United States Patent Application Publication US 2014/0325702 A1 - sequence listing, part 36

SEQ ID NO: 71285 - DNA, 470 bp, Heterodera glycines
cgtacatttgtttgaccttttcagaccgaattgatctgttcgtcggcggaatgctcgaagacccggtggtgcgcggtttggtcggtccgacagtgtaagtgccatcaaacattaattattatttcaaattactctcccattaattattcagtgcctgcattattggtcctcaatttgcacggactcgcgacggggacaggtgaagaaaaaaggcattcactaagactgggacgaattcccccccccccctctccggcaaaattggccccacttttcccaggttttattttgaaaatccgggcattttcacccgcgcccaattggccgaaattcgccgttcgtcgctcgcccgagtgatttgcgacaacggcgacgactttcggacagtgccgcgcgaagccttccgcacggggccaattgtccagtgcatagagataccgcaaatggacctgagcaaatggaaggagtga

SEQ ID NO: 71286 - DNA, 60 bp, Heterodera glycines; identical to SEQ ID NO: 52045

SEQ ID NO: 71287 - DNA, 1546 bp, Heterodera glycines
atgggagaggcgcagagaacagaacaattggagggaatgagccaattcgatggatctgaaaaggaaagtcatttagggaccgtccgtcggtccccggcccaaattgacctttgcgccaaaagtttggcaattctattcaccattttaagctggacaatattgcaagaggggaccaaagtgaacaatttggccacaattgcaggagaaaaggaatcgacggaaggccaatggacgagggaaaggcatttgagcaaacttccgacccttcggttgttccaatcggacaattcgagcaaagaacgcgcaaccgtgggactgtgcagcggagcatttcgacagagaagcacacaaacgcaagagaagagagaatggcggagggaaagcagaagaaggtcagacgcatccgtgtcgaatttattcagaaaatgcctgcaaagaatggcattgaaaatagagccaaatgccaaccgttcgttgcttttcttccgctacctcagttcgctttcgagtgcatttttttccgcttccaattcttttccgtgttcactttcctcgccatttttggcctcctcatcggttatttgggtaattcgacccaaaattaccccaagaaacaattggcggaacgaatcatcgcccgaatccctcgcaattttaattcggagaaacggcaaaaggaagtgcccccgactgctttcgcggagaacagaaagaatgtcatttggatcgatctgaaaggaaaaaatacagaccaaaacaaaaacaattgtttagagaaacactttcgaaggcactttttggaaatattccaaaagagagactcacaaaatcaaagtaataaatgccaagtgagtctcattcattcatactttgcatttaaaggcgagtgaaataatcccgtcgatttgaacactttgaaaattggagggatttcgaagggaatggcggaggagagaaaggcaaagttcggcaggggaaatttgcaaagaaacggcgaaagatgagagacaattggaggagtaaaactgcgaatcgagaagggcaaagatgaagtcattgaagggcctggaagcagaaatttatgaacaatcgcccaaactcgaaaatgtcacttttgagttcgcaacgcgaaaagacccttttcggtaagtgctgagaaacattggagcggactttcccctttttgggtggaatttgcggacgcaataatcaaatggagcgttttacaggagaattgcgatggcaaaatcacttccattggagcatagcgaagtgaagtgccatttgactaaacgaagaagcaaaacgacggttatttaaagggcaaattcacttggaaagagcggaactgaacggagagattgtgaggcgtcaaaacgacgaccatttgcgaagtgcaaatcacttgacggacaaagcccgactcaaagcattcgaagcaaaagcgaggcgaagcggaccaaacggagagaagcgaatcgaagagggcgagctgaaaaaggaggaaaacagaacaaacaaacaaatggagaaaggaatggaatga

SEQ ID NO: 71288 - DNA, 134 bp, Heterodera glycines
atgccagtaatccaggcactccgccacagcatgcgaagcattggtgcgcccgagttacggtccgtaaaacgcgaattagaaccacaagttcgcgcctgcacaccaaaaccccacagccgagccgagcaagtaac

SEQ ID NO: 71289 - DNA, 660 bp, Heterodera glycines
aaacaaaaaaatcgattttttcaagtgtccgtttggggtactcaaacatttatggggagcaaaaatccaacgcagaattaaagtacaggctatagggaagctattcccgaaggattcggtctccccataaatctgggcgcatcggttcggggggactgccccgaaaacaaaaaaatcgattttttcaagtgtccgtttggggtactcaaacaattatggggagcaaaaatccaacgcagaattaaagtacaggctatagggaagctattcccgaaggattcggtctccccataaatctgggcgcatcggttcggggggactgccccgaaaacaaaaaaatcgattttttcaagtgtccgtttggggtactcaaacaattatggggagcaaaaatccaacgcagaattaaagtacaggctatagggaagctactcccgaaggattcggcctccccataaatctgggcgcatcggttcggggggactgccccgaaaacaaaaaaatcgattttttcaagtgtccgtttggggtactcaaacatttatggggagcaaaaatccaacgcaaaattaaagtacaggctatagggaagctattcccgagggattcggtctccccataaatctgggcgcatcggttcggggggaatgccccgaaaac

SEQ ID NO: 71290 - DNA, 624 bp, Heterodera glycines
atgattaagctatgccctgtcggaatgcagccggagccttcagcgattggctacgtgccgtgcgatttacttgcgcccggccaatgcagcgaagggtaagcacggggaatgattccagattttccggaagtccaaaaaattagaatttttcacaaattcccacaacttttgactcaaatttgccaaaaaaaatagtctctgatcactttttaaacatttccgatcactgtaaaatgccaaccgccacaggtatcagtgcgtgcattcgcgtgacgatccggagatgaacatttgttgcagtcggttgcgcaaccaaccgccatctgctgcggcagcgcccatctgccccaatcaggcaaaattttcagtccctttctccatcgcgttcagttggcccatttctgacgggacagatttttttttttttttcaataaaccgaagttggcaattttttcagcaaattttattgcgagacgggtcaagcccgcgctactgctccccacggcagggcatcagcgcgtgtccaaatgggtaccaatgcgatgagtcaattggccaaccgaatgtgtaaattcaaaaaaacaaaattggcattttaatacagtatgtgccaaatttgaaaa

SEQ ID NO: 71291 - DNA, 773 bp, Heterodera glycines
atgagtcacagtgaaaatagacacttaagtaccgaagaaaaaatggaagaaaataataatttaaagcaaaaaattacgcaaaaaggagcattgaagatggagaaaattggggcgagaagcagggtaaaaataagcgcctgaaaatcgaaaaaaatttgattgtaacagaaaagcacatatgtatggaaatttaaaaacagcaccgttccgatttttcaaagaatgaaatcgaatacacactatcctttctgttgtacttggataagaatgcatctgatctcgaattttgctgttcttcctcacaaccattctttgtttcacttctttttacgcttctgacgcgatgcaatgtccttaaatgtacgtgaaattactgttgaattgtaaattcctaattctctcatttttagccgctttccattgagctcgaagtatccgaagacaaactcacaacaaacaatgaacagttgcattcgttctctcaaggcgaaattgtcattttccatgcccaattttcggatggaaatttctccctttttcttctgctcacttcgaatgcgaatttacttgtccagtacaaattctgcgcttcttctcaattcgcttcggtttcgcttaaaaagtttttccctgaaaaggttttaatgtgatttttttccttagtttcccacgttttttaggatttttcgcatttggcaaccgtagcaatcactgcagacagttctctgattgtttgcttatcaaacgatggaccgacaatatttatggttcca

SEQ ID NO: 71292 - DNA, 279 bp, Heterodera glycines
atggaattgggcattggtgaaagaacattaataaaatggaaaaatgaattgttgccaaattattataaaagtaagtgaatttttaaagtttttatttaattttatatttaagcaaaaaataactattccaatgaggataaattaataaaaatgaaacaatatttcaaaatgaaggcaagtaatgttgaaattagtgatggaattattgcagagaaattgggaattggaagagcaaccctattcatcagatggaaaaaggaattcattcacttcaactga

SEQ ID NO: 71293 - DNA, 1283 bp, Heterodera glycines
atgtccttatttgtaagatttgtccgtatttcgggccattgttcttatttcataaatatattcataattttatggcagaatgtcactaatttatcaagaaaatatagggttagctcaaaatttggttattttttgacaaaaactgttaacaaatcgcattaaaaattacaaatttttcccgtcagcgcctatcggcgccgccagacgccccagtcccccaaaatttttggaagcgctccgcgtaaaaaaaagcgtttttaaaagcgaaaaaagtcgtcgcatggcttttaaatgcaaaaattttaaaaatcttactttttttgatcccgaatacactaaaaaaaaattacgatttgcttatttcctacaaattgttaaaaatgatcatgggaggcgaaaaatatgaaatttgataactatattaattgattaaattgttacacaagcgattttaagcaattttgcgaaatgttcttatttttggccctaaaatcttattttgtggcattgatgttcttattttgaaaaattttcgaaaacatgaaaaacatatttttcagcacaattttttaaattagagcgatttaatattatgcaaaaaaaacctacttgtggtcatataaaaagctatatcggacaacaaacaaaaaagtttattacaccatttgcaccaatcttggagctttttcggaacgaaaatgattgaaacccgtactggacaggaaataagctaaaaaatactgttttgctgatgtctttttcatgcatccaaattttggctgatcaataaaatcaaaaaactgattcaataatatgtaaaaaaaatatatttgtgaattttttcttaatcatttaaaaaaattattttattcaaaaatatatctgaaaagaatgaattggtggcatttaatatttataaatttttttattatttataaaattgagtccggcaaaatccaaccaaatttcgatgaaatattcggcgaacgatgggacaaaaatgaagaagaagaccaaatgataaaaattgaactaaaccagctaaatggaaaatatgaagctgatcaaatggatgaatgaagaaaatggaatacacccaaatgaccaacaagagagaaatgattcaaaaatttgaagcaattaaagaaaagttgagagaaaaaggaaaattcaaaacaaatacagaacaaaattgaattcaaaattggcagagttttaggtgcaagtcgccataaaatatacaaatggaaaaaagaattaaatttatataaatttaaaataaa

SEQ ID NO: 71294 - DNA, 1014 bp, Heterodera glycines
atgaatttttgccatttaatatttataatattttttattatttataaaattgaatccggcaaaatccgaccaaatttttatgaaatatttggcgatggatggaacaaaaatgaaagagaagaacaagtgataaaaaatgatgaacaaaatgaaaactcagcaacagttgatcaaatggatggagaaaatggaaatggtccaaatgatcaacaaaaaagagaaacaattcaaaaatttgaagcaattaaagaaaggttgaagcaaaaaggaaaatatgaatggaaaaacaataacaaaattgagtggaaaattgcaaaattattaggccaaaatcgccaaaaaatatacaaatggaaaaaagaattaaatctaaataaaacgaagaaaaagagtttttatgaggggaaaaagaatgaattcattgaacgatttgatgaatttaaaagtttatatggccaacgcaaacagaaagaatttgtgaaggaattgggcatttccaaagacacatttacgagatggaaaaaagaattgctgccaaattataataaaagtaagagaatttgttttgtattattttaaatttttattattaagcacaaaataattattccaacgatgacaaattaaaaaagatgaagcaatactttaaaatcaaagaaaaaaatccaaaaattaccgaccaaagaattgctaaggatttgagaattggatattccacgctgaaaagatggaaacaggaattagtatctatttctgacatgtgatttttgaaattgtttgtgttattttgatatgttgtattgctataccattttctagtttaagaaattgtaaaatattccaaaatcaaataattaaatatcaagtgcaataacccaaatatacgggccattttctaaattttttacctattttttgtgtggatagcattttacgcggtaaacacaaggctcggatctgtccttatttataagatttgtccttatttggagggtccaaatcttagaaaataaa

SEQ ID NO: 71295 - DNA, 103 bp, Heterodera glycines
aaaatttcaggtattttcatgtctgaccatttttgggacgaaaatgtcttcgatctgatcgttgaactagagaaggaaggccgccatgtacggcttgattggc

SEQ ID NO: 71296 - DNA, 411 bp, Heterodera glycines
atgagaagaaacgtgcaaattggaaaaattaatgaaagtatagaaaaggcgaagcgctgcgtgctggtgtttgtaaaaggatatgcatgtgtatgtgtatagacatatagcagcagcagcttccttttttgtcttcctttatatgtataatggtgtggcgcccgctttctatttggacggcaaaaatgccgtagttggataggttaatacaaactcattaaagggatggaagtgatgaatggaaagtgaaaattgattatttaatgatttgatcatatgtattacagtaccaaaagaaatgtaaaattggtagattggatcgaaatcataaactctaccataacttggttatacggacaaagaagctttaaaattggccgtttaatacaaaaaataggtttgaaaatagta

SEQ ID NO: 71297 - DNA, 321 bp, Heterodera glycines
atgtgcagaatccttttcatcgttccaatttacgctttcgactcgtggctgagtttgttgttcttcagcaatgatgtgtacatttacttcaactccatcagagattgctatgagggtgatttgtttattggatttaatgaataaactgtgcttttatagctttcgttatctacagcttcctgagtttgtgttacgaatatttgggtggtgagagtaacattatggcggagattcgtggaaaacccatccgtcctacaagtatttggactttcacctgctgtctgagcgggaaacagtacacaattgagtttttgcgcttct

SEQ ID NO: 71298 - DNA, 708 bp, Heterodera glycines
ccgtttcccgattggacttcgcccatcacttttgcccatcacaaagcgaatgcttccatagcttctcatccgtcgtcgtcgccaatggccactataatcctattcagctgcgttcgttgctccacattccgttccgtcaatgtgatggtgcggtttcggagatcgggcgttatttttaacgggtgtcacttcgtccccccccccccgagaaattaattttgattaaactacaaaatctaaacttttaaagaaatttcgtaggaagggggggggtgtaaaactgtcaaaatccccattgcgaaactaaaaaaaatttcgcaaatctttcaattcccaaaaaaaacttggtttcatcatcgaacggcacattttatatgtacattttacaccattaattatttttccattgtggcacctttttatgcattgtttgacctcattaggattttcttcttattgacagactaatacaaaaacgaaaagaatcccttcccataggcactggctgaacacattgccaaagtgcacttgcagcaaaagccattccctggcggcgttcgcgtgcgtctgttgccgaacagcaaaaacaatggacgaccactgattcagtcggccaacatcagcagcaccaatggagaacaacagaagaatctgatcgccgtcgtcgagcagcacttggagcagtacaccaaggacctcgttaaggaa

SEQ ID NO: 71299 - DNA, 371 bp, Heterodera glycines
tatacatcccattatgacgctaaaattatcagagtgccgaaaatcgcatgtgatctaagcctagaaaaaaatggtgtaagtaaaatcgtaattacgctcaaaaagctcctcaaacaattttagcgcttccaattccttctacaatcgcctttatacatcccattatgaacgctataattatcagagtgccgaaaatcgcatgtgatctaagcctacaaaaaaatggtgtaagtaaaatcgtaattacgctcaaaaagcttctcaaacaattttagcgcatccaattccttctacaatcgcctttatacatcccattatgagcgctaaaattatcagagtgccgaaaatcgcatgtgatctaagcctataaa

SEQ ID NO: 71300 - DNA, 135 bp, Heterodera glycines
atgagccaaaaccgtgacgaaaactcgcagccacatgtactcgatggtccatacccaccggcacaagagggtgttgagtttgtggaagatgaagcacctttgatgcttgaggtgttggagcgtctgatacaagga

SEQ ID NO: 71301 - DNA, 1212 bp, Heterodera glycines
atgagccaaaaccgtgacgaaaactcgcagccacctgtactcgatggaccgtacccgctggcacaagagcgcaatgagtttgtggaagatgaagcaccggtgctgcttgagatgttggatcgtctgtcacaaggagtgggttttgttttgaattatttaaattttttaatttttccattttggcttatgctaattgttgattttgtttagggaatttgccaagccatgggcctgttttcgtttgcacttgccgactgttaggccacatttcatacatttgccatactgttcgactgtgagacacctgtgccatttgacgagcagcacaagcgatacgtgttcaaacacatggacaaaccgcggctaatctacgtttcggaagatggtagcgctatacaggttgacggtgtggtgaagcaaggggaatttgtgatgagcatcgagacgatgtatctcgataagcgaaacggagttgatcacttttgcacattcctgcgcacttttggcatttgtttcttgatgtgccattgaatgtgtttatttgttgcctattcagagcagtaaattgtttgcataattctgtttaattattttttgtttacaaccaaaatattgatccgcatttttatgttataattttaattcatttttgaaatttttatttaaatggcaaacgaagacttccgcttgtccgaatgcatccgttttattgagcgaacagcccaagagtatgattgtgttctgccggttccacggcttgggtttgtcacggaaaattttcttaataattttttttaaaatagctcaaggcgcgatgagcacctggatgcctgtgttcttatggaatcagtgggctcaggccatcggctctacattttcgagtttgaggattgcctccaggtatttttaaaatatgaggtcaattaattaaataaataaataaaacaaaaccccacaggtgaaaggacacatcgaaaacgaagacggaacaagtacacgcgtgatgattgagcactatgataaatacaatgggttatgtggatttgaatcgtttttggcgtcatgtgcttttaccttttttggattttttgttcacgtttcctatgaagatgatgattgatttaattttaaaataatttttattgtatattgcgtttcacaaattcataaacaaattcatccgaattacttggccttttcaaaaattgcata

SEQ ID NO: 71302 - DNA, 488 bp, Heterodera glycines
  unsure (1)..(488): unsure at all n locations
atgatcgaaggagaacgnggatgttacgtagaaagaagaaggaacaaaaatggaattgtacaaatcagaggatacattttcaaagatgaccaaacaatggacgaatgtggcattgcaaaggcagatntcatttatggtagaaacatttttggatggaaaaaaatttctgaggaacccaaatccgccagcagcagccgcccgaaattggaaaaaaccggaaacaaagcaacctaaaaatgatgatggcacaatctgttgctaaatgatcattctagtgctttagataaaacacctccaactgtttaacaggtgtcccccgtttttggctatcttctgtcttttcttaggggttactcaaaaaccagaaaaaaaacaaaaaacaaattttatctactttacctatgactttttctcaaaaacaatcaaattttaatttttaacctattttcaataactctaggtgttttctattaccgtgcaaaattaaa

SEQ ID NO: 71303 - DNA, 1782 bp, Heterodera glycines
atgtcatattcatactcatcgaccctgaaaacgccccagaaatgttttcatgactatgaaaatctacaaactgcagaactacatattaccccacatcctggatatccacgaactaaagctgggaagtttataaaatttttcctaacggttaaatgcaaaatcaaaaaatctttgaaattatccgaaaaagtttttccctgaaattttttcccggaaaggggaattttttggggggggggctttttagggggccccgctttttttgggggaaaaaaccccccaaatttttttcaaaaatatgggaaaaaaagggcccaaaaagggggaaaaaaaatgaaaaaaaccccccaaaatgggggaaaaaccccccctttttttttccaaaaaattgggaaaaaaaaattttttttttttgtgggggggggggggagggggggcttttttttttttttttttttttttaaaaaaaaaatttttgggaaaaaaaaaaagggggggggggaaaaaaaaaaaaaaccccccccccccccgggggggggaagaaaaaaaaaatttttttttttgtccccaaaaaaaaaaataaatccccccccccccccccccaaaaaaaatatttttttttttttttttctttaaaaaaaaaaaaaataaaaattatttttattttttttttttataaaaaaaaaaaaaatatatttttttttttttaaaaaaaaaacacacacaccttctttttttttttttttttttttttttttagaaggagaggggagcgcaaaaaaaaaaaaaaaaaaaaaaaaaaaaaaaaaaaaaaaatttttttttttttttttttttttttttttttttttttttttttttttttatttataaaacaacaaccccccccccccccccccccccccccccccctccccccccccccccccccctcttcatatttccttgctgtgttttttttttttaaaaaaaaaaaaaaaaaaaaaaaaagaaatttttctttctccccccccgcggggggggggggggggggggggggggggaaaaaaaaaaaaaaaataaacaaaaataaccttatcatgagtgggggtccccccaaaaaaaatacctataaaacccataataaaattattgccccatttagctgcccagcggtgtgttgtgctgtggctgcgtactttcaaaaatccaattttttgatgatatctcaaagcttttcatttatcctatcattttatacatcctttttaggtgcggtgggcgaaagcggcgctcagtgcggcagcgctcagtggcatgttgtcgccaccaatctcggcaccattggccacaacagctgcgcccagtacagttgccggcaacgggactatcgtagccgactcacgttgtgcaagaagctgtcagccaactacggtagctgctgccacaagtggccaacaacaaatgccgtccacgcttcccacacaattgagcagaggaggagggcacaattcattgatttaaaagtgtgccaatgatcattcattgttgacacatacagatacccccgtagatgcagttactttagtcattaaaacttttattcattttagcaccacataattatgtttctcatacatcagttagttattttttgtattgtataatttatatgtagttaatttagcatcacttttttttatttatcccccatatattatttatgtgtagttctattgttattttttgaataattagcctagtaattgattaagtatgtagatgatagcatgcatcaataaa

SEQ ID NO: 71304 - DNA, 270 bp, Heterodera glycines
atgacagcccaaattcaacagcagcagtggcaccagcaaatgcaacggcagcagcaacagggacagcagccgatgatggggtaagggggaggggggacaatgaaaaaacattgttggaaattggggttcctataggtaggcgacaggcacgaaaaatggcaattctcaaaaaaatttaaccatttttttataaaatattaaaatttcagaaaattttcccagtggcgtctatcggcaccgccgtgcccccatttcaccttatttttttaa

SEQ ID NO: 71305 - DNA, 439 bp, Heterodera glycines
aaaatggtgtaagtaaaaatcgtaattacgctcaaaaagcttctcaaacaattttagcgcttccaattccttctacaatcgcctttatacatcccattatgagcgctaaaattatcagagtgccgaaaatcgcatgtgatctaagcctagaaaaaaatggtctaagtaaaaatcgtaattacgctcaaaaagcttctcaaacaattttagcgcttccaattccttctacaatcgcctttatacatcccattatgagcgctaaaattatcagagtgccgaaaatcgcatgtgatctaagcctagaaaaaaatggtctaagtaaaaatcgtaattacgctcaaaaagcttctcaaacaattttagcgcttccaattccttctacaatcgcctttatacatcccattatgagcgctaaaattatcagagtgccgaaaatcgc

SEQ ID NO: 71306 - DNA, 304 bp, Heterodera glycines; identical to SEQ ID NO: 51570

SEQ ID NO: 71307 - DNA, 750 bp, Heterodera glycines
catattggaatgaacatcatcgctgctttggatgccaattgcggcattggccgttccaatgcattgccctggcatttgccggaagaatacgcacattttgtacgcgttaccacacacacgactgacccacgaaagcgcaacgctgttttgatgggacggaagtgttgggaaagtatcccaaaaaagttcaaaccgttgaaggggcgcctcaacattgtggtgagttttgattcaaattagagttatttcaaaaaacaattatattttttaaatttagctcagccaaacaatggcacctcaggtgaatttgtgcagcaattaaaacactaagcttttgatgcacttattgttagataaatgaccaactgatagtggcaaaacagctcgacgaagtgttcgccattctaaacgacgaaccgttcaaagacacagtggagaccatttggtcagcttcacaatgtaaaaaaggcgtttaaactagcagaggattattattatttttttgccatttcatcaaaaaaagcatttccaggaatgtgggtggtcacgatatctatgcgctcggtttgcagcatccgtcgctgcacaaagtggtgctgacccgtcttgacaaggcctttgactgcgatgttcatttcccaaccgttgactgggcacaattcgaacgcaaagacgactttaatggaccggaggaaatgcatgaagagcgaaaagtgacttggcacgtgacgtcgtacacgcggaagaaag

SEQ ID NO: 71308 - DNA, 49 bp, Heterodera glycines; identical to SEQ ID NO: 51181

SEQ ID NO: 71309 - DNA, 350 bp, Heterodera glycines
ttttgtacctcttttatcactgttgcacctcttctatcactgttgtacctcttctaatcacagttgtacctcttctgatccctgttgtacctcttctaatcactgttgtaccttttctaatcacagttgtacctcttctgatccctgttgtacctcttctaatcacagttgtacctcttctcaccactgttgtacctcttctaatcactgttgtaccttttctaatcactgttgtacctcttctaatcactgttgtaccttttctaatcacagttgtacctcttctgatccctgttgtacctcttctaatcacagttgtacctcttctcaccactatgtacctcttctaa

SEQ ID NO: 71310 - DNA, 159 bp, Heterodera glycines
atgttcgcgaaagaacgcgaatggaaaggtgcagcgattgcgccgaaaaagccatctgatcaggccgaaaaggaaagtaaagggaaagaaacagccagaaaggacactttagccgatctgatcaaaaaagacgagagaaatgaagagccgacaaattca

SEQ ID NO: 71311 - DNA, 638 bp, Heterodera glycines
atgtgccgcttggcaatgttcgtttcgctggcgcaattcataagcattgaaatgaaaaaaattttgtaattttaacatttaaagaaatgtatacattaactattgaatatattaataaaataataattactgccaaataccggtaattaaggaaagaatatgccaaaggaattatcccacgcgcttgcgcaaaaattcgtcgtctttttggacgttcggctgccattcaaactgctgcagatggtgctggcacgggctcaacaacaactccttctatggtacaacgagaatgtaaagcaaaattgatggtcatttatgtaagtaaaattaaatataaaattagaataatcgaagatattttaaataaatctttatttataattaataaaaaaaatttcttaattaattttctcagatggatatcaaaatgaatgagatttactttgagaagatatttgattttatgattgtcgccaaagatttaatgataaaaacaagagcagatgtcggtgatccgcgtcacatccaatcagcccgagtgataagaaaattaaattaaaaaacacgcaaatcattacttaattattcggattatttaattttatttatttatttattttctaattttcaatttaaga

SEQ ID NO: 71312 - DNA, 375 bp, Heterodera glycines
atgcacgcgttttgcgctcgagctatttatcatcgggcttgtcaatccaaagcgaaacaacaaagatgctgttttgaacgaataaagggcataggttattttgaagaagtgtcaaagaacatgcagcaataagcctgcaaaatctaataagtggaaaatacatgagtatagaatttattttcagaaagtgtcaacagacttttggaaaaatatatttgcaatttatcaacaattttgagaagtgagttagaaatgataatcttcacgattcaaaccaattttcgttgctctaattaaccgcgataaaaacattcgaatcaattaaatagcttctgagataataaggtttatcataaaatttcatttaaaaataaa

SEQ ID NO: 71313 - DNA, 672 bp, Heterodera glycines
atggtaacaattgtcagttgtaatgccccgcaggctaaccctaaagttgtgcatattaatcagcttaaaaggtgcgtagaaatcctaggacccgcttgcaccgcaccaaatgtctccgatgaggaaaaactttcattggaaaaagcagatgctgttgaagtatttgacatgcccgattttaatcatctgaactcagacaatccaaataaatccgaaacagaccctaacactgagtccacataaaccttttgcagtattttgttattttcccacgtaccacaacactcatcaaattcagttccctcatttgatttcagattcaaaactcataatcctccaaattcccaatttccttcctcgttttctgatcaattccattccccaacaaagtccgacatccgatctttcatggactccgacaaccgttcaatgtccagcgacacgtctacgattcgccgagtaatcgacgaagctgttgacaacgttgtttgctctgaattgttggagggtcaagatcccattgacatcgacctgtcgtatgcgctggaggtcgaattgctcgggccgcaagagcccactaatccgcgcataacacctcaaccggacaacaactccgaagtttggcaaagttgtgacgatgacaacatggacacgtccagctccaagttggat

SEQ ID NO: 71314 - DNA, 101 bp, Heterodera glycines
atgcagaaatcgttgccaaaatatccaaatgatccggaacgattgcccaaggaagtgattttgagaagagcggccgaactggcagaagcattgtacaaccg

SEQ ID NO: 71315 - DNA, 72 bp, Heterodera glycines
atgtctaagcgaggtcgtggaggcgcttctggggcgaaattccgggtttctcttgctcttcctgttggcgca

SEQ ID NO: 71316 - DNA, 264 bp, Heterodera glycines
atgactcaacaaaaaacagttattaaaaagcggtgcgaacattggagtcactttttcaatcgtttgaaaggttgctcaaaagtgatttttgaaaataaaaaataaataaaattttcagccaattattggtcaaaaattgtgctgaatacaaaaccaaagaaaaaacacggaaatattgaaaattgatcataaaaagccaaatataaaagttgcgtgactttgtccgcacttttttatgattttttattttcatcttcaaataaa

SEQ ID NO: 71317 - DNA, 447 bp, Heterodera glycines
atgttctactgccactggcagcaactccgaacaattgacgccgctcgttacccagtccggccaaagcttcatcttctcgctgctcacgtcgttccatttgcacgcactcatctctggtggggactgatcagtgaacagggaatggagcatatgcacagaatgcaactatttggtttaatgaataatttttcccattaaaattataaatccaggtcggtcgttatgctcatctcggtactccagagaaggttgttgagaagttggtgaaacacgtgacactgctgaatgcccttcacgatcgaggtgtcgaaaacaatcaagaaaatggaaacaaatacccaaacttttgatcaaatttcatttttccaaacattttcaccatttcacatttccactatctgaatattatgttgaacacatcttttccgctttctatagtactattaa

SEQ ID NO: 71318 - DNA, 265 bp, Heterodera glycines
ggagtctcgccgccgaagtttaaaccgattggcgaactgtcggattaccagcaacaaatcaacggatcacaaggcaaaagctttacatacggatgctgtaccaaacatttgcttatttgtatttgttttagaagtttcaaacattcgattcgccactcctccgccacaaccgccgccggtgcttcgcaatgttccgttgcctcccgtgacgtcgaataacaacgaaatgatggtggaccgcacttgtcgaaacaacacagcaaag

SEQ ID NO: 71319 - DNA, 85 bp, Heterodera glycines; identical to SEQ ID NO: 65905

SEQ ID NO: 71320 - DNA, 878 bp, Heterodera glycines
  unsure (1)..(878): unsure at all n locations
ggagctaagcaaatatgacaaagtgctctatcggatatttacgaattcaaaatttaaattttcttaggttcgaaggccacataaaatgattagcgatgataccaaaatcaaagtgactgtaaggacattgtcaacggagctgtgttgcccgatttgtctagacttgctgacctgtacaatgacgactaaggttcgaaataaaaaacgcaaaattttatgcctttttaatttcgtaatttatagcgccaaaaatgaccaaaaaaagggtctttaatttcattgtatgatagaaatattcttttcaaattcataggaatgtctgcatcggttttgctccgaatgcataacaacggcattgatgcgagggaacaaagaatgtccgacatgtcgcaagaaaattgtctccaagcgctcgctaagacccgacccgaacttcgatttcctcataagcaaagttcataaatttggggtttcctcatttatttgttttttgaatagatttggcccgaccggaagctttatgaaactgaacttgtgggttaagatttgatttgttgttttttttaaataacatctattcagaatgtatcaatgcaatttttccaagaacaaagcaacgttgcagcccttcaagtttgtttggactaattttgaattagaagggaaacatttagaaaagcattgaggaaggtatcaaagcgcaagcagcataccgaaaacaaagagtgcatgggtcgtacgactacgaaagttggtataatgttaaaatacgtgtttatttttcataaattaaacagaatattaaatttatacacaaatggatgggtggtaatttacgaattacaatttaaaattcccagaaaagaaagnnacctgca

SEQ ID NO: 71321 - DNA, 2621 bp, Heterodera glycines
atggagagcactagccaaaatgctgtctcattgagtggttccgattttgaccccatctatttttcgcccgaggaaaatcagagatggggcaaactgttggacaggatgagaacctttgaacaggccgtgtgtcgtcaattccgaagaattgaacacacatttgtccaaataacaaaccagacccaaattcaagacactgtggagagagtcaaaaatttggagagttctataaaggagctcgagaatgccaccgaattggacacattcgagacaaaggaaaaattgattgatgccgaagaagaggtagaacgggtgaaaatgagaattgatggttacgaaagatttacaaaggtacggtttgggaaaataatagaaaaaatgaaaagtgaagttggacgaattactgaaaatttggacacattgcaaggcagagtgcagctgttggagtatgaacaagacgagtatggaagagatgccgaatggatggaagacgagaattttagaggacaggcactaatttctccggagcaaaatgacaaaagagatgacatttcggtcggagagtgtgaaataatggtctcggacccatttttgggaggaattgccccattagaaggctatgatgggaatccgagtgtttctttttcccgttgggttgcccgattggaggatatgttgtctttgtacccgcaattgacggagccccagaaattaagccggttaaggatccttttgagagggcaagctagagcggaatttgaatcgatagagcctgctccggaaacgttagtggtggccttagaacacttaaaaatgaaattcgaaaacgaaaacacccgatcgatagctcgtcagacaatggtaagttgccggcaggcgcctggcgaaagggtttatgagttcgctaataggcttaatgaggtagtccgaactgccttatcgggggaaagcgaaggaataatcagaaaaagactttttgaggaatttttggaaaaattgacccctgaacttcaatttgaagtgaaagcagggagacccacgagttactcaaatgcttatgaaatcgcccagcattttgaacttcttttggccgccaagaggccttcacaaatctcggtcgcagactcggttgcggagttgtcccaaagggtggaggccttagctgttcatcaacaaacaacaactaagtctggcgctgaccgaagagcatgctattactgtaggcggcctggacatttggttaaggattgtcgggagaaaagaagggacgaagaaaggggaggtcacagagatcaaaggggtggccgatttttcagagaggaaagaagatggagtagagaaagaaatgaaagggaaaaccggcatttcacgccgaggggcggaggacaaaggaatcaccgtttaaatcatcgatctccaaccccctatggggagggcgagggaaataatcccaaccgttgggggcctcaagggagaagggtgaactttcggggccgagtaggcgctgctcgagtggcaagccccatatttttggcattgatggttattttatcaatttttggcaatggaagtgcggttaaccaggctacaaatccaatgatatgtcaccccgagtcaccttcaagtttatggtccataccagtggacccaatttgtccaaattgggcaccaacggagttgcccgtggctatgaatttgccagtttttcgtctaaatacggtaaaatataaaacgaaggcaaccgcatgcagatgcatacagacaaaaatagcgagaagaattggaattgttggagggcgatatgaagaggtggcaacaaatactgttgaagtacctacagcaacttgtcgaagaatgaaagaatttgatgattcgcccgcgggaaaattgtttcaaattaatggtactttcaaagccacccaaaattccttagagcctggatggagaagttggccaatgggaattttctggaaaaccatggaaattctaaattgctatctttatgaaacgattgtttttgctcgtcacggtgcctcagggctgagtaccccactaaatgattgtccagcctgctcttatcaagccggaaaattgctgctgtgcgcaattaagctaatttggagaccagaccatactcactgtgtaattatgtgaaagtcgcagactggaagggggagtactccactgatatttggacagcaaattcgggggattttgctctaacatttgtaaacaggactgacaaggctgattgcgatggaaaatggtttgttgcctctgatcagtcatttgcaattccaagagaaagttatttggaaatgatcgataaaagtgagtgggcaaattcgaagaatcgtaaaaaaagagaaattgacaatgaagactcagtgggcttagtttactcatctcagctggcagcgcagttaaccgcattaagtgcaaaagttacgcaaaatacccaaaaattgttcgcggagaccgttaggaaaatatgtaccagtttaagatttttagctgatcaaacgcttacattagcagaagccaacccgactcttttggcccgtttttacttagataatccgcttttatccgcgaggctagtaacaaaggatgtgttggaa

SEQ ID NO: 71322 - DNA, 3380 bp, Heterodera glycines
atggtgcaaaactttacgggtgagagagtcagaaataatgcagcaatctctcaggaggctgtggaagcgcagctggtcaagtgtaatcccaaaccagtgctgaaaaataagtgcagtatggctggggcaaggccaaatgtgattgaaatggaaaagcacttcgcatgtaacataccgcttactgagaggtggctatcggtcgattcaattccgaccacctcaaaacggagaaaaaacgaaccagccgagcccggaccgtcagaaaatagaaaaatcgttacaatcgcaatgatgcgtgtgaattcatgcgatgaaaagtttagagttatggccagagttaatggatatgaaattaaaatgttgttggacacgggtgcacatgtttcgctgtgtaatgtagaaactgcacgaaaattgggtatcaagcaattaagcccatcagatattgtgggcgttgtcggcataagtgacaaaatgatacccataatcggaaggagtacaataaatttggaagttgcgggctgtcaggtgttaagtacggtttatgttgtgaattctaaaattgggtccacagggtcttacgaaatgatcctaggccgacgaggtttcagacaactgccactatttttagaccttcaaactggcgaattggtaagaaagagcgatggtaaaatatttgtgtgtgaaaaagtggaaacggataaaaacttggtgaaacccatggacaataatttgggaaagcctgtggaattggtcaaatgccttgacagatacagtgacattttttcaaaacacgattatgacttaggaggatgtacaataaaagcacctccaatcataaccacctctgcgacgccggagagagttagaccatatccggtgcccgaaaaatacgagaaagagttaaaagggcacattgaaaaaatgttggaggctggggttataaaggaaagttttacgccatgggcgcataatgttgtgttggtgaagaaatcaaatggccaattgcgtccgtgcgttgattttagaccgctaaataaagtgacagtccctgatccctatcctataccaaggatggacaaaaccatttatcgtgttgctggccgaaaattttactcaactttggatttggcctctggtttttggcaaattcccttggatggaaatagctcctataaatgtggcattgtcaccccttgggggttataccaaatgttaaaactcccatttggtctcagaaatgcaccaagtatattccaaaggacaatggacaaagttttggagggagttagaaacgtcaccgtatacatagatgatatactaattcatacgaatacggtagaagaacacatagaagtgttggggaaggtgttcgatcgactgaggaagagcgggttaaaattaaaaatgaataaatgctctttcctaaaaaagcagtgcacctatttgggccatattttgaatgaaaagggatatcgtccttccctgagtaatcaggaggtaattgaagcttttcccgcaccaaaaaatgccaaggaagttaaacgtttcctaggaatgatgtctttttttcgaaaatttatacctaattttgctgaaattgcaaatccgttacaacaattaacaaaggaaagagcggaatttgtgtggaattccctggagaaaatggcttttgaggagctaaaagggaaattaattgaggccccgtgccttagggccccgaactataaattgcccttttatttatttacagacgcttcatcaattgcgtacgctggcgctttaatgcagtcagaacatgaacaagaaatgtacgcagtcggttattggtcgcggaccttaagcattgcagaaagcaaactgcccgccacgcatggagaattagccgcaattgttaatgccgtccagaattttaggccaataatttatggggccgatttaaccatattgactgaccataggccgctcacattcttattttctaaggcaagtagcaacccaaaaattaaccgatggctgatggcattgcaagaatttgagccccaggttatttacctggagggtaaagctaaccgagttgccgatgctttatcacgggtccctattaagtgggaacaaattgaaatgaagagtaaagaagaaattcccttccttttggttgcggaggaggagacggaagttaataggagcataattgaaaaagaatcggaaaaggacccaattgtctcccaagtaattgcaaaaatccaggaaaattggcaggaacccatccctgaggaattgatgcagtattttagagaaagagataaattgtcgtttgatgggaaaattgtgtggaaaaaccccgggaggcaaatggtgatcccggagaaactgcgtggccaaattctccaaatgcttcatcgagcacattttggaattgtaagaagcaaggcgcgggcaagaagtcttgtttggtggccacaaatgtcggaagaaatcgaaaattttgtcaaagagtgtaatatttgccaaatgaatgcccccagtgtgcccaaaaatgacccggagcataaatggcctgaagcaaaactgccgttcgagagggtgcatgcagaccttgccggacccgtatggggaacaaattttcttgtaattgtagacgcttactcaaaatacccgtttgtagcccaaatgcagtcaactcattcgacagccatcataacttacctcagagagttatttggaatgtttgggtccccaaaaaccctggtaacagataatggccctcaatttgtatcattggaaacggagacatttctgtcaaatgaaggtgtaaaacacttaacttcaccggcatatcacccctcctcaaatggggaggcagaaagatttgtgaggacattcaaagaaggaatgacaaaattgctgcaggagggaaagagcctaaaggttgcgcaatttttactgctgcaggagtaccgggcaacgcagtgccaggcaaacggcggagatactccatcacaaaaattttttggcaggcaaataaggacagcactggaaaaaataaaaatgccgaaaaaagtgcccgaggcaaatgagggggacgaccccccgggtcggacaaatgagaataaagaacgaagtcaaaggcgggacaatccttttagcccaggagatatgatttggttcagagcagcagaaggacagtgggcaccagggatccttttacagccaatgggagaacgaatgtgggaaatagaattggaaggaagtaatgtcccaaggtccgcccatgtggaccagttaaaaggacgaagattgggctcagttcgccataactgaacgcagtttatgtgactaatattttgtacatttgtaaatgcctcgtcctaaattaa

SEQ ID NO: 71323 - DNA, 489 bp, Heterodera glycines
atggatgccgagaatgttccgccccaaaatgagttggagaaattagaaagagaagcgttggactcaaaaaagtcgaagtcgcgcggtcacgaagagagactgaagaatgaaattgcccaaatgatgggccagctgcgggaggccatgaaagaggaagtgcgcggggcagtggaaggactgtgggcaaaaactgagcctttgttggtggcacaaaagcgctcaacggacgcgctcacggaggcgtttgacgaattcacgtcacaagtgcacatcggcggcaaaaacattgacgagtatgaattcacgtcccaagtgtacgtcgctggtaaaagcgtggacgaggagcgatgtgacaatccgcaaccagcggatgacccgtcggaaaagggcggagaaacggacccaccagtgggtggaggggctaacccacccgtgagtggagagcctgtccaggcttcgtcgttgccgccagagcagccaactgtgaat

SEQ ID NO: 71324 - DNA, 795 bp, Heterodera glycines
atggatgccgagaatgttccgccccaaaatgagttggagaaattagaaagagaagcgttggactcaaaaaagtcgaagtcgcgcagtcacgaagagagactgaagaatgaaattgcccaaatgatgggccagctgcgggaggccatgaaagaggaagtgcgcggggcagtggaaggactgtgggcaaaaactgagcctttgttggtggcacaaaagcgctcaacggacgcgcttacggaggcgtttgacgaattcacgtcacaagtgcacatcggcggcaaaaacatggacgagtatgaattcacgtcccaagtgtacgtcgctggtaaaagcgtggacgaggagcgatgtgacaatccgcaaccagcggatgacccgtcggaaaagggcggagaaacggacccaccagtgggtggaggggctaacccacccgtgagtggagagcctgtccaggcttcgtcgttgccgcccgagcagccaactgtgaatgtgagagcgccccagagagggggcaggggccaatggtgcccttcgggatataagggacaatggaaggcccaaggctcaggcccaaagcatcagaaacgagttggttatctgatgagacaattggagagggagttgagggaagagcaagcaccggaagggtgcatgtgctggagttgccgtcgtggaaagtggaacggggaccgtggtggtcgcggaggaggcatgggacgtggacaccggggagcatatggacgagggcgcacgaattaccagcagcacgcgggcccatcgcaccgtggacactga

SEQ ID NO: 71325 - DNA, 810 bp, Heterodera glycines
atgactgtccccagtgtgcccaaaaatgacccggagcataaatggcctgaagcaaaactgccgttcgagagggtgcatgcagaccttgccggacccgtatggggaacaaattttcttgtaattgtagacgcttactcaaaatacccgtttgtagcccaaatacagtcaactcattcgacagccatcataacttacctcagagagttatttggaatgtttgggtccccaaaaaccctggtaacagataatggccctcaatttgtatcattggaaacggagacatttctgtcaaatgaaggtgtaaaacacttaacttcaccggcatatcacccctcctcaaatggggaggcagaaagatttgtgaggacattcaaagaaggaatgacaaaattgctgcaggagggaaagagcctaaaggttgcgcaatttttactgctgcaggagtaccgggcaacgcagtgccaggcaaacggcggagatactccatcacaaaaattttttggcaggcaaataaggacagcactggaaaaaataaaaatgccgaaaaaagtgcccgaggcaaatgagggggacgaccccccgggtcggacaaatgagaataaagagcgaagtcaaaggcgggacaatccttttagcccaggagatatgatttggttcagagcagcagaaggacagtgggcaccagggatccttttacagccaatgggagaacgaatgtgggaaatagaattggaaggaagtaatgtcccaaggtccgcccatgtggaccagttaaaaggacgaagattgggctcagttcgccataactga

SEQ ID NO: 71326 - DNA, 1266 bp, Heterodera glycines
atggaaactctgacggacgacgagggcatttgcagggagccgtccgatcagcttaaactgctagcgtgtgcttattacacaattggatactgtatgtttttaggaaattaaacattttaatttgacttaatagaatttgcttcgttaattttcattcgttctcttctttttcaggttcgctttcccgcaagttcctttccttcccgtgggttgccagttgggatgtgctcgatgccgtgcgtcgttcgcgcatgatgtccgcgcttggccagcctggcaccgccaccaccggaagctgctcccgtatgttcagcgcaatgttcgactcgttcggcgaacgtatctccgaacacattgaacgttttgtttctgcacgacggacgcagttggaaggattcagtgcccgttgttttggcactgatcggacagtaactgatgggacggagacgggggaccattcggacagttgcgcgatcaaacagttgctgaaccgttacgtgcttcgacatgaaggtgaattttcaggattttgacaacggagcttttgccattttcaaaggtcttgccccactgatgttcttctgtgtatcgtgggctgaacacatgggccttttcgcgcagagtccgctcaaggaggaacatatttgtctccttttgttaagcgccggtctgacgaatcagccccaaaacgtaatcaactcggaggagcgtcgcccttggctgagtgaggtaattggtaaattgccgaaaatattttgaaaaaggattgatttcagactccggttgaatgggccgagtcggaagcaacgccacgacgagcggttacccgaccgggacgacgcttcagctccttcgttgagagtcttgcctcccgggacttcgaacagcttcactgtttggactttgcacatttgggcttgggttcagccgctttcatgttcatggttgtgttgtgtccaacaccaaattagtttttcccggttttaaagcaagaaaagcaaaactcttatttgttaaagaccaaaagtttattaagcaaaaataagaaagcttcaggcagggaacctgaggtttaagaaatggtaaaggaaagtcctgaatgtgagggcaaaggcatcgcttaaatactgacatgagtaaaggggaggagacgaacagatggacaacaaaacattacataaattgttgagttgtggaaaataggtcatcattgggggatctttaggatggacagaaacagagggacttaaggcaaaaacaaataaa

SEQ ID NO: 71327 - DNA, 1547 bp, Heterodera glycines
atggcaccgccaaagccaaagaaaattgttattccaacaaataacaatttaacagaggaggaggatcaattggcatctactgataaacagcaacaacaacaagtcgccttaattctggaagaaaatgctgaaaaggaaacgaccaaagagactgaaaattttttgatagcagaggatgatgatgatcaactgtttttgggtgctgctgctgagggcgcaaatgttacaaatttgcgacagggtgatgagcacggcattttggtgaacagaattgtagagaacacacgcatgcttgaggagaagcatttacaggttaaaactgagcatatattatgcttatatacttgaattcaaagaaattttgaccacaaaaaattttattgatcaaacgattttctccgattataagcaccttgtgtgactcttaaacccccgaaaaaaatgtgcaggaggatggcccatttgtggaagcggatgagcctgatttgcaagagcagcgaagggttcgcgttgagattgagtcagtgcaacgggttctgcaacgggcgacacagaacgttcagcccttggtacggaccatggaatttgctgcagacgattttgacacaatgttgcgcgagttggaggagtgtcgtaagcagtcgctggtggtagaacgaaagttgcaagaacgctccactggcgtcagttcggaagttgttgcgttgagcacaacgttgcgcgcgttggacaacgacattcgcgaagtgcgtgaacatttggcacgttcatccgccaatatgcttgaaaatgaacgaaaaattaatgcattgttggaaactaattatgccaaaaaatgatcgtttttaaattgttaatcttttttttgttttatgtgccttttaaatttatgtattatttattttattttttacgttgatgccaaatgaacaactttatattgcatatgaactctattcataacttacttacatttaaaaaaaattttctggttttcattttaattttttttttattcggaaacttcgttacgtatattaaatttataaatataaactattttaaaaaccagataaatggttgcgaaaaatattaaataaaattttttattttaattaataattggctcaattttcagttgcgcactacaggaaggtgatgtacagtaataaaaatggcaggactacaaaatttttttttatgtgttatactcatattaattatttttttgactgacttcctccatgactatttcaacaatttattcgaataaataaacgccggcaaattttcttaggattctgaattttgtttatttccattttatttttatattttttcataagtattttatccgaaaaaaagttttcgagaaattgatgaaacgccgtttggacttcgacaatcagagtccaatggcgaatggaattcgacttcgaaatgaccatttgacattggaatatcggccggacaaacccatgctcagatccattggaaaagcagtgagttttcttatgtctgaagtgttctcaaggtcaccaatgtga

SEQ ID NO: 71328 - DNA, 813 bp, Heterodera glycines
  unsure (1)..(813): unsure at all n locations
atgggctcaactgatcaaacgaaggcattgttttccacgctcatccaacggccaactctcactgatcagctgttgcagcgaccacccttcaaattcatccacgacattgtgcatgagacattacgtgtgaccggctttttggacggtctgttcacgagtgatgagcttgactcaacaaaagccggctcgtcgcgcgacaataaaatggcctttctacaaaagttaattgacgcgctgaacatggacggtcaccttgacgacgtgaagccagcaaaaattgtggccggcaaggaagcagaaatgaccaatttcttgctacagtcattggccactgaggccacaatgtacgcgaagcaagacaacaacaagcagcagcagggggatgtagcggtaaagaaaagtgcttcccattcctccgcttcatcaaagtccaaatcgactactgttgaagcggcttcttctccatccgcatcaaagagtaaaaatgatgatgacgagaaaaggaaaagcaaaaaagagagcagcagcaggagggacaaggagaagaaggaggaagagcatcatcgttcatcattaacaaagcatcgatcaaaggacaaagtgagcagcagcaaaatcagcagaacaaatggcaaccaccgaatttcgaatgaaactgcggcggagaagaagccttcaacagaccgggagaaaaggaagaagcggtctgaggggttgccaaaaaagaagtcagcatcgtcaattaaaaatgccaacgatgctgctgtgcttgatganaatgtcctaaaccatcagcagaaacacaacagatga

SEQ ID NO: 71329 - DNA, 73 bp, Heterodera glycines
atgaaagaagaaaatgccggaacatcaggcagcacacagaccaacaacacatatgtgctgctgccagatataa

SEQ ID NO: 71330 - DNA, 1146 bp, Heterodera glycines
atgcctcaatcacaacaagagttgaacaatagttctgatgacgacacgttggccgtctcatcatcctcatccatccaaccggttgaagggggaaaggtgcgaaatattttttgtaaaaattttaattaagaaaatttgctttgctcatgaatgttgtaggttaaaaaataaattttataagttcccgcactcactgggattgaaccttaaagctggttttttctagtcaagcacatagaccactataccattaaatgctgaaatttcgctttattctctatctattttctattgtgcagattgtccaatcctttaccgtcccctacatttccccgttggtgttgcgccgtgagctggagacgctggtgactaatgccgccgatggtgcactggtgttggcacggcccgggatgcgcattgcacacccaatcattttttggaacctgttctactactgcaggcgacttgaactgcccacccatttgctcacatgggttgctggagcggttgtcattcactgtgtgcaggtcagtcatcagtgctatttgggatactacgacctgtggaccttgattcaggcctgggttcttcctggattccaggtcctggccgtttttcggcaacctgggttttttcaggacctatattttcctattttgtccaagacatccatgtccttcacattccctatccaaattttaaaaaatgacattaaaatacaggaatttttaaacagattgccagaagtacatgttttttaaaatattttttgaaaaaaactaaaatttcttcttgttaagaacattaacaaataatcgaacaaaaatatataattttagaattttaatatttaaaaatataaactattttgcttttaaaggatatgccacgtttgccttccgccgacgaagacaaacagcagcaacaacaacaacacaacgatgctgttgctgaaccgtccagcggcaatgaagcggaggagcctggcaggacaaggaattgacggacggaacacaaacaacgcccacacaattaattgctcatatcttctaacatcatcatcattcaccacccacaccaatatacaaaatgtgagttattataattttccaaagtaattagttatggtcaagtatgctaaataaa

SEQ ID NO: 71331 - DNA, 118 bp, Heterodera glycines
atgccatcccgccaacgaaagccgccgcccccttcttccgcacttatgggacgaatgcttccaagcaaatccgacgaatccgtgcgctcatggcaattgatggacagaagatcgccct

SEQ ID NO: 71332 - DNA, 516 bp, Heterodera glycines
  unsure (1)..(516): unsure at all n locations
aaaacgacagctgttcatcaatttgtaaggcttcacatatgtaattggcatttctcttttataatttttaaaaatttaattttttttgtccataattttcgacatctccctatttttgtcatttanagggcgatcttctgtccatcaattgccatgagcgcacggattcgtcggatttgcttggaagcattcgtcccataagtgcggaagaagggggcggcggctttcgttggcgggatggcattgtgctgcaggcaatgcgccgtgggcaacggttgttggtcgatgaaatttcgttggcacccgactcggtgttggaacggttgaactctttgctggagccacagcgtgccattctgttgaccgatgcgggcgccgcgcatcaaagcgacggcactgacagcggcagcagtagtgccattggcggtggtgagacagtgacagcggctggcggtttccaactggtggcaacaatgaacccgggaaatgatcatggcaaaaaggaggtgagtgaga

SEQ ID NO: 71333 - DNA, 656 bp, Heterodera glycines
gttttcgggggcagtccccccgagccgatgcgcccagatttatggggagaccgaatccttccggaatagcttccctatagcctgtactttaattctgcgttggatttttgctccccataattgtttgagtaccccaaacggacacttgaaaaaatcgatttttttgttttcggggcagtccccccgaaccgatgcgcccagatttatggggagaccgaatccttcgggaatagcttccctatagcctgtactttaattctgcgttggatttttgctccccataattgtttgagtaccccaaacggacacttgaaaaaatcgatttttttgttttcggggcagtccccccgaaccgatgcgcccagatttatggggagaccgaatccttcgggagtagcttccctatagcctgtactttaattctgcgttggatttttgctccccataaatgtttgagtaccccaaacggacacttgaaaaaatcgatttttttgttttcggggcagtccccccgaaccgatgcgcccagatttatggggagaccgaatccttcgggaatagcttccctatagcctgtactttaattctgcgttggatttttgctccccataattgtttgagtaccccaaacggacacttgaaaaaatcgatttttt

SEQ ID NO: 71334 - DNA, 103 bp, Heterodera glycines
atgtcagcgtcaaaattttttctgaagtcgaacgacgatgaggtgtttgaggttgaccgcaatgtgatccgtctctccaccacactcaacacgatgtttcaag

SEQ ID NO: 71335 - DNA, 940 bp, Heterodera glycines
atggccttttttcttgggctggggatggcattttggctttggttttgtgccgtgttcgtcgccgtcccatcgttctcctccccctcattttgcctaatttcgtcttcgtttgccattataacaattgaaaatctcaaaacaattttctctttcttttctccctgtgatggcacttcgatttcaatgtctttgccattcaaatatttctgtacgatttcgttgccatcattgaaaattgcatttaatctaatgttgactttgcgcattggcaaattctggtggaaaattacgcgcagtttcagccttttgtccgtttcatctgccaaaacgaagtcaaaacagaaaaacgaaaataaaaatgccaaaaaatgcatttacaaagcagaaaatctgaattatttttcttttttattcgaaaattaattaattaaatttctaaatgagaggcgatcatttaaaatttgtatattctaattaatgggttttgaaaaacattataatttatggaataattcgatattattttgtgtttcaagcattattgcacattaattactccaataacatgactttcactcgcttttttcaggcgaattccacgtcttcaaaacattgtaaaagccaacattaattatttgtgggaaccatgatcgtctttccactcttttatttccgatgggatcaaatcaaccgggcgatgccagcggcgggcgtagccaaatgggtgatgccaactgggcgatatagggcctaaaccagggatggcattcctaggccccaaaaatttacggaaaccggaattacgggggtaaaaaatttttcgaaaatcggaatttcgaggtccaagaatttttcggaagtcggaatggaatttcgaccccaaaaacgtcggaaaccggaaatttttgaaaaaatataaaatatattaaaatttaataaa

SEQ ID NO: 71336 - DNA, 909 bp, Heterodera glycines
atgaaagaacactacgacgcacaagcaaaagtcacggagaacaaattccaaatcggagacagggttatggtcatttttcccgggtcccacattcgatcaccacataaaaagattttgtggaaccattttggcccatttcgtattacggaattgaataaatcgacggcgaccgtaatcccgtccgataatccatacggtaatccaatgacagtccctcttgaacgattagtgcgcgtaccaaaggaattgccaaacatttgtacaatgccgaaagggaaaaacccctataagaatgttttaaatggactgataagtgtggccggattaatttgtcaagaaaacataaaattgtatggggaagaaaaattgaactctaaaccggacggaataattgggcaattgaggtcaattgcatttttaggcggtgaggaggagcacatggaaacggaacagacggacgacaaagaggcggagaccaacgaaagcgaaaacgaagaaaatgtagaggaaaagatggacggcaaagaggtggacgcgaatgggagcgaaaaagaagcgaatctggaagaagaagaccaaatttcggtcgttcaggaagaagaggagccgaaaacgctttcttggacattggcatgtgtcggagacgggcacaaatgctgctccgatgtggtcgtggccgacttggatgctgtccttgaccgatcaggcattgggctcacgaagatcgagaatccgctcaaagcgctgttggcaatgtttctgctgaagtctgaagcggtcgcatcggcatctgctgccaaaaagctcatttcgcaaattctggacacggatgccgattgggaactcgcaacatattgcagtgcccgagaagacgacgtcaaaaacggcacatttccatccgaatcggac

SEQ ID NO: 71337 - DNA, 1904 bp, Heterodera glycines
atgttagtgagggaaaagcatggaaatgatggccatcagtgagtgcttcggcaataaaaagaaagtcctccggaggcggtaaaaaggagaaaagaagagagtgaaaaaagaatgccccgataaagtcagtgaataccctttgggatgcccttttggatgaaaatgcccattaggatgaaattttgaaaatttgggatgccccttaggatgataaatagataaaaatgactttcgggatgccctaggatgcccttcgggatgaaaaaaaagaagaatgccccgggatgcccttttggatgattaaatgcccattaggatgaaaataagtgaaaattttggatacccttcgggaagacaaatacatgaaaaagaaaattcaggatgcccattaggttgaaaatgtgaaaatttgaaaatgcccagtaggaagataaataagtagaaaaataaattatgaattaggaatgcccttctggatgaaaaacgagagatacccttcgggaagaaaaagagaaaaatcgaaaaaaaatcaaaattagtcagttaaaaaaaaaaaaaagattaaatgtgaaataaaagcaaaaaaaaaaaaatgaaatacaaatatacaaaaaaatacagtaggtccttcgggaagacaaagagatgattgataaaagatatattaaaaaaaaaaatacatagaaaattaattttaaaccatatacagtatacaaaaaaggggaactacagtactcaaaaaaaaaagggggggaattttgccggatatgttgatgaacaaagtacgctcgcagtcagcactatcgctctggcccatctgctgagaacattgctcgcttaacgttagcaatgcattttctctcctcctctcttccccccggcgctgttttccctttgtaatcggaagatctgttgcaattcacacatcttttcacagtcatctcttcccttcttcttcttagtcttcttccccccccggcgatgatgggcggaggatggcgtcgcttggccgtttactcataatacgccaataaatatgcggatttatacagcacatttcattcttcccatcatcattcgttttgtgtcactttattattgtcccatttgctagaaatgtttattaagattttcaatttaaaattaattttttttccacattcctttagaaactcaatttcaatttaatttaatacaactcttcagtgcaaattgtggacattggactgtcaacgaaagccttggcaaggacaaatcgctttggcatttttctgtgagtttactgtaatgggtactgtagcagttaagatgggtaggatttttgaatttttgggaccattttggggacaaaatctgttgaacttttgtcaattattttcatggtaatcctgataattcaaaatattggccaaacaaaaatgcggattatttaattacttgttggtgataattttactttcaaattataattaatgggttcctaaagggcttaataaatcaatttattttgtgttttatgagttataggagtttttaaattacggtaaatcatatgtcaaatacatgacatttgttaacattttgagcaccatttcaggctcttccttttgctgtggattttgttggacttggactgaattactggttgtttatctgcttgaaaggacaattgcaaatcgcttcggcattttctgtaagtcaacagtatactgtaatttatgggttaatttttcaaatgacatggctaattaatgcaccgtttgcattaattaattattacagattcctaaaaccacagtaatcaaaattgggttaatcttttcaaatgtacagtaatttccctatgcttttggttttctttggtcaaatttgagtattattggttcaaaaacgatgagttagca

SEQ ID NO: 71338 - DNA, 246 bp, Heterodera glycines
atgaacgaaatggttatactgtattacaattaacactgtaactcattcaggttttggcattgtgtttttgctttggaatttgtcgtcgtcaaggacctgagcagcgtttggattttggatttggaatttgacgcaacagcctttgaacactttgatcttctgtggccaagggttggtcaaatcactgattattgacttaattattcaaattattcaaaataataatacaagacaagacaaaacaaa

SEQ ID NO: 71339 - DNA, 233 bp, Heterodera glycines
atgaccgaattggttatactgtattaaaattaatactgtaactcattcaggttttggcattgtgtttttgctttgggatttgccgtcgtcaaagatctgagcagcatttggattttggatttggactttgacgcaacagccttttaacactttttgatctttgtggttcaagggttggttataatttcgaattaattattcaaaataataatatacatataaaaaagggacaa

SEQ ID NO: 71340 - DNA, 829 bp, Heterodera glycines
  unsure (1)..(829): unsure at all n locations
atgttcatgcagaggagggaggaggtgtgctctggcacaaaatggcatgccatgccatgccgtggggagatgaagcattttggaggaaaaacataaaacactgggggaaaatgcagaattgcttacgcattgtttaaaatggagaaaaatttgaaaaatctattaatgtaaaacggaaaatttgtttacaaattgttcaaatggagttaaaattttgaaatttaaatcagaaggttgaatcaggaattatatgaatttttgtaacaatttttaaatttgaaaattaaaatatagaaaatgaagaaatacttttataaaaatttgggaacatttttatactgaatggagaaaaaaattaaatttgaaaaatttttaaactatcagtagaaaaatataaattttaaaaataaatttcataaaaaattgaaattgaaaatatattgaaatttcatttanaaattttttagtttaaagcattggagaaaattgttaaataaatcaattagctaaaaaaaaacaaatttaaattacaaacatttaatttaattttttagaaaaattttccgtattccaactcggcaaagttgcgcgatttgaagtccaccgtcgatttgctcacctccatcacattttttcgaatgaaagttggttaattttttttttaatttttttttttttggtttttaaggttctcaagttgaacagcccccctcgggcgtcatatttggtcagagaatgtgccaaagcgtgcatcgaggtagccctggcagaatttataaaaaaaaaattcaattaccgtatttcctatattatagccccctgaaataaa

SEQ ID NO: 71341 - DNA, 225 bp, Heterodera glycines; identical to SEQ ID NO: 56422

SEQ ID NO: 71342 - DNA, 395 bp, Heterodera glycines
atgcgttcagtaaaacatggaggaaaaaaaggaatgcgattcagatacaaattgtcagcagttaagaggcaaaacaaaaaacagaagaaaaagcaaaggaacatagctggatggtaaaaatattgaagttttaaattgctaatttcctgttgttgtattcgatttgctgatggtctcacattattttaatttttttttgaaattcctctttcagaaatttggaattcgatttagaattttattttcatttcaaatacatagatcaacaagctcagcaaatagatacaattaattcatgtcgtttttttaatacttttagctctttgatcaaaaaagcatggcaaacccaactatcatcgcggcaaaatttaagtgcaatggggactggtctatga

SEQ ID NO: 71343 - DNA, 93 bp, Heterodera glycines; identical to SEQ ID NO: 60640

SEQ ID NO: 71344 - DNA, 735 bp, Heterodera glycines
tactcgtttgaaggtttttaatacccaaatttaaaaagctttaaaaattcggagtcgcttataatgaatctgacactaattttgaccaattaagggacggcatttgaaaacgcaggcattagcagcaataaaaataatgaacataaacgaagacgaggaggaggagatcaaagcggaaataaacatgctcaaaaaggttgggagggagtcaaaaagaagggcccaaaaaagaggggaaatggctaaaaaggaggaaaatggccaaaaaagagaaaattgtcaaaaagtaagggaggaatgatcagaaaggaggaaaaattgccaaaaaggggaaagaaatggctaaataaaaggggattaaatggcagagaaaagggggccaataatcgcacattaagtgggctaatgggacggatgaacgtgcaactttttagtattcacatcacccaaacatcgccacttactacggtgccttcatcaagaagttgccctcctcaactggcaaacgatgaccaactttggctcggttttctcgccccctccggcgatttcgagtctttccgttaagtgatggaattttgcggcggcggatcggtgaccgatctgatcaaatcgttcgaaggcggttatttgaaggaggaatggatcgcttacgtttgcaaggaaatcctttcggtaggcccaattcttctcagaaggacatttccccctttaggggctaagcccatctccaca

SEQ ID NO: 71345 - DNA, 802 bp, Heterodera glycines
atggctcagttgtcgctttccgtgcagacgttgcgtctcagtgaagccgagctgtccgtactggtcatttccggtttcacggtactgggtgtgagaagtcaacccgccggacagcacaatatcgataccctgttctcactctaccgattccaccagtggattaacgcactgggtaacctcagctctgacacgctggatatgctgcgccagcaaacgctgacggcagacagactggcctcggtgatgggtctggacatcagtatggtgacacaggccatagcctgtgctgacgtgagcagtcttcaaagctggcagaatatcaacgccgtgctgcaatggatggatgtggcctcagaattgcacaccatgccatcggttatccgtaggctggtcaatatccgctacgtgactgtgccgaacaaagccgagtcggatctgccttcctgggatgaatggcagaccctggcagaaaatatggaagccgggctcagtacacaacaggctcaggcactggcagatcataccgcagagcgcctgagtagtgtgctgtgccattggtttctggccaatatccagcctgaagggatattcctgcaaagccgggatgacctgtacagctacttcctgattgataatcaggtctcttctgccataaaaactacccgactggcggaagcgattgccggtattcagctctacatcaaccgggcgctgaaccggatagaatcgaatgcccgtgccgatgtgtcaacccgtcagttctttaccgactgggcgatgaatatccgttacagcacctggg

SEQ ID NO: 71346 - DNA, 968 bp, Heterodera glycines
atgtccaactatgggcccgactatttgcaaatgttgaaaaagcgacgtgccaaagagtctctcggcatgccattccatggcattggcatcaaagtgcccgtgaacaacaaaggcattggctaccgaccgctgtcggacgacgccaaggaaaatggtaaaattttcttggtacgcccattttaacatcgtaaaatttacgggtttttttcaaaatttctcacagtaaatttagtcaacatttcagcacaactgaagcgaaacatcgaaacaatgggcacaactgacaatgaagagaagaaagctgagctgaaggagaagttctaccagatgtattcatgggttcaggtgcgttttatttttattcggaaaaaagttaccgaatttttgcttggggtgtaccacacccggcaacaaatcctttttttttgattttcacattatttttttgtcgcatatttttaaaaacaactttcggtgaatgtgtcgggtctggcgtagacgtcgccaagaaaaatttagaaaactacggcttttgtgacgatttttgtgattttttttttttgaaaaaggcgaagttttgttttcttttaagttcgcaaatgatgaaatggacttcggcatgggcctggaatttgggcacgacctgttcatgtccaattacgcgtgctttgacggaatggccaagtctgtgctgatgacttcgtacgaactgttgggccgcaaacagttcgccacactacttgagaagcacatggaagtgaggcgtcatgaaaaatgtttttgaatgatcgacggaccagaaaatgaccgacgaatttgtcacatttattcattcatttatttttaccaaatcgatctcacacacattcaatgaatgttctctgctttgtttgcccttttcattttgacatttatgcatttgtttaattaaactattttttttacagttcggagtgtgcttttggtaa

SEQ ID NO: 71347 - DNA, 72 bp, Heterodera glycines
atgactgcggaggacgctttcatcaccaacgcaaaagtggcggcgaccgatcgttttttatgcgacccgtcg

SEQ ID NO: 71348 - DNA, 1090 bp, Heterodera glycines
atgatcgacgaatcgtgtcttttcgactcggaagaggaggaggatgaagaagcgaagaaaaagacgccggaggagcgcaaatatttgttcagaaaggagctgcggtcgatgctattcggttttggggacgaaagagtgcgaaaaaaatttagggatttttcacattttattcccctagttattaagaacccaaacgacgacactttggaggcacttgagcaaattgtggtcgaatatgtgaaggaggtgtgccgcaaagcgttggaggttggcaagccgaaccgagtgaacttggaggacattcattactgtgagacgggggcggtgttggcatggcaaacggaaagactgttctaaccttaaaaagaaaaagggggtgggtggtggtgtcacggaatatgataaaatagctgatttttacccagcatatcaaagagattatatttacaaaaaaatcgaaaaataatagtccgtatgtttgaaggattcgtttttcgttgctgtacatgtcaaattagtctgtttatattgcatttgctttatctctttggctgtgaccatttcattttccctaaattcagtgattcggagggaccagaaaaagttttcgcgcgtcaaagaactttttttctttcttttttatcagttaagaaatgcatcgaaatatgctgatgaacgtttgaattccaaagcactggcaattgaactgcaaaacgcgcggacatttttgacgattctactgccattcatcgtccccttgcttagtggacttatcattctactcaccatttaccattttttgacaactcaaattgcccaacttcgtacggagttttcgcaaacaaagtcggagttggctctgcagtttgccgatacaaagttggatttgacaacccaaattggccaagttcgtgcttagctcggtgaatcgaaaacggatttcgcattattttctgctcaggtcaatcgccggtttgagcacgagtttaccgacatgaagcaccaatttgccgaagtgtgcaaaaaaatggacgagattcttgtgcagactaagaagagcaagaagttttctgttttccgtcgcgagtag

SEQ ID NO: 71349 - DNA, 761 bp, Heterodera glycines
ccgcttccccaccaaaaaggcatcgtcgaccctcgtcttccctgcaaaattcaaattgtcggccgtgccaatgacgtcgcgaaacgtttcgaagtgaatcttttgtcacaaacaggcgaacaccttctccatttcaacccgcgcttcgatgttcgtaaaatccaaagatcgaccgaagaagtcccttcaggaacattgcgtggtgcgaagcagcacaaaagacggccaatggcaagcggaagaaaggggagggaccaatcccttcgtggccgggcgagcctttctcgctcgatctgctggttgagcaaggcctaattgaggtgggtgccggccgtttcggcccccaaattcgcccgtggcttcagtgttctgtgaatggcttccaattctgtgaatttgccgcgcgggatgacttctcccaattgggcgctgtttccgttggcggtgacattcagctgaactctttggaagtgtccaccgccgagggtcccgcgattgcccatgaaggcggcgataaggggccgcgcgaagctgacgaggaaaatgcgcaagaacagccgcccattgtgatgccggcccatcccgaaccgcaaccggtgccagccgaaccgactccccagcagccgcagcctccaccggcccaggggccgctggtcagtcacacaattaatccatttaggtatgctgtggacgagggtatattcgaatcattcgcagtcggtgccttaccaagctccgctccatgcgttgcttcagactaa

SEQ ID NO: 71350 - DNA, 478 bp, Heterodera glycines
atgtacgtgcagtacagtagcaattggtgggtcttcccgtgccgcagtctgtccggttctgttggatacgtgtgtggtgatctcgaatggatcgaaatggacaccatattcgtgatcatcgaaactcccaaaaacccaaaaaacttgtttctatagcaaaaaattttttgaaaatttttttttcaaaaaggggggtaccatcgacacagtattacccgagtgagaattgtaaggttaaaaatattaaatgttaattaggttatatatagtgattatcgaatgctgaggtgaaactttctatgcaaatgttaagctaagcctactttcgagttttataacctattttctaggctgaaaacaagtacccggagttttcgagatcgctgatcacgaatatgataattattttagcatattcagaaccatgaaccaaaattcgaacaaaaagtaataattttgtttttttgtttgaatctga

SEQ ID NO: 71351 - DNA, 769 bp, Heterodera glycines
  unsure (1)..(769): unsure at all n locations
atgaacgctaaaattatcagagtgccgaaaatcgcatgtgatctaagcctagaaaaaaatggtgtaagtaaaaatcgtaattacgctcaaaaagcttctcaaacaattttagcgcatccaattccttctacaatcgcctttatacatcccattatgagcgctaaaattatcagagtgccgaaaatcgcatgtgatctacgcctagaaaaaaatggtgtaagtaaaaatcgtaactacgctcaaaaagcttctcaaccaattttagcgcatccaattccttctacaatcgcctttatacatcccattatgaacgctaaaattatcagagtgccgaaaatcgcatgtaatctaagcctagaaaaaaatggtgtaagtaaaaatcgtaattacgctcaaaaagcttctcaaacaattttagcgcatccaattcctttctacaatcgcctttatacatcccattatgagcgctaaaattatcagagtgccgaaaatcgcatgtgatctaagcctagcaaaaaatggtgtaagtaaaaatcgtaattacgctcaaaaagctcctcaaacaattttagcgcttccaattccttctacaatcgcctttatacatcccattatgaacgctaaaattatcagagtgccgaaaatcgcatgtgatctacgcctagaaaaaaatggtgtaagtaaaaatcgtaactacgctcaaaaagcttctcaaccaattttagcgcatccaattccttctacatcgcncttatacatcccattatga

SEQ ID NO: 71352 - DNA, 139 bp, Heterodera glycines
atggaatcaaatcatatgttcaatcagggaaggatgttacaatgtgtaagttttttgtaatttttaaagtcataaaaatttttaggtggttttctgggtcgctgatttcaaatatggtaccatttcggtcaatttctaa

SEQ ID NO: 71353 - DNA, 683 bp, Heterodera glycines
gtttcacgaaataccgccctgtaatctttcgccatatccgggaagaactgtcaggctcaacagaaatatctgcacccgcgcctacgaagacccagacgtttgtggccgatgggaaggtatcccagcgccctcggattagcgcaacccgtgcagcacctagcgtctttcgcgacctgtaggccaactcctaacaggctccccggaggttccgagtatcgcctcactcgtgcgcgtcggtagttagccgccgaggcatttggctaccttaagagagtcatagtttctcccgccgattacccgcgcttcctcaagtttccgtgacatgacattcggagcactgatcaggcatccccgcaaacccttggaaacatgttttcatgactatgaaacaaaaaaaaaaatttcgaaaaaaggggggtggacaaagcacagtatttagtaccaatatttctccccaaaaatgtgttcgggttccctcgcgtgtcccctctcctggttcacaatcagtagaatgatcttattttttctgaaacaaaaaaaaattttaattaatttttttcgcttccaggaagaataatcgagtcgactggaaaaaagaggtgagacgaagctgaatggttcaaataaaaaaaaacaaaattgctttttagcgaattacgaaccaggaaacatttggccaaatg

SEQ ID NO: 71354 - DNA, 912 bp, Heterodera glycines
  unsure (1)..(912): unsure at all n locations
ggcaggacaagaaaagaatgaagttgatgcctcatgaaactcggaattggttatgtttagtcgaaaatatccttacataatactcataaaaaatacaaataattcaacccacctattctatgaccacattctgaaaaaaatcccagaaatacgaggaaagatatgcttggtcacaataaaataaaaaatggctagtatgtaaaaatttgcggtcacaaataaaataaaaattggctaatatgtaaaattggcgtccagaaatttttagactaatccgaagcaaagcacgaatgaattaaagaggcgcaagaattcacagtatcgtttctaatagggaaatattgacaggatattcggctaaaaacgggtttgatcatttttagcgcatttttatgtatacatttgagacaattgggcaggacaagaaaagaatgaagttgatgcctcatgaaactcggaattggttatgttttgtcgaaaatatccgtacataatactcataaaaaatacaaataattcaacccacctattctatgaccacattctgaaaaaaatcccagaaatacgaggaaagatatgcttggtcacaataaaataaaaaatggctagtatgtaaaaatttgcggtcactaataaaataaaaaatggctaatatgtaaaattggcgtccagaaatttttagactaatccgaagcaaagcacgaatgaattaaagaggcgaaagaattcacagtatcgtttctaatagggaaatattgacaggatattcggctaaaaacgggtttgatcatttttagcgcatttttaggtatacatttgagacaattgngcaggacaagaaaagaatgaagtgatgcctcatgaaactcggaattggttatgtttagtcgaaaatatccttacataatactc

SEQ ID NO: 71355 - DNA, 353 bp, Heterodera glycines
atgtcagaccgccgaaaagaaggagaggaaaagatggcaaaagcaatgtaaaattaaatttaaaatgccaattttcaatttgaattttgttttccccctttttcagtttcatctccgccgattgttggctttcggtgttcgatttgcttactccttctcaacttggcctcggaattgcgctgatcagccaccgttttgacttctacgtagacgaacacttcaaaactcgcaaatgggcgctgaaaattattcgtattgagagaaaaattggagagaatggcacaaagcaaatggaaattacaaatgacaatagaaaatcattgccaattccgaaaatgcaattgcctcgcaag

SEQ ID NO: 71356 - DNA, 485 bp, Heterodera glycines
ttattgccaatttaatttcttgcagatttaaagccatccattgcctgccggttctcggcacagcaaagcactaatagggtgtttgacacacttcaaaaaataatcattacccaaaagttgtttacaaccacttattgccaatttaatttcttgcagatttaaagccatccattgcctgccggttctcggcacagcaaagcactaatagggtgtttgactcacttcaaaaaataattcattacccaaaagtttttttacaaccacttattgccaatctaatttcttgcagatttaaagctatccattgcctgccggttctcggcacagcaaagcactaatagggtgtttgactcacttcaaaaaataattcattacccaaaagttttttacaaccacatattgccaatctaatttcttgcagattgaaagccatccattgcctgccggttctcggcacagcaaagcactaatagggtgtttgattc

SEQ ID NO: 71357 - DNA, 141 bp, Heterodera glycines
atggaggaagagaaacgagggaagcaacgagagaaggtgcagttttgcttcccatcctcgcctaatcagtaactcataactaatctcctttttcagtttaatgccactccaatgcaggacaattcgtgtttactttcttaa

SEQ ID NO: 71358 - DNA, 504 bp, Heterodera glycines
gatgttttttggaccaactctgttgttcctttcatctatcggtgttcaattgcatttgttgtgcattacgtcggggaattctgagggacttggaacgattaggcgaaatgaattgtattcgtctgcttctgtttatggcatccaacccaaatacatctcttttgtggatccagaagagcgaagattcccggatggttttcgcgattggaatatcaccagcctttctgcgctgatttactcttacattcgacggctgaaacccgatggactgatcacttttgacgaatggggcatcagtggacatccaaaccacagagacagtttcaaagctattttgaacttgaatactgaaggcaaacttaaagaactcggcctaaaaacggcattggcactgaagagcgttgcagttttaaggaaatacgtcggagctgttgacctttttttgaatgagttcgtaatgtctgatggaaatacatttgtcacatattcggctaacccactgag

SEQ ID NO: 71359 - DNA, 212 bp, Heterodera glycines
atggctggttgtttggatgcgctcccacatcaggcacacttcgactgggataccaaacggaacacatattcagccgttgcatctgggtttctggtagttttttttctggttgtttgttgccaattttataatattttcagttctttttggcttggtggcttatgattgacacagcggtcactgcgcaaaaagcacattggacaaattggtaa

SEQ ID NO: 71360 - DNA, 269 bp, Heterodera glycines
atgcgaaactcgtcacaattaggtgctcgcctttggcttatgttcggttttatcggatcgttcgcctgtattgtggccggcgtttgggtcatgtaagtccacttattattttaaataggtaattttctttctttaggttcggtgacttcgtacttaaagaaggacaaaatgacaattggccgggaatcgcgctttttctccacacattctttatttttgtggcttcattggtttacaaatttggacgcaccgaagaattgtgggagtga

SEQ ID NO: 71361 - DNA, 586 bp, Heterodera glycines
atgccttttattggtgtagggcctcggtggcgcgacgcccagtggcttggaaatggccaaacgactcgcgcgccacgtttggcctaagggacagtggcgcgtgaagggccgtgtacttttcgccttttccttgctcatcgctgctaaggtcggtgatccatttagttattcaaaatacgttttctccagcttctgaatgcgaccgttccgttcgtccttcgcgacatcgttgacttttttaatgggaaactcccggcggagctgtcgctcggattcgcattgcctggcgaagccattctgtcggcgggaattgctctgataattgcctgttagtgtttttgacaatgaccaaaaattttttttttaattttcgatggcgccgcgaggggcggcacttcgctcttcaacgaagtgcgttttttcggtttgactccttcccgcaataggccgttttccagcttcgaaacgctgtttttgcgcgtgtcgcccagcggtcaatccgcgacatttcccgtaacattttcctgcatttgcacagcctcgacatgtcttttcatctcaatcggcagactggcgcattgtctaa

SEQ ID NO: 71362 - DNA, 387 bp, Heterodera glycines
gtttcaattgcctttgggcagtgcacaaattatgccgaactcgaacagacactgttcgaaatgtgccaagccaatggccaaatgcattaccgaatgaaagtgtggttccaagcggagaattggctttgtgtcaaacattcggtggtcgacacaattctgatggccaattcgaatttgaaacgccgtgggcgtaagcattttgaatttatctaaaataaacaaaataaatgttttaagctcgaagtgctggcgatctgtcactgatgacgccgcgtttgaaaaagcattcgtttcataacgaaacatttgaccgttatgaccgaagagaatgcatcgaagtggtttggatgaagctgatgcaagcggtgatcacgtggatgaaacagg

SEQ ID NO: 71363 - DNA, 760 bp, Heterodera glycines
cgtgcccgatcagtaccaatccgtggcgggtccccaaccgcagttaaaagccgtgtccgatcagtaccaatccgtggcgggtccccaaccgcagttaaaagccgtgtccgatcagtaccaatccgtggcgggtccccaaccgcagttaaaagccgtgtccgatcagtaccaatccgtggagggtccccaaccgcagttaaaagccgtgcccgatcagtaccaatccgtggcgggtccccaaccgcagttaaaagccgtgtccgatcagtaccaatccgtggagggtccccaaccgcagttaaaagccgtgcccgatcagtaccaatccgtggcgggtccccaaccgcagttaaaagccgtgcccgatcagtaccaatccgtggcgggtccccaaccgcagttaaaagccgtgcccgatcagtaccaatccgtggcgggtccccaaccgcagttaaaagccgtgcccgatcagtaccaatccgtggcgggtccccaaccgcagttaaaagccgtgcccgatcagtaccaatccgtggcgggtccccaaccgcagttaaaagccgtgttcgatcagtaccaatccgtggcgggtccccaaccgcagttaaaagccgtgtccgatcagtaccaatccgtggcgggtccccaaccgcagttaaaagccgtgtccgatcagtaccaatccgtggagggtccccaaccgcagttaaaagccgtgcccgatcagtaccaatccgtggcgggtccccaaccgccggtg

SEQ ID NO: 71364 - DNA, 525 bp, Heterodera glycines
atgccaaaaaaggcatttaaggtacgaaaatcccgaaaaaggcataataaaagtcaagtagaagcttcagaccaagcgtaaaatgcttttttatacttaatatatcttgattagtacgcataaaaaggcatatgccacaaaatctgttctctaattattaaggccgatgaagcgcttcgcggaacttcaattgaaaacaatttctttttggcaaaatgttatcagcatcttaatgaaaaagaaaaagcgattgaatattttggaaaactgttgacacttgagccaaacaatttgtatgaagcagaacgacaaaaattgactgttgaaattctgacgaaagaatttaaaatgaatccattgaaattatgattacacctcgatgatattccatggccctcaattttgatatgaatttgttgattgactaaacaattttggagagaatatttttttaatttcgtcgggatttattggagggggggattaaaaaaacattatttatggtgaggatttttgaacaataaa

SEQ ID NO: 71365 - DNA, 562 bp, Heterodera glycines
atggcattggcaaaacttaaaacatcagtttttgccatttttgttgtgctttttgtttcaattgacaagtgccgatgtacaaacattctgttcacctttttccatgacacgggaagccatttccaatcggtgtttccattgatgcaaaagtacaaatattttacaaaattggaggggatttataagatagaatcaattaactagctaattaattaatattaattgatttaaattggatgtgtgttttgtttaggctggcgagtcggggcaataatgtgtccgttttggacacagtttatgagcaggaccatagccttgaaatccatcactttcgggcgcttttgcccaaacaccataacgatgaaacagttaatggcaattaaaaattgaaaataataataaaaatgttttttgttcagtctaaacgtcactttgccaatgacatttggtcacgccgtctttccgccactgatttggccctttattttgggacatgtgacaaggaactcggaattttgatgcaaaatcacagccaaaaagcaagcactaaagcattaataaa

SEQ ID NO: 71366 - DNA, 379 bp, Heterodera glycines
atggtaaggacgtccttgaaattgggcccttccgcttgaaaatttgaaagtatccttgaattcaagaagtaatttggattaaataaaattttccccggcggcgcctgtcggcaccgccggaccccccaccccccccctgttccccgaaaattttttgaaaaaagcgcgccgcaatttggccaagcccaaaaattcaaaaaagcccttttctcttttgctcgtaaactggtcaattctgttgtaaatcaaattaaaattaaaaatattacatttcatttccttaaatttatatatatattttttagttttttttaaacttggatctaatatggacgaaaacgtcaaaaataaaagattaatccgactttgtgaaaataaa

SEQ ID NO: 71367 - DNA, 1439 bp, Heterodera glycines
tgtgatgagaagcctttgtgggagtcgctgatgggccacggctttttggtgttgttttgtttcgcgctcattggcaattgcatcaatctgctcatttacaactcggatcaaattcgctttttcattgccattcgaatgctctgcacaaaattggtctgttttggcatgcaaatgattggcttctcactgattgaattgcccatcagctgatgaacacgtgcatgatggtggtgatggtgccgcaggcactacgcgtcattcgcttttgggacatcggtggctcaactgacattctctactggacattttggccatatcaggtagcggatatggacgtgaaccctccctaagtgatgttcaatttgcacaggcttacctgacaaatgttttcggcttctgtgcgatgtggctgaccgtactaatgacaggtgggcatggaacgcaccgaagggaattgaaaaaccatcataagccaattggcaaagccaaagtacatattattcaacccaacctgaaagccagagaaaatcaaattgaacattattttggagacgaaaacgccataataaactcaaattcaattaacggagattggcactatgaaaagtcatttctctcagaatttaaagtgcgctattaaaagcgaaattggctaatgatgatgatggccccagaagattcattctcctcattctgttcgactgaacctttttcccatttcagctgagtgttacatccacattttcttcccctccaagtcgaagactctctgcactaaacagaccgtttggcgcagttatttggtcattttcttcgccgcgtatgtcttttcccggggcaatttcatgaagccctccccctaattaggcttatcctcgcctccatttacccactcaatcgcaccgtttcgctgtccaaccgatgcaatcgcacaattgtcaaaataaacacttcccaaagtcagtccttccaaagtgttgccctttttctgttgtgccttccctttttagattttgtgatgggttttttcgagaaagtgcacactttggccgaccttctcctctccattttgcttccattaacacttttggtaagttttttaaattcaatttgccatactgtgccgttgctaccgtatccccaccccactcattcatttgtccttaatttgtaaggttttcatgaccgtaatgattgtgtggcgcctttgggtttggccaaacagacaccgtcgtcatcttttggccaatgagaaggcacaagtgcaggccaacagtctgctgagtgccgctgctcaccaagaaaggaagaagcgagagaatcatttcgcggcagaaaagcggggagtgactcggatcggtctgatcacttgcttcattcaggtgccctccccctgggggggggttcgtttgatccgcgctttcccttcagttgcttac

SEQ ID NO: 71368 - DNA, 904 bp, Heterodera glycines
atgaataagttattctttccactagtgaatctttacaaggataatagccttcaactgatgcacgaaaagctgaaaaaccaacaattggacacttgggaacaactgcaaaatgccattttgaaagaaaaggaagcgaggtaaaaatggggaaaataattattctaattaaaaataataattttaagaaagcaaaaaatggaagaattaatgagccaacaaagaaacaaaagtagcacaaagatagtgaataaattgacgagaaaaagcatcaaaaaccattcgaagaaacaattggagacaaatttggaaaaaggaagcgaatcgtttgaaggtgtccaagttccaatacttaatttggcaaaagatggacaaaaatgccaaacttttctgacagaagggcccaacgacggtaagcaaattagacgagggcaattacatatcataaaatattatttttcagacattggcatggattctgatattgaatatggcaccgagtctaaaatgttgaagccaaatccgcaaaaagagagggtgaaaaagatatacgcatagtagttgtattaaaccctaattaaatgccatttcgttacagaaaatcgactaccattacttctaccggtttgatgccaatgcgatcatttgccgttactgtccgtattgccgaccgacccaaaagcggtttaagccgacgaacgcgttgaagagccacctgaagacgcaacatatgagtgtgctaaagcagtacagaaggagcaactacattttgaaggaggacagcggaaaagagcaaaaagaaggaggaaccatcaaaacaccagcaaaacaatgggagggcagcagcctcaaaaatttagaagacacaactgacgaggccaaattcagaaaatatttaaatttttag

SEQ ID NO: 71369 - DNA, 149 bp, Heterodera glycines
atgtgccgtagccggtcgtccagcttctgttcccgacgccgtttcagcaccaattcgggattggacagtgtacgagcaaatggtgccaatgtgccgcaaagcggagaaattggtggcaacaatgccgccgacggtaccgagtcgtacag

SEQ ID NO: 71370 - DNA, 999 bp, Heterodera glycines
  unsure (1)..(999): unsure at all n locations
atgattntggatcgtctgccggatataaagggaaacgaaggcagcgatttgattcgcaatttctttaaaaagtacagtcaatacacgattgattggcctaacaagaagcgtatcgaatcattggaggcaaaattaagtggccgtgctgaaagagcctataatgccgctctggccagcgaaccgttcgcttacgaaaacatcaaaagaagtattttacaacaattggaggagacggactgcagagaaatgagtgcattcaatgatttgatgaatggggtactcagaaaatccagtgaaaacctggacgatttggccgatcgaatttcgagtcttgtacgcagggcgtatccaggactaacgcgaaatctggcagatgaatactcgatcaaacatctgattagaagtttgaataaccccgaactcgcactgagtttggagcttcatcgccgtaatggaatgtcatttgatgaatttatggcgttggcttcgcgcgcagaaacaacccaaaaagcggcaaagatacaaaacggggagcgctcaaaaccatattatgagcgaaacttccagcatacgcaccagggtgaaagaaattccgaaatgatttctaaaaatttttcgccacgccctatttgttacaattgtaacgagcccggccatatttcgagaaactgtaataaagcaggggtacagtcgaaccgaaatgcacccgcattttttccacggaatcagcaacaacaacagtttcataattcgccagctacgggagcgaaccgaattgttcaaaattccaaaaatggagtaaccccagcggtacgctcacaaaactttcttaagcaaaattgcataagaatggaagaggaagttaaaaccgacgcaaccgacgcaaccgtcgcgggtgttaaactggaaaaggaagttatagagtatttgagggatgagttggagaaaagcgaaactttttgtagtggattcgaaccgaatgcaatgattggaaaaatg

SEQ ID NO: 71371 - DNA, 138 bp, Heterodera glycines; identical to SEQ ID NO: 50950

SEQ ID NO: 71372 - DNA, 679 bp, Heterodera glycines
tgaaaaaaatatttatgaaacaaaaaaatcgattttttcaagtgtccgtttggggtactcaaacatttatggggagcaaaaatccaacgcagaattaaagtacaggctatagggaagctattcccgaaggattcggtctccccataaatctgggcgcatcggctcggggggactgccccgaaaacaaaaaaatcgattttttcaagtgtccgtttggggtactcaaacaattatggggagcaaaaatccaacgcagaattaaagtacaggctatagggaagctattcccgaaggattcggtctccccataaatctgggcgcatcggttcggggggactgccccgaaaacaaaaaaatcgattttttcaagtgtccgtttggggtactcaaacaattatggggagcaaaaatccaacgcagaattaaagtacaggctatagggaagctattcccgaaggattcggtctccccataaatctgggcgcatcggttcggggggactgccccgaaaacaaaaataaatcgattttttcaagtgtccgtttggggtactcaaacaattatggggagcaaaaatccaacgcagaattaaagtacaggctatagtgaagctattccggaaggattcggtctccccataaatctgggcgcatcggttcagggggactgccccgaaaac

SEQ ID NO: 71373 - DNA, 2715 bp, Heterodera glycines
atggctgcaaaacgcaatggaacctctcaacaaagcggaccgtcgactaaaaaatgggatttccgatcaatcgggtaagtaatttttaataatatatttaagagacaattttaatcaataatttttcaggaacaattttactgaagaaatggaaacttttaaattagtggattatcgttcaacgatttgcgaaaaatttggatttacgaagaatattgtggaatttacgatcaacccggacgtgggacgccccgataaagcgatgcaggatgcggtcgacacaatgatacaggtggcttttaaaaatacggaagaaaggatgatgaggaaagtacgaatgtttggagtggccattacgggcgccgggcttgctttcccggtgtgggtgccgtacagggcgtacccgcagaacaatgcggaagttattatgcaggaaatcaacaagctgggacagagcggggatggagaggagaataagaaaatgctgttgctctcggagccaatcacgatgaaaataacgtgtgtgacaatgcccagtggagaggggccgaggaatgttcataaatttgactttggattcaaggaacaccagcggatagggtaagtgtttttaataaaataaaactaaaataaaaaaatcaataaataaaattaaaagaaatacattaaatttatttaatgaagcaaaaattctttaaagaaaaaatgaaaaaaaagcaacaaaaaaccgaaaaataaattaaaaatattaaaaaataataatttaatgagccaaaaaaaaaataaaaattaaattttaaaaaaatcaaaaaaataataaagtaaaaaataattaattaaaaaatattaaataaataaaaaataaaatttgaaaaatcaaaaaaaaataaattaaataataattaaagtaaagaaaaaaagaaataattatttttaattaagcaaagcagcaaaaaaaaaaacagaaaaaaaatttaaaaaataaattaaataataaagaaaaaataaatggaaataataataataataattttattaaggattacaaatgcggataaattatgtctgttttacgcgctcgtagcctcgaaattttatctggaattgcatgtggacagcttcaggagatttatgaaaaatattgtgagacagagggatgcagctattgagcttttacataattgtggaattgatattaacgaatatagctatggtgtggagcaattaccgaatgttcagaaatattgggtgggtttaaatgaaaaaaagcaaaattaataaatttttcaggatgagatttaccccggaaagtaccgggttgttgcatttgaaaagtcagctgatccacggaaatcaatccgtgttttgtggaagggccctatgggacgtgaaaatgtagtgccgatatttttggagaatggtcactgggatggtctgaagaattacgtctgcttttttaatcgtgggagaaaattttgtattgattgtgagtgcttttttgacaaggatgtcaaacatactttcgagtgccgggcaaggtgttattattgcaatagagtgaggggaatgccatgtgaaaaggagagtggagtgaagattgaatgcccaaagtgtcaccgttacttttacaattgggagtgttataattatcatcatggacatcagacttgcaaattatggaggcgttgcgttatctgtgacaagacttatcgatttaacccgaagaaggaacatgaatgtggtgagacttattgccaactttgtagtgtgagccatgaccccaagcgggggtgttatattatgccgatcgaggagaaggaggaaaaagatgtctacagaattgtagtttgggtaagatttaataaagaaaatcaacaaaaataagtctttaactccaggattcggagacttcgcaggattctatttacaagggggaccagaaggagcatgttattaattatatttcggtgagagtgacgtgtacggaatgctgtgatgacaaaaacaggacgaattgcaaaatttgtggggaggagaggatcaaggattggagcgaggcggagggacatgagccgaccaaggattttgtggagtggattttaactgcttttacgaattacgatacgtacatatttgcacataacgccggacgttttgacggtaatttcaaaatttaatttttaaatcctaaatttttaggtcattttgtttttaattacctctgccgtaccgggaagaacccgctaccgctcatcaatggattgaaaatttatgaatttaaagtgcaaaactcgaagaaacattcaaagctgatttggagagactcatgtttattgatgccggtgaagcttgagtcgctgaaggcgacatttaatttggactgtgaggacaagccctttttcccctattattacaacaagaaagaaaattatggaatacgattggaacatctgccaccgatggaggactattcgccgggatctatgaacaaggataaatttataaaattcgaaaaatggtaggaaaatagaaaaatttttgaataaaattcttttttcaggtacaatgagaacaagggggcgcccttttatttggatgaagaattgagaaattattgcagaaacgacacggagattttattgttgtcgattattgagtttcgaaggatattgattaacgacattactaagggatttgacccactaccgaggagtt

SEQ ID NO: 71374 - DNA, 302 bp, Heterodera glycines
caaaaaggaattaattggcaaaagaatttccttcacctgtcacttttggtgacaggtggatgattgatgaccttcccgcggcgctgcgcggcgcgggaaaaaaacacccgcaacaatttgggaaatcggatttggcaggcggcagcttcaaagtggtccaataggttttggttttgaaacaccccccatcgtggattttttatggggcggcaacttcaaagggctgcacccctcccataggcacgggctcgtgcgggaaacacccgcaaccaacccgcaaccttttgggactatatactact

SEQ ID NO: 71375 - DNA, 829 bp, Heterodera glycines
atgacacggtcgtcagtgagaagcaggggatgcccatcggttggtcaatgcattttcaacaatagtgttccaaccttgaaaagggtcggtacagtagaattgccgacttgcgtgccgattttgtgtcgatgacgcaaaattggcccgttttatacagtagcaacacactcttttacaattgcggacattgttcacaatttgttgtctctaatatatgttgttgttgttgttttgtttgtgtaattttgcagggatcaaacgaattggtctatcagctctcaaatctgcgaagaggaagagcggagaattaacgaggcgtgcataataaatatgattaaaaaaaataaaatcatttttaggtttgtaatatcaaaacgcaaggcattgaacttgttacagccgctttgccttcactgagcaatgaagcattccaacatttgcacaacgaattcaaattgttgcacaacaaaaacattgctgacagcatcattggttgtgaacagacttcagcggaggatggcacaacaacaacaacaacaccaaaatgttctttgggtgaaggtatggttcaacaccgcaactgcaaaatgaagaaatctgatcgggcatcttcgttttctgttgccggtggtggtggccgagcggcatcactttctggtaattttgtctgcattacctttacctccacctctcttcccctccctccaccttatcgtcccatccttccccgacccgaaaaatttattaaactgaaaagttcgtctcatacattcctattattaaaaaaaaaaaaaaatttttttagcaaaaattggaatttgaaattaaa

SEQ ID NO: 71376 - DNA, 882 bp, Heterodera glycines
  unsure (1)..(882): unsure at all n locations
atgcagcaaaatacgggcgaaagagaggacagaaagaaacggggcggggaaggggaaggggcggcggaaggcgaagcaaatgcgcgaggtgacaagcggcgcgagaagggccgtgccgcgaaagacgcgccgactgaggtgagtcacccgcgagaaggggccaagaaaaggcccaattaccaagtgcccccgcccccattagcgtggaatcctccgtcggaagagccgatgccaattcgacgtcgcccaataacgaatcgccggagatggccgtggcatcggcacgctccaacacagcttcgcaacaatcattcggatctgttaacgaccttatgcccgcaacttacgacagctgttcagcccaaaacatgtctccgtcctcctcgcagtcgagcgaatcgccgacggaaacaaacgcatcgccgatggaacaggtcaattgggaagggaatgtaagggaaagcgaggggggggttaaatattgtaggtacagtaggaaagaggtcagtggataaaagaatggggcatcaggtactgtattttatgggcaatgggaaagggaatggaaaaaggtgaattaaatattgtaggggaaggagtcaatggggaagagagagagagtgaaagggagagcaaaagaaaactgtactaattacagtacaccgaaggaaattgaacccattatttttaaaacaatgcccttttcttcttaggatggcgaagtgccaatcgctgactcttttcaatgcctgtggcataaaagggacaaaatnttcaccaaanaaaanccttttntntacctatntnaatnaccatntccganccgaacttttgaaggaaaagaaaacccattaaaaancataattaatacttgtagggata

SEQ ID NO: 71377 - DNA, 2433 bp, Heterodera glycines
atgatctcgcctggccatcaccaggaccacttctccaacccgtcctttggctctccgtcttataattcgagtccggacgaggaagagcagaaccgacgccaggaacagtcgtcgtcgccgtcattgagcgaaattgaagaaaaggaccacactttcctgaaaatcgacgttgagaccgaaaaggaaagttcgcctcaacaaatgcgaagtgcgggcggcggaatattccctcaaaactcggccaatttccaccgatacaacgtcaatgatcatcgcgcaacggtcaaaatggagacgaccgcggaaatgggcggagacggagagaaatgcggctgtattggcgaaatgccaccgacttcttgcgcagagaatgccatccccacgtcggcacatgcacctcccatctcaatcccatcgtccatgccgccttttccttccaatccgtcacagcaaccacaacacaccgtgagcaccaccatcttccaacaacaatggttcacccaatggctggccaacaatccgttctttgcctctgctcttgatgggtacttaaacaacaacaacagcaatatcagtgccattggtggaggcggtggcattaaagggctgctgacccacactcagcaacagcagcactcaaacgtcgcttcacacaaccacagcagcagtcagatggccatgctccaagcactgattgcggctgcaacttcgtccacttccgcttcgccatccttcgggaattactcctccgtcgttaatgcttcgacaccgatgagcaatggcgggttcaaattggcaccccaacagcagcaccaaccgccgcctaaaaaggcaaagacagcgaccggcggagggaagggaaaagcttctgcaaatgttgccgccgctgacgcttctcatcaccggcgtcagcagcaaaaggacacgaaaattgacggcggaattggagcaacgacggacaacgatctgctgagtgtgcatatccctcacaatcatttccattcgccgttcagcagcaacggatcggctaacagtccgacatcggtgagaaaagtgtaaaaagtaaaatggcggagggaatcatttgaatcccttttaaagaacgacggcagtaaaatgtgcgccctcatcgattcccttcttcacataaaaaaaagcagcggtcagaacagtccgattgatgagcagatcaaaacgaaaggaggacgaacgatccgagaggagacggaacggaggaacaacggaagacgcgagtgcccacacgagcgacggaaatggcggaaattgtttacggagacgagccggagacttatttcgaaaagtcggaaaagagcgagttggcacaggcgagtgaagacaaaattgaaacggtggtactgattttaaatgcattcccaaaatgggattagcattgatgggcactgtttatcgcaattccccttttaggctgcttctcccaacattttccccagcatccaaaggctaatgttggcccattccgccgaaaattgctcttcctcccttcattttccttcttcctcttctgctgatcatcaacaactttcgccagcggtctccgattctcagacgagcggaagcagcaacggaatgacgacgacgacaacggaagcgccgcgaggaatgaacagtccgccagcagcgacaaatccaacgaagtgccatccgacgggggaaagtgatgtgagtgatgagggaaccaattctgtggttatatcaaaatcgaatgggacaataatgactcaataattgcatattcggagactattcgcgttactaagaatggcttcagcaggacacaccgacaacagtgaccagcaaaggcagtggcgaattctcaggcaaaaagtcgcggggaaaggcggagagaattcgtcaaattgtcactcggatcaccacagcagcggaagaagtggcagaggaaaaggttcgggaagagctgatcgactgcgcccgtcaattgcaattggttacttcatctgccgaagaaaaggacgaagaagcgtaattattccgacaccaacattttgacacaaacaaatttatttcacataattgcagaatgtcatcccttttaaatactcattattttgcctgcgttttcccaaaaatctcatcttttttatgaaacgaaccatccaaaaataggcacaatttttttcgtcggatcgatcattcatccgtttatagttcaacacatttgatctataatactttgatttttttgcgttccattgttgttactttaaagaaacattgtatacttttccggcacaatatctcactagaaattttactgtcagcggatcgacccctggctcaggaaacattcaaatcacttttttttcttcattaatatttgtgactttaatatagaaaaatgctatcagattaatttacttctttttatgataa

SEQ ID NO: 71378 - DNA, 321 bp, Heterodera glycines
atccaaatgttttcccacccgcgccccttcttcggtcgaccgcggcattaccaagtctattaaatgtaacaccaacgcaatcagcaggtttctcccctttttttttgtcgtgcgtattaccttcatgcaaattttatcctgctaatttttgtgtcatcactaaaaggtctgttgccatcctcaaatcttcaatctttgctcggtgaagtgcccagcctcctcaaaaaccgaggccatcagctttttgccgtgcccccaaacattccgccacttcgcctctttgacgtgcatgagcaaaagcagcctttgccgaatggtttc

SEQ ID NO: 71379 - DNA, 814 bp, Heterodera glycines
cagcagagcatcgaaattgtcaatgcttttttggggaatcaccaaaaaaatccaaccgctcctctgaacaatactattctgagtcagctgacaaacaaacatagcgaaaatgtgccatcgctaacggcgaatttggcaccatcggcagaacaacagcagcctttgcccgtgccaccacttccatcagaaacttcttccatggacacatttatggtgccacctcctccaccgcctcctgtgagggtttgtccgtttcgcttttatgtgattgtggtggttaattaggacaacattcctttaatatgaaaaccaaataaattgtggactgtttaggcttgtcaaaattcccaatgtttggcggactctccgatggacatcgaagacgaccaagatgaagtcgaaacaagcgaaaaggaaagaaatgcaaaggaatgcgagaaaaaggggcgcaacaaaaaagtacaaatggccgatgaactaatgaagcgcgcattgaggccctattttaagtgaggaaaaaatcaaatgagttaaagaaaccgaatcataccgatttagaattatccctttaaacttacggtatctattgtcattcgaaagcaattttttgaatattatagttttgctgactgattttacttgtaacaattttaggcggcgacgaataacgaaggacgaatacaaagagattatgattaaaggagtcgcgaaactgaagaaacgccattcactgaaggccgaaaaagtcgagaaattcgtttctaaatatgtccaattagttgctgccaagcgcaagaatcaatttggctactga

SEQ ID NO: 71380 - DNA, 704 bp, Heterodera glycines
atgataaaactcaaatttcattcggttcataccaggaatgtgctgattgaccaggtaaggaaaaattattgcctaagaaactgatgatggatgatcactgaaacattttttttatatttggttgaatcgtgggatctgctggaggttgcagactgagtccacttgtgtttaatttttacatatacaaaataattaatttattaatttgttaagaatttgtcccaagcccaatcgcctgttgatcgtcgctcgtttatcgtacatgccaaaacttccgttacggtagctgatcaccagcaacaacgccatacgtttaatcagcttccacaaccgtggcgtgtgcacaatgatttgactgatgaagtgcttttgtttgagcatgtgatcaccaatcaacagcaacaacgagtgatttatttgttgcgcctgcggcgatgccatgccaatcaactgaaagatgccgacaaattttatgcaaaacattttgaagattttctttttttcaaagaccatccctgtaagggatttgttgagtcgccaaaattaattcttggctaattgttttcatgcaatttattattaattattgttatgtattcgcaaaaaaaaagaatttgttttttttattatttaaagattccgttgtgattttagccaaatcttttcttgaaattaaaattagcatttttgcgattaaaaataaa

SEQ ID NO: 71381 - DNA, 933 bp, Heterodera glycines
aaattcctcagtttcgtctgccttataatgtagtcgattttgaaattcaattggcaaaagacattggtgttaaggtaagaaggaatctttttttcaaattaaatttatttaaaagtaaaaatagtttaaaaatatattgaaaaactgaatatttttcataaaagaaatcaaatttaatcattaaattaaataattgtttttaaagattgaaactggccgttctctgcatcgtgatgatttgaccttagacagattgcaaaaacaaggcgttaaagcggtgtttattggcattggaatgccggagccgaaacgggcaccaatgtttgatggtctaacaccggaaaacggcttttacacgtctaaagattttttaccattggtggcaaaggccagtaaatcaggtcaagaccataaataaacaattaattttattgaaaattaatgccattaatgaaaaaaaatatttttttgttgttcctttttaaaggaatgtgccattgtgccaagactcaattacctcgtttatctggtcgtgtaattgtcttaggtcagtccaaatattaaaattaatttaaataaaatttaaaaatatatatgttagccaaccgaaaatattgaaagaaaatttgagtacaggtgccggtgacacagcgttcgattgcgctacttcggcacttcgatgcggtgcccttcgggtcactgttgtattcagaaaggtctacttattgagcgacaattatttagaactctgtttttattttttcaaaggatcgttcgaatgaatattttttttggtagtcattgagcaccaatttttttgagtccaaatttggacaatccaatggaatcggactctaaaatcgtaaaacatcaataaataaatatatctatagggatttacttcaatccgtgccgttccagaggaggtaaatt

SEQ ID NO: 71382 - DNA, 350 bp, Heterodera glycines
atgtattctaaggcatacgtcctttttatggattttatgcttatttgtaccaaaaagcccaatggtaaatgcatttttaggcccacaattggagagaaatttaaacaagtcttcgttattaatttgtagaagcgaaagataaatacgtgttttaatgaaaaattattaactatgttaaatataaactcaaaatagtaaagacaaaagaaaccaaaagtatcttatatatatacttagaaatatattttaaaaaataattgcagaggtacaagaaatttttaacaataaatgaccataaacataatattttttaaaatttttggtaatacatcaaattctaattttgaata

SEQ ID NO: 71383 - DNA, 331 bp, Heterodera glycines
tcttttgctgctccttattgctcaagcagtacagaataaaatgaattttcctggcaccgaaacgtttagagaaatgccaatcattcaccagcagaagaagcaggaagtggtggacagtgatgacgaaagcacaacctccttctcgtcctcatattcgtcctcctccagctcttcgagttcaacagagtgccaaagccctctgttgaaattgggcggccgcacgctgttcaacaagccgacaatttgcagaaaggttgccattacaaaacactcatggacaaagggcacggcggaggccaatttaaataaaaatgccgttcccattgtatga

SEQ ID NO: 71384 - DNA, 466 bp, Heterodera glycines
aaaatgtcaggttgtccaccatgaagtccactcttgtcgtctttggctgcactttcttcgaaatgttcgacataccggtgttttggccaattttggtgatgtactttatcgtgctcaccactctgacgatgaagcgacagattatggtccgtttttttggggttttcggtttatttttagacatacagtttttgaaaatgtttattttataataaaaacaatttttaaggaattttagaaaatttttaggttttcattgacaatttttttttcaaatttaaaaattccatggcaaattcgaagtcttggttttcagcatagtcaaaaatgtctcattttgaattttttgcttcattttcatccatttttcccattttagcatatgattcggtaccgttacattccgtttacgttcggcaaaccgcgcccccagggcaaggaggagaccggcaaataaacacacatc

SEQ ID NO: 71385 - DNA, 482 bp, Heterodera glycines
atgcctcagcaagcgcaattcccaattttacaacaaaggctcgacattgccttccaactcgtcgaattggaacgtcggcttggatggggagaagatgtgcaagatgagattaatgcgcttcaacaacaaatgcagcaattgctggagcaattgcaaaacctggtagcgagaggatcaacaggaagcgaaacgatacttttgatacgattatgaacattaatttcatccaaattccgaaatctctcccaaattttaaagttgtgtgctccgaatgtgttataaagacaattcatttttgatttaaatattttaaatttggcggcattttgttctcattatttttggttaattgttcactttccccgatgacatttttccgtaattttatgtaattggtaattttgtgctttttgcttctcatcttcaaattgtggtctcctaatttattttgatattattcatctgcttcggacttcaataaa

SEQ ID NO: 71386 - DNA, 674 bp, Heterodera glycines
atgctgcttatccaagcggcacttttctatctgccaaaatggacgcaggaaaaattgcttcaaaaatgtgagtgattttaagaaagggcaaaaaaaataaatctttgaatttaaaatatttaaatttaagtttataaaattcagcttgtttgttgacaaatgccgtggcacaatttgccgtggttaacgcattgaccggccgagggcaccgctggtggggcattgaagtgggaaaatcattgctcaatggtgatgaaataaaggtgaaaattgaaatatttcagcaaatttatgtattttcaaagcgcataattttatctaagtaaaatttcttataaatttcaaagataaatcgcgaaactttatcaagttttcagtagttttactctatatgcaattatttgccttggttcgaacactttcggcactttggtttaaattttaattagaaagttaattaaattcgtttttttgtcgaagacaccgaaagaaactctcttaatcactgcacttttgcccttttaaggatttgcccattttcccccgtctgatcacttgtgattctgtccttgctccgaacgtgttcgtccaatgccatctgcgcatcgcctggttcaacgagaagattttcttcctcatttggtaaattaataattccattttcactttttcta

SEQ ID NO: 71387 - DNA, 146 bp, Heterodera glycines
atggctatctatttttttgagaaattttctatgcaacaaacgctctcgaacatgaaacgaagtgcggtgcgccgtggccattttatttttcaaataatttttaaatttaatagatattccagaaaaatggctatctctttttttga

SEQ ID NO: 71388 - DNA, 146 bp, Heterodera glycines; identical to SEQ ID NO: 57274

SEQ ID NO: 71389 - DNA, 146 bp, Heterodera glycines; identical to SEQ ID NO: 62432

SEQ ID NO: 71390 - DNA, 905 bp, Heterodera glycines
atgctaagccaaccatttttttggatgaattttcctttttttctaaaagatcatctaaaacatccgtgccttggccacaattgtgcacacttttgctttgccgtgccaagcagtgatcagtcggctccgttgaagaggaaatgtgcatgcaaacaaggtgaattttgaatccaaattgagagacttgagattcttgacatgcattaatgggtcaattaaaaaatccttacctttcaaaaaacaaaaaaatcatttaattttggggcgagatgaatgtaaaaaaaaaagaataatttattaaattataacaaaaaatggattatgcaatcatttacaaaaatgaaaaatcaggacacctttgaaaataaagaatcatttttggttggttaacaataagtcagaacacataattaggtaattaattaattaattaattttatcataattaattaattatatgccaaaaaaagacgtttaatttgctcattttttcaggctacaaagtgaatccgaacaacgagttggcctgcattcgcgatatcatggagcctgttgagccattgtgtccgcgcaatggaagccaattccaatgtgccaacgggcgatgcattccgttggaatggtagggatggattaaattcggaatttaatatagcaaaaattaattaatgattaatttgatcccatttatatggaatttcgttgttgtttttaattttcattacattttattttttaatttttctcttttttggcatttttctcaataatgaaaatttaactcgtgtcttaaattgttcaataaaaaattgttttacacttaatttaggcgttgtgatggagaggatgactgccttgacggatcagatgaaattgacgaaaacactcaagcatcttgttataag

SEQ ID NO: 71391 - DNA, 579 bp, Heterodera glycines
atggcgccaggagtacggtcgcagggttggttcaaccccaaaaagtgatgaaaattgaacaaatttattttattttaaaaacactgcatttttcaggactaaagcagaccgaaaccgtgccaacagcagatggagaggggacatcgacccaagccgccgaaagtggaccatcaacgtcagccttggaccttcgtaagtcaaaaaagtcactaattttagaagcaaaaattaaattaaggccctcgttcaagcccaaggccattgtcagcgactccgatcaggcgccatgagcgtgtacggccaacaactaccgaaaaagcaacacacatggatttgacaacgatggataaggcaacagacgtggatttggcttatgaggacgccgcgacacaaaccaagcaattggacaaacagctgaaagagcaggaacaagtgatcagctttcttcaacagcaggtccgcaacagagacgcactgatcgctgatctgcgccgtcgattggaacagcaggcgaaggaccagccaacacgtaaattctgcagaatttttagagccatttatcatccaaattgtttttag

SEQ ID NO: 71392 - DNA, 312 bp, Heterodera glycines
atgttaattagtaaaaccatccaaaaatttcaaaaccatgtcagtgagcatttcgccctggttcagctgtgccaacagtttggcacaatgctttcgaatgtcattccggcattccgtccgttggacaagccgttgggagtcggcggcattggcattttgagtttgttggtgctgtgctcctccggctgctggcagaggttgttgggccgcatttggctgctctattatttaaatattttgcgtattaaaggcaaatcatttttttatataaatcaaaaattctcatttttcagaattttcctgaatttttaa

SEQ ID NO: 71393 - DNA, 1424 bp, Heterodera glycines
gaaggaaatgcgccgagtggacgaggaaatgcaggtgaattggaggggggggggagagaaatgccattgctatcatttgaacaatttgtgccattccgacgataagcaacggcccctttcatttcagcgtcttcgccacgagttcgaggggtaccgccccgccgcttcgcgttcttcgccttatacaacggcgggcactcagcccatttatggtaaattgactaaatattgtggtgggttgaaggtgggaggggggggggggggggaagcggatttcccaagtaaattcccgcgggcactaaacaacacagcccaaggagggcgaattgttgccccggggaaacagtggccgggagggagggcattcacttctctcccctcccccggccccttaacttggcatggcttttcgcctgtcccctcggggatttgctctgctcaaattcattcggccattccccgcattttaaaattaaccacaaacatttatttttggcggcttaaaaatgaaagcgaaattaaattttcgaatatttccgctcgtcaatcttcagaaatacttaaaaagaaccaaaagtggaaaaggaagggaagaaaatggcaattttggaacacagaaaagtcaccccgactcaacttgtgccccccaaggtggaggaagttcactgagcaatggcgcgggcggcggggcgatggcgcgccattcgccgacttacgacccgtacttggaaaacctaaagagcccactgatcaaagacgaaagtgacgggaaaacgttgaggctcaggtacaaataaaaatggacgtaatttgcaattaattacccttccctccccaaatggtcagattcgacgtcgcccaatacagacctgaggaagtgacggtgaaaacggtggacaaccgtttgttggtccatgccaaacacgaggagaaaacgccaagccgcacggtctatcgggagtacaatcaggtgaaagacggaagagataaagagggggggggggggggggaattgtggaggggacagaacgccatgaacagtccaaaatgaaacggagcgacggcgtgggagaggagaatcaatggcacccgtacaaagcctaggcctagcttaagcctacgtacaagatgcctttgtatgagttgtaatgaaaccgggaacggaacggggacaaagtaataggaaaataattggatttaacccgggaaaagcctatgagggagagtgggaaaacggaacgccaaaacaatttgcaggaatttatgctcccccgcggcaccaaccctgaacagatcaggtgggcagaatcatctccacaatctcatctggccacactttcccctccaattttttcagctcaactttgagtactgacggcgttctcaccgtcgaggcaccgcttccccaattggccatccaaaac

SEQ ID NO: 71394 - DNA, 717 bp, Heterodera glycines
atggtcgacgaagtcatcaaatggtggatccgaatcgcctgtgtctactcaaccttcttgttcctgcgtgacattgtccttccatgcacactcgcctacttgttcaaccctgttcgggtcacatttctcagcttaatgggagttcgacgtcagccgcttcaaccaatgctcggcaaaacgctacgacaggaggaagtgccgcttcgagaagttctccgatcacctcagccacgcacttcaccgcaccgttctctgtcacccgtccacctggacgtgatcgctcgcagtgcccgttaccaacaaactcgagcgcaaagcgatgcaaatctggcagaagtcgacaccccgttcggacgacgaacgcgacgaagagaggagcactgaggaccacgaggatcaaggaacagacgagcccaccgagaaggaacagattagcccccacgagaacgaatgatggatgaacccgatgcctcgggaatgtcgaaattttcgtaaaatcaaaatttgattttagcgttaaaatgatgtaaaaaagggggtgataaggggatggtatgactgatcgatttccctcccgtgtttgtttgtttttaatcccttccccgcccgttcctcatcctgttcctccccaaatctccctccgccgcaaatttgccccacttttttctcccgcaatcgcaactgtgcgaaattgtacgctcatttccccccccccca

SEQ ID NO: 71395 - DNA, 603 bp, Heterodera glycines
  unsure (1)..(603): unsure at all n locations
atggacaacaccgccccaaaaaaattcttgacttcctttgaccagcttcaaattccccccgaaattgacaacgacagcaccattcccgactacgcaaaactgcttattaagcaattgcagtcgctgttggccaccgcgtcgtctctggttcaatctcaagtgacggcgaatgacgcgattgaggaggaccgcagacaacggaccgttgtcatcaccaatgtgccggagttccaatccgggaaaggttcggaacgtggggaggcggacagagcactggtcaatttgattttggacacagtggacctcgatcaaaccccagtggtgttccgtgtcggcatgcgaacgcctaacagagcgagaccgctcaaaatggaatttcccacaaggcatgcggctcgacatgtgctcagaatgaaaggcaaggctctggctttgaatgctctacatggtgcgcggatcagggaaagcatgaccaaggagcaattggccgaacgtcggaaattaattgagcagtgcgcaaagaaaagaaaagaggacgcgggcgattggattatctacgcgaatcaggtcatcctgcgcagtgacattgacancaattcgtaa

SEQ ID NO: 71396 - DNA, 661 bp, Heterodera glycines
aacaaaaaaatcgattttttcaagtgtccgtttggggtactcaaacaattatggggagcaaaaatccaacgcagaattaaagtacagactatagggaagctattcccgaaggattcggtctccccataaatctgggcgcatcggttcggggggaatgccccgaaaacaaaaataaatcgattttttcaagtgtccgtttggggtactcaaacaattatggggagcaaaaatccaacgcagaattaaagtacaggctatagggaagctattccggaaggattcggtctccccattaatctgggcgcatcggttcggggggactgccccgaaaacaaaaaaatcgattttttcaagtgtccgtttggggtactcaaacaattatggggagcaaaaatccaacgcagaattaaagtacaggctatagggaagctattccggaaggattcggtctccccataaatctgggcgcatcggttcggggggactgccccgaaaacaaaaaaatcgattttttcaagtgtccgtttggggtactcaaacaattatggggagcaaaaatccaacgcagaattaaagtacaggctatagggaagctattcccgaaggattcggtctccccataaatctgggcgcatcggttcggggggactgccccgaaaac

SEQ ID NO: 71397 - DNA, 867 bp, Heterodera glycines
tacgtcaacatcgatcatacgacaggctctcgacacttacaaagatgtccaactttctcgcggaaaagtaccaagtggtcttgaggacttcgtcaatcggattttcaatcaaaacttggagctgaaagaatattctctggttgttggcttttcctcggacacgcgaagaattgatatgattgagagaactgttaacgctgtttcgaaggacggtgggagtacaacgacaattcttatggacacattgaacaagctgtacgagtctcatttggacgtcgaatttcatgaccaagttctcgggttgataatccgttttctggagtgccaaaaagagccgaattatttcgccttatcgcaggtaaatatatgtgtggtcggctgtttgttttatcccagtgattttagtgtttggttgaacttaaaaaagctcaatcagtggccgaattgttggaccgtcttcttgtccaggcaggcgtgcctttttttgaatttaatgccctaatcaaaaagatatttttgatgtttgcagaacaacgctctgatggcgtatcagttggcatttgatctttatgaaaatgcaccgcaggagtttttgaaccaaatgaagatgcatctctttccgagcagtccatccaccgaagaaccaaagacagagacaaaaacgcctgaaaaggaaaagttggaacgaattttgagcggcgtggagaccatcaaacatcacatgcaatttctcataaagaacaatcacaccgatatgttgatattgaggcagctcaaagacgcttcacgtgtgaattgcacacataatgctgtggtaattgccaatggattaatgcattgcgggaccacttgtgatgactttctgag

SEQ ID NO: 71398 - DNA, 497 bp, Heterodera glycines
atgaagctgctttcagcgacaccggactcatcgatctcgcacgacaactcttgtcaaaatgaacggttggcattatgcgataagattaattacttttcgaatgtatacattctttggtcagcagactctttcgccaattcgattatttttgatccatttacgcgtcccgttatgcgtttcacatcgcttatccaccccccccccccattaattgcttttggtttcccatttaaataccaaattgtcttcctccccctccccccgttttcacctgaacttcgtctcagtcccatcagagattcacccccgccgggcattggtccgttgcccaccgccatcactgggctaagcgatcgctggtgccaatggctttggttgtgctgctgctgttggacaacggcgcggtaaagatgcataaacagagggatggatggttaatggagtgtgtgattatgaccattattagagacatgattaattaattgaaaggaaataaa

SEQ ID NO: 71399 - DNA, 2464 bp, Heterodera glycines
atggccactgactggattcataatgcttatcctgaacaagcattaggaggaggaggaggagatgaacccgtcaatggcaatgtaaactggcttcaaattatggacgacgacgacgatcaaaatgagaaaagagagatgcaaagcgaggtggacgaggaaaacaaaatgaaaaaaggtttttgctaataaaaacgatttttttaacattttttattcagcggaaattgcaaaagtcataccaagaaaatgtagctgcggtgggaatgggcaatctcaacaacaacaacaaccgcaacaacaacgagaaaagaccgaaatgccattaattgagcatctgtgtgaacggtacaagtgttcaaccaaggaactggaagtgttgttccagaacctgaaatcgcggcgccaaatcttacaacacatgcgcttcaatgttcgtctccgtacaaactacttacatccggcaaatcgaaactttgtggtgcagtgtaacgatttgtcatccctttcggcaagtgaagcatttgcaatgcgtggatatttaggcattacggttggtcatataaattggattttgtatattaatattatattttattaggtccaaacctacttctatgttaaacatggagttcgtcttcgtcatccaaatcttccatgtgcgattcgttttggaggacgcgaccatcatgatttattcccgatggaatgcttgaacgtagttaaacagatctgagaaaaaatatgcaatcaaccgaatctataaaaacatattttgaaattgtatgcccattttttaagaaaaataataaattgatgcttgacattcaaaattgcacagttactttcaaagtacttaaacggccgttgaacaaaaccgagtttttggcaatcgcgcacaacggcgtgaatgttgaatggaatccgcgccgttttcatgccataattatgcgacttcgttacaccccgagaacagtggctgctctaatttttcaatctggacgtgtggttttaactggcgtgcaacacccggaccgtgccaagaaagaagcaaagcgcgttttgcgccgcctccgtgcttcacttcgatgcgccaacattgaaactacccttttgctgctgattttacgtgtggttaacattgttggctcacatacatttactcatcgaatacatattacgcatctcgtgccaatcatgcattcttcgactagcttctgctctgttcattatgacccaacaatatttccagctcttcggtgtaaaataaaattaaatgatgatgatgatgatgtttatgcaacatgtattatgtattattctggcaaaacaattctgacgggggtacgctcaataacatatatagacagtgcattttccattttgtcatcatttattagcggaaacaataaaaaattaccatgacctataaaactttttctcccattattactattatggttatgcgctttttgcttatctcactccccgcccatcgaagcacgtcattagcaagtaagcgattttttttttgattgattaaagtatgaatttttaagcatccgagaagtcatggaacagtattgcggaatcggttgatcgcaaagccagagataacaattttcaatggcctagcacacatgaaaaaggcacatgggcagcagttgcagcaactggagaagaatcaagggcgagagcgcagacaggagcgaatgtaagggatggtaatgaaatggtacaagcagaagcgataagcgaacgagaaggcggggttgcacttgctgctgcgacgaaaaatgcattatcggaacgcgggagtgaggttgaacaacaacatcagcaggtcgtagtgatggcccgtggaggagcaataagcaatggggatggtgcccgtgcaaaagcagaggccactggtggcgctaaaagtgttgttgaaacgaggattacggaacatcacggtgaagagaggctagctgcagctacagccgtcatacatagagaggaaaggagagaagaaagaagaagaaaaatacgcgtaagaaacagagaccgacaacaaggaggagaagagaggcagcgcggagaaggacataggcagtctcacccaaacgaaagacacaacgacaactttcacagttcgctacaattgaatttaccgcccaacagaatgaaccgaagggaacaggatgaacacatgcatcattcacgagatggtttgatgggacagtcgaacaatcaacaaggagaagagaggcagcaaggaggaggagggcataggcagtatcgcccaaccgaaagtcccaacgacaactttcacagttcgctgcaattgaatttgccgcctagcagattggaaggaagggaacaggaggaacgcatacatcattctcgagatggtttgatgggacagtcgaacaatcagcaaatgagaaaacgaattcaacgagaatgtttttgcacgtgctaa

SEQ ID NO: 71400 - DNA, 209 bp, Heterodera glycines
taaaaattgaaccagaatatatataaatgtttagatttaagaaaaacaactttttttaatggagcaaaattttcaaatattcaatgtggatgacacaaaatttcgacacccatttacattgaccatatctggcagtacgggaagtggaaaatcagagtgggttatgcgctttttgaaaaatgttgatacgcttataccaatgggccaat

SEQ ID NO: 71401 - DNA, 520 bp, Heterodera glycines
atgttgagacacaagttacaaatggaagacgatgttggggctattctgttttttttgaaggagttgacccaatatagtgcccgcataatagttgtatgccgcaatagtcaaaaagtcacctttttagcattatgtcccccaatggaatgccaaaagcaaggggaattatttcaatcaattaaacaaaatttaattgaaagtattgggccgtattcatttgtggggtaagtcttttcgtattatattcaaattattattattaatattattattaattatcttttttaattttagtttggacgagccgcctgcaattaaaaaatgaatgaagtaatctattgattgtttccatgttgtacccattctaatcaacgtatatgtggtaattgaatattttgtagttcactgaccatatcatttgcttcactctgggtaatatgccctaaacgtttcataaaatttacaattgaaatccagcagagcagtaggatgggaaatattataagataaaggccaaaaa

SEQ ID NO: 71402 - DNA, 740 bp, Heterodera glycines
atggccactgactggattcataatgcttatcctgaacaagcattaggaggaggaggaggaggagatgaacccgtcaatggcaatgtaaactggcttcaaattatggacgacgacgacgatcaaaatgagaaaaagagagatgaaagcgaggtggacgaggaaaacaaaatgaaaaaaggtttttgctaataaaaacgatttttttaacattttttattcagcggaaattgcaaaagtcataccaagaaaatgtagctgcggtgggaatgggcaatctcaacaacaacaacaaccgcaacaacaacgagaaaagaccgaaatgccattaattgagcatctgtgtgaacggtacaagtgttcaaccaaggaactggaagtgttgttccagaacctgaaatcgcggcgccaaatcttacaacacatgcgcttcaatgttcgtctccgtacaaactacttacacccggcaaatcgaaactttgtggtgcagtgtaacgatttgtcatccctttcggcaagtgaagcatttgcaatgcgtggatatttaggcattacggttggtcatataaattggatttggtatcctcatattatcatactaaatacggtactgaagccattataatagttttcccaaaattattttacattaatttacctaatgttttgtgctcctcttgtgtgaggaaagatttggaaaattataaatattttgaaaaaaagattattgcaaaattctttta

SEQ ID NO: 71403 - DNA, 748 bp, Heterodera glycines
atgtttttagtagagttcgacctggacctggatccaggcctggatttttcctggatccaggtccaggggattttcctggatttttgtccagaaaatccaggtccaggcaaaacacgaaaaacctggattttcctggacaaaattttagaatttattatttcaagtgaccgatgttttttcacgttttcaaaaacagattaaataaatttaaaaacacattattattatttattagatatttttagatgcttctaagcaaataattaattttttcaaacattcttttgatttttaaaataaatttcaaaaaatccaggtccaggcctggatccaggtctcgaggagcctggatttttcctggacctggattttcctggatttttgtccaggaaatccaggtccaggtccaggcatttttcaaaatgtcgagctctagtttttagtagtatattcgcttgaaaaaattattcaattattttatcaaaatctctttttgtcatttttcattattttagaacattttgggaaaaggagtgactatttacacgttttttacagcgcgattttttcaaaaactttttgggaacttggaggagggtacggcggtgccgataggcgccgccgggaaaatttcacaaattttgaatgaaatttgcgatgaaaaatgagttaactttaattaaatttattatttaatttatttaaaaatatttggcattctgtcttagaaaaattttcaaaaaaatca

SEQ ID NO: 71404 - DNA, 1733 bp, Heterodera glycines
atgacaaatagtgacccgagtttggccacttccgcttttctgactacgaatttcgactcaacaatggacccgctgttttctcctcccccggcaccgattgtgccgattttaacggcagaggagggcaacacattaatgagtgcgggcgactcaaatgacccaccggaactgcgccattgggccaacatcggagaaacaaagtggggggatgatgaatggagatggaataacgaccgatttaagtgccttccatttcttgcatcagctggagaatgagttgaggaggtcgcctccccgttcgcttctttcgcctgacaatttcactcctcgtccgtctgatagcaattggtttgactgtacacatttcaatattcattctcttgaaaattgcctcgtttacagccatcagcctaaacatttgtcaactcaaaagaaaacaaatgtcaaacggagggaccgtcgccgttcgtccgcttttgtgccgtccgctcgttccaaagaagaattggagagtttgctcaatggcaacatcgacccgaacaaaccggtggaaatgggggaaaaggcgaaataacggacacagagagttagttggaaagatgaacaaaacaatgcctgttcaggtgcgcaatgtgttggttgaggcgggcattggggcggagtttggacttcgtctaaagtcatcttcgactcttccgacgctattcgagcgaaattttgtgccggcaattgaagtgccaaagtgccggggaaacataagcaaaggacggaggtcgatggaattggcaaaagcaatgggacaggaggagggggagcgatcagggttcgaatctcattggaccaatttagagcttcttttaattcatttatttgaaaggctccgtccactgtcccacccttctgccgccacaattcttcccatttatttcactcccgctgaattaccaacaaatcatttgcccgtttttactaataagccacccagcgacaaaaggtaaaaataaaatttctttattttttaaaaatacaaccgcttcaaaatttgcctctctcaaattaaagatttacctggtcctgacattttcagttgtgtgccaagctctactcatctgctaaacaatttgggaccttcctcatcgatggaagaacagcggacaaagcgaaagaatcggacggaaagtgttcaaaagatggaccagccaatgttgagctcgcaactgttcacccagaagatcccttgttcttacaaaggatgtcaggtgacccaattaatcgggtgaatttggagtcaaatgaattttcatttcagaaaacatttgtgaaacaaagcgcaatgcgaaagcacttgcaaatccatgggccccgtcagcacatttgccaacagtgttcacgctcattcattgagcgttccaaattgaagcgccatttgttggtccattcgggcgagaaacgtttcgtttgtgactttgaggtgactgaccagtggggttgtaaaaaaggattccttttaggactgtggaaagcgtttctcgttggacttcaatcttaggacgcacattcgcacggtgcacaccggcgaacgcccttttcagtgtccattctgtcataaacaattcgcacaatccgccaatttgcgcatccatcgacgttctcacaactgtcgtcccacggtggacggaggaaaggagaaacagaaaaatggagcaaatcggcaaaaagtcacgtcgtgctga

SEQ ID NO: 71405 - DNA, 133 bp, Heterodera glycines
atgccgcaccgccaccaatcggtcggagatgacatttccttcaacaacaatcagtcgaaacacagcgaaattgttgaaaatgagctgttgacggttgctgaacgcaatggcgaggaactggagatggttccgg

SEQ ID NO: 71406 - DNA, 84 bp, Heterodera glycines
atgtcggctgaggaggctgcaagactttcttggatgtccgcttatgagagcggcaaagaatcgggcaaattacggatttctcgt

SEQ ID NO: 71407 - DNA, 849 bp, Heterodera glycines; identical to SEQ ID NO: 9433
  unsure (1)..(849): unsure at all n locations

SEQ ID NO: 71408 - DNA, 1248 bp, Heterodera glycines; identical to SEQ ID NO: 9434

SEQ ID NO: 71409 - DNA, 368 bp, Heterodera glycines
atggccatagaacgggaaggaaatcaaaaagaaaaggataagccaggccaagttgggactgaatgcaagcacaggatggagacactaagcccaaaaaaggtaaaaaaaaactgaatttaaaattataaaaatggtaatttatggaggaaataatacgaaaatagaaaagcaaaaaatgaaagggttaaaagtaacagaaatttgataaaataaaatatatctactatacaattattaatcttaagactaaattaataatttgggtagcatattaggctcaaaaatcataaacacttaaaaacggcagagaaatagcaaaataagatataaaagggcataaaacgcttgaataggcacaaaaaaagcaa

SEQ ID NO: 71410 - DNA, 882 bp, Heterodera glycines
  unsure (1)..(882): unsure at all n locations
attacctcccctctcacagcaactccgttcctcgccgcaggttggccctggtggtggctgttgctgctccttctgctcctgcttctttgcctgctcctctgctgtctgctcgcgtggcttttagcaaagtgccgtcttagcctttgattgatcctctcactgtcccctcactaattacccccctaataatctttcacttttcctttcccaatttcccttttaatttttcttttgtttcattcacttctctcttcagaaaacgccgccagcgatatgtgaacggaagagaaagagaacgacttttgagggacgaaaagacggaacattacgaacgaagccgaggcgattttgaggacggatacgcacacgggtacagggcggcgagggcaggcggacgcgctgaagaggactaccggggcagggacgaggcattccgggtaggaacagcggatcggcacgcgtaacccaccaatccgatgtttaaggaggggtacgcaaaagggttgcgcgacgcgggagaacgcgggatgagcacatccatggccaacttggcacaacggcccacccagcgcctcggctactcctccggatacatgcagggcttccgggacggaaactcgggcgttttcggtgatcgcatcagcgagagtctgttgcgaaggttggaggagcagtatccggacaacgaggagttcagagccggttacattgacgggttcaaagacggagtcagcggaggacgcgtgagtgaatgagtggttannacgactgtccaacggngacatattttggccattataatcccccagtttggccatttcagacctttcgagactcccgccgcattcagcaaagtctgaccgaattgacagaacgactgac

SEQ ID NO: 71411 - DNA, 645 bp, Heterodera glycines
atgccaattacaaaaacggaaacagcagcaacaacaacttacgacggaagtgcccagaagaccaaaccgagacaaaagaccagcacaatcaaaacgggaagaaccagcacaaagccatgccgaagggacaaacggtgcggagacggcggggacgaagcggcaacttctgtcggagagatcaaaggggacggaatggccggaggaatggggacaagaagaggaatgcccgaggggacaagaaaagatattgaaatgacaagaaaaagaagaagcacacagagagaagagggggtacagtaaaagaaatacgataaaaaggaaaagcaaatacgatagaatactgtaaagccaagggaatgcaaagagtgacattttggaccaactaacaaataagctccgtccccccccccccaattaacctttggcttaccgtcggctctgatctttttgttgtaagccatggattaaaagcgtgaatgagaaagaacgacaagagaacaaccaaaggatgagtggtggtgaaagagtggtcgtagtgaatggtcggtcggtcatccgttggatttggctcccaaattgcccccatttccccccccccccattttcaatatattttttagtgtccaggtcaacactaaggagtga

SEQ ID NO: 71412 - DNA, 343 bp, Heterodera glycines
atgtggagattgaagacagccgaacagaggaagaagtatgagaatttgaataaaatacttttaaattcctgctttcatcaaggtacttgttgacattccaaccacggatgaacctgtcaaacttgtaatacataaatcaattaatcctaatttatttttaattatatcggatatttatttatttagtcgaatatatatttaaagcggatataattaattatatatttgtttattaatttagttgttgcatgcagaagcgaccacaaaaccgggcaatggacaacaccaaggccaagtcgcagttgactccattcaatttgatgtaattacgccagtaattaaa

SEQ ID NO: 71413 - DNA, 279 bp, Heterodera glycines
atgtgccttaggaaattgtcctgtgatttttcaaagcgtgcaattggttgtaaatgggcaaaccctgaaggcttggctggcgatgttaatgcatgggaaattggtgtcagaaaaaagcaaaaagatgcagccaacacactctttggtaattaattaattaaacataggtttattgattgtcattaaatgcgctattttagatggtgatattgcattggcacagttgcacaaaaatgcgcccgcctatttggtgtccgaaacaattcaggcataaataaa

SEQ ID NO: 71414 - DNA, 156 bp, Heterodera glycines
atgcctcacgtcatcgaacacaaaatccgtctgctcggcagtccctcgtcccctcaccgttcgccacccccgtcggaattcggacggtacgtcgaactccaaaaggacaaaagttgggccgaaatgccatttgagcgaaatgatgccaaggaaaag

SEQ ID NO: 71415 - DNA, 1095 bp, Heterodera glycines
catttcaatcactggcactcaacccactaacatttcaatcactggcactcaacccaccaacatttcaatcactggcactcaacccaccaacatttcaatcactggcactcaattctcctgcatttcaatcactgggactcaacccaagagcattccaatcactggactcaacccaccaacatttcaatcactggcactcaacccaccaacatttcaatcactggcactcaacccaccaacatttcaatcactggcactcaacccaccaacatttcaatcactggcactcaacccaccaacatttcaatcactggcactcaacccaccaacatttcaatcactgggactcaacccaccaacatttcaatcactggcactcaatccaccaacatttcaatcactggcactcaacccaacagcatttcaatcactggcactcaacccaccaacatttcaatcactggcactcaacccaccaacatttcaatcactggcactcaacccaccaacatttcaatcactggcactcaacccaacagcatttcaatcactggcactcaacccaccaacatttcaatcactggcactcaacccacagcatttcaatcactggcactcaacccaccaacatttcaatcactggcactcaacccacagcatttcaatcactggcactcaacccaccaacatttcaatcactggcactcaacccaacagcattccaatcactgggactcaacccaccaacatttcaatcactgggactcaaccctccagcattcaatcactgtgactcaaccctccagcatttcaatcactgggactcaacccaccttaagatgttttaccgggcggggggagggctcggaagcggcgcctcacttcctaacatttcttattaacactttgtcttttttcttgctggaaggtacgggcttggccgcttcacggcctcgcacttatttttcttcctttttagcattttcatatggtcagacatttcttcttaatatttaatgacaaaaaaattttaaaacttacttggcaaacgttaatacaaaaataagtgtaaacaaatagtcatttattaataaa

SEQ ID NO: 71416 - DNA, 745 bp, Heterodera glycines
ataatactcataaaaatacaaataattcaacccacctattctatgaccacattctgaaaaaaatcccagaaatacgaggaaagatatgcttggtcacaataaaataaaaaatggctagtatgtaaaaatttgcggtcactaataaaataaaaaatggctaatatgtaaaattggcgtccagaaatttttagactaatccgaagcaaagcacgaatgaattaaagaggcgaaagaattcacagtatcgtttctaatagggaaatattgacaggatattcggctaaaaacgggtttgatcatttttagcgcatttttaggtatacatttgagacaattgggcaggacaagaaaagaatgaagttgatgcctcatgaaactcggaattggttatgttttgtcgaaaatatccttacataatactcataaaaaatacaaataattcaacccacctattctatgaccacattctgaaaaaaatcccagaaatacgaggaaagatatgcttggtcacaataaaataaaaaatggctagtatgtaaaaatttgcggtcactaataaaataaaaaatggctaatatgtaaaattggcgtccagaaatttttagactaatccgaagcaaagcacgaatgaattaaagaggcgaaagaattcacagtatcgtatgtaatagggaaatattgacaggatattcggctaaccatgtggagtgatcatttttagcgcatttttaggtatacatttgag

SEQ ID NO: 71417 - DNA, 664 bp, Heterodera glycines
tcaacccaacagcatttcaatcactggcactcaacccactaacatttcaatcactggcactcaacccaccaacatttcaatcactggcactcaacccaccaacatttcaatcactggcactcaattctcctgcatttcaatcactgggactcaacccaagagcattccaatcactggactcaacccaccaacatttcaatcactggcactcaacccaccaacatttcaatcactggcactcaacccaccaacatttcaatcactggcactcaacccaccaacatttcaatcactggcactcaacccaccaacatttcaatcactggcactcaacccaccaacatttcaatcactgggactcaacccaccaacatttcaatcactggcactcaatccaccaacatttcaatcactggcactcaacccaacagcatttcaatcactggcactcaacccaccaacatttcaatcactggcactcaacccaccaacatttcaatcactggcactcaacccaccaacatttcaatcactggcactcaacccaacagcatttcaatcactggcactcaacccaccaacatttcaatcactggcactcaacccacagcatttcaatcactggcactcaacccaccaacatttcaatcactggcactcaacc

SEQ ID NO: 71418 - DNA, 861 bp, Heterodera glycines
ggcaggacaagaaaagaatgaagttgatgcctcatgaaactcggaattggttatgtttagtcgaaaatatccttacataatactcataaaaatacaaataattcaacccacctattctatgaccacattctgaaaaaaatcccagaaatacgaggaaagatatgcttggtcacaataaaataaaaaatggctagtatgtaaaaatttgcggtcactaataaaataaaaaatggctaatatgtaaaattggcgtccagaaatttttagactaatccgaagcaaagcacgaatgaattaaagaggcgaaagaattcacagtatcgtttctaatagggaaatattgacaggatattcggctaaaaacgggtttgatcatttttagcgcatttttaggtatacatttgagacaattgggcaggacaagaaaagaatgaagttgatgcctcatgaaactcggaattggttatgttttgtcgaaaatatccgtacataatactcataaaaaatacaaataattcaacccacctattctatgaccacattctgaaaaaaatcccagaaatacgaggaaagatatgcttggtcacaataaaataaaaaatggctagtatgtaaaaatttgcggtcactaataaaataaaaaatggctaatatgtaaaattggcgtccagaaatttttagactaatccgaagcaaagcacgaatgaattaaagaggcgaaagaattcacagtatcgtttctaatagggaaatattgacaggatattcggctaaaaacggggtttgatcatttttagcgcatttttaggtatacatttgagacaattgggcaggaccagaaaagaatgaaagtgatgcctc

SEQ ID NO: 71419 - DNA, 629 bp, Heterodera glycines
agtcttccggttccgggggaagtatggttgcaaagctgaaacttaaaggaattgacggaagggcaccaccaggagtggagcctgcggcttaatttgactcaacacggggaaactcacccggcccggacaccgtaaggattgacagattgatagctttttcatgattcggtggatggtggtgcatggccgttcttagttcgtggagcgatttgtctggtttattccgataacgagcgagactctagcctactaaatagttggctcattgcttctgtgggcacaacttcttagagggattttcggtgttcagccgcacgaaattgagcaataacaggtctgtgatgcccttagatgtccggggctgcacgcgcgctacactggcaaaatcagcgtgcttgtccttccccgaaaggggttggtaaaccggtgaaaatttgccgtgattgggatcggacattgcaattattgtccgtgaacgaggaattccttgtaggggcgagtcatcaactcgctctgaatacgtccctgccctttgtacacaccgcccgtcgctgcccgggactgagccatttcgagaaattcggggacggttagtgttccggcttcggtcggtatgcagactggaaccg

SEQ ID NO: 71420 - DNA, 314 bp, Heterodera glycines
atgctaattggtctacgtgaaatgtcggctaaactccgttccgacatcaagcataatggtccgtgtagcattgatttatgcaaaccaattagtgtgctggtcggctcctccattagcatgcttttgtttggccacccgctgaaagaggtaaataattagcgattttctgaagcaaatatatacataactcataattgtggtttattaataaatttattaaattaataatatataattaatagagactggctggccgattcaaaagattcgatcttattgaaaaagccaaaaaaacttcaattaattcgtggtaa

SEQ ID NO: 71421 - DNA, 437 bp, Heterodera glycines
atgcgcgtgagttggagctttggtcagtgcactgtttggtcccgtgctcgtggaagtgccttttctcttacaagttccacgaacttttctatgctcattgtgcactttcctctcaacaaaatgcaattttttcgatggtcgcagcattttttgtgcgcttcgaattttgtcgctttcaatttaaccaatttcagaagaaggatggcaattcagcagaggatggcggcatcaaaattcttcgctatgatttaacttacgaaaagctatccgaattcgatttggacttcgattgtgtggacactttcgagggagtcactctcgaaagagtggcaatgggctgcggacagacggaaaatcggctgtttttgtacgaccggacaatggttaccggcgaaatccctttctggcaaatttcgctcgattggacaaaagtctga

SEQ ID NO: 71422 - DNA, 780 bp, Heterodera glycines
  unsure (1)..(780): unsure at all n locations
atggtgttttctttggaggtacattctttgtttttgaatntaagaaaaattaaaaaggcaatttaattaaatcgaattaattaattaaatggacgaaatattttttaagttttattaaaaatgaaataattaattaaaaggaattctcggctcgctgttctcatttctgcagtttctctcatcgcccatttttggctcattgtccgatttgcatggacgaaaatcgcttcttttggttgctgtgattggctcactgatttcatattgcgtaaaaataataaaattattaaaatttaattcattaattcttgaaatttagctttggtcactgtcatccgaaagtttttcaattttctttgtttctcgactgatcggaggcttaagcaaagcgtcggtttcggtagcgatcgcaattgtcactgacattatgccaacggaagagcggggcaaaggcatggtgagttaatgagcaaatgccaaaaagagagtcgaactttgaatttaatttacattatttaatttaatttaaattacaattatttaaatttttgctatttctagttaatctttgtttatttataggctttaattggtggctccttctccctggcttttttgattggcccttccattggcgcctttttctcgatcggtgcccgggaaagtggcgagttcaacccgtccccggctctactggcaattgcactcacactggcagaattggcacttttggtgttctttttgccggagacattggccaaggcaaaggcgcgtctctaa

SEQ ID NO: 71423 - DNA, 510 bp, Heterodera glycines
agtgatcgccgactgcgcaaatccgtgccgagttccccgcagacaattctcgttttggccggcctttttgtgtgcggcctcatccttctgatcagtggtcttattgttctaataacggtaaatagggaaggcataaaaaggggaggggaggggggagaatttcactttttttgttttggcattcagaattggcaaaacgcaaaagcaattcaaaacggatggtattaccacgtggctggctgtacaatgcttcttcttggcttttctgggctcggaatttgtgcacttttacagcgtaaaaacatcacaaaacttgcggaggacatgagcagagtcaaatttgggataattaaaaaaggattaaaataaataaatttaaaggatttgtttaatgttgctgcaaatgcggctgcttctgaagagaaaagggcgtcggaggaaatggcaatggttggagggaacaaaaagctgaagcgaatgttggcacaagtgccatcgacgatgatttga

SEQ ID NO: 71424 - DNA, 429 bp, Heterodera glycines
aaacagacatcaccactcattcggataaaataaacaaattgaccaatgctgttgaccaaattgaggtttcaatgatgagtgcagcagaggtgaatttaaaattaaatttcgagaccaatgcttttcatgcttattaattagcccaatgccttttaacaaacaattggataatatatacttagggttatgaaatgtaacaacccttttcagcaaagagacatctttttcattgtcataatttttatgaaattttatgaaatttttactaattttgcaggctaaaagggaacagaatgataaaaaacctcaaaaactttttttctaaaatggtattttaaaattagtggtcacttacgggttccctctacgacctaaataggtatttaattccaaaattttaaaaaatcctggcaaaaaatcgcctaaaaa

SEQ ID NO: 71425 - DNA, 626 bp, Heterodera glycines
  unsure (1)..(626): unsure at all n locations
atctttatttatatttgagaatatgccaacaccaatttgcgatacgccttcgataagcggtgtaaagaaagaccaatttgaagcgacaaaaaaagtttgttactaatttaagtgttaacccttaatacaacattccttttcagtggaggaaggccctcaaaaattttcacgagagtatgccattgtccactcaccggcgccagttgcgaacattcacagaaacattcactgggaaagatgcgttggattttgccgaacaaatctttccatcagtttttcctttatgcaacaccaggtcctttaattttatttatgatttaattttccatttttagggataagtccagacaacttttggaaagattcttatgctttgggtacattacaaatgtgcgtgatgaaaattgcaaaagcttctcagacaatggccactttgtataagtagggactgtattattctacagtaaatttgcttatcgcataagtcgaattctgtttggttttttaggttttgcaacgaacgaattgcccaaatactctcgagtagtcaggaagacganatgaattggaggcgaaatgtttttttggcacggtcgtcttcagtgcgcgacaagacataactgatc

SEQ ID NO: 71426 - DNA, 861 bp, Heterodera glycines
ggatacgaaggcggtgttccggaggaatctctcgactttttccgctcgccaatgtttttgctcagtgaacgcgctgcgtccacagaagaacccttggcgagtgaagcggcgcgtccgtctgaaaatgaacggcagcggaaggcggcggtgatcgcctgtcattatcaggtgatcaaagggaccgaaaatggcgagagaaaggcgatggcatttgttgtgggagttaaaacaaaacctgatcaggtccaaatcttcttcaacgatttgattgtttgtgcctctgatcccgtgccgctccattggccttcgttttgtgtcccatttgcccgaattttcgatttacgtgtgtttgaaagacccgagaaggtccggtgatcaagattaaattaatgttacagactaaaggttggtcttttttagattcgaattcgcctgatggagcgtctgtcacgaatggcaaaatggcaggaaattggggaagttttcttgcctttgttagctgaccataaaaccggcacttctgctgacgataatcgtaaggaagaaggatcgctggttggacttcaatttgcctccaccgtacaccggggaaggtgggactgaaaaagccgggaccaaatgggggaatgggggtggggtcagccgagagcactttttgtttttttcagtttcaaggacagtttgggctgtggcgggcaagcgccatttatgcaaggacgattattctgtgcactcaaatcaaccagtggaaaaagaggcgaaaagaatgaggaaagaaagggacaaagagaaaaggtaggaaaagggaaaagcaatgaaagagaaaatgatcagaagtcaaagggagatcggaatgaatga

SEQ ID NO: 71427 - DNA, 309 bp, Heterodera glycines
atggatcgaaaaaagactgaaattcttcaaaaatgtcgtaaacgcaaattcttggataacaatgacagcgaaaacgaagggaattctgagcaccgcgaacaaaacgccgaaaatgatggatgcgatgacgattttgaagaagaacgcgccatcatcaacttcgaactactcaaaatggaggcatttgtctttggtctgaaggtgggaaatttgctagaaaaggatgaaaatttgtcaaaggctttcggtacacacacgaaaaaaacgaccgatggaggtgcactgtgcgtggctgccatgcccgcgtga

SEQ ID NO: 71428 - DNA, 75 bp, Heterodera glycines
atgggcccacttggagctcaaacattcaacgcctgggttcagagtcaagcaaccctggcttcatacccatttaga

SEQ ID NO: 71429 - DNA, 1508 bp, Heterodera glycines
atgaccatcttttacgaaattaccaatggagaaaatccagcagagggaaacaatagaaaattgacattaaaatggcttcaaaatgatggtagtgcaattttatgcaacgaaaatttccaaaaaattcatgaaaatctcagaatcaaaaaaacaaatggagatgaagcattcattgagaaagcagaaaacaattggaacaatttttgcgcaatgtttaaaaatgggaaaagcatcagaaaaattgagacaaatttggtggaaagagcaaaagaatccgtgctaaatttggagacaatgccccctgcattggtgaaaaatatacgaaaaattgcgcaaaatgaaaattttaacgcggaaaataaacaaaaaatggccgaactattggaccaattcatcgttgggctgaacatcttccgaaaattggttggaggtcaaaagcatttaccaatttgtaaataaaaaataaatgcaaattttagacacattttggacagataaaatcgtgaagcaccagcagcagctgcagttggcacgacgaaagcgaagagcgaacttaataaagtcggcggagtgcctcttcagcattgggcttggggcccttgcggccactttgggcattgtcctcggcgcagacttgggccaaaagaggcacaacgacgtcgaatcctatttcgaactgaatgaacggctcgaagtggccggaatattcctttgtttcttccttttcgtgttctgtatcgtatacatttgcaaaacgtgccgttcgtgagagaagagacttttcgaaatgatgaaaggaattcaacacaatttgttggtctagaagggttttatgtaaattgttttttatctaagataaataaaatttatagattgtgaagaatgtatccgatgctcgaaacggccctcccgacccacctaaagtcacgataatctccaaaaaatcgactaaaaaggtcataaaaacccgccaaaagaaaaaaaacaccaaaaaaagcacaaaataaatgcaaaaaagtccagaaaaattaggtaaaagtgaggaaaaatgccaaaataatgacaaaaagtctgaaacagtgacgaatagtgatataattttcagccaaatattgagcaaaaataatttttattcacttcgaattctaaaacatccgactatcgctccgcccagcggaattggaggagcgcaggacaatgcaaaaggaatgcacggaacgaaggaaggccgaaccaaatgccgactggatcatctacgcgggaaacattgtcaagcgatcggagataccggcaacgcaactcccacaaacaaatgccccgcctcccgtcgagggaaatggacctgaacagaagaaggctaatgaaaacacatccaaatcgcaggttgacatcagtaccaaggaatttttaagcacccttaaccgcgaaatgcaagccattaaaaaacaatatcccgatcttgatcttttcaaaagacagttctgccaaacctccaacaattaaaaaaa

SEQ ID NO: 71430 - DNA, 117 bp, Heterodera glycines
ttatgatactagggctcggatttttaggcaaaagcctattttttttcctgagctccccgtggcctgaaacgcacgaaaaacatgtttttttgggctgttgttaagctacttttcgag

SEQ ID NO: 71431 - DNA, 641 bp, Heterodera glycines
agtgtccgtttggggtactcaaacaattatggggagcaaaaatccaacgcagaattaaagtacaggctatagggaagctattcccgaaggattcggtctccccataaatctgggcgcatcggttcggggggactgccccgaaaacaaaaaaatcgattttttcaagtgtccgtttggggtactcaaacatttatggggagcaaaaatccaacgcagaattaaagtacagactatagggaagctattcccgaaggattcggtctccccataaatctgggcgcatcggttcggggggactgccccgaaaacaaaaaaatcgattttttcaagtgagtgtccgtttggggtactcaaacaattatggggagcaaaaatccaacgcagaattaaagtacaggctatagggaagctattccggaaggattcggtctccccataaatctgggcgcatcggttcggggggactgccccgaaaacaaaaaaatcgattttttcaagtgtccgtttggggtactcaaacaattatggggagcaaaaatccaacgcagaattaaagtacagactatagggaagctattcccgaaggattcggtctccccataaatctgggcgcatcggttcggggggactgccccgaaaac

SEQ ID NO: 71432 - DNA, 896 bp, Heterodera glycines
  unsure (1)..(896): unsure at all n locations
tttaaagtttgttgcataaattcctaaataattaatatgacatttttcaatattttacgaacattttttaagaaattttcatttttgaagagtggcaaggaaaccgacccgaagcatgaccatgaacagttccttggcaaggacgaggccagacagtacgaggagttgacgccggagaagagcaaagaacgactcgcgtaattttcgaaaattacaacaaaaaaaaagtattaaatatttancagaaaattagtgccaaaaatggacctaaactcggacggtcaagtggatgagttggaactacgngagcacatcaatttcatgcagaagcgttatgtggtgcgtatatntaagaaaaaaaaattaattacttgagggaatttattttttttaacttagctgaaagattttaatttttttttttttgaaaaatttgactgtcttcttgggtttataatttttttattttaattaatttcggtgaaattttttaatttgaaatttttgattataaatttcgttttttatttttaaatttttcaatttattttcttatatctgactaatccttaaaaataaaataaagttttttttacagaacaatgatgttgagcggacatggaaaaattacaaggaggagcagctgaagaatggcttgctcgattggcaagactacaggtgaagaaaatctaacagagggcgagaagggtggaaaatttataaaattcttaaacttttcaggaatttgatttacggaaaaccacaggagggccaggagatttcaccggaatacgtcaaaatgattgagcgagacgaacgtcggtggaaggtcggaagcgggccgaaaagacctgctaatttatattaaatcgagaggctaacggccgaattttaat

SEQ ID NO: 71433 - DNA, 636 bp, Heterodera glycines
tttttggttgctatttatagaaggggtatataaagggagtgaaaggaccatttgattgatacacaaaaatgcaaaaaccgataatcgtaaatataattgctctcgctaatctcggtaccggaattaaactaaactctctgacgatcaccgaatgcgaatttaagtataaccctagaaaattcaatgccgcggttatcaaatgtacaactcctatcaaagccacggcattattatgggaatccggaaaaatgatatgtctggggacgaaaagtctgatagactgtgaaaatgctattaaaaaatttatagaaataattaagggttcggggtgtccgggggcttcttacaccggacacacggttgaaaatattgtttcgacctttaaattcggacgtgaaattgaactgaacgagtttcgaaaaaatcgtcgtgcattttatgaaccggaaatattttgtggtttaaatttcaagcggggtaaaagcatgacagcgttaattttctggaccggtaaagtcgtaattacgggaactaaaaacaattctgaaattaaggaaatgtatcatcatattctcccctatttgaaaatggctcaaaagaagttagggagacgataaaaaaattttcatttatggg

SEQ ID NO: 71434 - DNA, 201 bp, Heterodera glycines
ccgcgccgcgcagcgccgcggaaggtcatcaatcatccacctgtcaccaaagtgacaggtgaaggaaattcaattttttcttttgcaaatttaaatctttttgatcccaaaccttttgggccggttttattttctcaatcctgaatttttttatgatgatttttcggatcctgaaattaaaaattctttttgaaaattagc

SEQ ID NO: 71435 - DNA, 830 bp, Heterodera glycines
  unsure (1)..(830): unsure at all n locations
atgagcgctanaattatcagagtgctgaaaatcgcatgtgatctaagcctagcaaaaaatggtgtaagtaataatcgtaattacgctcaaaaagctcctcaaacaattttagcgcttccaattccttctacaatcgcctttatacatctcattatgaacgctaaaattatcagagtgccgaaaatcgcatgtgatctacgcctagaaaaaaatggtgtaagtaaaaatcgtaactacgctcaaaaagcttctcaaccaattttagcgcatccaattccttctacaatcgcctttatacatcccattatgagcgctaaaattatcagagtgccgaaaatcgcatgtgatctaagccttaaaaaaatggtctaagtaaaaatcgtaattacgctcaaaaagcttctcaaacaattttagcgcatccaattccttctacaatcgcctttatacatcccattatgaacgctaaaattatcagagtgccgaaaatcgcatgtgatctaagcctagcaaaaaatggtgtaagtaaaaatcgtaattacgctcaaaaagcttctcaaacaattttagcgcttccaattccttctacaatcgcctttatacatcccattatgagcgctaaaattatcagagtgccgaaaatcgcatgtgatctaagcctagaaaaaaatggtgtaagtaaaaatcgtaattacgctcaaaaagctcctcaaacaattttagcgcttccaattccttctacaatcgcctttatacatcccattatgaacgctaaaattatcagagtgccgaaaatcgcatgtgatctacgccttaaaaaaatggtctaa

SEQ ID NO: 71436 - DNA, 626 bp, Heterodera glycines
atgatttacaacagtgatagaagaggtgcaacagtgattaaaagaggtacaacagtgatcagaagaggtacaactgtgattagaagaggtacagcagtgattagaagaggtacaacagtattagaagaggtacaacagtgatgaaaaaagggccacagtgattaggagaggtacaactgtgattagaagagatacaactgtgattagacgaggtacaacagtgactaaaaaaggtacaacagtgatcagaccactttttcgccagaagaaaaatatgaaactcaaaataaatgttatattcatgatcagtggccaaaaatagcccagaaaaataattttcaggctatttttgaagaaaaattttgtccatctgaaaaccaaaagggtctccccttgggtcaggaaattcgaaacaacttttcgggtgataactttttttgaagaagtgatggataaatagtgaaaataacttttttgtagaactaaaaattacggatttttggatgattaaattttacctgtacccctaatatgaagggagttatgaatttttttctgaaaattcgaaattttttagaaaatttggaataacttttttcttattcgttattttaataccaaataaa

SEQ ID NO: 71437 - DNA, 85 bp, Heterodera glycines
taatcactgttgtccctcttctaatcacttttgtacctcttctaatcacttttgtacctcttctaatcactttttacctcttcta

SEQ ID NO: 71438 - DNA, 992 bp, Heterodera glycines
taattaaatccattccttcgggggaccgtgccgggtgccgcggggtaagcagtgctggttcgtttcatcacggcaccgaaccttttggctagtcagcaatcgttgcttaacttgccagatcggacgggtgcgcatgattccactgttccaagcaccccaccaaaagcaaaacgatataaccaaaatataaggaaaaattttttaaaaaattttttctccatcttcctttttgatactaaagcatcagagtgctaaaattaagttgtaaataaaatttggtgcgctttagagcacttcctgaaaaaaatatttatgaaacaaaaaaatcgattttttcaagtgtccgtttggggtactcaaacaattatggggagcaaaaatccaacgcagaattaaagtacaggctataggaaagctactcccgaaggattcggtctccccataaatctgggcgcatcggttcggggggactgccccgaaaacaaaaaaatcgattttttcaagtgtccgtttggagtactcaaacaattatggggagcaaaaatccaacgcagaattaaagtacagactatagggaagctattcccgaaggattcggtctccccataaatctgggcgcatcggttcggggggactgccccgaaaacaaaaaaatcgattttttcaagtgtccgtttggggtactcaaacaattatggggagcaaaaatccaacgcagaattaaagtacagactatagggaagctattccggaaggattcggtctccccataaatctgggcgcatcggttcggggggactgccccgaaaacaaaaaaatcgattttttcaagtgtccgtttggggtactcaaacaattatggggagcaaaaatccaacgcagaattaaagtacagactatagggaagctattcccgaaggattcggtctccccataaatctgggcgcatcggttcggggggactgccccgaaaacaaaaaaatcgatttttt

SEQ ID NO: 71439 - DNA, 263 bp, Heterodera glycines
cagtgccgatgattactacgcgctccgtttgctgtacaatttgcccgtcggatttgcaattgcgctgctcatttaccacttggcttggtaccggatcaacttcgccgactccattctgatcaacccgttctggaaggagttcgtcaaatggctgatgatcgtctctgccgccctgtcctattcgcttaatcccgttggtggtggtgatgttctccaacaactgatgcttgcttccacactaatggtcacttcgttttcagttg

SEQ ID NO: 71440 - DNA, 920 bp, Heterodera glycines
atgccaaaacaaacggaaatcgttttaaaatattcctttctggacttgacttggtttcttgatatcgaagctgttttctacgctatttctaaaacggttataccaaaccccagatttttgaatccggttttcagaaaaaatgccttgtggtgaaaacaatatttcacatttcactccataactttgtgagttcggcacggatcgagaccgggataagaccattggaaagagcagctcgagctctacaagaaggtatggaaagaaaaaatagttatttctgggactttttcagaaatcagaattaattctccaatgtggcccaaattttaggcccccagccacagccccttgcttctcccagttttaagtcttggatttgtcaaataaattcaagacttcaaattaataatcaaaaattctcttaaaatttttttgaacccaattcaaaaaaggaaaaaaatttgcagtcaaaaaattattcgaatttctccaattttgtttccataatttccgaaagttattcggtatcataatgccaaaacaaaacgaaatcgttttaaaatattcctttctggacttgacttggtttcttgatatcgaagctgttttctacgctatttctaaaacggttataccaaaccccagatttttgaatccggttttcagaaaaaatgccttgtggtgaaaacaatatttcacatttcactccataactttgtgagttcggcacggatcgagaccgggataagaccattggaaagagcagctcgagctctacaagaaggtatggaaagaaaaaatagttatttctgggactttttcagaaatcagaattaattctccaatgtggcccaaattttaggcccccagccacagccccttgcttctcccagttttaagtcttggatttgtcaaataaa

SEQ ID NO: 71441 - DNA, 1157 bp, Heterodera glycines
atgcttggagagcgcttgaagagctgcaccggatgcgagtgccgccgttgctgtacgcttagcggttgctgtgcaatgacggaaaattgcttgaaaaatatacatcagaaaaaaggaaataaaatcaggaatacactctcccgtatcgcctgtagacaaaccgaagggtatatggacgaacggcaagtggactgtttaaacgatgcatgtggatgctaaaatagttttgtttttttccttttccatctctgtttttagcgaagaaatttttattttaaaacaaatttaacccatattttacataagagtttttcgggcggggatataccataaattaggacaggtaaaggagaataaaattttatcttcaattcacagagttgaaaaaaatgggcacatattaaacaggaacagtagtcaataataaaaacattcaaatccatcgtccatccatggatctgagttgtcggaggaatcttaaaaaagaaggaattcgacaacaacaaaaaaagcctttgtcgggaatttggcatttaaaacacttttctgcaactgttcgaattttcaatcgttttcagcttcaaaaaattcccacaaaagtcaaattccaagcagtgagtcaaaaaattcaacttttaattgtgaattcgtaattttaacggtgtaccagggccaattcaaaagttaacagaataaagaaaaataaaatttcagtgcttccggatggttttccatcaagttaggaaatccttgaaaatgtgcaaaaataattataaatgatgatctgatcaggaaaccatttccaatcacaattcttaaataatttaattaaattttactcagtggcgcgggcggtggcgttgagtcttcacgcgggttgaatttctgttgggctgggttcattggtaacacaggttgtaatgctgcaattggatttgatgttgacatagcctgttgaccattcttaaatttttgatgcaattaattaattaattaaacacttttttaacatggtttattttttgattttattttttttggaaaaattttaatgggcgttttttaattaattttttattttggacttaaaaactaatcaaaaagtaatcgataaattaaaaaatgaattatgtaaaattaattaaactaattaaaaa

SEQ ID NO: 71442 - DNA, 1938 bp, Heterodera glycines
ctgaaagcagagggcaagtcggaaccacttgaggcggacaaagcgattgtggccaaaaacaaagccgatccaggacagccaagtgacccgtcagacatgatcactgccaaggacaagaatggtacaataatgaatttgatcatttattcctcattcaattatcaggaagcaaaattaaaatttttttaaattgcaagaattttacaatattttcacatattgaatttaaaaaagttttttaattttttaaaaatatttaattcatcattaaacaaaataaattattcttttaagttttttcaaattaaataattattgtattttcatataattttaaataaaatatggtttgagctgtggtgccgatagtcacatcagcaggagggaaattttggcaaatttaacgaaatttgttaaaaaaatttttagtgtttttattaaactcaaaaaattatatttatttgattgtttttccaaacaggctcaattactcgccgtgtgtcaaacgggacaacattggccaatgtgatcccacccgatcacttgcaaacattggtggagaatggcactgacgcattgctgccttcaacatcggatgcgccaaggaggtctcgtcggatcgcggccaaagtgagttttgggcgggtgggaaaaaaaaagaaatttgattttcaaaaattgatttattttttaattagtttaattaattttacataattcattttttaatttatcgattactttttgattagtttttaagtccaaaataaaaaattaattaaaaaacgcccattaaaatttttccaaaaaaaataaaatcaaaaaataaaccatgttaaaaaagtgtttaattaattaattaattgcatcaaaaatttaagaatggtcaacaggctatgtcaacatcaaatccaattgcagcattacaacctgtgttaccaatgaacccagcccaacagaaattcaacccgcgtgaagactcaacgccaccgcccgcgccactgagtaaaatttaattaaattatttaagaattgtgattggaaatggtttcctgatcagatcatcatttataattatttttgcacattttcaaggatttcctaacttgatggaaaaccatccggaagcactgaaattttatttttctttattctgttaacttttgaattggccctggtacaccgttaaaattacgaattcacaattaaaagttgaattttttgactcactgcttggaatttgacttttgtgggaattttttgaagctgaaaacgattgaaaattcgaacagttgcagaaaagtgttttaaatgccaaattcccgacaaaggctttttttgttgttgtcgaattccttcttttttaagattcctccgacaactcagatccatggatggacgatggatttgaatgtttttattattgactactgttcctgtttaatatgtgcccatttttttcaactctgtgaattgaagataaaattttattctcctttacctgtcctaatttatggtatatccccgcccgaaaaactcttatgtaaaatatgggttaaatttgttttaaaataaaaatttcttcgctaaaaacagagatggaaaaggaaaaaaacaaaactattttagcatccacatgcatcgtttaaacagtccacttgccgttcgtccatatacccttcggtttgtctacaggcgatacgggagagtgtattcctgattttatttccttttttctgatgtatatttttcaagcaattttccgtcattgcacagcaaccgctaagcgtacagcaacggcggcactcgcatccggtgcagctcttcaagcgctctccaagcatattgtttttttttctatctcaactatgaatggagttataacaaattttgttgacgtttttgcatttaacagatccattataaaaataatagttg

SEQ ID NO: 71443 - DNA, 388 bp, Heterodera glycines; identical to SEQ ID NO: 59955

SEQ ID NO: 71444 - DNA, 649 bp, Heterodera glycines
atgctcgacattaaccctgaaaaacgaatgagtgccacagcaattatcgactttttgaatgggggatgtgcgccaaatattggcatcggaaatgaagaaaaaatgccaatttttggcaaagtcgatgcagattttttaagcatttcattaagagccgaaatttatagagttaagggaatttatgaagaaaataaaaaaatccgtcttgaaaatttggaaaaaattcaagccctgttgacgacggtgacaaaacgccaaaaactgttgttttcaatgttggcaaaaaggaaacacatttgtgagggtcaaaagaattaaaaagtgaattttgggagattttagggaaatttattattatttttttatttaaaatctatgtaaagtgatcattactgtttttaccagataaagattaagaaacaaataattcacataatttaatcgtgatttaatacaaactttcgattgcaaaggcttattctgaattggcagattatcaatttccatttttaaaaagcattttgaatttctgtgcatttaaaatttggttattcaaagaattgtggttaattacaattaaagaaaatttaatgtgttcacagtgatataatcaaaatctcaaagtttggcgtgtaaattgattaataaa

SEQ ID NO: 71445 - DNA, 1024 bp, Heterodera glycines
atgagacgaggtacacctattccgactcagccgcctacaagccgcacattggctctcatgactacgtgcatcctcggctttgtcgtcgttttccagcaacccaaataccacgctcggcatcgccaccattcttgacatacccaactggcacatggcaaaattattggtaaataatgatttaaactccggttttcaaccaaaaattcaattttataatatctaatttttgtaacatcaattacgttggaaaatgcattttaaggcgtcgtcctgatcaatggacatggactcaactgttcttttatgcagtgcagttttttgcaatttttgcctacaccgttgttcaatacgcgttagttcgaggtatgtttttggttctgaattaagtccgactcttttttttttgatttcacgatttaatgaatttttctttgattttaaaaattttgtatataagagaatttcttttcacgccgaaccatttttgagacggtgccaacaaaattttatacaaaaaatatcaactccttgcactatgtttcacaacgcatttattaatttggattcaactttaattaacccacaaatggttgtaaaatgggacgataaacggaaaaaaatagtacacctattacattgatttccgtttttaatttcagtttattacgccttccgctatctgaccactcgggctgcttggtatgccatcaaatacaccattctttggccaattttggcaccgtattatgccgcagtcagctactacaataaggcccgatttgtgcgttttatttttttaacggggggggggagacaatctaaggggactatgggtattttgggaatgaatgtgtcatattgtgggaaaattttttcctcataattttgttccttcaaagtttaaaagaaatttcctaaaaatcaaaaaaaaaaaaattttttttcagtgacttgaaaaatctttttttcaaaaataataatgcgacttaaaatttgaagaaaaaaaggctaaaatattattaaa

SEQ ID NO: 71446 - DNA, 54 bp, Heterodera glycines; identical to SEQ ID NO: 53113

SEQ ID NO: 71447 - DNA, 705 bp, Heterodera glycines
atgtctaaaggaaaggaccgggtcggaaaaattttggtgactaacgtagagacatacggcacccaaacggtagcaatgttagatgggggagcccaaatttcactgattggagcaggatttctgtatgaattgatcaaagaacgaggcttagacctcaagaaatcggacttctctcgaacgtcagcacgaattgccgatgtaaatgggcaacaattgaaatgttttggagtggtaacaattccgatcacacgaaaaggttgcagtcaaataccgatctgctttcacataacatccgcacaatttggctacgacttgcttcttggcaccaattcactttcaaaattaggatttcttctgtacgacacagcgaacaaagaaatgattgaatttgaggaaatatcccaaaatgatagcaattctgctcgggttattttttctacaaaaattcaaccccgctcaacccgcctcatcgaaattggtgttggtgatcagtggaatggaaaagatgtggtcatttctccccaaactgtgaaaggaaatgttaaagtggaagaatcagtgggaaaagttgaaaacggcaaagtggtcgcccaaatcacaaatttgtcggcatttttggcacaaatcgatgaaaaaacggaaattgcgaccgtagagtcagcagaaatcgttttcgacagtgaaaattcgattattcaggcggaa

SEQ ID NO: 71448 - DNA, 59 bp, Heterodera glycines
aaaaaaccaaataattttgtattattttcacttgatataaattaatatttgaatttttt

SEQ ID NO: 71449 - DNA, 125 bp, Heterodera glycines
atggatctgacacctgaacaagaacgcgagttgtataacgcctactatcgtcccaatgtcccggaggacctcaccgaagcagaactgtcgcatgaaactcatttggaggcgtttaatcgagcaat

SEQ ID NO: 71450 - DNA, 617 bp, Heterodera glycines
atgcaaaaagtcaaaataagagttggccaaattatggacgaagaatatcttatccaattggacgaaatgtttcccgaaattttgcagattggtaaatttcttttccgaagttttttccgctccttccctctttttcagatttgctcctcccttggactcagacggtcctttataagcgtcttttggccaccaaatcgggcactgatcagcatttgcgaattgaatgtcgtttcgctttgcctgtgcttttccaccgactcaaatggctcattgttaaaacgcccaccttaaaagggaaagtgttggcccttttccgggaaaagctgcggaaagtccaacggattgccttccgcggacttcggagggaattggtcggaattcggcagacagaactgatgcgggaagagctgctcaaaagtgtgtgcattttgcaacgattttacgagtttgcatcagccatttcggcacttcccaacggagccaaggaaatgccaactgaggaagaaattcgaaattggaacacaggacgaaattgcatgacggaggagggactgatcagagcttatcaggtggataaaggatttattttataacaaaaataatgtaaaaataataaa

SEQ ID NO: 71451 - DNA, 1696 bp, Heterodera glycines
atgtcaaaaattgtcagagcaaaaatgatttccttttctttatgctttctttttttgttatttttggcaaatttaaatgacggcggcaaaaataaaaagttaaaacaaaaaccgatgaaaagcgcacaaaaatttgaggaaaaaaaaatattttgggaaagaaacggcgaattttcaatggcaaaacaatggacagaaaaagcaaatgaatgtttaaaaaatgtggacactttggcagaaaaagaagaagaagaagaagaagaaaatggagaaaaaggtaaaaacaaacaaagaaataattaattatttaattatttttaatatttaaaataattaaataataaatcacttgaaaacgaatcgaaatttggcagatgaatgcaacaaattgatggccaattttgttctctttttcaaaaagtcggcttcaaacgatgcggcagcaaaagaaattgttccaacgcttaatgttaattcgatgctttggtttattcgtcgaaaaattattaatttgctaaatttttccaaaattttatttgctaatgacgaaaatgtggttggaattatcgaagaatttgtgcgcgaatggaaaaaaacatttgggaaaaattggagagaaaatgcgcagaaaaagcgggaaatttgcacgcagtacaaattcgggatttatttcatcaaattaatggtttattatgcgaagagttgcgaagcattggccgaatatttgagaaaagaaatttctttagaaatttttcgggtggaaaaataattttaatgaaatttaaaatgaattattatttaaggtcgatgaggccatttttttaaattgcgatataaatggacaaactgagcaaatgtacaacaatttattagaacaaattggccacataaatggacaaaactttatggaacttttggacatttatgaaaattttcgggaatttttcaacggattcgaaaatgaaaaaatgcgaaaaacgaaagaagcgatgaacaaattggtaaagagtgaatatgtgaccaaaattgaggacaaattcccgaacatattcagaattggtgaggattaattaagcttttcaattttattttgctaaatgtttagacataattctcaattcgtcactattcgaacgattgcaaagcttattgacaaacaaaagcttttcaacagcgtaccgaatggaattcagtcgactgacaatggcatttctgatcgatcgatcgtttaattcggatttgttactgatcggcggaggaaaaggcgcccattcgagcgatcgaattacagcgaattggagggaagcgatggccgaagcaattgcagcagcttataccgatttggggtctgaacaaaatctgtgcatgttaatcaaaatgaacgaattcgcccaacttatcagtaaaaaaaggaacgaaaaagggagcgaaaaattgccgtgggatttacggatggatgaattgtgtgaagatggcacggaaagggccaaaataatggataaatttgtcggtgccgaacttggcgaaatatacacggcagcgattgaacgcgtcgtggcctaccgacgcgaacatttcattggcattttgagaatacctggggcaaagacacggcttaagcaattggtggaatctgagcagagaatgaccgaattggcgagcaaaaacggattgggcgaagctttacgagaaatca

SEQ ID NO: 71452 - DNA, 760 bp, Heterodera glycines
atgctgggctttgtttacgcggacgatttgagcgaattgaacggagacaatgcaatggaagtgctttatgccggtgaatttattattttttaaaaatttaattgaaaattgtgttagccaaaaagtataacatcactggcctgatcggcccacctttacaaattcccatctccgaattgcgcaatgttttcttagcctatgcccaggctctcctcttcgaattagatgtgagaaggtcaaaataaatttaattttattatttttagattttctgaagatccaaatatttttttttgtataattttctgtaattaatacatttaaggattttgtcagcgaatgtttgcggtacatttgtcaaaatgcagccaaattgttcaaatcaactgattttttgcaaattgatcaggaaatgttgtgctatttttttgaacgcgatcagttgttgatcagcaatgaatgtgaactttggaaagctgtaattttaattaaattttgcattttattttgtttttcatttttgctttaggcacttcgttgggccgacgaaaaatgccgacaaaatggtgttgaatgctcaccggaaaatcttcgtgccgtcctcggcccggcattgttcaaaatacatttgccaaacttccatgaagcggatttttcaaaatacgttggtaaaaatgtttgaaatcggataattgaaagtttttaagctcggaattaatttccttttaatgtttgaaattaatccaacttttttaaaaaa

SEQ ID NO: 71453 - DNA, 585 bp, Heterodera glycines
atgccacgcaaaatgaaaaggatcgtttccctcaattggcttaacgacgcaattgcaaagagacaagtgactgcgccaagtaaagcttgccatttgccgaggtaatcaattttttgtttatacaatttaccattttttttttttgttaatagcatttggagttcaacacgatacaatccaaaaacatttgcaaaagtaagtggatttcactagcatataactgtaagcaaaacaattggtgtggagaagtttccgaaacgtcgtcggctgaaacgtcatcgtgacaaaacgtcgttgtgccgaaaaattcccaaaaagttcgaatactttggttgaaagctctccatatgatttattagggttcgagccccgcccccgcccccgggggcgggacaggttttttgggctcacccccgcccccgtgactctgacccccgcaacccccgcccccgcgaccttcacccccgcgggggcacgggggtgaaaatacacccctaagaatggcatattcgtgggaaataaggcaaaaaatttagacaattttgaatttttttttagctatcttgagaaattttaagaactaaa

SEQ ID NO: 71454 - DNA, 468 bp, Heterodera glycines
gtttcaaatatcgtaagattgtttgatagggccagacaagagaaggcaactgttggtaccaagtttgcggtaaaaaaatgagaaaaaagagatagctattttttggtcaagaattttttttgtttgcgtttcaaatatcgtaagattgtttgatagggccagacaagagaaggcaactgttggtaccaattttgcggtaaaaaaatgagaaaaaagagataaccatttttggtcaagaattttttttgtttgcgtttcaaatatcgtaagattgtttgatagggccagacaagagaaggcaactgttggtaccaattttgcggtaaaaaaatgagaaaaaagagatagacattttttggtcaagaattttttttgtttgcgtttcaaatatcgtaagattgtttgatagggccagacaagagaaggcaactgttggtaccaagtttgtggtaaaaaaatgagaaaaaa

SEQ ID NO: 71455 - DNA, 637 bp, Heterodera glycines
  unsure (1)..(637): unsure at all n locations
atgggcactaattactccacttcaaattcggctccgtttgattacggaatgacgtcacggaagaaaggcaaaaatcgaagtgcgaaaaaataaaaatgcaaatgaaacagaaagtaatgttttgattttttcagcatacgaatccaatcactttgataagaattatctgatcgaaggcaccgaattttgggcagagaacgaatatcgcaaggacagttatttatttgagaggagaaaaggaagcgatcgggcaaattgtgagtttgaaaagggggaggaagccatcgatcagttcatcagcagaaaaggaaatccgatttaagttgccgaaatttacgtaaaaactccggcggagtacggaagtccgcgcgtctcctgctgggcattttcctgctcaccgtgcgcttcttcaaaagaaagtgccgttgccattccgtcccattccctccctccttcttccgccccgtggtcttcaccaattcaaccgaatggtgccaaaagtgctcatggctcccgcccggtgggcgtccgatcgaaatatttgccaacctttgggtgaatttggccaattattgtgtatcgctttttgtttgtanatttttaacaagttgttaattttaagtaaataacgaataaa

SEQ ID NO: 71456 - DNA, 3292 bp, Heterodera glycines
atggattcttcatttttttattcaaataattcacatatttcaaattcttatccgaaaattgagaagaaaaaacaaaacgaaataggagatacattatttagaaataaacgatctactaactttttaattgaatgcattactggcggaataacactaaacataattaatcccgttgatattattggggtttgtagtcaaggttattgtataacaataaacaaaccaaatttaaaagaaacaattatttttccacaggaaattatcaaaaacaattatgaatttgagattaaattgattttgaataatacaataacagaagtaagtaaatcaaattgtaatgcctctccgatctgtgaaatgataaaatgtaaaatttgtattgaatatttacgagctccacaatgcatagaacactttcactttattataataatctcggtagtattatttaccatctatattctgtcaatttcaatgcaaataattaaattcatttactcaactttaaaatggatttttaaattcgtgtttttctgtaataagaaaaagaatttaaaaccaaaaacaaagtcaaaaagccgtagttatactctgaaatcaagaactgctattttgttactaatgattctaaattttattcacctgacaaaaagctgtgacgaaattaccaatttaattgctaattcaaccaattgccctcgagatgaaaatggaaaaatagaatgtacttttgatcaaaccattttaatatcgataaaacctgaacacaaaacttgtcttaagcttgaagataaaatacgaaatactacttttaaaacaattaaattttcaactgaagaattaattttaacctgtgaaagggagtcagaatattttatgcgtaattatgaaatactgtcagaatcggttaaacgatgtccaaccatgggacagtgtcaaggttcaacttgtgaaaagataaaaagtgattcatcgaatcctgaaatttctgacaaagcaaacaaaaaaccaggatattcgtattgcgtgccctcatgcggtggttggcattgccaatgctttattgcgactgatggatgtttattttatagaacatatatggaagaaaatggtaatgattattttgaagtaaccaaatgcaatcaatggccaatagaactgaacttcaaatatgaaatagaatctgatgacggatcaactgcagattcaacattattaaaaccaggaatactaaataaaaaagacaatatagaaatgactcttactactatgactattccacctacaccaatctttggttcgaaatttataatcaataaagttaataatgatgctattattgttaacaatgaagatttactaagaaatagcattcgatgtcctgatgaaaattccgctaaaacatttagctgtaaatttccacctgaagcatgtaaatgtaatggcggagacacacaagtaaattgcgaatgtacaaaagatcctttacccgaaatgttcgaacaacaaaacgagaaattaccaattgattttaaaggaagtcatttgttttttgagaataatcagataaaggctaaattaaaacagacaacagctttacaattgcaaattactttaaaaggttttaaaactactccattttatgataaaacgaaatgtactgtagaatcaatatccttaagtgggtgctacgcatgtaaaggtgcagactggaaatttaaatgtaaatcagaatttggatctgcattagcccaactagtttgtccaaatcaaaaggttgaaataaattgtgatactgaagacaaagaacagattatccaactaacttataatatagaagaaatcaatgaaaaatgctcgctaatatgtccaggaggtaatagtgaagtagaaataaaaggaaaattattttacgtacaacaacaggaagaacaaaaaacgaatttgaataatactattcaaaatcccgaaactggtataacctttgatgaaataatcaataatattaagaatttcggttctaaaattataaatttcttaaagtcaaatttatggattgcctggttcatactaccattaatagtcattttaatatttgcagtttttctgggtccaatagtatggcctctaatcataagaataatcttccgacggaagaccaaaactaaacctaaatcttcctctgttgggagtgtcggattaaatccgaaaaaatataaaactattaataaaaacaaaactaaattaaaataataagaattttacatgaaaatacaaaatattaataaaaataaatccaaaataaaataaacatttcataaaatttttatttttaaaattaaattaaataaataaatgaatataaaataaaagtaaaataaaataaataaataaaacaaaatgaattcataaaaaacgaagcgaatgcttctcgcaataaaaactaaaaaataatctaataaaacgccccaaataataaataaatttattccacaataaaacggttgaacgtaaaagcaattaaaattgtttatgaaaagttttcctttcttaaataaaagggaagaaaaaactaaaacgataaaaaataatttaaaaatgaaaaaaccataaaatgataatgtggaaattttgaatgctattaaataaccaaaaaattttggtataaaaaggggaagggttttcagtttaggcatgcttcaaccaattcactctgttagcctatcggttctcttcactcaacaagccggacaacaactcgctctgaatacatcacaactcgggcattcgaagcatcgcggatattgatcaattgtgatcagaaatctaccaaattttccactttgtgtcctttgtcgccccatcccaaataaaatattaaattaattgattggatcgaccagtgcatcccatcaattttggtgccaagacccgggaagtgcaaacgacaaagaccaacaacaacaacaacaacaacaacaaaagctgatcactgatctgagaactggaaaaagccggtcatctgtttaaatagaaaattgttgtgcctgttcttcatcaatcaaaagtctgatttagacgtttagttctaatcaagaccaaaatcacaaacaaacaaataaataaacaaaaaattcagtgaaacgaaaggctgagtcaaagcccgatacggagctaaaacacacaaagaaggacgaaaacaaaaccgacgagttcaaaatactctaggtgtattcaaaggcgatcagataacaatttttcaattaatcattgtgatcatactgttaataaa

SEQ ID NO: 71457 - DNA, 1787 bp, Heterodera glycines
atgattactgaaattgaaagtttagttaattcaagacccttaacttttatttatgatgatattaattcatatcaaattttacggccaatcgattttcttttaccccatcaaaatatttgtattccaccaatattagaagaaaatgaatttggtgatccaacatataaacctaaatttaattcttatgaaaaaactgtagaattatggaagaaaacatcaaaacttctagatgactattggaaattatggacagaagaatatatacccagcttacgagaaagatatcagataaatcacaaaaatccaaaacaatgtgttaaagattttccaaagataaatgatatagtcttaattaaggaagaattaccaagagccttatggaaaactggaataataaaagaattaataattggatcagataatataattcggggagcaaaaattgaatttccaaataaatcaattatgaatcgaccccttaaattaatatacccacttgaactttcgaagaatattgatgaaaatgatgaaataaataaacaaataaataatctaattctaaactcaagagattctatccatactgaaatcaaaaaatgctctttttgtttcagcaatgaccatcttcaaattcattgtacaaaatataaaggttatagaatgagaaaaatgagagcaaaaaatttatcactctgttataaatgtcttaaacctggacaccgtattaaaaattgtaaaaatgaggaaaatttttgtgataaatgtaaaatacataaatctatttgcctaaattaccgagaacattacgatcaaaactcttcaaataatgatgatctaaataacttattatcaaagaaaagaaataacttatctcaaacaattaattcaactccctctacattacttcaaaaattactttttattgcattattattatttgtagtccccatgaatacttattctaattataattgtcctaaagaccttaaaaactatacaacaattttaaccagtttttgtgttgaagaaggaattattgttcgtaaaaatttacaaaataacgaattctgttctgacatgttatcatgtttaaatagacatttaatctataatcatacaccgtactgtggacctaaatgtgaatgttcaaaatgggcacaacaatgttcatttgtaccatatcaatcaattaaaaaatataacaagaaaattgtaaagaaacttattagacaagccggacccagtatatgcgcattcaaacaaaatcctaggtgtatgaacaaaaccaaaggaaaattccacgccattcgtctatatgacaatagcatatattttgtaaaaaatttacatatccgttatgcgcaaattgaatcaaaatacgattacctttgtctaggggagggcaatctaacgattggatctccaggttattgtgaactatttcattgtgataaaaaagggacaaaattttgctatcatgatcaaagagaaagaatttatcttatattaggtaaaattgaaattccaattaaagaatggggtataattgaaacagaatattacacggaagacaaccaaaaaagaaaaaagcataaacaaaaagaatcattggattctttgtttttcaattcgaattatacagagagccatcaaaaagcaaaaaaaaaaaaggattgatggattctttatttttttattcaaataattcacataatatttcaaattcttatccgaaaattaagaagaaaaaacaaaacgaaatagtagatacattatttagaaataaa

SEQ ID NO: 71458 - DNA, 421 bp, Heterodera glycines
atgctccgcctcgaagagcaccgccaattgggcgacagcgaagaaatcgccgacggattggcacgcgaacacgcggagtacggcacggaagcattggtcagtcgaagcaaagcgaaccgatgccaaccattaatgatgttaagcatttgtttatttaatgtttattatacttcaggatgacgtcatccgtccgtgccgcaccctccgaaaacgcggcatcgaactcagcgaaaagggcgacgaccttagcgaattgttgaacagcacaaagggaagcgacagtgttggaccaaagtgcgacgaactgaacagaatggcggaagtgttggggggagcggtggagaggaggggccaaatgttggagaaaagccgcaaaatgcacgcgcaaattgccaaagtgagcggagagaagaaactttaa

SEQ ID NO: 71459 - DNA, 664 bp, Heterodera glycines
gttttcggggcagtctccccgaaccgatgcgcccagatttatggggagaccgaatccttccggaatagcttccctatagcctgtactttaattctgcgttggatttttgctccccataattgtttgagtaccccaaacggacactcacttgaaaaaatcgatttttttgttttcggggcagtccccccgaaccgatgcgcccagatttatggggagaccgaatccttcgggaatagcttccctatagtctgtactttaattctgcgttggatttttgctccccataaatgtttgagtaccccaaacggacacttgaaaaaatcgatttttttgttttcggggcagtccccccgaaccgatgcgcccagatttatggggagaccgaatccttcgggaatagcttccctatagcctgtactttaattctgcgttggatttttgctccccataattgtttgagtaccccaaacggacacttgaaaaaatcgatttttttgttttcgggggagtcccccccaaccgatgcgcccagatttatggggagaacgaatacttccggaataacttccctataggctggactttaattctgcggtggatttttgctccccataattgtttgagtaccccaaacggacacttgaaaaaatcgatttttttgttt

SEQ ID NO: 71460 - DNA, 80 bp, Heterodera glycines; identical to SEQ ID NO: 51817

SEQ ID NO: 71461 - DNA, 80 bp, Heterodera glycines; identical to SEQ ID NO: 51817

SEQ ID NO: 71462 - DNA, 369 bp, Heterodera glycines
  unsure (1)..(369): unsure at all n locations
atggtgccgtcgatccgcaagaccgccgacctggtacaggagatcgccgccgcctcgnccgaacagtcgaccgggctggagcagatcaacaatgccgtacaccagatggcgcagaccacccagatgacggcctcggcttcggaagagctgtcggccacctccgaggagatgagcgcccaggccatgcatctgcaggacctgatgcgcttcttccgggtgggcgagatgcacaagtccgcgccacgcagcgtcaaggcaggacccggttccggcggcaccggcaagcaggagcgcatgcgccgcctgtccatgctggacgccgccgaggatgaggcgtcggtggacgaatcgtcgttcaagcgtttctga

SEQ ID NO: 71463 - DNA, 2439 bp, Heterodera glycines
atgcacatttttccgtggcttaaccctgagcaagtctcgcggaaattggcactgctttctgcccgatttgatggccttgtggacacacatttcaaatcgcgaaaatgggcatttgtatggatgcttatttattacagcaacaacgtgaaccgtagcggtgtgagcggcgtcgatgtgtatgttcaacacaacagaaaaaggcaaaatttacttatcccttatagaaattttaaaaaaatttgaataaatatttcatagcataaattcagaaattctaaattttaactcttattataaaaatttggaaaaatagttgcttcttaaattatataaaagaaataaaatgctatttaatgtacttttttagaggtttcagaggtttacgaatcgatgaattgacgccgtccaaaaatttaattgattttaaatgcatcgagctccggtaaacagtgttatttttatattgtatagaaatttatttctactttaatcaaatctgttttcgttggtaaaaatgtacagcactctcccacccattcatcttttcagtcaaaaatttcttacgaagtataaacatttctttaaaaattacacattttaattttaattattttcttgaaattttcaaattatttttaataatttttctagaatttttctaaaattggggacattcgcaactttatgaaaatgtcagcacgagaaaaatcgctcaaagtttttgtaaattttattaaatgctaactaaataacggattttgaggcatagcctttttttctgcgcattagtttcgaggtactagtacggtttgtatcccctatttttcaaatttttttaattgtacgaattgctttaaatgacaaataaaagatgatttatgtgtttattgggtacaattcagcgatttgtgaccaaatccggtcccccaaattgcttacgccacaaaaaatccgaaatatatgtggaaaaaagtgatctgtgactgccaaatctttttttgaaaaatagaggatacaaaccgtactaataccagtttcgatataataagcgtgaaaacaccttttccacttggtttgaggcttctacgttgacttttattatgcctttttttgactttttctggattttcgtgccttaaatgcctttttttggcattttgccgttttggatgcctttttggcgtttttttgcgaaaaattccattaaaaatgtaataaaatagtgaaaatacacccctaagaaatgacaattttaaatttttttactttctaccaataatcgtttaagaatatttcgttaaacaatacgcaataaactcctccaaattattttagttactttgacagctctgtgctctcattgcttcatcgctttaagccacttttcctaatgggcatcactttacaactaatgggcaaagggatggaagccccgcggggttgggcactgcgcatccaccaacttcttcctctgatcggcatcaccaacatccacaagttgtatgttagcaccgggtacgtgagaacaaacatccaatcttaccattcatatactcacattttgtaaagtgatttaatattttattcaattttaaataccgaatatggttcaatcagtttaatattttagaatagtttaagaggttcccctacatttgcgcacctgctggacatttgcgcctatgttcaaaatcgggtttaaaacttgaatgttttcagtcccggctgatggcttaaacagcctttaataaaccatagaaagtgattgtatgcgataaattgatcataagaaaatttttgaaaaaaaattaaatatttctaacaagataaccctaatttaatatcagtttcatctgttggaattaggactacggtttttagcttctaaaaaatcacaaaataattactaaaaacaagaaaataagtgccaaaaagtttcagatttagggaactaaaatcgttaaatattgaccaatttttaacattattttttaaaattattttgacattttctttaaaattaaatctaagaaccgatcggtgattttcaatattttcttacaacaattttttccttattttagtggctatagtcgactgtgcggactgcttgtaagcatttcagcaacatttctgatcgattgtcccaatctccgactaatttattatgatgcgattatgactggccctgatcgtccctttgacaccgccaaaaaagtgcaggaatggctccagtggccacggggagatggccgtccaaaagtgttgtttcgttcataccagctaccaattgttgatgagttcaaacaggcgagaagggcacaagcaatcgggcgaaatgcatatgcaaaagcatctaatcactcttaattgactgtgatattagagaaagtgttttaaaacacaaaaagtatgtaacaggacaaaacccagccggga

SEQ ID NO: 71464 - DNA, 407 bp, Heterodera glycines
atgaaatttcttatttccaatttgcaaataatggataggaatgtgagacgaaatttttgatgaatccacagtttttggctcatttaacccccatttttgttcaggactttctgactgcaaccataccggcaaattacatcatctgttttatatcgtttggtattcatccggagaatgttgagcagtttcagctggacaacaaacgcaccaatgaacgattgaaaattgaacgaaaagtgttggatcagcaacagcagcagaagagcaaagtttgcatgacgagggcaccgatcggaagagacgagcgacagtgggcggaatggatgcgaaaagcgtggcaggaggaggaaaagcgaaatttgctcatattttggatatcggaagcgaacatggggccggacatttga

SEQ ID NO: 71465 - DNA, 818 bp, Heterodera glycines
taattaaatccattccttcgggggaccgtgccgggtgccgcggggtaagcagtgctggttcgtttcatcacggcaccgaaccttttggctagtcagcaatcgttgcttaacttgccagatcggacgggtgcgcatgattccactgttccaagcaccccaccaaaagcaaaacgatataaccaaaatataaggacaaattttttaaaaaattttttctccatcttcctttttgatactaaagcatcagagtgctaaaattaagttgtaaataaaatttggtgcgctttagagcactttctgaaaaaaatatttatgaaacaaaaaaatcgattttttcaagtgtccgtttggggtactcaaacaattatggggagcaaaaatccaacgcagaattaaagtacaggctataggaaagctactcccgaaggattcggtctccccataaatctgggcgcatcggttcggggggactgccccgaaaacaaaaaaatcgattttttcaagtgtccgtttggggtactcaaacaattatggggagtaaaaatccaacgcagaattaaagtacaggctatagggaagctattcccgaaggattcggtctccccataaatctgggcgcatcggttcggggggactgccccgaaaacaaaaaaatcgatttttttcagtgtcccgtttggggtactcaaacaattaatggggagcaaaaatccaacgcagaattaaagtacagggctatagggaaagctactcccgaaaagatttcgtctccccataaatctggggcgcatcgggttccggggggactgcccccaaaa

SEQ ID NO: 71466 - DNA, 1383 bp, Heterodera glycines
atgaacgtggtcaaccgccagttgatgatcactgcggagaatcgacagtacaaaaagggacggttggcggagaaaaggaaggatcgcaacgcggcgttcaaatgcacttttggcgaggacattgcgaaggtggcgcaaaaagtggaagggttaaaacggagttatcgacatttgcaccccggacattgtgcctatgtccaaaaacgagtttaaacttaagttttatcagtccctacagcctaattagcatttttgagtgatgaaagtgattgtgtctgataatttgatagttaataagtattggaaaagtcaccgattattcaaaaagcagaattaattcttatacgcgctatcggggattgaaaaattttgtttgaatccgatttttgatataagcgtgatggcaaaatatacaaatagaatctaagagctcccctaatgaaggaaggcaaacaataatttcaaaaataatttgtgtattttaggttttgatcaatccgcgtcaattgctccaactgcttcagcttggcccagccgaatttgaacgggtcgtcgtcggattgtacgttgttcataaggtgcgtttggaacaacacgttgggagcatttgattaatttatggcccattttgcttcaagaggccgtggtcactcgaacggatcgaacgcgtcacgtgggatgccgtgccgacgtacaaagttaacggccactgcgggcctctgaacgttgtgctgtgcttcaaagagttcagctgcatactgctcaaaattgatcagtcaaggccgagctctaaccacctgatcgggcagaataaaacggcggtcggtcagcaaatcgccattatttttattgcatcttttgattcaatgaaaaaatcattcggaaatttattttatttttttactttccgtcggcgctgtccccacagaagacgtacaataacagtacagctttattatcattgcaatttcactttcaaaggttgccaaatttatcgctccatccgccgagcacattaagcgaaaggctcaagaattggaggaagcgctgcgcgagacccaacagatgaagcgcacggctgaagacttagcgggaccgatgcacaacaccaaacgaatcaaagacaacgagcaatatgatgaagaagaggaagacgacgacgaataaggagccaaagcgtgaaatttgatcatttgtttttcccattgaaatccgacaacgaggcggtttagcatttgcagaaggccccatttttgatgatttattgtaattggatagattatctaatttattccctttttgtaattgaaagatgtgtatgcagtatttaaaagcaattctgtacgttacctttttagtttaagatcctaaaagttgatatta

SEQ ID NO: 71467 - DNA, 884 bp, Heterodera glycines
atgagcaatgacgtcacgctggccaaccacatggaaagctcaggggtgccggggtaagaaacaacaaatgaaatgctgatcgcaattgattagggcttctctgagagatggcatttaaatgtttggagttttggaaaattcaagaatgattaaatgctcgaaaatcgtttcatctctaagaaacccgcaagtggtgaattggtgattatccatgtaagatctaatcgattgcgtgttttgagcaggcgattaattatcgattaattggtgcaaaataaatgaacattttcaaaatagctttggaatacgattaaatagcccagtaataaatcataatcaaatttttaagtcgaattcacattactgacgcgacattgaacgcgttgaacggtacgtaccgtgtggaagtgggcaacgggcaggaacgttcacggcaccttgttgagaagggaatcaagcagacatggctggtcgtctccgaggagggcaaagaggtaaggtgatcaattaaaataatttattttaaaaaataaggtaaaatatatattccaaaataattattctttaattactgaattaattaaaagatttctttcacattaccatattaatagaatctcattattctctctaatatgatcattaattccaaaataaatagattcaaaataaattattaaaagtttagaacaaaattagactcagtttcattttcagaaagcagctgatcaccggaagctgcacagtgtcattaagtaagaaatgacaattacttgttggctgattgatccttcttttattataattaattcccgcttttttatgtaaatctgctaaaaatggctcaaaatcacaataatttttggacaaaattcgttaataaa

SEQ ID NO: 71468 - DNA, 521 bp, Heterodera glycines
atggttgaccaaattaacaaagcgaaaagtgaagaaattgagaaaatgcgtgaacaaatcgggcaattacacaaagaaattgcaatgataaagcaaaacagtgaatgggtaatcatttgaaatttaaaaacacaaataatttatgaaaacttgaaaaaggagagaaacaaggggctagcagtgtttaatttttttaatgacccaaaaataggccgggaatcccggcaaaaccccgactggatgccggtcccatccagtactcatttctacatcaaagcgcatttatgccaccaaagtattttaattggtcagcgcatttgcttatattacgcgccctttgctgtttaaaattttatttaaattgtagccacaaaacataaaaggaaaataattaatttggttaaaaatttttaaaataaaaaaatatttagaaaatgcaggaaattttcacccaatttgggagaattcaaactggaattgatgaattgaagcatcaaaatgagaacgtattaattaaataa

SEQ ID NO: 71469 - DNA, 920 bp, Heterodera glycines
atgaatgggttgaaagaacacattggagaagaagaatatgtgaaactcgagaaagtcttagaagaaaaaaggcaagcggaacagaagccgagcattattgagaaaaagcatgacaaagatggagagaatagtgaagaaggcatgggaaagagaattaaggacaaaagtaaggacaggcacagacacaagcgagagagagaaagagaagagagagatagtaataagagagagacagatagattgatagataagagagacagaatgataagtgatagatatatgagagagagagaaagagagaagagaagataagagagagagatagggtaagagacagaaagcagaaagagatagataagagagagaaagagagagagagagtgatagatagataagagagagattagacagagagagatagagaaagagagcgagaaagagagagagagattgaaagtgagggaggtcggtaggcaccagggatgtgtaccaatttccaaattttttgaaggcgaaggcacacttacttccctgctaacaataagcaccagtgtttcgaatcgaaaaataaaatgcgaaatacgaatactgaaaaaaccgcaaaattttttagtgaaaaattctaaaattttgaatcattctcaaaatttaattaatcaaaaattctaaatcaatttattttcatcgtttttttatcataatttcttaaaatttagaagtttattattatttttttactttgaaagttctcctaaaattccttaattatggtgtgatctgcttacgaattttcaattttttgccgcattatttttcccaaatttttagggtaggagggccggcggtgccgataggcgccgcttaatagattttgtccgtaaaatgagaaaattttgcaattttggcaatttttaaataaa

SEQ ID NO: 71470 - DNA, 1076 bp, Heterodera glycines
atgatatgctccgttttgcatttattttatcactacaaaatgattctccttcttcttcaagaattgataaagcagctaattgtaagcaccatacagatgaaaatgatgaaaagttggaggaacttttgttgatattgaatgacaacaccataaagcgagatgtaaggcaaaaagattaatcggatcttacgaagaaaaaaaaaattcggcggaaagtgggcggggacggtgtacaacccaccccaaaacgtcgacgggacaaaacggcatcgaaaatgcaaaaaaattttcggcaacctagtctaattcttgagaaaactttttttaacaaataggaaaaagtaagatttttgaaatttcatgaaaatgaaatcaattaaaaatagtaaatgtttattttttaaatttaattctgtttaaaagatttcggctatgatgactagggctggcaattttatgtaaatacatattttatccagctggattctccatgctctaaatagtaggaaaaacactttcttttttatgtttgcaaacaaaaatcgggacttttatttacatatttttacatatttcggggttttatacataattatttacatatttcaggattttatacatatttggtacatattttggactttttagcattttttcctaatttttttttgagaatttataaaaattttcttgtgaaaattttaatttaaaatgtacccctaaaaatcggttttttcaaaaaaggagataccaaaaattaatatttaaatatacaaaaatgtgaatctaagattatttaggtaatttctatggtattttgtgcctatttcatcctttacgaaggatttttcccaaaaaaataaccatttaaaaatttttaattacatgtttggtgttttttcatacatatttcgggattttttttttacatatttatgtacatattctgacaactttttttacatgtttttgccagccctaatgatgacatgtgatttcatcaaataatcttttttacgaaaaaaaacattttagtgttccattaacacataaattcgttcggaatattaaataaa

SEQ ID NO: 71471 - DNA, 648 bp, Heterodera glycines
attttttcaagtgtcgttttggggtactcaacaaattatggggagcaaaaatccaacgcagaattaaagtacaggctatagggaagctattcccgaaggattcggtctccccataaatctgggcgcatcggttcggggggactgccccgaaaacaaaaataaatcgattttttcaagtgtccgtttggggtactcaaacaattatggggagcaaaaatccaacgcagaattaaagtacaggctatagggaagctattccggaaggattcggtctccccataaatctgggcgcatcggttcggggggactgccccgaaaacaaaaaaatcgattttttcaagtgtccgtttggggtactcaaacaattatggggagcaaaaatccaacgcagaattaaagtacaggctatagggaagctattcccgaaggattcggtctccccataaatctgggcgcatcggttcggggggactgccccgagaacaaaaaaatcgattttttcaagtgtccgtttggggtactcaaacatttatggggagcaaaactccaacgcagaattaaagtacagactatagggaagctattcccgaaggattcggtctccccataaatctgggcgcatcggttcagggggactgccccgaaaac

SEQ ID NO: 71472 - DNA, 311 bp, Heterodera glycines
atgggaaatgatggacaaaaaggaggggaaggacctgaatatggtggaaaatggaagaaagaaaagacgaaaagcaaaggaaagggaagaaaatcggaaaaaggaagagaaatttgggggaaagagaggcgaagagagaaaaagcgcattttgggggcaattggaaaatgggaaaaaggaaaagggaaaagagaggaaaagccaaaggaaaatgggaagaagcgattgttgggcttatgcttgttcacttttattgtttaatcagcttaaaccattgaattgaagaaaatatttgagggaaaacaaaacaa

SEQ ID NO: 71473 - DNA, 581 bp, Heterodera glycines
atgcgcgaacaaattgagaagcggagcggatttgtgaccaaatggttcaacaaatggccaaatgtggccgaaattgaggactttgagcgtggtcttagagagaaaaagcgcaatttggccaaatggtcgacgcatttggaagtaaaagaaaaaaggaaaagcaaagaaaaaaaacaattaaatatttattttaaggaggttttggagaaggcggaaggaaaagtgacaacgaaagagcatttgaaggaagtgttttacgacgcggtgaaagtgaaacgaattacgaaggcgacggatgccaaagatttcataagcatttgtaaatcaattaattaattaataattattattattatatctgttctcattatgtatttgtcttttttctgcttattccaagcaattaattaatttttccattttcaggcgatttagcggtcgacgagcgaatggtaaagcgcaaattgagaaacaccgatttgacgaagaaatcggaaagtgccacactcagctgggcaagttgggccacaaaacaggcatgcaaagtgcaaattgggaagaaaagtggcaaaatgaaagag

SEQ ID NO: 71474 - DNA, 577 bp, Heterodera glycines
atgacccttgctaattgtcgtattccccaactttgctttattctgctctttgcccttctgctgctgatcaatttggcgcaaagtgaccaacaattgagcaaaggcattcttttaattacctttaatcatttcatttattactttgccatttttggcgaacaatcgccgatggacgccgaattagacacaaataatgagcatgagcaacattacggggacggagtgttcgtcgacgcggtgccaatgtgtggcggtggtgccaacatgccgaaaagggcattcgtcgagggacaaaagatcaacggggtaaaagcggcagataaagtgccaaaagagtaggaatgaattacttttcactaattttcagaaaaaagggcccatttccgacggcactttccgccctttcagtgtcgccatttggtcgcctcagtttttgccgcgacggaaatgaaactttttagggatgaaaatggacgaggaaataaggaaacgaacgaacggcgacagatctttcagcacatttttgtctgtccataaaacgcttaaaaattgggtggaaattgccatttgatttcaa

SEQ ID NO: 71475 - DNA, 158 bp, Heterodera glycines
atgtgctcattttgccccattcattgtgccgtggcacttcgtcccggtgggctggcaccgatggactctgaccccgacgcctcaaagattcatccgatgagcggggtcagcagcagctcaacgccaaacaccgcacaaacgatttggggaggaatacg

SEQ ID NO: 71476 - DNA, 796 bp, Heterodera glycines
agctgcattgggttatcgtaacttttcgcttttcagattgtgatcggaatatgcgcaatgcaacggaaggccaacagcaagccgatgcgttcgatcatgcttaaaatgaacgagttctacaaggtatttaccggcttacaatgaatgcccttcatctctatttaaatattttccaatattttataaaatgttttacccttttaggacttcctcgattttgtaatttttcccgaggaaaccattctcaatgaatcggtggagaattggcccctctgcgactgtctcatctcttttcattccaccgatttccctctcaaaaaggcaattgaatatgaaaaagcgagaagaccttacgtgttgaatgacttacaccgccaatttgatttggtaagttattattattttaatttagtaaaagtgaaaaatactgacgggattgaaaatgtatatctctaatgaaagaatctgaaagaatttttttggcggcagccactccctgaagagttacagacccgggactgaagtggcaaaatagctttgggactgaaccgtccaatgtctaaaaacacatgaatcttcaacaaaacatacagaaatagatttatttttgtctctaatgtaagaatatgtgaaaattttgacaaaatgtaaacaaggaatccctttttgggcaatctttcggttcattggtcccgatttttttttttttaataaaattctggaaacccattctaagtctaatttgagccgctgagtacgaatctgaccaccttttcgaccaatttcgaatcccgaa

SEQ ID NO: 71477 - DNA, 423 bp, Heterodera glycines; identical to SEQ ID NO: 65209

SEQ ID NO: 71478 - DNA, 990 bp, Heterodera glycines
cgtcggtgggctggcgagtttactttgaacaaatcagagtgcttcaacaggcgtttcgcttgaatgttcgtgcatggaataatagaagaggatttcggtccgattttattggttttgctgaccgagataatggttaacagagacaaacggggccattcgtattgctacgtgagaggtgaaattcttggaccgtagcaagacggactacagcgaaagcatttggcaagaatgtcttcattaatcaagaacgaaagtcagaggttcgaaggcgatcagataccgccctagttctgaccgtaaacgatgccaactagcgatccgccggcggatttattcgccctggtggggagcttcccggaaacgaaagtcttccggttccgggggaagtatggttgcaaagctgaaacttaaaggaattgacggaagggcaccaccaggagtggagcctgcggcttaatttgactcaacacggggaaactcacccggcccggacaccgtaaggattgacagattgatagctttttcatgattcggtggatggtggtgcatggccgttcttagttcgtggagcgatttgtctggtttattccgataacgagcgagactctagcctactaaatagttggctcattgcttctgtgggcacaacttcttagagggattttcggtgttcagccgcacgaaattgagcaataacaggtctgtgatgcccttagatgtccggggctgcacgcgcgctacactggcaaaatcagcgtgcttgtccttcccgaaaaggggttggtaaaccggtgaaatttgccgtgattgggatcggacattgcaattattgtccgtgaacgaggaattccttgtaggggcgagtcatcaactcgctctgaatacgtccctgccctttgtacacaccgcccgtcgctgccccgggactgagccatttcgagaaattcggggacggttagtgtttcggtttcggtcggtatgcagactgga

SEQ ID NO: 71479 - DNA, 601 bp, Heterodera glycines
agaatcgggccgagtccgcagagacgccgccaaaacgcaatcggcggggcaaacgcttcggggaattgcggaatggtcgggcgaagcggcgattgaacgagacgaagttaaaatatggcccaaattagtgccggtcacaagcaaaagcgaaccgagtccaattctttggccgcccgtgccaacgacaaaacggccacagacagtgccaaaggaagaaggaaagaaacgcatctcaggaggaaacgacgacgaacttcaaacgaacggagagagtagaaaggagaagaaaaaggaagaagtgtttcgggatttaccctcgggggtcgaagtagtctcttctttggtggaaaaagcggtcgaaaatggacagaaaagtcgaaacaaaacacagagacagaaaatcatggaaacattgggaaaggtgggaacggaaaatggaaggactgatcactcacacatttaccaccttccgatcaccttaaggcaacgaacagaggacgagttgggccaaaaaagcaaaatcgaccagcacaacaaatgccgcgaattttggatcgcgattcgcccgagccgacaaattcgggacgaacggctccaatga

SEQ ID NO: 71480 - DNA, 533 bp, Heterodera glycines
gcttaaaagcattgtactgcataattaaaagctaaaataattttcgtatatttttcacaatttatttcaaacagccaaaaagtccggaatcaattataaaaactaaaatagtgcacaaaaggggagccgccgcacggcggggcttaaaagcattgtacagcataattaaaaccgaaaataattttcgtatatttttcacaatttatttcaaaagacaaaaaaaaaatgattcaattttgaaacgaaatagtgcacaaaagggagggatggttagacgaaaagaggaatttttagaaaagagcgcaccccatctgatattcccatttttccgttccacaactggccaaaggcgactgtgctcattgacacgtagttgtccaataaggtacttggactttccacagtaaaatgtggtacaaaattttggaactgtcccgcctcacggcggggcttaaaagtattgtacagcataattaaaaccgaaaataattttcgtatatttttcacaatttatttcaaaagacaaaaaaaaa

SEQ ID NO: 71481 - DNA, 518 bp, Heterodera glycines
atgatgtcaaagattggacggattttcactggcgtattggcactgtcatccgtggcaccgggcgcggcaaacgcttcccaaaagggtggagaagttcaagcagttaaaaaacaacaatgtgcaccaccacctcaaatgccgggccgagatttggtaagattagcaagatgcattagttattctttaaaagattggtcaattaacgggaagaagttaaacaagaaaactattcttatcattaattttgtttttcaacagcatgaagttccatccgggcctaatcccacacagaacaaaaaagttaacttctgaggaaaaaagaatatgctttcttcgtttattcatgcttttccttctttttctgataacttttagtaatttattctttgggcatatttatcaatttattttaatcattttccactaaatatttatttcttttagtaaaattatattgttgcatgaaaatttgataaaaagaaatcattgaattgtttaatataggggaaacaaataaa

SEQ ID NO: 71482 - DNA, 434 bp, Heterodera glycines
atgggtgatggaattgttggacaagttcaggctggacaactgagtgaggttgacaaacgatttgggaaaactgaacaaagaaaattcactttaaaaaacggcgaaaattttggaaaaaacggaggcctacccggtcacaatgtttgtgcttatgtccaaataggccaaattgtggcagagaccgatttcttcagccacttcgacaatttctggggaaaaaaggattgggataaattagtggatggatttttgaaaaaattgaaaaactggaatcatgccaagtcgtgacgatttgaaaaaagatttggcccaaaattattcaatttttaacggatattttatttgattttacgatataagaaaattcactaatttacccattatacataaacctaaaaaaacatgttggctatgacattttagaatgtaataaa

SEQ ID NO: 71483 - DNA, 2169 bp, Heterodera glycines
atggatactgacgtaaatgaaattgctgaatttaaatcaaataatttgcttcattatctcccacataatccggtaataaaagagagctcaaatacaactaaaatacgaccagtttttgatgcgtccgcaaaacttaaaggaaataattcactaaatgatgaaattcaccaaggaccaaaattactaccagatttgtgtggattgattctccgatttagactcaaaaattacgtattaattggtgacttggaaaaagcatttttacgagttggattaaatgaattagacagagacacaacacgatttttatgggtaaacaaatcgtacttgaatgaaataagacaaaattatcgagaaattgaaatgagagacatcgaattgagacgattcacacggataccatttggagttaacgcttcaccatttttattaactgctgtagttaatctccacttgtcaaaaataaatgaaatgtttgaaaaattcaagacaattcaagttaacaaggaattatgtctaaatgataaagaagaagaatttaaaaatctttgcgtagaacttaaacaaaatgcatatgttgataatttcgtaatgatgtgcgatgatgaaaaggaaatacaattcaaacattattggagtaaagaaatatttaaactagcatcaatgaatctgagagagtttgtctctaatcatgaacaaagtaataaagaaattcaaaaattggaaggatcagagataccaaaagtaacaaaaatgttgggtataaaatggaatgtcgattcagatgaacttgaactccaaataaaaattccactaatgagtaaagacacaacaaaaagacaaattttgacgatgattgccaaaaatttcgatcccatgggatggatttcaccagtaatactgaaatataaactatttttccaaaaactatggcgattaaacaaagattgggacgataaattagatgatcaagaaattattgaatggaataatatttcaaacacagatatgataaccataccacgttcgcctttcacaagtcaatatttaaatcattcaatattacacattttttctgacgcttccgagttggcttatgccacttcagcttatttacatacaaacgaccaagtgaatctactattcgcaaaaacaaggcttactccattgaaaggcctaacaattcccaaactcgaattattggggttattgatagccgcaagagccgccaagtttataaaaacggaatccaaattgaaccttgaaaatacctatatttggtcggactcaaaatgtgtactcagttggttaaaatgtaaaaagaatttaccaatttttataaaaaatagagttgaggagataaaacaaattgccttggaattacatatcacttttcattatgtaaaatcagcagataatccggctgatttggcttcacgaggagcaaccatgagtgaattaaaatacaacaaattatggtggaatggaccaaaatggcttaaactggaagaggaaaattggccacctcacagcttttacagtcctgatcaagaagaggctccatatttagataatacagaggaaataattaacactcaaataaatttaataaaaaacgaatataacggaattatcgaatgggataaattcagttcatggcttaaaataactcgcatttgtcaaactttattaaaattcatatttttcaaattacagaactctaaaaaatttaaagaaaaatttatttactctaaattcgaaaatgcattacaattaaaaatcatggcacaaaaaatgctaattcgaattattcagagggaaatggaaccaaataaagaagaagaaagacagttaagaatttatctcgataatgatatgatactcaaatgtgaaggccgattaaaaaatgcacaaattcaaggtgtcaatccaatttttctaccaagaaaacactatggaactcatttgataatcatggattatcacacacgaaatttacacgcaggtacaatgacaacattatcggaaataagaaaaacttattggataccgaaaggaagaagaattgttgatcaaatacggagacaatgctaccattgtaggagatataatgctaaaccttttcaacaaccacaaatgcctccattacccaaatcacgagtgaaataa

SEQ ID NO: 71484 - DNA, 452 bp, Heterodera glycines
atggccgcatcttcattccgtcataggtggtgagtcgataattccaatgttttctaattcccaaaatttctgaagtatttggttcgtttcgtctttttttcttttttcggtcactgagttacaattggtgtcctcaatagttccttttccagataatatttttcctaattttgtatttattgagtaaaatcctgatggaagtaattgaatttgtgaatttggtagcatgaagtgccagtaatagtcgattccaattaaaatttgaggacgtgaattaatcagtaggatgctgacacaaccctgtatttgattttttggtccaggagttattcattcacttcaacttcagctttttgtcgagtctccaatgcagatggactgggggatgctaccttagattaattaatttgtggggaatataaattaaacaaatgtataatattatgctttaa

SEQ ID NO: 71485 - DNA, 931 bp, Heterodera glycines
atgagccaaaaccgtgacgaaaactcgcagccacctgtactcgatggaccgtacccgctggcacaagagcgcaatgagtttgtggaagatgaagcaccggtgctgcttgagatgttggatcgtctgtcacaaggagtgggttttgttttgaattatttaaattttttaatttttccattttggcttatgctaattgttgattttgtttagggaatttgccaagccatgggcctgttttcgtttgcacttgccgactgtttggccacatttcatacatttgccatactgttcgactgtgagacacctgtgccatttgacgagcagcacaagcgatacgtgttcgaacacagggacaaaccgcggctaatctacgtttcggaagatggtagcgctatacaggttgacggtgtggtgaagcaaggggaatttgtgatgagcatcgagacgatgtatctcgataagcgaaacggagttgatcacttttgcacattcctgcgcacttttggcatttgtttcttgatgtgccattgaatgtgtttatttgttgcctattcagagcagtaaattgtttgcataattctgtttaattattttttgtttacaaccaaaatattgatccgcatttttatgttataattttaattcatttttgaaatttttatttaaatggcaaacgaagacttccgcttgtccgaatgcatccgttttattgagcgaactgcccaagagtatgattgtgttctgccggttccacggcttgggtttgtcacggaaaattttcttaataatttttttaaaaatagctcaaggcgcgatgagcacctggatgcctgtgttcttatggaatcagtgggctcaggccatcggctctacattttcgagtttgaggattgcctccaggtatttttaaaatatgaggtcaattaattaa

SEQ ID NO: 71486 - DNA, 2323 bp, Heterodera glycines
atggaagggaagggacctaaagggaaggggatttatccctttcaagagatatccatgaaacggataaaggcgggtattgcaaaaaagtgcaaaaattcccttgggagggggggttgctgtaaccccccgaaaactcccggagagccgggattgaggctggtcagctgacctgcgagagaaccatgctcctccctcgcacccccagagtcggttattaggccgaacactggtaactgtttgctacttgcccatcgggctttcgacaggaggctactccgccaagggggctcgaacttaccctcggtccatgccaggcaggtgggttcaccacttcgccaccaggcaggtgaaatgactattacatttctgacccaagtgatttcactttaatcttctctcaatttaacttgatatttccaaattgtgtttaaaagcggaaattatcgcatcgatttttttgcataatgttccttttttcacttatttttattctcaatcgagccaatttttttaatactttatttcctttcaaatttagaattttgcctgccattgtttattttacattgacgaaaatgccgacactttgatcgaatcggagggatttttgcaaattgaccaaaaaatgttgtgcgaaattttggaacgcgacgaattgcaaatccgtgaagaaatttcaatgtggaatgcagtaaatttttttaaatttaaaaatgttataaatttatttttaaaataagtccgaatctttttcggactattttataaaattattatattcaccagcctttccatatttacagttttcaactcgtcctcaaattggaactgttttggcccgtttcgaagcgctggtggacaaacattttgatgacatgacgaatttttttataatttcggcaagtttttttttgtttttttctgttcttttttttttttgtttttgggttatggtcccaaaagccttaacagccccaaattttcaaaattcaaaataaaataaaaatttttggaaattcaagaaaatttatttgtaaaagtgaatagtttttatgtgtttttttgaaggattttatgcataaaatatttaatggcctccaagtaggcaagttttttttgttttttttgtgtgtaaaaatgagaatgtttcaattttttaaattatttttttaggatttttttccaaaaaaacgaacttcacttttcagaatatcaaagtggtggacattctcccctttttgaccgtccatctcttaagagaacattttttcttaaaattaaaaaatcttttttttggaaattttacatttttaatttaattttttggccctttttattcattaaaaaatctttttttttggaaattttacatttttaatttagttttttggccctttttattcaattaagcctaaaaatgcattttctatgaacaaatttacatatttaactaacattttttcaaagtttcagctgggtttgcatggtgtttggatggacattctccccttttgaccgtcctcaactcggcctcaaattggcattgctttcgccccgtttcaatgctccagtggacaaacatttcaacggctgaaggcgtaagtttcagtttcaaattggctatgaaaatttttctaatctctacttttgtttggattcggcatttaaaaaatttaatttgaaaattttttttgagaaattttttcgatttatgacctcagaatccctgtgtgctttgtacctcttctaatcactgttgtacctcttctgatcactgttgtagctttttttccccattttttaaataactagagcgcaaaaaaccttttttttcagcgacgaatatcgattatattttattattcatttctcagtataaattttgttattgattcccccctcccttttgttaaataattaaaaacaccaaactaccaatgcttattaagtttttcctttgtatagaattttaatctatatttcaaacattttagataattctctctttactttttgttttttttcagctggttttttgcaacactttggatgggcatttctgaccatcttcaactcggcctcaaattggcattgctttcgccccgttttaatgctctggcggacaaacattttaatggcaaagcggattgctggcaagtttcaatttttctcaaagtaaccggtcaaatgttcaataagctttaaaattgtgattgcattcggcagttcaaaaattgaaaaaaggaaattgacgaaaatgccgacactttgatcgaatcggagggattgaagaatgaaaaaccgtctttaagttataaataaa

SEQ ID NO: 71487 - DNA, 712 bp, Heterodera glycines
aaaaaattccaagccaaggccaagccactatagcagtatagtgccaaaaattaattgaaaatattaatttgtattccggttattcttccgtcaaaaatgacgccaccttagccattaggcctagaaaaaagagctctttcgaatggtaccttcaaatcaaaaaacgactgtcagggagctgagctacagaaaaaaattccaagccaaggccaagccactatagcagtatagtgccaaaaattaattgaaaatattaatttgtattccggttattcttccgtcaaaaatgacgccaccttagccattaggcctagaaaaaagagctctttcgaatggtaccttcaaatcaagtgccaaaaagaagctgagatacagaaaaaaattccaagccaaggccaagccactatagcagtatagtgccaaaaattaattgaaaatattaatttgtattccggttattcttccgtcaaaaatgacgccaccttagccattaggcctagaaaaaagagctctttcgaatggtaccttcaaatcaaaaaacgactgtcagggagctgagctacagaaaaaaattccaagccaaggccaagccactatagcagtatagtgccaaaaattaattgaaaatattaatttgtattccggttattcttccgtcaaaaatgacgccaccttagccattaggcctagaaaaaagagctctttcgaatgg

SEQ ID NO: 71488 - DNA, 66 bp, Heterodera glycines; identical to SEQ ID NO: 53774

SEQ ID NO: 71489 - DNA, 77 bp, Heterodera glycines
atgattcttgaatacgctgacccacaaaatgtccaagtctcgaaattgagtttttttattattcggatgggcctaag

SEQ ID NO: 71490 - DNA, 127 bp, Heterodera glycines
acttggacattttgtgggtcagcgtattcaagaatcatttttgagagtttttgccaaccaaactggacaatcttggtatcattcgaaagctgctgatgaggagaatctttttctaagcaaatgctaa

SEQ ID NO: 71491 - DNA, 515 bp, Heterodera glycines
  unsure (1)..(515): unsure at all n locations
atggcacaaattttgtccaaattggcgttgcaagtggcggattatgtaacagtttatttggcacaagtaaaaacaaaaaaattatcaaaaatttcatttaaataaaaaatgttttttgaaaggcattttgaacatttattctcctctcgacggttgttggattgagaaaattgctgatgtccaatgcggcatttaattgattaaatttttctgttggcaatgtttgattttaatattttttgaatttcatgcatttacacatgaaaaaaaaaaatcaaaaacggatataatttcacaaagtttaacctgttaatttcgtagttgtcatgtcattactttagcttttcctaaaaaatgttttcggatgagcatagaaaataatgacaaattttacacgaccatctgaagcaaccttgtcagataaattaaatgttttgataattttcagttaaaaacttgctttcgtaaaaataagaaataaaaactgaattcttccaactanaaaaaacaataaa

SEQ ID NO: 71492 - DNA, 399 bp, Heterodera glycines
atggataaagaagtcgaactttcatcaacaatttttccaatttgcattcattgcggggcccgtgaaaaatttgaagaaggaaaagcatatattgctggatggggatatttaaagagtaagcttagtcaattaattaattagcaagcttaaatattattaaaaaaaaatccaaaattgaatcatatttattaatatttgaataaattaaatttaaaataaaattaataaatgagtaagttatttagatagttgtactcaaaagtcccaaaaaagtccattaacgctaatgggtcgcagtgctcaattagtgaaatgcaagaaatcattctttaatgatggacaggaacgaatttgcattgagaagaataccattgagcaagttggcaaattttaattaaa

SEQ ID NO: 71493 - DNA, 49 bp, Heterodera glycines; identical to SEQ ID NO: 60106

SEQ ID NO: 71494 - DNA, 296 bp, Heterodera glycines
caaaagttttttacaaccacatattgccaatctaatttcttgcagatttaaagccatccattgcctgccggttctcggcacagcaaagcactaatagggtgtttgactcacttcaaaaaataattcattacccaaaagttttttacaaccacttattgccaatctaatttcttgcagatttaaagctatccattgcctgccggttctcggcacagcaaagcactaatagggtgtttagctacttcaaaaataattccatacccaaaagtttttttactaccacatattgccaatct

SEQ ID NO: 71495 - DNA, 243 bp, Heterodera glycines
atggctcaaatgtccgcccatggacaaatggccaaacttttgtctaacaattttttaaaatttgatttggccatttgccactgtgccgaacagcttcgacttgccaacaaagtagggtagcgagcactaaaccattccgaagcctatctctaaatttaaaattttttttgaaattttttcagttttccgtcaacccaaaaaatgtcaatcccatccgcttggagttggccaatctgcatttga

SEQ ID NO: 71496 - DNA, 835 bp, Heterodera glycines
atgctacacagacaatttgaaccgtgccaacatcgaggcacagaagaccatcaagaagcagagcgagcagctcaaggtgttgcaggccagcctggaggacacgcagcgccagttgcagcaaacgctggaccaggtcagcttgagtgcgagcgtgtgactcattgtatttgtttttgtcacctgcagtacgcgcttgcccaacgcaaagtgtccgcactggcggcagagctggaggagtgcaagactgcgctggacaatgcggtgcgcgcacgcaagcaggccgagttggacctggaagaggcgcacggacggtaagtaaaatttgtacacgcctcgtgcattgagtgcaagttgatcattgcgctacaacaattgcagcatcaacgacctgcaatccatcaacaacaacctgactgcaatcaagaacaagctggagaccgagctgtctactgcacaagcggacttggacgaggcaaccaaggaactgcacgcagcggacgaacggtaagtgtggtcgttattcgagttacgcgttatatctttgtacagtgccaaccgtgcgttggcggacgcagcgcgtgctgtggagcaactgcacgaggagcaggaacactcgatgaagattgacgctctgcgcaagtcgcttgaggagcaggtgaagcagctgcaggtgcaaatccaagaggcggaggccgctgcactgttgggcggcaagcgcgtgattgccaagctggagacgcgcattcgcgacctggagaccgcacttgacgaggagacgcgccgccacaaggagacgcagaacgcgctgcgcaagaaggaccgtcgcatcaagtaa

SEQ ID NO: 71497 - DNA, 57 bp, Heterodera glycines
atggaaggcacaaccaccaggccaccgacgctcacattggctttacattctttgaaa

SEQ ID NO: 71498 - DNA, 545 bp, Heterodera glycines
atgccaataaatccaacaaacgttattcttttattgcaagaacattatcatggtaaagccccccctcccacccaattaacaccagaggaaaagcaactggcaaaggattttttgaacacattggaattttgtgcaaaacaagggtcagaaattgagactttggaagaccttattgtggatgaattggccgtttttgatcaaaaagatcagcaagattctgacgagcagtttgaccttgaagatgatgaaagtgaagatagtgaagggagtttttcctctccagcaagtacagtattccttttttccttggatcagtttttgcattagaatcatcttcatcgagttatgctccctccccaaagaaattgtgttccccgcatgttggatttgccgaaaaaatcagtgccctacgacatttttttcctgatcactgtcaaatcactttttgttcggaatttataatgattagatgtgcatggtgtgacaaattcctttgcttcactcatttctaccaaaattatcacatgtgccaaaattaatgtcga

SEQ ID NO: 71499 - DNA, 456 bp, Heterodera glycines
atgttactgatgaacacaaacaaactgtgccgtcaacagcatcggatagcttatctcattcaactaatgaagcgaactattgcaaaaaacggtgagttttgccagtgaatatgtcggatgccctttggcattcgttgcttacaaaggagaggtacccaagtgaccatgggacttccgaatgaaactttcagggtaggtagattaccccccctttgtattataaatttttttttatttttgctaaatgaagcttctggccgagatatgaagcttttcctttttgccttttcaatatcattttcaaagaatgtaaagccaatgtgagcgtcggtggcctggtggttgtgccttccatacttttttcttcttctaaagttcaattccccaaccctgtaaataattattttgttttttttcatatccaaattagtttttaagctttttaatattaataaa

SEQ ID NO: 71500 - DNA, 435 bp, Heterodera glycines
ggttcgataaaacttttaaaatatacgcctaaactttttggcctgtttaaaaaggaattaaaaatttttaaaatttttattcatctcccttttgatagaaaaagcatcagagagccttatttaacttttaattaacatttggtgcgtttcagagcacgttctgaaaaaatatttatgaattaattttgcaaaataataaataattaatgaaaaagtcagaatttcgaaaaattttaaaaacaacaagcgttggcattttttcaggttaagttagtcctttacaatggagaaggcctgcaaaatttggagagattatatcgattttagtgcgctaggttcgatgaaactttttaaaatataagcctaaactttttggcttatttaaaaagcaattaaaatttttaaaaattttattcatctcccttttgatagaaa

SEQ ID NO: 71501 - DNA, 1147 bp, Heterodera glycines
atgatgcgcaacggcacagtgacaattcccaggccggacacagccccaaaatgtgttggcaaagaatgcaaagcagcgaaaaaggagcgcaaagacaaaccgacaaaagtgcggaaggacaccgtagtggtaccgtacggaggatacaccgtaatcaggtggaaaataggggatacggtaggggagcgacgcgattcgatcatcagacgaaacaaaggagggaatgtgaaatttggaaagggagggagagagagagaacgaatagggaagagagtggggagggggaggaggggaaagaaaggagaaggggaaaaatgttttttaaggttttacgcagaaaatccgggctggtggatggccgaaacgaatcaatatggacggacaagttttgcatttgccatcggcgaagatgaccaaatgcccaaagcacccaaaaaacacccttccgattgcaacagtttcgacccgggcaccgacatttacgaaaaattctaatatgagaatatctgacttaaaatctaattgatggagtaagtgaaatttatataaatcaagcaaaaaaaaacaagttatatatgcaacgaaataaaagggtaaagtgaagaatcaatggaataagtactgttttgaggtgaaaggcagtcgtttatgctacacattaaataaaatcggaaaatgcgtcgtctgtcattcgtttatattgcccaaaatggtgctcctcttaaaactgggaatacgcgaaattctcaagtgaagttgggagacgctcctcctaagctgggaccgtctgcgatggatcgtgcccgtcgaactgaattcagccgcgattgaacttaaaattcgtcgttaagacgtcttcgcccttcggggtcactgcctaacttttgctcatcattttcagtgagtctaaaaaggcgtaacttacagcgctttgaggatgccgtccacttcttcgggtcggttctcgcgttgctcacggatttgctgctcagtgatttcttccatcacaatgtcacgggtcgacgtcgttttgatctgaagatcagtcaaaaagagaatcggacggaaagggtagaaaaacgaacgcgttggatgagattctcgaaaaagtcgaaggcaatgtcaaatgtatagctaaagaaaagca

SEQ ID NO: 71502 - DNA, 562 bp, Heterodera glycines
  unsure (1)..(562): unsure at all n locations
agcagtttcntggcagaaacagaagaacccatttacgggttggccaacttagactatcattggcacggagaaactgccgacccaaattgggacggtggcgaaaaaggtgaagcgaacgacccgaccaaagtttgtctctattttgcgcccgatttgcagttgattttctgctgaatcgatgcactgctcgccaatgtgtgctgctgggctgtcccttcagaacagaaaatggcacattcgccgcattcgacggacgcaaatttaaatgccattccatagacgaactgagaaacaatggcaaattgaacaattatccctccgggcatgggtatgattaataaaagcgaatttgattgattatcacttccaaatgctcacacacaaaaagaaatgatgatgatgaagtgattgaaagccatcacattttgttggactccgaccagaaaactgtcgatggtttccgtttcaaaatgcccgcggcggttgggcccttttccacacgaaacggcgtggaaatcgcagaagcattgcgacgggacaactgctcgcgctgcgaaagcaa

SEQ ID NO: 71503 - DNA, 1295 bp, Heterodera glycines
atgcctgtgtcgataattcctgatccaaatgatccgtatttcattccttctgtgcccatgtatcgcgactttcgaaaggagatcgatttgaatgactccatttgtgaccgattctttgaaggtcaactgacttttaattgaatttcctaataaaaataagagagtaactttagagcagcagtcccctaaagctggacatcccgttgaacagccggttcccaaggtccaggccaaacagcgcccagtcagtcgtcgttcgttgtcgcaagtgcgcgagcaaacagcgatcgctcaaccaacgatgcgttttggtaacacttctcgacgatccgtcatcaccaaagggttaatggattttgaaataatattttgtttgttgaaatctcgcattcgccacgcggtagggggggacaatatacgtgattctttaaatgtgtaggaccagcaacgaaggcatgcccatcagcagcggccccgttacccgcagcaccttttcgtctgccaaggcttcggacgtttctcatgcggttcgttcgacggttcccgaagtccaggccaaacaacgcccggtcagccgtcgttcgttgtcacaagtgcccgagcaaaccccgacgttcgttcagccaccaatgcgcacttctcgccgatccgtcttcaccaaagggttaatgaacttgcttggaataaataatattttgttttttgaaatctgtcgcattcaccgcgcgggaaagggagggggggggacggcaaaatggacgaatgaaccaatcgactttaaatctaggatcaatagcgaaggcatgcccgtcaacagcggtcccgttacttgtagcaccgtttcggcttcaaaagctccggatgtttctcatgcggttcgtttgacggttcccgaagtccaggccaaacagcgtccagtcagtcgtcgttcgttgtcgcaagtgcgcgagcaaacctcagcgatcgttcagccaccgatgcgttttggaaacacttcgcgccgaaccgtcatctcaaaagggtgaatgtttcttttaataaatacttttgaaatttgtcgcgttcactgcgcgggagggcggtgggggggggacagaatggacgtgatgaagcaatcagttctttaaatatgtaggaccagcaacgaaggcatgactgtcagcagcggtcccgttactcgtagcaccgtttcggctgccaaggcttcgggtgtttctcatgcggttcgtgggatttgcgtggtgcgcaatatgccgactaacaataagaagcaacagacgaaagataagcagtga

SEQ ID NO: 71504 - DNA, 646 bp, Heterodera glycines
cgcccgagggcatttacgaggggggtggccgatgcgtggaatgccaagtgaagccgagtcaacagcacgcgcaccattaacccccccccccccccgttccccgccattagcacaacacagtgggagtcaactgtgaaaaatgcctccccggcttctaccgtcccaccaacgtgtcccactaccgtaccgacgcgtgccgtccgtgcgactgcgatttggtgggagctgaaagcaaccaatgcataagagatgagacagaagtgactgagcagatggtgagcaaagattggctctgccgatgcttgcgaatgcttttcgtactttccctcccttttcagcgacccggcgactgtcgctgtaagctcggctttggcggccgccgctgcgagcattgcgcgcttggctttcgtaatcatccgatttgcgagccgtgcccttgcgacagcgccggctcactcaacttcgacacgtgcgaggaggaccaatgcgtgtgcaagcgcaacgtggagggcgagcgatgcgaccgatgcaaatccggcacaatttatttggacagagagaaccccgaggggtgccagccgtgcttctgctttggcaaaagcactgaatgtcgcgagttcgactgggacacagcgaaagtgggaaa

SEQ ID NO: 71505 - DNA, 627 bp, Heterodera glycines
atgtatattaaaatttataaaccacaacctatttgttttacattggccgaaaaagacggaaataattgcgacttgcgactgttcgctatcgtcggtcagtcgcatgtgctcggcacggaacccaacgcaaaagcagcggcagtgacggaggtcggcagaaatttgagggaaatgggcacggaaaattgttgggatttcgcagaaatcactgcaaaatgcaaattttgcctttgtttgttaactgagcaaaacaaatttagaacgagttgccgcagtcgtattccgcgacattgccaccgccccatttggatgccactgccgactttttctccacctccaacagtgacaacgacgttttgcccccgtttgatttggtggcatccgtcgcgcttccgcccgcggtgcaatgtcgcaaattttttgccgaccttcgcccagtccgtgtttgttggttttgtggtgttagagaaaatgacatataaatttttttttgcattttcatttgtttatgtgtaggccctttttttctctgtctgtgttttctcttatcatccaacgagaagagactacggtattgtcagtttgccctcccatggacggtaaaaaagaaaaaaaagcgacaataaa

SEQ ID NO: 71506 - DNA, 529 bp, Heterodera glycines
tgatttctgcgaaatcccaacaattttccgtgcccatttccctcaaatttctgccgacctccgtcactgccgctgcttttgcgttgggttccgtgccgagcacatgcgactgaccgacgatagcgaacagtcgcaagtcgcaattatttccgtctttttcggccaatgtaaaacaaataggttgtggtttataaattttaatatacatatactgtatataattaaatttctaattaataaagtacattcatgggtaattatacagtttgacccacataaaattttttgcttttaatgataaaaagtgtttccaggggttttcggggccgctgatcatgaatatgaactctatttgacgaatttccggacccctaacccggaattcaaacattcttgaaaaaaaaaaatttcagaccaagcattaatgccaattttatttgtttttttgatgaattacgtggcatcagtgcttggtctgaatcaatatattatgagcatcacaccggagaatcatggagcacatattttg

SEQ ID NO: 71507 - DNA, 204 bp, Heterodera glycines
atggaaagtgattcgaatccgcaacaacagtctgtgcctgtgcagcaattgccgtccgacgcttcgccccaaccgcagcaaaacggcggcggagattcggcggacaaaattgggccggaccaaatgcgtttgttgagcgcacagatcgccgcatacaaaatgttggcccgtaatgagccggtccctcgtgcactgctcagagag

SEQ ID NO: 71508 - DNA, 978 bp, Heterodera glycines; identical to SEQ ID NO: 43946
  unsure (1)..(978): unsure at all n locations

SEQ ID NO: 71509 - DNA, 56 bp, Heterodera glycines; identical to SEQ ID NO: 58360

SEQ ID NO: 71510 - DNA, 1422 bp, Heterodera glycines
  unsure (1)..(1422): unsure at all n locations
atgactgctcatgtcccaaaggttgctggccgagaatcatataaattatggggaaaattcacaccgcaaatagaggttattattaatggttttgctgcacgaattgagattctgtatataattaaggtcgggtacttcaacgcctttctcgaagcaatgcagacgttccaaggaggtaccgaagaccaattttttgtgaacaaccgcgtgacactgcgaatcgaaccgcctaacgacgacattgttcatggaccgtctggttcagcggccgtgttttgcgctgtatttggattggcttgcaatcgcctctgctcatcagacaccgtcgtcagtgcaacactcgagcgtggccaactatttggagtcggaagtttgctgttcaaaattcgcgcagcaaaagcaaaaagaatgaagacgttagtcctgtcggtcgataaccaattagaatgggaagagatcgcagcaagcgcgccacatgaaatcggaacaactcggaaagtcgccgcctatggtctccatgcctccggtcgcaccccaaccgccctccttgacggtgatgtccgcctcggcctcaccctcggtgccctccttctcctgctcttgcgggtcacggaagaagtacaggtcgggcatgatcagcttgtcgtccaccacaaagcccgtctgacgactgattttgccgcgcaacagcaaaacttcacgagccaacagccaccaaatcagtccgacggagtgcttttgctgtgaggggagggggttggaattgggacagtatttaggtattaaaacgatcaatcaatatggtaccaaaacattttttgttctatagatccgattcgagtaataccaagaccgtatatgtaccaagttttcatggcccggtggtatcagaaatttaccaatccaatcagtgacatataattgagatagcttttagcaattttggttgggtatgggctcattattcgggcatccggccactatcaactctttgaaagacacaaattcaatacaaccttcgggatagttttgctaaaaaaacaaaaccttgttgtttgccgggatggcaatgtccacaaatttcaacggcgagtccgtgttggccaccgcaatcaccggcgtgttcacgtaggacgcctcacggaccgcctggtggtccaactacgggtcggacaccacgagcagacgcggttcctgcaaaacaacaaaatgttgagtttcgtcttccatgtacttaaacaaagtttaaaaatgtaaagtttcgactttttgttcgaattcggacccggagtttggaattgttcgaaatggatcccggattcgtgagtagaaaccgcaaaaacccttaaaaaagaaccttaggggctaggctatcaaatggtaccanattttattttggttgactttagaaaaattatgata

SEQ ID NO: 71511 - DNA, 998 bp, Heterodera glycines
atgcgttttcatcgtgaagcaacgaaacggtccccgcgacaccgacccgaaaaggcaggagaatgtttaggggtacaagtgatcgaggacgataatggaaatgtgatagacggtaattattttcattttaagcaaaaaacggtacttattggtaatttttgtgcagatttcaaaaaagtttatgtttttggatataacttttttctttggcatctaaatccaatattgttggtatcattcgagagcttaacatgtttcgaagctattactgtgctatcgcttcgcgatcagacaattaccaaaaaagttataaatgaaaattgcgaagaagtcgaaattagtcaaaattttgaagtttttccttaataaaatttttccaggctaaataattttttttattttttgtaaagctaatagagtatctgaagagctttcgaatgataccaacaatgttagctttggatgcaaataaaaaagttataaccaaaaaatgttttttaaatctgcacacagatacctaaccaacaagtacccaaaaaacatagttcgcatttatttcaggggaattgtttattatgactgctaatgttccaaaggttgctggccgagagccgtatatcttgtggggaaaattcgcaccgcaaaccgaggttattaatggttttgctgcacgaattaagattctgtatgtaattaaggacgggtactacaacgcatttctcgaagcaatgcagacgttccaaggtggtaccgacgaccaattctttgagaacaaccgagtgacgctgcgaattgaaccgggttagagaggcaaataattcaaatatttgcaattccctctcttgggctctttgaccccatattgattttccccattcatgcatgcccttcccttcgtccatcctctttcattctgttattttccttcttattgtgtgctcccaaatttgctccgtccctccgacaaatatttgtttatttattttccatttggttta

SEQ ID NO: 71512 - DNA, 253 bp, Heterodera glycines
cacttgtacccctaaacattctcctgccttttcgggtcggtgtcgcggggaccgtttcgttgcttcacgatgaaaacgcataaggtgttcactaaattggcgctgaccggcgaattgccgattacaatctgtgcgacttaaatgaaagatgttataatcaaacctatatccgcttatattatccgcattacttccaagtaatttgccctcctctattgacgacgaacatttcaataaattgacacaaaagaaa

SEQ ID NO: 71513 - DNA, 941 bp, Heterodera glycines; identical to SEQ ID NO: 43952

SEQ ID NO: 71514 - DNA, 946 bp, Heterodera glycines
  unsure (1)..(946): unsure at all n locations
attgattctggtgctctattcnccgatggaattgctgatgatgggccaaatgcaactgctggccaagcgttgtccaaatggttgcacactccgagcaaaaatggccaaccgaagcaattgcatcgcaataattattttggtccaccaaagctggaatgggtcaacaacttcaaagaggtgtgtctagccatattttctataaattgtttagttttttccaattttttatttagacatttcgccgtgccaccacttctgtcagttacacaattcaactttatattattgtggaaccaatgccaattgaaccatttgaattggtgaacgaagtgacaaatgagaagctgacactgaaacatagcgaagaattagactataattgcctgtataattggctgttgaaacggtgcccaattggggagacggcgccagttaagtggaaaaaccgcgaaaattcgggtgctaatttgaactatatcagatttgagctgcgatatgccaattattcgggtgccaatttgaacaatatccgatttgaggtgtggggtggaaatagttgcattgggtgagcagcaaaagcaatttttgattgttgaaaaaataaaaataattttaggccattgtcgctgccagcggaagaagaagaagcggatgaaagcaatgaaaattaattatatctgagaaatgatcgatctcaatttgttgtgcttattttctctcagaaatgcttttttaattgtttcgttccaattatataaaaatatgcttttttgttgagcaatttattaataattagggtttgtaattatatggatataaaaacgcgaaatatggccataaaatatggaccaaaaatcgcaaaatatggacagaaaatggcaagaatatggacataaattttccgaatttatgggtaaattttcaaaaaaaaattttttcaaattta

SEQ ID NO: 71515 - DNA, 629 bp, Heterodera glycines
atgttattcgttgaaaaggaatttgcattaatcgatgaattggaattattaaatcaatttgtttatcaaagtcagagtcaatcatcggaaacgcaaaagtatgtctttactgtaatttgcaatttgcatatcagaaataacattattgataaaatttagccagcaaaaaccgcgtaatgaattctatcaaatttggacaccgttttacatggattcgcaattaaaaaagttatcaagtgatgcagaaaagacgacaaatactcgtaaacggagaaggaaagctcatcattccatggaagaaagaagcgatggtcgggactttctcctttcggtagaatgcatttttaaaattatcaaaaaataattattattttttagaattgtcgaattgttcagaatttgttcactaaattccaaaattcttgcaaaggtttcatggaattcgatgcaaatgttcctcggtaattcacaattgctttctaatatatcaaattaaacttttaacaaaatttgcacattcacaaaatatattcattttcagcaacaacgaaattgctcgcaattgtgtgaaaatggcgcccttattttgtccctttgtgccgtcaattgccaacggttttaacaataaa

SEQ ID NO: 71516 - DNA, 303 bp, Heterodera glycines
atgactgatcggttgaaagaattatcagaaactcgcctgcatttaaaagcaactaagacaaggcattaataatttagaaattttaaaacatattgtttacttttttaaattttaattcgatttagggttacacgcgaagatggctcagtgatcgaagaagagaaaactgaaaatggcgagtttgttgtaatttttgagcgagccaatggaaatggaaatccgagtggatttaaacaatccaagcgaatgcaaaagggtcgtggctatgtcattgacctctcgcccgacttgcaagtggccaat

SEQ ID NO: 71517 - DNA, 410 bp, Heterodera glycines
catttcaatcactgggactcaacccaccagcatttcaatcactgggactcaacccaccagcatttcaatcactgggactcaacccaccagcatttcaatcactggaactcaacccaccagcatttcaatcactggtactcaacccaccagcatttcaatcactggtactcaacccaccagcatttcaatcactggtactcaacccaccagcatttcaatcactgggactcaacccaccagcatttcaatcactggaactcaatccaccaacatttcaatcactggtactcaacccaccagcattccaatcactgggactcaacccaacagaaacccaacagcattccaatcactgggacaattctcctgcatttcaatcactggcactcaacccaccagcattcgaatga

SEQ ID NO: 71518 - DNA, 655 bp, Heterodera glycines
cttcgaaacgaaatgaaggcattggtggaaaagcacacgacggaatcggagcaacagagaatggacaaagcgcagttggaagagagaattggggaggtggggagaaaaaatacaaaactcggaaatttctaacccaaaaacaaaaacagtttttttgaattttggaattttttttcttttttgaaattctgatgcttcttcagttgttttgttacatcttttttttctttccttagcattttcgtcagcgcggtgaacagttggacaaattggagacgaaattggcggaaatgaaacgacaaaagcaaaaggaagtggccgaattgagagagaaaaacggggagcaatcggaccgaatttggcagctcgagcagagactcgaactgtacagaaacacctcgaaatacgaattcgaaaaggttaaaatgttggcactataaaatgatagaattttttattttttgcttaaagaaaactgaatttttaattttcgaaaaaattccatttttaatgtgtttttacagaaatttatttgcattttaatttgcaggtaaacaacgtgttgattcgccagcaaagggacgcggaagagtaccctcactacctgcagcacatggtgcagcaatgttcgcagtcaatggccgacctcagagag

SEQ ID NO: 71519 - DNA, 494 bp, Heterodera glycines
atgtttggccgttgcagaagcgaaatggcaaaaacaaattcatgggatgacataagggttcgtaaagtatcaaatcttatttttcaaattttactaatagactaattgtaagatggaaatattttttaatgatggctattttcctgtaaaaaatttgaatttatgagcaataagtcaaaaatttccgattcattttcgaattcttttgtgaaagatcaattgaaattataaatgcataaataattttgtgtcgcattttccattttggaattttatgcaaaaaataaaaatctaattaaatttggaaaaaaatatacgtgcagttcataggtttgaactttcaaccgatagagacactgggaaaggcgcttaaccgactgcgccatttgcacgcacatactatcgctttcatttttcacttttagctttattttttcatgggatggcataagggttcgtaaagtatcaaatcttatttttcaagaaaggtcaga

SEQ ID NO: 71520 - DNA, 695 bp, Heterodera glycines
  unsure (1)..(695): unsure at all n locations
atgcacgcgttttgcgctcgagctattcatcatcgggcttgtcaatctaaagcgaaacaacaaagatggtgttttgaacgaataaagggcataggttattttgaagaagtgtcaaagaacatgcagcaataagcctgcaaaatctaataagtggaaaatacctgagtatagaatttattttcagaaagtgtcaacagacttttggaaaaatatatttgcaatttatcaacaattttgagaagtgagttagaaatgataaacttcacgattcaaaccagttttcggtgctctaattaaccgcgataaaaacatccgaatcaattaaatagcttctgagataataaggtttatcataaaatttcatttaaaaataaaccctcaattattggtatgaacgatactttccaaacatgcacgcgttttgcgctcgagctatttatcatcgggcttgtcaatccaaagcgaaacaacaaagatgctgttttgaacgaataaagggcataggttattttgaagaagtgtcaaagaacatgcagcaataagcctgcaaaatctaataagtggaaaatacatgagtatagaatttattttcagaaagtgtcaacagacttttggaatatatatttgcaatttatcnaancattttgagaagtgangtagaaacttcacgattcaaccaattttcgttgctctaa

SEQ ID NO: 71521 - DNA, 1078 bp, Heterodera glycines
atggcacatccgccaactcttttcccagtacggcacaatttgttccgtcacggaattccctaaggcatttcgtgtcgaattcgcggccaaacgaatggcggcgtttgcgatttggtcgatgaacggcaaatattggccaaatacgttcagaaggatcatttgcgattggtggaaatggaaaaatgacaaaacggaggcaattaaaataaatttaaaaaatagaaaaaaggaaaattcaccaaaatttaatttaatttgtaaaaatgaattttctattttggattaattattctatcatttttatttgaggtcaataattagcatataaaagccatttgcggtgataattaaaaacgggttttaaaatgattgataaaatatttgaatcagaattttaaattttaaatgaattaacaattctgattatattaatttttagaatcattctccggttggacgattcactccaaatccatttgaggtgattttcccatttaatttgaaaaaatgaattcttatttttatttagaatcattcccagacaaaacaattgaccccaaatccatcgatggtaaaattttagaatttccaataaaaacgaaacggattttataaaatcattatgattaaactttaaaagtcatttgtgttgaaaattaaaaaacaaattttaaattttggaataaaaaaaacattttaaacgatttaaaagacattaattatttcaaatcattcccagagaaaataacaattgacacaaatcaatcgacggtgataattataattttaattatttggagtcaaacgacataaaactttgatcagaatattaatttaaaatgaattaataattttgattacaattaattttttagaatcatactcaggttggaccaactccaaataaacaattgacaccaaatccatcgacggtgataattataattttaattatttggagtctataaagaatgataaaacaattaattttgatgtttaaaatgcttcatttttaggattgtgcccaaattgaacaattggtcccaaatggacgattggtcccaagatggaccgattg

SEQ ID NO: 71522 - DNA, 243 bp, Heterodera glycines
atgcccttggtatttatattggtattttcgtgcatattaacgccccctttttttgcattttcaaaaaatcctctgttagaatggccctttctcttttgttccctaaagaatagaaaattaaaaaaatattatataaattttagggccttttctcaagaatatacataaaaatttgacttacagtcaggtgcaaaatattgcagcaaatttttgtaatcctatgcctatataacaatatataaa

SEQ ID NO: 71523 - DNA, 96 bp, Heterodera glycines
tggaatgtcccggacggagagcgacgcgagttgaagctgtacacggaggagggactgttccgtttggtcaccacatttgccaccaaagaagctgaa

SEQ ID NO: 71524 - DNA, 368 bp, Heterodera glycines
atgtcaccaattgcacttaaaatgtgaattacaaaaaggattaataatattccatcagtgagttaattgattcaccaattttgtattttatgagaaagaattggcactgtgacaaaataccagatgaatttgaagaatatgaacggacagaatgccaaaaatatcgcaaatatttggacattttgtacgaatatttgtacagagaatacgtcggaattccaacagtgaagccaaaatttgtgtttaaaaaggaaattgaaattgaagggccaataatttatgcgtagatttggataatcctacttatggtcaatccaattttttaaatattttatttaatataataatcaaattacgcagccctctga

SEQ ID NO: 71525 - DNA, 851 bp, Heterodera glycines
ctacattgaccattccgtgatcaaatttttccgctccaagaagcgattctttgacaaaagtggcaccaaattggaagtgtttgtgcattcaattgatacgtatgtccaaccgatttgggatgtttttacccgcgaaatttggcctatttttgcgaaaagcattcgtcatttgggtcttcataatgccaatgctttggacaatttgcgcagtcgcatttcaccgacacttctcactgatcttgatcaattttcaatcgattccggttatctgtgccccgatggaattgctgacgatgggccaaatggaaatgctggtcaagcgttgaccaaatggcttcacactccgacaaaaaatggacaaccaaagcaattacgtttccgtgcttatgtgagtccaccaaatttcgaatgggtcaacaacttcaaagaggtcgtctcgccagaattttcgtcaaattgtttttattttaccaattttgtttagacatttcgccgtgccaccacttctgtcagttacaaaattcaactttatttttgggtggaaccaatgccaattgaaccatttgaattgatgaacgaagtgacgaaagaaaagctgacactgaaacaggagatcgacgaattcgacttaaatgtgtataatttgggaaaaccgcgaaaatccgagtgccaatttgaacaatgtcagatttgatctgtggagtttcgataaatccattgggtgagcagcaacagcatttgaattttatcgaaaaataaaatatttaattaattttaggccattggcgccaccagcggaagaaaaagaaggagaagaagaagcggatcaaagcaacaaaaatgtcgtctga

SEQ ID NO: 71526 - DNA, 836 bp, Heterodera glycines
atgagaaaagttattaccaacttcgccgaactgaatggttctcatcgatagacacttttaaattcttatttatttattccatttaaccggatatttaagaagataatttatgtaaaatttcgaaagataatatttttgaaaaatcaaaataactattaatttttgcaagtttaagggcctaatgcccaaataatcaaatttacaaaagagaatatgacgtcatgaaaaaattcctcttttaaaactcaaattaaattcaattactccaattaaatgtaataatatttaaccaacaggcacaaaccatagaaatctgatcattttttgcatagaatccggtcattttttgataaaacttctgcatccaaatgttcgttctcattcaatttgctccgctccgtctctgtcttcagttcactcaccagttactatggcagcatttactatggcagcatttagtataaaaaacataaaaaatttgtaaagttgattattttgaagaaccatgggggtaatgaaccttttaagcgcccaaaaataaaatcaaagggagacggtaattaaatcagataaaaacgtaaaaatattcaactaaaatgtcaaaataatacagcgaccaattattaattctggcaaaaatccactttatattcccttagaaaatgatttaatttggaaatttattccattttaggaaaatgggtaacgaaatggccatttttgtggcaatataattgtcccttgaaggcattttcggaaattcaaagcaaggacgatcaattgccgtgcccaaacaagggacgatcaattgcagtgtgccaaataagctaaaatga

SEQ ID NO: 71527 - DNA, 501 bp, Heterodera glycines
atgatggtgctgctgctactgttcgaattggacggtgagcgatcgcgcgggtgccgcagggatttcccctcgggcgctgccgcagacattttagtcgctaattgcgttaattggtcgccaattacgctgcttttcgaatgacgccgaaggttcaaagtgtcgcaattgacacaaaagggaaatgaaaatgggtatttagactccgattttccctcactttttcatttgtcttcgcttggcattcggccgtccgcaacattcgcagcaaaaatgccgaaaaatattttcacattttccatcgttctcttttccactgcttttctcattttcattttcgttgtttttttgctgtttaaaactgccatttctgtgcacttttcgtccgtctttcatttgctgaatattcaaaaaattttaaaaatttcagatgaattttccgttcaatgaatgccatttcaaatgtttttttttaccttttgctgttccctccacttttattga

SEQ ID NO: 71528 - DNA, 662 bp, Heterodera glycines
aaaaaatttttctccatctccctttttgatagaaaaagcatcagagtgcctaaactaacatgtaaatacaatttggtgcgctttagagcactttctgaaaaaatatttatgaaataaaaaaatcgatttttcaagtgtccgtttggggtactcaaacaattatggggagcaaaaatccaacgcagaattaaagtacaggctatagggaagctattcccgaaggattcggtctccccataaatctgggcgcatcggttcggggggactgccccgaaaacaaaaataaatcgatttattcaagtgtccgtttggggtactcaaacaattatggggagcaaaaatccaacgcagaattaaagtacaggctatagggaagctattcccgaaggattcggtctccacataaatctgggcgcatcggttcggggggactgccccgaaaacaaaaaaatcgattttttcaagtgtccgtttggggtactcaaacatttatggggagcaaaactccaacgcagaattaaagtacagactatagggaagctattcccgaaggattcggtctccccataaatctgggcgcatcggttcagggggactgccccgaaaacccaaaaaaaaattttttggataaaaattatttaaatgaactgactagataatat

SEQ ID NO: 71529 - DNA, 381 bp, Heterodera glycines
atgtacgggtacaagtgagttgtgctgtatttaacaaatctatgtttttctgtctacatttttacttactctctcccatagttggggccggtaggcgggggaagccgacataaaagcaacgaatatttgtaacttttacgccacaatttttcaaaagtttttgcgtcactgtccccttcctgcccgattttccaatagttttacttgtatttttttttgatttcacaacggattctgtagccctaccctccctcaaaaaaagggtaaaaaagttccatttcccattttgtttttttttcagacttgaagcgccaaaagggtacgatttatcgaagaaaaagatgaggacaatcggcgagtgaatgaatttacgggaataaa

SEQ ID NO: 71530 - DNA, 965 bp, Heterodera glycines
atgccaactataactgaactaggacaatatgtgtgtgtgttccgcacgaattccaccgagtttgacctgctgttcttcaccgccgagcggacactgatccgttttccgacagacgcgcgtgccagctggccaatgattgttgcgaccattcgcatgcgacgccggccgttgttctacgtgttcaaccacattctgccctgtgtgctgatctcgtccatggcattgctgggattttgcatgccgccagagaccggcgaaaagatcaacatgctgaacacggtcagatgcgtgactatgttccggacccgatttttgtcaaaaattctgacgccatgccggaccagagttgcactccatttccctctcccccctccctgtcgtttccccatccgaatttttttttttaaatttataaacatagaaatttcggcgattttatcaaaattttaacaactttgtgtcagggtcggaaggaattccatgcgaaagggtctaatcccatttcaacaatccctgcaggtgattctgtcgatgggcgtctacctgcaatcaatcaccgaatcaattccgcccacttccgaggcggtgccactaatcggcatgtactacgtcgcttcacttgcaattggtgggtgtgggtgctttatccccgtttttttggcgattttattttttgctaattttaaaaatttcagtttgcctggcaactgcgatgaatgtgtacacgctgaacattcacagacgtggcaccaccaaccagggcagacgcgtaatgccctgctccgttttaaaaaataactaaataatttttattctaaattctttaaaaataaataaataaaaccgcgccctcacttattttttggctcaattttaaggtgccctggtggatgcgcaagtacattctcggctacttggccacatttttgttaatccgtgtgcatgagcctgactcgatcacatga

SEQ ID NO: 71531 - DNA, 2844 bp, Heterodera glycines
atggaacatgtgatcctcgccgacatcgaaaaggcatttctgcaacttggcattcgacacgcggacagagatgcctgcagattcatttggctcaacaatcccgagacagcagagctcaatccaatcagccactccgaattgcgcatctaccgattctgccgtgtcagtttcggtttgacggtgtcaccattcctgctcaatgccacattacgagaacacctcgcgctattcgactccgacctagcaaggcggatcgaagagaatctgtacgtcgacaacatcatgttcgacgccaagccaacggaaaagcttcaagatttggtgacgcaagccaagacaatcttcgaagcagcgggcatgaaactccgagaattctacggaagcaacatcgaagagctaaaaaagctgcaaccagacgacttggcaaaggacctcgaagacaacaaagtactcggcattcgatggaaaccaaaacacaatcggctcatcttcaaattgccaatcttcgaaggaaaaatcacaaaacggacaattctgtcgcaaattgccaaagtctatgacccgctcggactcatgtcacccgtactactgccagccaagctcattcttcaagaagtgcaaaacttgaacccaaaatgggacgacgaattgccagcaaacatcaacaaggactggctcaaattgatggcacagtggctcgacagaggcgaagcaatcacaatcgaatttccacggcacatcaaagacatcgactcagtggaattccactgcttctgcgacgccagcaaatacggcatgagaattgccgtgtaccaaaaagcaaaaacgacgatcatgaaggatgaatgtaacctcatctacgcgaaaagccttgtcaaaccaatcaaagtggcagcacacgacggtacaatcccaaagctggaacttcaagcactgactctcggagtcaaagcagtcaaattcatccaagcccaaatcaaattcgccgatcatcaagtcatcatgtggacagacagtcaatgctcagtcgaacgacttcgagaaaacaagcgccaagatcgatttgtggcaaatcgattacaaaaaatccgagaagcgaattttcaagtcagacacgtcagaaccgactcaaacccggcggatatggcatccagaggcgcagatccccaatgccttcgaacagcactgctttggcgctttggcccgatttggctttcaaaagcagacaaatggccagaatccaacgtcatctaccgacccggagatgaattcaaagaagtggaaaagccaccaatcgttgatattccagagcaaccaattcaagcagtgcacagcttcatcgcatcagtcatggacgattcagtttctcttgccggcagcgacgacgaaagtcaacaaccacgaccaaagaagaagttcaaaattccgaaacgacgctcagcactgttacgacccatcggccagcagcaaagtccattgcaaggacaacacaaacgccgcaagcaattacaagactcaggcttacgcaagttatttcaagccatctcggaccaacaaggaagcagcaaggccaccacaaaggccatcgaggaaagccgagaagtgcagaaggcaccacgtcatgaacagatcgagcacgaacaacgaatggtgaggaaaagtcaacaagaagcaaatcgacatcttcaaccgaaaaagcggcagcaaaaagaaattcaagaagtgccacattcaacaacagaagagcaacaacgagaaaccaaacgccaacaaatcgaaagacaacaaaatgacgaacagcgtgccatcaatcaacaaacacgcagtaaggcttggcaagaattggcacgacaatttgactacgatctgatggatcagccggatccaacagagaaacaaccggaagaaacggatcaaccaacgaaatcaaagcagcaatcaacaaaggacaaagaggacaaagagctggaacgacatcgcatcggcagaaaaaagacaatcgacatgcaagaaaaacggcaacggtcaagagacgaatggccagaggaaaacgaaacgctgctcagctacgttcaacgtatttacggaccggagaattggacgtcagcatggcaaagaggacgtgttctccgagagctccatgaactggaagatcaagggcgatggatgattcatcacaaatccgatcgcctacaactcagcgtctcgcgaatgtatggaggaaaacgaccatttgccgagttccgcttcgtggaaggcagatactactcacacatggtgccagaagatgtgatctttctccaagcagtaccaaccgaagaacagctggagatcataacaatcaacgacacaacggcaccggcaacaaatacggaacaaacgaagcacccaacaaaaccacaacgaccacaatcgccaaaactcgaagaataccgcatggccgactccaaaccgaacacacacagccaattcaacctgttcgagccatgcgacaacacgcacacaacttgcgccaaaacagcgacttacggttccacagcgggcaaccgatttcaaatggaagaattccaaaacttccgtgccaacaatttcttcgaggcattgctctttaactggttaacacgcaacatgaacttgccagccgaagagatttgggcggcacacgaaggctacattcagtcagacacaacagtggaagaagtggcgcaaatgttctaccaacaaaaagttgcagacaacggacgacaaatcgcacgagaccagcatttgaacgaggtcatcaatgtctggcgtaactcctgtgaccgatttggcgaactttacaatcaaccggcacacaagcaa

SEQ ID NO: 71532 - DNA, 669 bp, Heterodera glycines
cagctttgggattgtaccgtcgtgtgctgccactttgattggtttgacaaggcttttcgcgtagatgaggttacattcatccttcatgatcgtcgtttttgctttttggtacacggcaattctcatgccgtatttgctggcgtcgcagaagcagtggaattccactgagtcgatgtctttgatgtgccgtggaaattcgattgtgattgcttcgcctctgtcgagccactgtgccatcaatttgagccagtccttgttgatgtttgctggcaattcgtcgtcccattttgggttcaagttttgcacttcttgaagaatgagcttggctggcagtagtacgggtgacatgagtccgagcgggtcatagactttggcaatttgcgacagaattgtccgttttgtgatttttccttcgaagattggcaatttgaagatgagccgattgtgttttggtttccatcgaatgccgagtactttgttgtcttcgaggtcctttgccaagtcgtctggttgcagcttttttagctcttcgatgttgcttccgtagaattctcggagtttcatgcccgctgcttcgaagattgtcttggcttgcgtcaccaaatcttgaagcttttccgttggcttggcgtcgaacatgatgttgtcgacgtacagattctcttcgat

SEQ ID NO: 71533 - DNA, 513 bp, Heterodera glycines
atgcgacaccaaatttcctggtccgatgaggctgtccttcatgtactgttccccgttctgctgccgctgctgttgctcaccggtgtggtcagaagtggacaacccatctcgggattgccggacgatggcggattcgacatgccggagaggtcggacggggccaaagtgggccatttgagacacgcattcagcattttggagccggagttggcccagtcagtttggagccgagagggcctgaaaaatccgatcagacggaccacaaccattccaatgaatgatcggttggacattggaaacaccggcgaattgcaaccgaaaggtcgtttttctgatcagagattaagagcaattaccttcttgatcactcactcactgtcagcaggcgccaataagccgatgaagcgaaggccgagaaaagctgagactgtcagcgaatacgacacactgaacgacgactttctgacggagtacgacctgctgaatttggacttcagtttggacgaaccgtag

SEQ ID NO: 71534 - DNA, 792 bp, Heterodera glycines
  unsure (1)..(792): unsure at all n locations
cagcacattcgaactgcccacggcgtgccactgattcggtatttgaacaaatgcaccaaatttcatcccttttcgtcatcaaaatntaagtaccttctgaccaacatttacnctggaaataatatacacaaagggaccacgcgaattgtgagttgcacgaccaatatttatgaatttcaactggtttcaaaatgcaattatttatttattttaattaatgaatccacaacctttgtttcccctttttgtcagatggtccaggaagtattgaagcgtttcgcgcggattcgttttgaacaatggagaaatgttagacaaatcaaaacgaagttggggtcgatgaaacggaactgttcctttcctcctgttgacgaccactcgtggaaacgaaaaaaagtgggaaacgaaggcggaaaggtggcggaggaggacggttcgatgtcattttatgtgatttttagactgttacctttttaagttatcgacagaattttgttttctccgtcacaaattcctcaaaaccttagcgagcgttttcaccgtctgaaaaaggtgatttgcaactctcccctcctcatttttttaaattttgcttacccagatggaccgcatttcgcggcatcaaatgatcgtgccaatttgcgggatgtcgtcgttcgtcggtttgtccaatgtgcgcattgccaaaatggccaagagttgcagcacccacaaatgatgctttttattcggatattttacacattaaatcttttgcctttcttttcttacaattaatttgattaaattaac

SEQ ID NO: 71535 - DNA, 372 bp, Heterodera glycines
tatacatcccattatgagcgctaaaattatcagagtgccgaaaatcgcatgtgatctaagcctagaaaaaaatggtgtaagtaaaatcgtaatacgctcaaaaagcttctcaaacaattttagcgcttccaattccttctacaatcgcctttatacatcccattatgagcgctaaaattatcagagtgccgaaaatcgcatgtgatctaagcctagcaaaaaatggtgtaagtaaaatcgtaattacgctcaaaaagctcctcaaacaattttagagcttccaattccttctacaatcgcctttatacatcccattatgagcgctaaaattatcagagtgccgaaaatcgcatgtgatctaagcctagcaaa

SEQ ID NO: 71536 - DNA, 372 bp, Heterodera glycines
  unsure (1)..(372): unsure at all n locations
atgttatataacttggaaaattatgtcattttcggcggatttcttccaattttggcactttcgctatttttggctttccgtttgtcccacagtgattttgtgcacccgccgagtccacttttttctgctgctgctgctgatcaacgcaggcgaaaagatgacgcgtccgatcaatttgtgctggcctccgtccacgtgttctcccccctccccgccgacgatgcaccgttatcaccgacaaaacaccgacaatttaatttgggagttgttgcgaatttgctcgcncaacttcttcccgtcccccccccccttccactatttatgggtaacgtcgaaccagccaatgcaattgccgacgaccgcggttattaa

SEQ ID NO: 71537 - DNA, 839 bp, Heterodera glycines
atggcctccgtttcaaacgattatcgacaaatgaaaacagtcccaccaccatcaagttcaatcagcagcagaaaacccaatgtttgtgatttgttatttaaataaaaaaatttataaatttatagaatatttttttgacaaaattaattcatttataaagacattttattaatttgtaattcattttaatttagcaacataatagtaaatcaatattattttaaattcataaagaaatttcataaaagcagagaactgctaatgttaacttttaattacgaaatttttttgagtttagttgaaaatgatttatttttttagccaaaaaccaaaaaattaatgaaaaattcgatttttatgcgttcttgcttcaatgatctttttaaatgccataacagagtattttttaaaaggacgtccttagcttacaaaaattcaatttttcttatattttattaataatcaatttttaactgttttctatttaaattttaaactcaaaattttgctaaggcagaatatcagccaagcaatcagacgggccaaggcaagcgaattgtggacagtttatgggatttgcgattggattcaattcttggcgatcaacaaatcacagaagcagtgcatcaattaattgtggcaattatcattattgcactcatttcagctgttttggtcagtttcttttttttctttttgtttttttggaatattttaaaagttttatttaaataatcattatccaatcaataaaatttacagtatttagaagtctaattttagtcttgagaaaagaatctttattagcttaaaatataattaattttgcaaaaaataaa

SEQ ID NO: 71538 - DNA, 344 bp, Heterodera glycines
cttcggcttcttccgattcgtctttgacttcttcgaccgcctcgtccactttgaattccacgaataacacaaccgaaagcgaggaaccttttcacggccaaagccgcaagggaacgtcgcaggaagagagccgaaatgaggcgagtgataaaacatttatgcaaaaaaaggaattgcatttaccaatatcagacacatgcttctcgcctggacgattccatcctcaaccgtttgttgcacatcgaaccgccaaatgggaacaagcaaaagtcgttgaacaacacgtgccatacatttgtgacgaacagccgaaacgaaagcccaagcgatttccgttggattga

SEQ ID NO: 71539 - DNA, 166 bp, Heterodera glycines
atggcgccaattaatatgagctcagaagatccggtatgaattaatatgatataaaataatatataaatatatttttatttattttcagctttatttggcctaccgttctgtcggtccgtccgccgatttaattgtgccggccgttgcgctgaatttggttgttttg

SEQ ID NO: 71540 - DNA, 1157 bp, Heterodera glycines
atgtccaattttgctgcactgaaagcttcacagaatttgctcggccaattccagcaacatcaacagatgttgaataattgtcacgcatcgcccgctattcagcgtcaaagatccatcgattatgacacggagcgggagaagaacagcgaaatgggaccaatgacgggcggagttgggacagcgatgtcaactgccgatttggtcaccgcacttgggacaatcaaagcgcagaacaacagcagcaatatcggaacggacaaatgtgaggataatgaaaaaacaagaaggaatttgaggaatttcgttaagtaaattctgacatggaacacctcaagcgggacaacgaattccccgtttattcgccctctcaattggccaattccatcatttcgcaatgcaaaactgaccaaccgcatcagtcttcggcatccgttgacttctccaacggatggagaatttcatcagacgcacggagggatagcagtgagccggacggagaaattggctcggacatagccgaatcatttggtgggtttgttactttgggtctcgatatttgccaccatccccaaaaccgaattcaaaacataccgagaagcattatgtcgttaaataagtaacaggaagtaataacattcgaattcattgttagaaatattattgccacagtatgacgtataatgaacttaccgtctcaacaggtcgatgcattgttcaacaactgcaaacagtctcaagaaagaatccgatgctcgcagtgcaaatgcgccgggaattgatggacgtgtgcttcaaatacgaaatgcaagcatgcgtcatcgacggtggccatggttgactcgccattacttcatgtgatttttttcccttcaataatctcgaaacttttgtttgtttgttttgcgtttgtcagggaaaatttcctatgtggtacttcttcctcggctttttcttgataagtatcacaacaaatattatttgtctcttcaattcattttcctatggagaagtcaacagattaaacatactgaaccattttggcaaaattcatacccctgcatttgattttgcatattcccggttgttatttgattattggtcactgatcacctcttccgatttcaagtcatccaaataccaaaatttttgattctcta

SEQ ID NO: 71541 - DNA, 304 bp, Heterodera glycines; identical to SEQ ID NO: 51570

SEQ ID NO: 71542 - DNA, 355 bp, Heterodera glycines
aatttatcaaataaagagatagccatttttctgggataacctctaaatataaaaatcctctgtgaaataaaatggcgattgtgcacagccctccgtctcatacgcaagcgcttttgtgaggtataaaatttctcaaaaaaagagatagccatttttctgggatagcgtctaaatttaaaaattctctcaaaaataaaatggctattgtgcacagccctccgtatcatgctcgagcgcttttgtgtgtgtataaaatttctcaaaaaaagagatagccatttttctgggatagagtataaatttaaaaattccctcaaaaataaaaggtatattgcgcaccgccctccctatcatg

SEQ ID NO: 71543 - DNA, 274 bp, Heterodera glycines
aaaattccctcaaaaataaaaggtctattgcgcaccgccctccctatcatgctcgagagcatttgtatgtgtataaaatttatcaaaaaaagagatagccatttttctgggataacctctaaatataaaaatcctctgtgaaataaaatggcgattgtgcacagccctccgtctcatacgcaagcgcttttgtgaggtataaaatttctcaaaaaaagagatagccatttttctgagatagagtataaatttaaaaattccctcaaaaataaaa

SEQ ID NO: 71544 - DNA, 1329 bp, Heterodera glycines; identical to SEQ ID NO: 43988

SEQ ID NO: 71545 - DNA, 228 bp, Heterodera glycines; identical to SEQ ID NO: 65316

SEQ ID NO: 71546 - DNA, 49 bp, Heterodera glycines; identical to SEQ ID NO: 51181

SEQ ID NO: 71547 - DNA, 561 bp, Heterodera glycines
atggcatgccatcccgaataccagcaaaaagtacatgccgaaattgttgaacattttggcgcaattgatggtgaggaggaagacgatgagcagctgctgcaattgactgcctctgatgtgaacaaattgccgtatttggaccgttgcattcgcgaaaccatgcgcatgttcccggtaatgatgagaatttggtgccacaaattattaaattgccacatttgtactggggatttcaaatgtttcattaaacaaacaaagctagagctccccataaaaatatagatttttaacaaaaaaaaaatgggataaaaattaaaattgataatcattatttgtctatttttaaagcaattaaaaaaaacattttaattcctaaacgtaatgggaattaaaataaaattaaaaataatcataattcaattttagctgattcccatattggagcgtgagcttcaggccgacttgcgcatctgtgacaaaactttgccccgcggggcaatcgtcgccattatgccactggtcattcaccacaacgaaaaagtgggggaaggataaaaaaaa

SEQ ID NO: 71548 - DNA, 782 bp, Heterodera glycines
atgactgggcttccgttttcaccttcgattgactcatcaaatcataaaaccaccaaactttttcctttggtggttcgttacttcaatccaaaaaaaggaatttccgtcaaattgatcgacttagaggaattgggtggagagacttcggccgaagtttgaatcatactttattttttggcgaatcagctcatttgcgtgactcattccgggtttttaacgggaaattttcaaaattttccccatttttcagaattttctgaaatcaacacttaactatgtcgataaatggttccgtgttgaacgttttccaacgaatctaaaatggatttctctcaaggaaatgaaagtcactagcgccgaagtgatgagtttggctgaacagattgctccggaagtgaacgacaatgagctttttgacgaaattacgacgctgaatgaaatacttgaaagtatttctgacgagaaatttggtgaaatgaacgcagaacagaagtggatgaaggttttcgaggcggaattacccaatcttgtgttgctcgtcagcaaaattctttcaattcccgtgtccaatgcatgcgtggagcgcgtcttctctttgttcagctcagtggactgatgtgcgcaatttattgaaagttgaaaccgtgaaaagtctggcccaaatcaaatcgaattatgatctcacttgcactgaaatgtacgatttgctcatttcctcaccaaaattgttaaaaatgatcatgggaggtgaaatatataatatttgatacatttttgattga

SEQ ID NO: 71549 - DNA, 3367 bp, Heterodera glycines
atggctgttgcagctgctgtgattgtcggactgcaatacttcatcaatcgggtaacatcttttgtaggtgatggcaaagttggtgcttgagagaggcagcgatttgagaaacgattgggggagggtaagtttttgtaaacaaaaaaagtccaattccgagagtgatgagacaaattttcaatgttgttgacccattttcctttttttctcaacttttgattatcatttattccaactaaaattcacttagcgtttcttgcgctgtttttcataagaccacagtgttgccattgccttttttgttgatttgctattactccttctgtttagctcgcttacacagaaatatcatggaaacagttctacacggactttttggaaaagaacaatgtgtgctaatgatttggcgttacacttaacggattccccgaaccattcgtttaggttgaacgcctcgaagttattgacaataaatgggtccgtgtcattaccagggagccaacgcaggtgacgaagcgaaacaaataaacggttgtatttttcatttgagaatttagaccgttttttacttcaacatcggaagcgtagacacttttgagcgcagtttaacccaggcacagcaacatttgggcatggagacgagtcagcagcaggtgccggtgttgtacaaaagcgaaacggacatgtgaggaggctggcaggccattgccaaataaaaaatgaattcttttttttcagagtcggaatgattccccatatggttaactttcttatcacgggcatcttcctgttttacatgttcagaatgtttcgagggttcggaggtgatctttcgaattattcacatcatactttctcaaaaacccaggaaaaaagcccggccaacgtggcggcggcggaggttttccggggatgggcaatctcttcggtgttgggcagtcgactgcacgggtcatcaacagagaggacgtgaaaacggcgtttgcggatgtggcggggtgtgaagaggcgaaaatcgaaatcatggaatttgtcaactttctgaagaaccccgcacaatacaaagcactgggcgcaaaaattcccaaggtcattttgttgattcattcgaattttcatcttaattagccatccttatcttctttttttgcagggtgctcttctgactggccctccgggcactggtaaaactcttctcgccaaagcaactgctggcgaagcaaatgtgccatttatcactgtgtccggttccgagtttttggagatgttcgtcggtgttgggcctagccgagttcgggacatgtttgaaatggcgcggaaaaaggcaccatgcattctgttcattgacgaaattgacgctgttggacggaaacggggcggaaagggcgccatgggaggccactccgagcaggagaacacactgaatcaattgctggtcgaaatggacggtcggagcggggatttgtactacgggcatagaaaaatcaccccttggcaaaacacaaattttcgcgagggggggacaaactgcaccctcttcgcattgggaggggtggactaattgtaagagagtttggagtgggggaatcgttaccaagtctatcctccgcgagggtgcaccccaaaatttcgccggccgaaatttcgccaaaaatattttttaatttggaaattttcaagaaaattcttagaaatttttatatggaaattccaaggaaaaattttggaaaaaaaaattttattggaaaaaaaaattttagcttatttcttgaaaaattgacccaaaattggtcttttttttgcccgctggctattcatccatccctttattggactgaatgccaaagttaagggttttcaactgatgaatcgaacgttgtggtcatcgctgccacaaaccgcgtggacattctcgaccccgcgttgatgcgtccgggccgatttgatcgacaaatattcatccccgttcccgacatcaaaggccgtgcttccatcttccgcgttcatttgacaccaatcaaaacaaccttggacaaaatcgagctttcccgcaaacttgctgcgcacacgcccggattttccggttgcgttagtcacatgtcaatttattactgtttcttttcaggcgcagacattgccaatgtttgcaatgaatcggcactaattgcggcccgaggttccttttttatggatgcgatttcaatctcgctcctctcctggagcattcccccgtagtcttcgaaatttttaaaaacaaacatttttcgtttttaatgttatttttttctatgaaaaatgtaaaaaaacttttagtttaggaaaacccctctaattgtaagaaaattagaaaatttgccgttgttttagatgcacacgatgaggtgacttccaaggactttgagaatgccatcgagcgggtcatcgccgggatggagaagaaaagtcaggtcctgcagccggacgagaagaaaacggtggcgtaccacgaggcgggccatgccgtggccgggtggtttttggagtttgccgacccattgttaaaggcaactacttattttccaaaactgatatcaattatttattttcccattgttttgggtgtcaatcattccgcgtggaaagggcctcggctacgcgcaatatatgcccaaggatcaatacctttactcgaaggagcagctgctggacagaatgtgcatgactttgggtgtgtaacctgtgaattttgtgtcacttaatagcgcttaaatttctaattttaggtggcagagtgtcagaggaaattttcttcgggcgaattaccactggcgcccaagacgatttacggaagatcacacagatcgcctactctcaggtgggcatttgcattagtaatcagttttaaatttcaccaataattaaaatcattgttgtttttgtcttacgttggtttcaggtggtcaaattcggaatgagcgagaaagtcggtccggtgtccttcgacactccggagcctggcgaaatggcattcgataagccctattcggaggctaccgctcagctgattgaccaggaggtgcgcgacatggtcagcgcggcactgcggcgaacgcgcgaacttttgatgtcgaaggtggaacagatcgaacgggttcgtgaaacaatcagaaataattaggagagaccataagcatttacaaaaacggagaaaaatttgaccttcgtataaaaaatcgggcccgagacacccccccccccctgtcccaatcgtccgttgtatggcccttgggctgagtcaccccttggcatgtatgattcatttttcttatttgtaggtcgctcttcgactgttggagaaggaaatcttggcaagggaggacatgatcga

SEQ ID NO: 71550 - DNA, 434 bp, Heterodera glycines
atgcgacgattcgtcaactcagccaaatgtcaacgattcgtcaactcaatgattcgtcaactcagccaaaatgcgacgattcgtcaactcagtcaaatgtcaacgattcgtcaactcaatgattcgtcaactcagccaaatgtcaacgattcgtcaactcaatgattcgtcaactcagccaaatgtcaacgattcgtcaactcaatgattcgtcaactcagccaaatgtcaacgattcgtcaactcaatgattcgtcaactcagccaaatgtcaacgattcgtcaactcaatgattcgtcaactcagccaaaatgcgacgattcgtcaactcagccaaatgtcaacgattcgtcaactcaatgattcgtcaactcagccaaaatgcgacgattcgtcaactcagccaaatgtcaacgattcgtcaactcaatga

SEQ ID NO: 71551 - DNA, 120 bp, Heterodera glycines
tgtccgtttggggtactcaaacaattatggggagcaaaaatccaacgcagaattaagtacaggctataagggagctattcccgcaggattcagtctccccataaatctggggggcatcgg

SEQ ID NO: 71552 - DNA, 660 bp, Heterodera glycines
aaacaaaaaaatcgattttttcaagtgtccgtttggggtactcaaacaattatggggagcaaaaatccaacgcagaattaaagtacaggctatagggaagctattcccgaaggattcggtctccccataaatctgggcgcatcggttcggggggactgccccgaaaacaaaaaaatcgattttttcaagtgtccgtttggggtactcaaacaattatggggagcaaaaatccaacgcagaattaaagtacaggctatagggaagctattcccgaaggattcggtctccccataaatctgggcgcatcggttcggggggactgccccgaaaacaaaaaaatcgattttttcaagtgtccgtttggggtactcaaacaattatggggagcaaaaatccaacgcagaattaaagtacaggctatagggaagctattccggaaggattcggtctccccataaatctgggcgcatcggttcggggggactgccccgaaaacaaaaaaatcgattttttcaagtgtccgtttggggtactcaaacaattatggggagcaaaaatccaacgcagaattaaagtacaggctatagggaagctattccggaaggattcggtctccccataaatctgggcgcatcggctcggggggactgccccgaaaac

SEQ ID NO: 71553 - DNA, 921 bp, Heterodera glycines
  unsure (1)..(921): unsure at all n locations
atgccaaaacaaaacgaaatcgttntaaaatattcctttctggacttgacttggtttcttgatatcgaagctgttttctacgctatttctaaaacggttataccaaacccccagatttttgaatccggttttcagaaaaaatgccttgtggtgaaaacaatatttcacatttcactccataactttgtgagttcggcacggatcgagaccgggataagaccattggaaagagcagctcgagctctacaagaaggtatggaaagaaaaaatagttatttctgggactttttcagaaatcagaattaattctccaatgtggcccaaattttaggcccccagccacagccccttgcttctcccagttttaagtcttggatttgtcaaataaattcaagacttcaaattaataatcaaaaattctcttaaaatttttttgaacccaattcaaaaaaggaaaaaaatttgcagtcaaaaaattattcgaatttctccaattttgtttccataatttccgaaagttattcggtatcataatgccaaaacaaaacgaaatcgttttaaaatattcctttctggacttgacttggtttctttatatcgaagctgttttctacgctatttctaaaacggttataccaaaccccagatttttgaatccggttttcagaaaaaatgccttgtggtgaaaacaatatttcacatttcactccataactttgtgagttcggcacggatcgagaccgggataagaccattggaaagagcagctcgagctctacaagaaggtatggaaagaaaaaatagttatttctgggactttttcagaaatcagaattaattctccaatgtggcccaaattttaggcccccagccacagccccttgcttctcccagttttaagtcttggatttgtcaaataaa

SEQ ID NO: 71554 - DNA, 392 bp, Heterodera glycines
atgctttccgtgctgttcgccggtgtcattgcgttctgtcgccagtcccgtaaaggtgccatcattttctctggccttggcttggtcatttttctcgtcacatggcttctcttttctgcggcatttccgctcactgtggtaaggccaacaaaaaattaatttaaaatttaaaaaaatagttggaaataatttttagcgggtattttgtaatcgtctatcggatttatgcatttaaaactgtaaaatttagttcatttaaaaaaattgctaaaattttaatgggaattactaaactttttttgaatttttagttacaaatttcaaatttctccaatgaactctcaactatttcacttggattttcaaaatttgtcaaaaaaaaactccaaaaa

SEQ ID NO: 71555 - DNA, 324 bp, Heterodera glycines
atgcaggagccgaacacaagccctggggcaacatcaaaggcattggggtaattaattattaaaaaatactgtagtcggcttactgtcgggaatactgtgtttcccttgtcatggaaggcatggcggaattaattaattaaaataccgtatcctgggtattttcgtgaataccatatttcccctgccatttaatgaattttcagtgataaattagtgcccggggcactgccgctggcaatgattcgtcaacttagcatggaacagaatgaagctgaacacaaattggaggcactgcttgcacgtctgttcaacggttcagcggag

SEQ ID NO: 71556 - DNA, 916 bp, Heterodera glycines
atgaatgccatcagcggattggacctgccatatacgcgcatggaaatgtttgctgctgccactaaaccacttatcggaacccagggaattgtcgaaaatttgagcgcattggctgactttgatttgagcaaggtttggaaaatcacgatagcatttaatctttctttaattttagctgcagtttccatctgaagcgaattcaaatgacccgaaccaaggggcgaacatcttttcccgacagtacattgaggaatggtttcgttacagcgccagaaatgtgctcaaattaaattacgaccagtcaagcgcggataacaaagcaacggctgcgaattattcatctattgaaacgcaacaacagcaactttattcgacaacagcgtccgtaggaacaaacgagcaggaggtcacaaaattggaactgtttggttggtaaataaatggatattttcttcagatccagttcagcgaagctgccgctcttggagttatccaattaaactgtcttaatgctcgtaacattcagcagaaagtggcagagtttgtggaaacattggaatcccatcccaatttgtaattgttttatttttttcaaatgaatacgatcaatttcagtcgtgaccttcggacttgcattgaccgcctcctttcattgagcgctgatgatgagaattttacgaatcctgaggacactgtttcggttgtcagtgtcagcgaaacttccgtcagaggtgcatttgagggaccagtttatcccccctccctccaaagaatttaagcatttttatttattactacattttgggaaggggcagttcaccctctccatacaaaaaataggggggggggtcggggtggatttaatataattctgtatatatgatctgagcacgtaacaacatgttcctgttcagca

SEQ ID NO: 71557 - DNA, 1329 bp, Heterodera glycines
atggacaatgaaaagatttttaggaaggcatcagcggaccaagaaataatcaaaaagaatatcggagaatgggagagcaaacgggaggaagtcacgtcattgattgcccaagcgaagaatgacttctctggccatattcaatcgataaagaatgggaaacagctctcacaattgccaaaaatccaagtgccaaaaccgccgcccggaccaaaaatcatgccattggcacccattcaaccccactcgtcgtctacttcactggttaacaaaataaatgcagtaattgcttttctttataattgtataaatttcacgaaattcagcttcaaaacaatggcgggggagcaccgcaacaaatgccaccctcaccgcttccattggaccgtaaagtcattactccgcctgggcggtctcacattggtgcttccgctccacaacagcagggccttgccggcgcgggacttggccaggtgcgaattgcctccctaaactccccattggtgagcaaatgaacttaccattttcttgcttgggaaggggtggttattgttttactgaatactttctttttttaagaatccgaacatgaccaacgccgcttccgccggtcgccagtccatttcgtcttcggccaacgttactccggtcaaattccacagtcaaccgactgcgattgctgcactttcgcaaccgccgcctcaggcacaccctcctggacattttactacaattgcgccgattggtgtccgtccgcaaaattaccaaaatggcatcaccgttccgtccgcatcatcttcctcgacaacgattcaacatcagaaaatgagtggagcacaacgtcattctcctcagctgagtggagcctcaatgattggcggggctcaattccatgccaacgcccctccgcctccaatacaacaattccatgtggttggaaattcattgtcttcggttgggcagcctaatgccaccttgcaacaaaaacagcagcaggcaaacgctggtggtggtggctcatttcaaacatggggcggtggatggggtgatcagctcaacaacatcagcgagttgttcggtcaggggaggtcgtttggtccgttgggcagtgaatttggcggcagtggtgggggtgtcgtcgatggaatgcgctcggccagtgtcatccatccgccagctgccggcgtgatcggtgcgccctcttcgacggtttcgaccgggaacaatgtcagcagcaacaatcccccgtcttcgcaaccgatcggtgctggccgcaatttgcagaatatgtcaccttcacagcagcgcaacggatggccatcttttggatag

SEQ ID NO: 71558 - DNA, 804 bp, Heterodera glycines
atgcctccctccgtgaaaggctatgatgaacaaattgatggcccgctcaaaacttttttggatttgtccaagaaaattggcggcgatgtggccacaatggtttgttttttgtctttgattttttggtaatactaccgatggtaggaccccttttttgaaaaaaatatttaactttttaaaagtcactgaaaatatttttctaagggttttcggggtcgctgaacacgaatctgacattcatttgaccaatttcgaatcccggacccgaattcgaacaaaaaatcgaaaatctaaaattttcaaaattctcaattttgttcctaaacgaataaaacatgcaaaatttagtctaaaactattctaacaattaaaataattcattctatgtaggatctaacgaaattgagaattttgaaaattttagattttcgactttttgttcgagttcggatccgggtttcgaaattggtcaaatgaatgtcagattcgagttcagcgaccccgaaaacctttagaaaaatattttcagtgacttttaaagttaaaatatttttttcaaaaaggggtcctaccatcggtagtattaccctctattcttccgccgatctcttttatccaaatgaaatcgctaggctccaaccacacatttcttttccttttttcctctttttttttgttgtattctgacgtttcatcaccgaatgtatttctccgtctttcccctctccccttcttttcccacatatccctcaagggaaaccacccaaattcatcattttttgagtatacaaaaaagcaaataaa

SEQ ID NO: 71559 - DNA, 1142 bp, Heterodera glycines
  unsure (1)..(1142): unsure at all n locations
atgctcctctattatttagccgccatcttcaaagggcttcatcctcgggtagacgatgattttgtggataaattgaattaccattacacatccgccattattttcgcgtttgccataattgtctctgccaagcaatacgtcggtcggtgcgctttggcattttgccaatactttggcccattccctcccccccccccctttaggatatcccattcagtgttgggtgcccgcgcagttcaccgatgcctgggaacagtacacggagaattattgttgggtggagaatgtgagtaacccgggccaaccaaccactgatcaatcagtcccaaatttagacttactatttgcctttgaccaacgcttttccgttggactacggcgacagacggtaaatgcgcctttggggccgaccgatccattggctgatcaatcgtagcaaaaatgctttacctaaaggtacagggcgcgtcagatctcttattaccaatgggtgccttttgtgttggcgttggaggctctgatgttttacattccgtgcataatgtggcgcggccttctccattggcacagcggttggtcaagcattgcatttcacaactcagaaatgccaactctcggccacttttgcaggaatcaacgtccaaaatctcactcaaatggcatgcgatgcgcggatgatggatgtgaggagaggggtgggcaggtgaattgactgggatgagtgatcggccaaatcaggtggacgcacggcatgccacagtcaggacaattgcaggacacatggaggacacgttggaactgcagcgagaggtcggccaatggcgggggaagtgatcatacagttgttgattgatcgatcaatgggatggggggaggtgatcacacagtgatcgatcgatcagtggccaatgttggatagggggaaggcgggggggatgtccaatttgccatccccttaaatgatgggtcagctagctgatcagtgctttcttatcaattgtcctaccattattttatctctttccccttcccttttttttagatttacgacgtgtccaatttttgcatgggccgtcgttggagttcttacgtcacttttctttatgntgtcatcaaaatgctttacctgggcaatgtcatga

SEQ ID NO: 71560 - DNA, 644 bp, Heterodera glycines
atgatcaattacatgctgctgttctcgcgccagggcaagctccgtctgcagaagtggtacgtcgcatatccggacaaggtgggcaacacacacagcgggagcagaccattgacagtggggtcgggagcggttaattgcttagatggctgctctcacattggatttgactactaattgtttgtgatggcaaaattgcactagcccgttgtgattaattatctgattgtttagtttaatttttgtcccggtttatttagagattaaacaagtggtgagcggcacggtaaaatttaccggccttttttgtgaccggtagatttaccgaccgactatctctgaaaaaccggttgtttttaccgttaccggaaaaatgcatttgccgttcaatattagctagcatactttagctcttacaaaattgttaaaaaagactgcattttcaggcaaaaaagaaaatcacccgtgagttggtaaccaccattttgtcacggaagcccaaaatgtgcgcattcctcgagtataaggacacgaaagttgtgtacaaacggtgtgccatattgaaaaccaattttaaataaataatttaatttctcagttacgcttcgctttacttttgctgcgccattgagcagacggacaatgag

SEQ ID NO: 71561 - DNA, 913 bp, Heterodera glycines
gctttcaccttcaatccgactcaaagctcaagcggaaacggcgacggaagcccaaaagaatttggcgctgccggcacaacatcgccaccacaaagtgccggcctcgttaaacaccattcgtccaccaattgcaacggtaataaataaaatgggtaattaagatggacatttaaaaaattcaattttgcattttaagggcgtttaagcagcgattcgcgcccttcctccccgccggcggaagcctgcacggaaaagcagcagcacaaaattgcagcaaaagttgcaggacaatcggcgggtgatggtgaagatgatcagggagaggaagaacacgtgtgcagccttcagttcatcaactcaccggcgatcagaaggggtgggtcagaaaaattcttaaaaatttaatttttttttgtaaaaataatttgaagcatgtcgttcccccccccccccccctcgtcatttccacccgctcatttcttccctcgaaaattaaaaaaaaaattcttaataattttttaaaaagaacttaaaaaaagatttagcgttatttatgatgcattacagtttttttcagtccaaaaaatcgctgatacatttttaatttattttttttgaatttttctcataaaaattttttaagattttttcttgaaaaatttaaaatttaaaaatccaaaaatctaatttttcaaaaaatttagtgccaaaattgggcttgtgcctttggcttggcacttccgctggcgccgttgtggccttccaactccaagtgccaacaaatcgtaccggtgcttcgcttacggtcactccgtcgggtagggaccaatattttgttgattttccaaattttcaatttttataaaattaaaaatttaaatttgtgttacagcaatgtttaatgggccaaaag

SEQ ID NO: 71562 - DNA, 65 bp, Heterodera glycines; identical to SEQ ID NO: 54797

SEQ ID NO: 71563 - DNA, 353 bp, Heterodera glycines
acacgccgtccacaccattcaatcaaaaccaaccaaatccccactcattagctcattatgaaatttgcccctctggctttgcttgtgatccttttggtaggcacttttataagcattcattgaacaccggtcaaaagtgccatgcttcaggtgtctttggtcgctgccgtctctgctaattccaacaacccttttgatgcggacgcggccgacaacggtggcatggtgcgccatgctttggcttctaatttccgtttttggcatttttgcctttgactcattaagaagcgcgtcaaacggcagcaacagcaatggcgttggagtccgcaacagcagcgctgggtgccaataaa

SEQ ID NO: 71564 - DNA, 897 bp, Heterodera glycines
atggcaacagcccccgcggcattgtccggccatcgtttgacacccaattttatgtttccgcccactgcttccagtacgccaattcaacgcgatccgtaattttattttttatgaaaaaattaaaaaaaaatgttttctcttggtatgttatgttcatttctcatcataattgccatatttgtatggacaaataaaatcgcaaaatttttagggatgaaattttgaaaattttaagtttttcaatccttatgagatacatttttccacaaaaaatattgaataaaaacccctacaaacatcagtccatccctactcatttctatcccaaattttcttgttttatttaaaaaaacaacaaaaatactgtatttggattattgtaatttaccttcattaattatttgtaattcaatttaaatcctattgtcctgattcactgtcgcattttctaaggaccaaaagtttacattattaaaaaaaaatttaatttaattcattttcaatttttattttatttcccaaatttttataatataaaaaaattaatttcaatttcaatttaatttttctttttcttttttgtttttacttctaaattttacataatattaattatattacaattttatattatttttttttccaattttacttacaaaattaaattaaatttcaatttattttatttgcaggtcaatggactttgagcacccggtgtttatgcaaaatcaattgccgatgacaaatgccaagcagcgcatgcccaactacatgaagcagcaaccaaatgtacagcaacaacaacaacaacagcagcaccaccaacagacgagcagcgacgactttgaccgggcagtggccgattcaatgcctgagttgcacaacagaagctttcag

SEQ ID NO: 71565 - DNA, 132 bp, Heterodera glycines
atgcagaggctcggtcagtgttgcataactaaatgcattgacaaaatttaattcaaataaatttttaaattatcagaaaattttcggcatggatcactttgtcctcatatggcacaattattatgtgcatag

SEQ ID NO: 71566 - DNA, 113 bp, Heterodera glycines
ggattatttttcaaaacacctcgtagacagactggggaataattggagactgcgggattaatagagactgggctataattagagcatatacggtaattaaacatccattaggt

SEQ ID NO: 71567 - DNA, 53 bp, Heterodera glycines
ccaaattttcaattttaggacttccaggcgccttcttaaggtgctgattgacc

SEQ ID NO: 71568 - DNA, 431 bp, Heterodera glycines
  unsure (1)..(431): unsure at all n locations
atggagaaggcctgcaaaatttggagagattatatcgattttagtgcgctaggttcgatgaaactttttanaatataagcctaaactttttggcctgtttaaaaaggaattaaaaatttttaaaaattttattcatctcccttttgatagaaaaagcatcagagagccttatttaacttttaattaacatttggtgcgtttcaaagcagtttctgaaaaaatatttatgaatggattttgctaaaaaaataaaatagtgaagcttttaaaaattaataaaaaattttaaaattcagaaatacttggagttagcatcatagcagtgctttttctttgtctttttgatgctctccgcaaaatctggttcgcttctgaccagttataaaaaaaaagtaaacctaaaatttttcccatatttaaaaagcaataaa

SEQ ID NO: 71569 - DNA, 155 bp, Heterodera glycines
aagcctaaactttttggcctgtttaaaaaggaattaaaaatttttaaaaattttattcatctcccttttgatagaaaaagcatcagagagccttatttaacttttaattaacatttggtgcgtttcagagcagtttctgaaaaaatatttatgaa

SEQ ID NO: 71570 - DNA, 81 bp, Heterodera glycines; identical to SEQ ID NO: 58971

SEQ ID NO: 71571 - DNA, 923 bp, Heterodera glycines
atggtcgttcagtgtgtcgtagttgtcccagtcttccgctctcgcctcagccgactgctggttcgtgttgaagttgttgcggcctcgtttggcctaaaaagccaaaacattattgtatgtgaagcacataaaaaacaatcaaaatgatgacgatgatgtcatgcgaaaatatagctaaaaagtatcgttttcttttttttgattggtaccactcccttcaatacctcgtccacccgtttttcaaaaaaaaaaaaaatttttggtgcaaaatctattttaaaaaagtaaaaatttcagattttttcaggcggcgacgtaccccttgcgttccccagaattttgttccaaaagtgcatcgcaaaaaaaggactggaaaagcaaaaaaaaaaaaaaaaaatcgtcgcccgggtgtggtaccccgtccaagccgaaatcctgggaccgtccctgggaaatgactgtcagaaatttagggtggtctcctctttgggaaacagaaataatgtccaagagaatatatatatatatatatattacacatacgtattccagtgcaatgtacacctgtgtgaaaggaaaaatgggaaaattggatggacaaatatttaaaatgcaaatgaaaattaaagtccaactgaccggcgcagggagagaaatggacgaagagacaatttggtgtccaaaacagagggcctttaaaaagaaatggccaaatcaatcaaacatttatttggacatacgaatgtgaactgttggattttgtccattgaatattcgttgtcgtccaccaaaatggcgtagcgcggcacgcgagcagttccctgggggaaagcgcaatttaatttaatttgatttaaaaccccaaaaatggtgtatacatcatttcaagacagtcctttattcagaaaaaaaacataaataaa

SEQ ID NO: 71572 - DNA, 452 bp, Heterodera glycines
gctcttggtcaacttgggcttgcacgaacggcgtatgagactgccatctctttccaaccggggcacatcgacgcacggattaacctctcaacaattcttcagcaattggaccagtccgaacttgcactcgaaaccctcaaagacctcaactatgattcttgctcccacatccctgtaaagccgtgcccattctttcccacccctcccaatatacaaggcgtagtctagccatgaaactttttttgctagttggtctaatttaacctaaaaatattaaaattccagaaaaattaaattttattttaatgaagcacgggaagtgaccttctccgactgtacatcctttctttttatcccgttgaaaataatgcactgaatgcttttttattttaggatgaacggcttctttgtcgtcaagcggaggtgcttttggagcaacggaaggccgacca

SEQ ID NO: 71573 - DNA, 1401 bp, Heterodera glycines
atgactcatcactcgccgtcctttttggacattcgaacacggaacgaacttttggcacatcgtctcgcactttgtgaccgagaagatgaaattctgagacacttctacacatttatgagcccaaatgaacgtcgtccaatggaaaatcaacaatttaatgctcaattagaagatgaaattgaggcggaaccaatcgacctaaatttggcaattatttcttatggacgccaatttaacaaaagtcagaggggacagcaagagggactcagcggtgatcaggtggcacaaagcagaggcgaatcaatgcccgttaataagggtcatttgcttgattaggttgagaaggcaattacggcattggcatggcttcatgcttcgtccatgggatcgcctcaatttttcgggccaaattctgtccttccgcacttttctcagccaaaacatgaaaaatgttttgtgaatcgaattaattattaataaggaaatttctcaaggaattagccattaaaaattggcttcttaatctgctgctgacacttccaaattgcgaatattttcgaaaaaatgaaccaccgttgcgcaactttcttcaaaacgtcaaatttgaattgattgatgagaaagaaaaaacaaacgcagaaaaaggcgagataaaaagaaattgaatttaaataaaagattttaatcaaatattaataattaatattttttattctcatagatttgccaattgttttatgccatggcaatttttgtggcgataatattattatctgcccaaaaggcgaaacacagcacagagaaggggtgccatcttctgacaattggccaaacattcgcggctgggaattggcttatttaggtaataaaatgtcattagatttatttagaatattaaaatttgtccactgaactcctttaggttaattaatttgtttattaactctttagggtatggcatttccgatttggcacatcttctgttgtccagcgtcaactcgagcttgcgcattcactttctggaccaatgggtcgcactttacgtgcacaaatttgagcaatttcgccaaattcagcgaaacggaaaaggaggaggaaacacaatgccaaaagttttcgccaagttggaaaaaacatgaaaatgctattgagaaataaaatatttagcaaaaataaattggaacgcatcgtaaaacgacaaaagcaacaattccaagcatcgcttcccggccaattcctccgagttttgcccaaattagcgactgattatcgaaagttggccgaagcgaaagcaaatccgatggaaagtgaacaaaaccaatggaaagggtgcgaattgctgggccgaatgatcggaggatttgaaatgatccgtaaggatttcgaacgaagaaaatcgat

SEQ ID NO: 71574 - DNA, 2584 bp, Heterodera glycines
atgccttcaaattcgacgcctttcgatgagggaaaacaaaaaatggcagagaaaaagtaacaaaaagcaattacataaatgttcaaaataacatcctaattaaatatttaattgcttttttgaaattaaagcaaaagcattccgtcgtcgtcgtccatttcgaaatttgcccctttttcttcgtctgctgctgctgaaattccccccgaaattgccgcactttctcaactttcgatcagtgattctccgaaagagccttcggtcgtcgtcgccgccaattggactttgtggcgttacgaatgccgcgatttgccggagcacagatgccaagcgaagccgtgccaattctgcgtataattgggggggggggggagaagcatttaatgaatctatttttgaaaaggctttaggagcaagtgagcaaattgaaaggggtggccaaagggaaactcagcgaaagcaccgaccgatgggacagttatttgaagcgggaaaagagctacgatgacgagcacattctgatcaaagtgatggaaggcttttcgcccagcaaattggcaaaggacgtgtgtaagtcacgtcgtcccattatatcccaccattttagcggctaattggcataattgaatttagtctttaacaaaaaattgggcgtcgcattattccgtggggacattgagccgaaaagtgaaagtgccgaaaacgccaacggcatcgtctttcaattgcttctcctcgccacttccgggcgcagaagtgccgcactcgtcagcaaatttgacacaatcttttcgcaaacgcttcgcctgacgctcgatctgccgagttcagtcgggcgccatgtcaacggcattttcttacggtgatttggcgattaagatattttaaaaataataattcaaaaatataaaacaggtgcgagatgaacccgggcaaaaacttggaaaaagaagcaaatgcctatggaaacctgatggatttgccgttcatggcaaagattgaggtggacgaaatgcatacgatagcattcactttgtgatactgtaccaattgaaggtgtggatcagagacagagccgacaaagcattggtgtgggaaaaactgatcacgaagattcaagcgaaggtggacgaattggcacttccgtccaccgcttgtcgaaacttctttccgatgaatcgactcgaaaattgggcgaagaaaaaaggggtcattattagcaattaattaaaaagcgatagagtaaaaaggcgggttaatgtgttcgtctgctcttttggtgacggacggaggacaaaaagttggaaaatcgggtttcagggaagagacggcggggcacagaatttgtccgcacctcgcggaggcaatggcattttggtatttgggctaaacggagaagcgcgagagttggacgaggaggaggagaacgaatgggcgggagggattttcgaatatccgccgataacggcaccgatcgccggaagaggcaaaaagaaaggcgccaaacagaggaaaaaatggcacttctaacaaattaactccccacaattttggcaatttccacaatcgctatttggcagcctttctcaacattatcaggaaacttaccagcaatcattcattttttgatcaattcaaacccagacttatttccgatcagacttgtaatcagagagggaaacggaatttagagaaaggaaaacttttgactccgatggaccaccaatctcctaagatttttctaagatttaaaacaaaagtcctcataatttagtcattttttggaaaataatattgtaaaaaattgggccgacgagcaaaaaaaaggcccacagattgccaagccgaaattattttcttattacgggtctttccaattcttattttgaaaaaacattctcattttgtcatcatttcttgtttaaaatccgtctttttgctcactttttctcccaattctcaaatgtcccttttctccactgtttgttattaacgtttaattgttttttatttctcttcatctttctccatttcaaaattaatcatttcttcgaattcggtgttcgcaatttttgggtcgtttagaacattttatttattttccctattaattttcgcaacttctcactttatacatatttttaaattcttttttttaatttccagaaattcgttggaactgctcaattcggaatcaaaaagcccttccgaaaggtgtgggaattccaagttcttctgatgggtatttattggacaattcatccattttcagaatcacattgttgaacaccgaaacgaaaactgaactaattattcatttgacagatttaatttatttttaaatgttgaaatttttcttttgaaaattaatattcgtattagagaccggacgagggatctcgcgggattaaattcgggacccgaccttgggagccatctcgagccttttttaaattcattgagattgatcgggatttcatcggcatcctaacttgggtccctctcgaccatcgccaatcccgcggattggagtcaaaattttacgacaattttcattttcttattaagatcttgcaacactaaa

SEQ ID NO: 71575 - DNA, 1428 bp, Heterodera glycines
atgtcaaaaaaaaatatcttaaatgggactgagattggcgagatcagtcgatttcgactggtaggataaagtaaatttccgcaaaaattggaaaaaagggatttttggccgagctactgacaacggacgagcctatccgaccctcggcatgcttttcctcaactaaagacagtcgcgccccggccgaggggttaaaatgccgcccatttggaaaagttaaagcaataattttgctattatcgattccctttcatttgtccattctttcgtttttaatttggtactttgttcacaatcttttgtgtgcaaattcggtcccaattggtggcagtttgtgtttgccctcccccattttccataaaccacccaaatttgtccacgacatctgacattaacggcgttcatttgcctcggcccaatttcgtcgtcccatttctcgatgtcaccgataggttgatcaccactttccaatccttatcagcactgaattcctttctcattagtggaaaaatcataaggccgaagttaattgagttaattgccgttggtcggctcatcagaaagtggggcttatcgtttaattatcgcgtttggatatgttgggcccaagaacagtcaaatgacatcagatgagcaagtatttggcaattttgggcctttttaaggggccgaatggaacgggtggcattcattcactcattttgaaacaaagccacccatttaccaattacacctttcaccttctactcccaccaagtccaaaaaccaaaaacaagtcatggaacgcactttcgtctgcattaaacccgaatccgtccgaaggtgcctcgtaggaaagatcattgaacgctttgaagccaacggctttcggctaattgccataaaaatggtacaaatttatggtgtcttttagctgcttattctcatttttcagatcgttgcaactcgcaaacaagcgatggaccattacgtcgcttgtgccggccaaccctttttccccaaagtgatcagttatatgacctcgggtccggtggtggcaatgatctgggaaggtaataaaaaccaatatgaaaaacaaactcagctgtttttgattgccttttcaggtgtcggtgttgtgagaggaatccgcaaaattttgggtgccacccccgacaaagttcctccgcccggcaccctccgtgccgattaccgtaacaacagcgacgtgggcaaataccatgacacggtttgccacggatcggactccgcggaggacgcacagcgcgagtttggcatttggttcgacaaaagtgagatgccggcacctctctcgagggtatcgggctgatgtgatgggccgaccgatcgaacagaaatggacaaaatatttgcaaattcgaaatgctattcattgtttttttgtaattattttttaaagaatattaa

SEQ ID NO: 71576 - DNA, 375 bp, Heterodera glycines
atggcctctgagccatgggtaagcaaaggaaaatcagattattatctaatattattattcaaatttagccacgggttggataagttgagtatgcgaattttcatttgatttcaggagcagcaagccaagctaagcgaaaagtactacccgaacacgccaatgctccattacctcgtcaaaatgctgaaactgcacggcctgtacttcgacgagcatctcgtttggcgcgaagttcaggtgaaatgtgatgggcaaaaagaagtttattttctcatacaaaagaattattttcagaatgaaattcgtatttcaaagggtaaaatcatttacccgccaatcggtgcaggaaaacagaagatgaaagccaaaatataa

SEQ ID NO: 71577 - DNA, 254 bp, Heterodera glycines
atggcaccggcaactcagctcccacagacaaatgccccgactcccgttgtcgaagatggaccaaaccagaagaagaccagtgatgacattcccaaacaaccggaggtttttgacgaaacaatcctcgtctgttatgaagcactaaactcatttccacccaccgacaaaattgttcaccaaattcaatcgctcaaaaaacaataccctcatcttttcaacaaatagttctaccagacctccaacaatttcttcaa

SEQ ID NO: 71578 - DNA, 1647 bp, Heterodera glycines
atgagcacgatcaaggaaaaagcgcactcgcaagcaatggagaagtgggagaaggagaaggcccacggcacagtgcgggaacaaatgcagaaaaaaattgagaggaacagtttccggattcggaaccgtgggagtatggcggtgattacgacgatggactcgtgagaattgccaattggccttccgaatttaatccgttttttaaaggcccacagagtttgacacaatcaccgaatatatttccgaacaaattgttgtgctgaatgagagaaatcgaacttcaacgaaaaaaaagttgccaaattttttgcaccgatcaaattgttttctgcactttttcagttctgtgcttatcgatcaaattcatttgtttgtgttgaacatagcaacggaatccagcaaaatgttttccaaggaaaaggtgaaaataaattttcaaaaatgagtttaaaaatgtttagcatcgttccaatttccatgcgcggctcatttctgtcagtgccgggccggcttctgttgtcggcatgcacaaaattttgcaggacatttacggacttgtgtcgacaacggtctgcggaataccaatgaagttgagtaaagggagttaatgacagcggtgaccattcttataccattttttgtgttgattaggatgtaatttaccgtttattgtacaaatggttgccgacatttcaggaagaggcccaatccggacagtccatcaattacgacgtcgaaatgctccacccacgctccgctcacttcgccctcacctcactcggccttttaatgggtgagaccaaaatgctggacagcgccagcgcccacgagaatctgttcacctccgtacggctcaaatggtgcaccgcctcgccgaaactgaagtcggacaaagtgcgaatatcctttgtcgtttttcccctctctctctcgctctctctctctcttccgtctctgggctttctccctttctctctcctctctgtccctctcggctttctctcatcccctttcttcattcagttcccaattcttcaacgctcttttcccattacgcctgcccacgtgtctctccgtcagtccgtttgtctgacctccttcataaccaatggcaaatcagtgctgttggaagtgttcccagacgtttaccaagggcgtgccgagcattgcaaattgagcccaaatttgcatcaaaaactcatttcccattatctgtcgcgcgatgtgaacggcgcccttcttttgcattgtgtggcgatgggaaagaagggtttcacccactcacttttgactgattattccaatttggcaaagctttcagcaaattttggcggaaaactcagcagtgaaaatgtttatggcccgaagggaagttcagcggaattggccaatggactgaaccgaacggcgatggcacaactcatccaagccgctcaaattgtgccgtgtccaaacgaacagtttgagctggtcgatgacgagagcgattgtgacgacggggaggaaaggaacagcggggaagaagggactgaaaaagcgaggtgccaaacagtcgaccaaatttggcagaatttgcttgttcagcgtgagactttcgctgttggggacattgaaaaggaaacggcggcggagagagcgccaaaatga

SEQ ID NO: 71579 - DNA, 890 bp, Heterodera glycines
ttggatctcattgcgcttaatgcgggtgatgccaatgtgtgggtcaccggattaatggcattggccagcggaacggtgcccggcaccaatggcaccaccgcgagcggaagcatctcaccagtgccgccaaatttgcgtgagagatggttggccacggcatttcgggaggctgacgcggacaaaaagggaacaatcagcgaaaaagcggcgatgcgactgatccgatctctgaacacgcgactattgacaaatcgaatcagcaaaaaaatgaaggtccgcaaatttcggaacaaatattgggagaccgaaacggcgaaatgccaatatttttcaaaaagcggcattttgaaaacaaaagttggcaaaatttaggaaattgggacgagcgcggcacagcagcagcagaacaacggcggggaagcgcaactgcagcaaaagggacgcttagacgaggcgcaattcatcgaagcttacaaagacatgtccacacggcccgaaatttactttttgatggtacgctacgccaacaaagactatttgaacacaaatgtgagttgatttgaccatcctcaccatctaaacattctgctgactttgacaggacctgcaactgttcctggagactgagcagggcctttccggcgtcggcgtcgatttttgcgagaatctcatcgatcagtgcgaaccatccgcggaagcacgggagctgaatgtgatgacggtcggttggacggtgatcactctgagcaaagggaaagggcactccttttgaaacggcatttccaaccaatcgtttcacttagcaattgctgtttagcattccaattccgatcaccactttaaaatgcatttcccaatccaatcggttcatcccaaccattcttcgttgt

SEQ ID NO: 71580 - DNA, 1176 bp, Heterodera glycines
ttaattccctagaaattcattggtctgtctttattaggatgattttccaggtcgttgtcctcctcatggacacacaaggcattttcgacagtgtcagcactttcaaaaattgcgccaccgttttcgcgttgtccacgatggtttcctctgttcaggttttaaactgaaaagaatttttgaataaaatttaaggaattccatccgttttccattcatttgcttcccagattttcaacatcaacaagaacatccaggaggaccatctgcagcacttgcaactgttcacagagtacgcccgactggcgctggacgaggacaaaaagagcaaaccgttccaggcaatgctcttttttgttggttgaccctttctctcatcaatttcagtcgcttttgttccttgtccgtgactggagtgtgcctcatgtcgcggagtacggctcaatcggtggccaacgcattcttgacaaacgattggaggtactcaatttgactagtatataaaatcggatgcgtaaacggatgtactacatccccaggatcagttcccccgtattttattcacggcttgtcgatggatttgttaaaaaatatgtttaattttgccaggttacgtcccgtcaacacccggaacttcggcagctgcgccgtcacattcgctcgtctttcgacaacattcgctgctttttgatgcctcaccccggccgctacgttgccacaaatccacactaccgaggcgaacttgacagtgtgtttattgttttatctttttgtctgtccactgaattcaaagcattttggttttccctttaggaatggaactcgacttcaaggcacagctcagttcacttgcgaactatgtgttctaccccaacaatttggtcgtcaaacaaattggcggtcagcccatcacttgccgagagcttgccggctacataaatgtgccctttttcgcgtcgaattgaaatatttaagttcaaatttttaggcttatttcgaggtgttcagcaaggctgaaatgcccgaaccgaagacaattctaaatgtaagcattttgatgctttccctccttatgaatgccaattgcttttatttttattaggccaccgctgaagccaatcatctcgcggccgtggtgagagcaaaagcggtgtatatgagggagatggaagaagtgag

SEQ ID NO: 71581 - DNA, 774 bp, Heterodera glycines
atggaagaggaagcccaaaaggacatcgaagagcgcgacgcactgtccaaaaggataagggaaagggagaagcacaacacgcggcacgtcatgtcaaagtcggaagcgaggagcaaagcggaggcgacgaaacgcctgaacatttcagaaaaggacgacgaagccaacgatatgatgggcaaattgagatacgaaagtcggaagagttatttggcgaagcgcaaggaggacaaacgcatggaattggaggcgaaggttcacgatgatgagactatttttgcgaatgaaaagtaagtgcaattcaacaaataatttatttatgggtgcatttctactcattaaaaaaatctaggttttatttcgaacgaatgacaaaataattaaatgaaaaggacatattttccattttactaaaacataagtgaaattttaataagtttcaaactcaattttcaggcttaccaaacgagagcaattggatgccaagtacagaaaggaagtgcttcactatgtgaagcaatatgacgaggcggggaatgtgcttaaggtgccgaggtgaattggcactgttttgccatgttttacaatgatttccaaaggtatcatgtccccgatgcgagcagcaaaattattccaacggaatatgtggaggagaacgaattgcctggcggggacggacgtcgctgggaggatgagaaactcgggtccgccgtttttcattacggggcaaaggacgcgaaggctaagccaatggaaaagggacagataccctaa

SEQ ID NO: 71582 - DNA, 208 bp, Heterodera glycines
atggctgactttgacaaacacgctgcccagcgcgaggcggagtctctccgcactttggccttcttcggcgtgtgcctgtccaccgtggccacggttatcgctgtgctttccgtgccgttcgcctaccagcacttccagcagatcggcgccctaatgcatgaacgaagtggacttctgcaaaatgcgctccggcaacatgtggcgcgag

SEQ ID NO: 71583 - DNA, 377 bp, Heterodera glycines
atgagcgggcactttggcaccttaactccacgtttggttcatcccacatcgccagttctgcttaccaaaaatggcccacttggagctcaacattcaacgcctgggttcagagtcaagcaaccctggcttcatacccatttagagtttgagaataggttaaggacatttcgtccccaagtcctctaatcattcgctttaccgagtataactgcttaacgagctccagctatcctgggggaaacttcggagggaaccagctactagatggttcgattagtctttcgcccctatacccaagtcagacgatcgatttgcacgtcagaatcgcttcggacttccaccagagtttcctctggcttcatcctgctcaggaatag

SEQ ID NO: 71584 - DNA, 805 bp, Heterodera glycines
atgagcatgtaatttatgcaattttgagtctgggacctatgatggatattttccattgttattaaaataaataaaaagaaaaataatatactatatcgacaaatgtagattacgatgcatgatatggtacttgcagtgaaacgcataaaactacaaggtaaaaacaacccataaatataaataatgatcaaataatttaaaataattaaagaacagtagtgaagtatttaaaattaattttacatctgacgaatgtaatttggataaaaatgaacgttaagtatagcatttaatctgagaaggatataaattaattaattttattcattatctccacattataaataaaaatgaatacttccgaccccgttaagatattaataaatattaaaatatttttttaaatgcttattaataaataaaatggttacattttgtcaataaaactctttaatcaatcacataaatgaaacataattctatgtattttaaaacatttcataagataaattttaaatattacatcaaaaaaatttgacgatagaaaaatattaagcaaattaaaattcaaaagtgataatgattaagtcgaaaaagattcaaaaaaaatgtgaaacaattaaaataaattaaaaatcaaaaaaatattttatgattatattataatatatagttaaaagattttcagtttattaccgttatatttggcatttaatgaagataatatgtgattttaaattttcttattttttttaatagcaaaaaaccttggtgagataattaatgtaccaaataatataataaa

SEQ ID NO: 71585 - DNA, 819 bp, Heterodera glycines
  unsure (1)..(819): unsure at all n locations
atggatgatgctcattntaatgtgctgcggggcataccacntcatttaccaagcatcattacccactcatttgaatcgtaggggagtaaaaagcagaatttaattgaannaaatntaaaaaatcatataaaaatggaatgtttccacgtataaatcaataatggaaaaaagtttcaataaaatccaataaatatagaattaaaacaaataaatttttagttgagcccatcggcactgcttattggcattatgtcgacgataatgagcttcagttatttgctcagtgccccaatttggggccttatgatcgaaaagcaagtgaagcactcatccaaattgatcactttgatgggctcactgatggcgatcagtggcgtttcgttaatggggccgcttccattcattccaatcattaagtaattttccaattttcattagaaacataattagccttatttataagtttaaacatttcagtttgtagcaccattttttgtaaaatttctgagtcacaataggccgtgaaaacatatttatgagttttctgagtcactgatcaataatgtgacatccattacggtcaattctgaaaaccctggtccgatttggcttaaagtcgagaatttgaatttttaaaaaatcaggtttatggtctaaatatataaagtaatcattaatagttagttattaagttcagaatctagtccaagattattgaaatgggttgttatcatatcatattcatgattcattgagactccgaaaacgatctgaaatgcgtttgcacagcttttcaaaatgtaaattttttttaataaa

SEQ ID NO: 71586 - DNA, 108 bp, Heterodera glycines
aacccatgggtgctctatccacccaccaaatttcatttggaaatcccacggacacctggggaccttcctttgtcagtcgaattccgtcaaaccaaatactcaacatcg

SEQ ID NO: 71587 - DNA, 584 bp, Heterodera glycines
aacaaactaaggtcgcatttcatagtttcaggaaacaccagtgagaaaattgataatgttttcgggattcacattggcattggcataattgtgatcattttgggggaggtgaatgttattgatgtcgttatagagtgcgccgtcatgttctaactaactttgtttcgttttgttttaattttttgctgctggtccatattatataatttaaatagctttaatttagtttataaactcattaatagggttggtaattatatgcacatgcatatttttttcctagactgtgggaggcatgaaacgcacgaaaaacatgtttttagcttggtttgaagcttctaggacgtatttccatatgcatattttgcatatttgtgcatatttcgcgatttatgtgcatatttgcatatttgtgcatattttggcatttcgtgcatattttatgtccatattttggcatttttcaaaaaaaacctctattagaacggcccccagcagctaaattagcctttttgagcccaaaacccgaaaaatttttcaaaaaatcattttttcgccaaaatttctcgagaatattgaataaa

SEQ ID NO: 71588 - DNA, 63 bp, Heterodera glycines
  unsure (1)..(63): unsure at all n locations
ttttcgcgtggccattttcgcgtggttgcatataaaaganaattcataactcacattatattt

SEQ ID NO: 71589 - DNA, 304 bp, Heterodera glycines; identical to SEQ ID NO: 67235

SEQ ID NO: 71590 - DNA, 304 bp, Heterodera glycines; identical to SEQ ID NO: 53844

SEQ ID NO: 71591 - DNA, 205 bp, Heterodera glycines
atgaaagccctaagtctaccgaatttttatttaactaaattatggacaaaaggtaaaagacaaaaaattatcttgaataaaaaaattatcttgaatatactcttaaattaaattccaggttttctcattgaaatttttacgaagcaagaaaaaaattgatggcctaagaaactgagggtagtcactgacttggacgcacgcttaa

SEQ ID NO: 71592 - DNA, 111 bp, Heterodera glycines
atgcggaaactgtcgtgcacagtttggaactcgatggtcggctggggaatgccagtcacgctgcattccaacaccacctggccaccgatctgcgcttcctggtccgacaga

SEQ ID NO: 71593 - DNA, 563 bp, Heterodera glycines
tggaaacattggaaaagctgagtccatcgtcagacaatggcgattcggaagcgaattctgatcagattttggctcgtcttttgtccgttcaccaaacggacaaagcggcaaaggcgaagcccaccaaatcgactcaaatcactttctccgattcgttgatcgatctgtgccctcctccaacgattggtcaggagcctttgtcatttgcacttggcgaggacgacccttttgcttacgaaccggcggagttgggcgaattggccgacttcgatttgcccgaggatttgccgggtgaattataatttataaaacaaagttttatttgaaatatcacatcgaaggatttattagaagagataatacttccaaaatctgctgatatgagattataaataggaagccaaaaatagcaaaaatttaatgaaaatatgatgagcaaaaataatttttcaaattattgtttaaatataaatattttctagggttgagcggtaccggtaccggtaccggttttttcaaaaatgaaattaccgttaccggtttgtctagtaccggtaccgccg

SEQ ID NO: 71594 - DNA, 75 bp, Heterodera glycines; identical to SEQ ID NO: 54636

SEQ ID NO: 71595 - DNA, 287 bp, Heterodera glycines
catttaaatcactgggactcaatccaccagcatttcaatcactgggactcaacccaccagcatttaaatcactgggactcaatccaccagcatttcaatcaccgggactcaacccaccaacatttcaatcaccgggactcaattcttcagcatttcaatcactgggactcaacccaccaacatttcaatcactgggactcaatccaccaacattccaatcaacgggactcaaccctccaggatttcaatcactgggactcaatccttctgcatttcaatcactgtga

SEQ ID NO: 71596 - DNA, 56 bp, Heterodera glycines
atgactagttactatttgaataggttatttcgcgtccgttcaatgtccctgcaaag

SEQ ID NO: 71597 - DNA, 439 bp, Heterodera glycines
aaaatggtgtaagtaaaaatcgtaattacgctcaaaaagcttctcaaacaattttagcgcatccaattccttctacaatcgcctttatacatcccattatgagcgctaaaattatcagagtgccgaaaatcgcgtgtgatctacgcctagaaaaaaatggtgtaagtaaaaatcgtaattacgctcaaaaagcttctcaaccaattttagcgcttccaattccttctacaatcgcctttatacatcccattatgaacgctaaaattatcagagtgccgaaaatcgcatgtgatctaagcctagaaaaaaatggtctaagtaaaaatcgcaattacgctcaaaaagcttctcaaacaattttagcgcttccaattccttctacaatcgcctttatacatcccattatgagcgctaaaattatcagagtgccgaaaatcgc

SEQ ID NO: 71598 - DNA, 412 bp, Heterodera glycines
atgccagtaatcaccggactcacacaattaatggctttcaacagagaaaaggaaatgatgcgcgagattatgaaaaatggaccaatccacgcatctcacatcatgtacactgggtacggaagttgctgtaaaaacaacgaaatatacgaggtgggttaatcctgtgccggctcgttagtaaaatctaccaatttgaacgtttttagggacgtttttctgacatattttcttaaaatttaaataattttttgaaatttcaagacaatgggatcacttataagacaatagaaaatagttataggatggctctactttagcgcgaatggttctcggaaatgatcaaactcccaaaaatggagtgtctctattttaagaccaaatatatttgattaattttcacaatttcattaaa

SEQ ID NO: 71599 - DNA, 185 bp, Heterodera glycines
atgggtgccattgttcgtctgatacttcgcgctttttgcgattttgtgcgtgtgcagaaattttcacgacacggttttgagcagctccaagttgactttgcttatgtccgtcaaaagctttggtatttcgtggccgatgagcacatgttgaacacgtgcattgaggacattgtcacggctgcggg

SEQ ID NO: 71600 - DNA, 1261 bp, Heterodera glycines
atgtccactccgccgggacgcgaaatgccgcacaaagttttgttcggattgacgtgcagaaacctaaacgaagcaaaggccatggccaatgccaatcaatgccttcttttggtcacccacctcatctcttcagctgtggacgaactggcgagcagcaaattgttgcgcaagacgaccatttgctcgacgcccatcagaaagggcgtctccatacgttcgcggatgttcccaaattggccattgctgaacacttcaatgtgtccatcggccgctccgacgtaagtgaatctgacaatcagtgatggacagaaatgccttttcgcaaattgaaaaccgacgaaacctttcagtcaccgccaaactgagcaattcgctgtgcattgtctccgactgaattcgcactttgcctttgtgcgtgtcgtaaacggccaaagtgccgtcgccactcgcggccagcaaattattgcgccaaatgtgcaacgcatctgaggaaattcaatgggccagattaagaaacttcgctaaattccgctggggaggggacaaaaaaggggcacacccaactgattatgtccgcctgctcgccaaatgtgtgcacgttcggcttgggctgtccaaagtcccatgcttttatctatgttaaaatgtgacattgtctcattggacttcttcccgacagacttcgccgttttcggcacccgttgcaaaatgccgtctttcgcccggcagcagtgccatcgcactgggccgacttttgtgcccttcgcgaatacagcgcactctcttccccgtctcaacgtcatacaaacagacggcccttcaaaactgacaattggggagggggcgagggggaatgggcaacctgttcgaactggtcgcataaagcgaagtgccatcctcagaaatttgcattgccctgacggaccgtttcatccgtttgcgccacattccaccgagttttaccgaactttccatcgatggagtgatccctcgctgtgtgtcaaaggaaaaacattggatggacccatccaaaaagccaagacaaatggtgtttcgtgtgcaatttgatgtgttcgtagaaagggaggaaatcggggtattgaacaatctctccataaaaaagtcaaagcaaaaattcacaaggcgaaggaactttaaaatcagaaaaaatactaaaaatataaaaaatggttggtaatccattcaattattttggcaaaaatttataaatccttgtcaactttaatgtaagcaaaataaa

SEQ ID NO: 71601 - DNA, 161 bp, Heterodera glycines
tgaaccaatgtgcccagcccaaattgttggatccatcggtagttaggagaatttgtgaagaaatgcagtgatctatttgtatgtacaattaaaattaaattaattaattgttcactttgttttttattttgcttacattaaagttgacaaggatttataaa

SEQ ID NO: 71602 - DNA, 114 bp, Heterodera glycines
ggatgtgccgagccagacaaaatccgattccgattaaatcgccgattccgattatggccaaaaatccgatacggttttaaaaccgattacgattatggcccaaaatccgattaa

SEQ ID NO: 71603 - DNA, 1018 bp, Heterodera glycines; identical to SEQ ID NO: 44055

SEQ ID NO: 71604 - DNA, 351 bp, Heterodera glycines
atgacttgcgcatacgctaaactccttggtccgtgtttcaagacgggtcgaacagatgaccggcttttacaccgagaacgtacaactgagagcccgagctggaccgaactggttgctggtacgtgtcgcacgcgaccgccaccgacccccagctcgagtcaacacggacccgaaaccattgcacaattcacccagagtaaacagcactcccccgatccgggtaccagaccccgaaaggctggcctcaagaccgagctcacgcagctactccgagcatctcagcgcactccgcctgcaaatgccccattcgccactgaacagaaggacagcaaaccccagtctggaggctag

SEQ ID NO: 71605 - DNA, 447 bp, Heterodera glycines
tcacgcaacagcccggctgacccgacctttagagccaattcttttcccgaagttacgaatctaatttgccgacttcccttacctacattattctatcgactagaggctgttcaccttggagacctgctgcggatatcggtacgatcaggcaggagattcaaatagcttccctcgcattttcaagggccgtgtggagcgcacgagacaccacaggaaccgcggtgctttacgggcgcaacatccctatctcaggctgagccacttccaggcacgcacaccctaaaccagaaaagagaactctggctcggactccacacgacgtctgcgagttcatttgcgttaccgcgcaaaacagctcttgcgaaccgtcatttccctagcctggcgtgggaatgttaacccacttccctttcggcaaccggatggaccaactgcgcaagcacagaa

SEQ ID NO: 71606 - DNA, 449 bp, Heterodera glycines
atgtacttccctgaggacgtggacttcactgctcgcattcgttccattgttcgcacgctgcccaaggaaattggtgacttcaaagcgatcactctcaaagagttggagggcggctctgacccgcaggtaaaaaacaaaacaaaaaaaaacatatcatataacataaacccaaaaattggccccaagtgacgagagatccgtagactgttttttttttttttttgctttttacccctcaaaattttttctaatataaattttctaaattagaggctctatgggtggaaataccttacatttttgcagattttaatatggctaatttgtgcatttttgggtcacattttaaataatgtttaaacataaaaaaagcgccgaaaacccatcaataccacgaaacaggcaaaacacagccgccgaaacacagccgagacataacacagccggga

SEQ ID NO: 71607 - DNA, 386 bp, Heterodera glycines
atgtatttacataaaaaaggaatccctggtaattaataaatttgaaaaatatatttttaaaaatttaattttaagaaactctcaaaagatttaaaccgcgcaaccaaaaggacgaagtcataattcgcctaatccgtgacgaagacattgacgaaacggccgagatcattcaggaatcctatctgcaggattgtctaaagataaagcatgccacgccggagcaatgtaagcaaatgaaaaaagtgccgttggaaaggacgcggatggcactgagcaaattcaaagcggaggaggacggggcgctgatagttgccgaaacgacggcactaacagatgcagggtaaagcgtcaaccgttgcattttggacacaatgcgaaaaaataaa

SEQ ID NO: 71608 - DNA, 1004 bp, Heterodera glycines
cactaaaacgcccggaccgcctggacccagcactaaaactcccggaccgcctggacccagcactaaaacgcccggaccgcctggacccagcactaaaacgcccggaccgcctggacccagcactgaaacgcccggaccgcctggacccagcactgaaacgcccggaccgcctggacccagcactgaaacgcccggaccgcctggacccagcactgaaacgcccggaccgcctggacccagcactgccggaacttcctctacaaagacctacactgttccaacaactccaaaacgtttgttttagcttgtacaatttgtaagattttttctagcacctccgtgttgttatggctgtgactaccctgtcgactgccacacttctgggaaggattgcgactattccccgcttcagccgccttatcaaagcgacccttacccggttgggaagtgcgtcttcaaaaatgtcacgtgcgccgctccaaacaccggcaaagtgctcttcatgaaggtgggtaataatgaaattccaacccatgaatcacatacataattaattatgattatgatgattacctggaccgtattattcactttttcaagctcaacaatgaccccaactccgtcgtttcgtcttccgtctcaccgttcaacaaagtcacagtcattttgcagtgcacctgcaaaccgtacttcgcaccttattgggtccaagtgggcgttgacggcaacccggccaagcaggtcaacgtcaaatcggtcagtgtttcgctttaaatttgcatttattgaatcctcaaacacaggcaacctgcggacgtcactgttactagaaaatggtaattaatggttattgtttatattatcatttatcaattaaaaatcaaatttagatgaccactcattgtccaacaaaagaattaagcaaaaaggaaattaattagaaaatcaattagagaaaaatttccttgcgcattttttaaattgtaattttctttattaataaa

SEQ ID NO: 71609 - DNA, 664 bp, Heterodera glycines
  unsure (1)..(664): unsure at all n locations
aaacaaaaaaaatcggattttttcaagtgtccgttttggggtactcaaacanttatggggagcaaaaatccaacgcagaattaaagtacaggctatagggaagctattncggaaggattcggtctcnccataaatctgggcgcatcggattcggggggactgccccgaaaacaaaaaaaatcgattttttcaagtgtccatttggggtactcaaacatttatggggagcaaaaatccaacgcagaattaaagtacaggctatagggaagctactccggaaggattcggtctccccataaatctgggcgcatcggctcggggggactgccccgaaaacaaaaaaatcgattttttcaagtgtccgtttggggtactcaaacaattatggggagcaaaaatccaacgcagaattaaagtacaggctatagggaagctattcccgaaggattcggtctccccataaatctgggcgcatcggttcgggggactgccccgaaaacaaaaaaatcgattttttcaagtgtccgtttggggtactcaaacaattatggggagcaaaaatccaacgcagaattaaagtacaggctatagggaagctattcccgaaggattcggtctccccataaatctgggcgcatcggttcggggggactgccccgaaaac

SEQ ID NO: 71610 - DNA, 283 bp, Heterodera glycines
taattaaatccattccttcgggggaccgtgccgggtgccgcggggtaagcagtgctggttcgtttcatcacggcaccgaaccttttggctagtcagcaatcgttgcttaacttgccagatcggacgggtgcgcatgattccactgttccaagcaccccaccaaaagcaaaacgatataaccaaaatataaggaaaaatttttttaaaaattttttctccatcttcctttttgatactaaagcatcagagtgctaaaattaagttgtaaataaaatttggtgcg

SEQ ID NO: 71611 - DNA, 798 bp, Heterodera glycines
atgggtcctgctgctttgctgcttctcctcccctccctccttctgctttttctgctcatccgtgctcttcttgagcttatccccgtctcgcggttggataagcgttctgtgctaatcaccggctgcgattcgggctttggcttcgacttggcactgcgatgtttgggtgccgggatgcgcgtttttgccggctgtttgactcagacagtgcgccaattttgcataaaattttaaaaaaattatttcaaatgaatttttggcaacaattttcagggaattcagtctctaaagaaaagtgcccaagaaaagggaattgccgtggaacttttggaaccaattgaattggacgtcacaagtgacgaatctgtggcaaaggcattggaattcgtggaacgaaaattaggaccgggaaaaggtaaccaaaaatggagaaaagcatttgaatgtttcgaaagggcttcacgctttggtcaacaacgcgggaatcagtggcaacgaggcaaatgccgaagtcggaagtgaattttgcataatttgttcaatttcagagttgggacgattggctgattccaaaggactacgaagatgttttccagggtatggtcagacaaaacccagtgaatgaaatctctgcttttaccaaatgccatttcagtgaacactctcggcacaattcgcgtcactcacgcattcaaacgactcgtaaaggtcaattcgaataattatggctaattaggggaccattacgactctcgaaaaaaattaagctctttggttaagaaatccctccctatctga

SEQ ID NO: 71612 - DNA, 537 bp, Heterodera glycines
atgtcagcaaaggacgcgcttaagccgattcaatgtaaaagacgcaatgtggaccttttgaagaaattttgcttcggattaatgcacttatgccttaaagtagtggcatgcactaaatgccttcaggccgccctttattgacatttttttaaatttgtggtatatgcacaaaaccgaaaagggcatgattttgtgaggaatttgtttattctacatcaaaatcctacaaaatttgcctctatttactcatttctgttgtgcccagacaaaaagtgcctttgaaactattttaaataattatttttttgcagcgatattgtcccagaaatcatttgtctcctcatactttatctgctggtgcccaattactatttccgattagaatacttaaagaattgcttccccattttatctcgaatttcacttatgcaaaccgatcatttctttccatcttttccatatattaaattccattccaagatgtgagtgtatcagagatatccaccccatatgtttattttatattattaaaataaa

SEQ ID NO: 71613 - DNA, 530 bp, Heterodera glycines
atgaatgaatggaatggtcacgggaaagaaagaaagtggtggtggtggtgttgctggacgttgggtgttgttgggctggctaacttttcttttctgttggctgatctggctgtcagtaagtgttaagtgcaccaaatttttacaccgcccaacagatcaccaccaccaatcccatcctattcacacactttgattttcttagggtaaaagcggcttaaacaatgttttttgtgtggaaaaaatcgaacaattttaatgtgaattctgtttgcgaaatattgaaaaataaaataaaaaatgggtttatagaacttatttttttattggtatattaaattgttgccaaaacgacactttttgaccaaaaaaaaacaaacaaaaaaatgatgggatttcatttagctaacttaatagaaaattaagtctacctttttttacaaatatttcaaaaaatggaaataaaaagattcaaaaaatggaaattttattattttttattgaatttttagaggacatttgaagtaaataaa

SEQ ID NO: 71614 - DNA, 66 bp, Heterodera glycines; identical to SEQ ID NO: 53774

SEQ ID NO: 71615 - DNA, 1194 bp, Heterodera glycines
atgctgatcaaaaaaggtagcaacaccaagttgatcagatcactccttcatggtgatctgatcagcccattttggctgggaacgaggggtaaatttcaaaaaaaaatttctagggggttgggaaaatttttctggaaattttgagtaggcccattttatagagcacaaaattctctacaatattcaaaaaaccgcatgtctctattacttataccggctgaggtatgggcacttcaattttgacgtagtgtaaaatgcactattttcttaagaaatacagtactttttataggcaccgaaataaaagtcgacgtatctcagcgggcctaaagcttacctgaatttttttagatttttttaatgctgatccagagaagcaatattttaaaaatgaaatgggacaacacttttgaccacctatattttgatcaaattgtgaatatggtaaaataaatcaaataaatgtttatgtcacaaatgcaaatatggtatcattggaaagcccataaaaaatgctatccaatggtatgctacttatctgttgaaattggaaaatgacaattttatacgcaattatttttttcaaagcatgatgggacaacacttatgaccatggcctgtgtattcttaaaaaaattatgttaaaaaactgtgaccaactcttaggttttatcaaatcaatgtattttttgtattgtaaaaaataaaaaataattttatatatctatttttaatctaatttaatcataatcaatatttgttcctaaattacataattttatttcaaaaaataactcttcctgatacttgtattcaaccaaatacttgtcgagaatttcaaaatgccgagctctaataaattaatctaacggtccctaataatcaaatcaaaaaattataatttttttttacagtttaatttgataaatttctaaaacaaaattcaatttaactctctttcttctgtgagccgccgctgttaattttttcggtgtttgtttaaagaccaaaaagtgcaaataggaaaaatgtacgctgtttttgtcatcacattcacatcaaatcacacaattttcacaatgattgcgcgaaatgttttgcctattctcacaaatttcaccacttttccatcacaatcgatattctctctaatttcctttaatttcctcaagttaatgttaattttttaataaa

SEQ ID NO: 71616 - DNA, 66 bp, Heterodera glycines; identical to SEQ ID NO: 53774

SEQ ID NO: 71617 - DNA, 485 bp, Heterodera glycines
aaggaattaaaaatttttaaaatatttattcatctcccttttgatagaaaaagcatcagagagccttaattaacctgtaaataaagttttgtgtgtttcagagcactttctgaaaaaatacttatgaattaattttgcaaaaaataaataattaatgaaaaagtcagaatttcgaaaaattttaaaagcaacaagcgttggcattttttcaagttaagttagtcctttacaatggagaaggcctgcaacatttggagagattttatcgattttagtgcgctaggttcgatgaaactttttaaaatataagcctaaactttttggcctgtttaaaaaggaattataaatttttaaaatatttattcatctccctttttgatagtgaaagcatcagagagccttatttaacttttaaataacagttttgtgcgtttcagagcacgttctgaaaaaatatttatgaattaattttgcaaaataataaa

SEQ ID NO: 71618 - DNA, 236 bp, Heterodera glycines
gtgcggtggaggaaatcctttttatgcgtggaaatattaccgtaatctgacagtatccggaaccaaccatacgatgaacacgggctgcaaaccgtataaaatgccttcacagtcaaattgcgtgttttcgtgcaacaaagaatggctgcaacaacaatatccgaataaagcaaaaacaccaaaaacgcctggggggataccattgtttggaaccacctgggaagtattcctagctg

SEQ ID NO: 71619 - DNA, 358 bp, Heterodera glycines
atgacaattccacgtttccacagagaccgactgagtgccaccgaaatgttgcagttgcgaaaagtgatggagcacgtgtgggagaaaatcctttacccggcggagacggcgaccgacgactgcggtggaggcgcaagcgcagcgcattcgctggcaacgcaattaccggaaaacattgaagaacgtattgagttgttctgcaacgaacaggtggacttcccatgtacaaattgatgtgattgtaaatgctttcgtcgcttttcagaagttggactcggatatggaccttaggacggtcaaacatttgatttggaagcagggcggcgatttgcttattttttaccgtcccgttaaatga

SEQ ID NO: 71620 - DNA, 422 bp, Heterodera glycines
atgcaaggatcatcggcacgttcatttttaaatcctttgaaaaaattgcaacgaaaagaagacttggagaaggaatttgtggagagtggtgagaaagaccgggtccaagaggttgtggaacgacgacttcacgagtcggggtgggcgaaacgagtggagagcatgtgcgaggagtacatcgcgaagaaggtagcgaaggtgaataaggccgcgtgggttattgttttaaataaactttcctgttttggaaattacacctacgaataaatggtttcttattagggctatgaacgcgttgaactgcaagcgatggttgacgagctgaaggatgcctcgcgtcgaattgtgccggatgaagtgaagagagaactcatgcagctgattcaggaatttgtgaacagccgaacatcgacgggcgaagg

SEQ ID NO: 71621 - DNA, 2308 bp, Heterodera glycines
cgcattatgcttacaatgctggcgacccaaatgttcagggcgcaacatcgtttgacccacaggtaactgaacactgacatttgaatcatcagaatggtagttggttaagctggcacagaaacaatatgaggcatggcagcagtattatgcacagactggggctggacaacaaccggtgcagaacattcaacaacataccggacaagaggcacaattactttgttcaaacattgtccatttccataatcgtttttaggttggtgggacatataaagcctattttgaccagccggtccccggcacggtgccgcccgctgctgcgcctcaaccgctcgccagtgcttatgttggccgtcccgcttcgaatgcgcctgtctttccaccgcctcaaccaccgcaagtgcaacaaatggccgccccagttggtggagcatgggccgccagtggaggccctccccaacagcgcggaccaccagcgccattgaattcgttcatgggcgggccaccgccgtacgggcaacaaacgccgcgcggtgggggctttcaacgcggcgggggcagtcaaagtcgctggagcggcggtgggagtgaacggcaattcagcagaaggtgaaaactgcgcaaaaatttggggaattgagtgataaaaatagaccaaacgagtacaattatatgttggtctatttaatttctctaagttacaaaggaagcgaaacactaacatttcgattgggaaaaggacattgtgcagaatgaacgccctgtattatgttttaagtattaattataacaaaacctctgaatttgttgaatgcattggttctcaattatagcgatggtttcttatctttgaaaatctcattggttccaacaaaattaattattcaaattttctgcttgaatatattaaaaatatttgatttctctctttttctttgggttatttgtcgtaataaacttaaactaattggtctttctgcacaattgaaatgttgaagtagtcatttttatttttgcagaaatggtataagaatttttctaattgaacattcccaattaatgaacggtttgctcctctttcgaggagggcaagttttatttcgaaggatttttacggtggtatcaaagaaggagtggaggaaagggaggagggtggaggagacaattgtgctatgtgtgtaatgactgaatgattcatctgtccattcagacccggtgattataatagcggtccaccgggcggtcaagctggttatcgaggtatttgcaactcaacgctttgcttgtctcgtaacttacaaacttttatctaatgaggactggtggagattatttattatcttttaaaaaatttccctggtccaatacgtcggtgttttggcggacattttattcgcttttattgcgtggattttattatattttagcagaacaattgactgtgtattttaaataaagtacagggattggtaataagcatgaatattgacatttaacggtccaataaaaaggaaaataaattgggaaaatttgaaaacgagttatatgtgtcttgcttttttgtttgaaaaacttgttcaactactagcccttcaggtggcggtgacggtgggtttgaccggcgatcgtccggcggaggcccaatgagacaggagagaagccgtggaggtgggtgaaagaaggtggcttcgagagcaaaaacatcctcttcttctcgggacttccgcaacagtcagtgaagaaaggaatgtttgcctttatttgtctcttgacagtgtcaacgaacaattcattcatgatgtgttcagtatgcagcaaggagatgttgaaactgaccagaatggtggcccaaagatacgaatttacaaggaagggggacagtcaaaaggcgagtgcaccatcactttccgcgatacggcggttgcacagcgcgtgatggacacatacaatggtgagacagcggctaattgtaagcctttctcacatttgtgcaacgaattgcataggacaaccctttcctggcacggacaatgtgatggacatttcttttgccaaattcggtggcggtggtggaggccgcgggggaggtggtcgaggcggaggcgggtcacgcttcggagggggcggaggacgaggaggaggcggcggcggtacttttcgatgatttgtcctttcctatttagtctcaggtttcggtggtggtcgtgacttccgtcgtgatggcggtggcggaagcggaggtcgtgggccgccgcgagacggtggtggatttgaaggtgaactgtggaaatctaatgacggtgtttaa

SEQ ID NO: 71622 - DNA, 1392 bp, Heterodera glycines
atgaaatccgctattaatcgagtcatgttaaatattttttccaagaaaatggcttcatgttcaagtgacaagtctgtgcgtctttgggaccttcgaaatccgagtagtcacaccaaactctcaacgccaggtataaacaaacaatatgattgcctaaaatttcaaataaatctttaaagttaacacgttttctttttaaatttagttgaaaaagctaacatcatacaaaagggttttagtaaaacgtataaataaaacattcaaacaaaacaaatatcttcgcaaattgcttctaaaagaaattacgaagatggcaaagcaataaaaagtccatttttatcagcttaatatttgacctgaactttttacaggcgcaaatctttttgtgacgtggtcctactgcgataatttcattatctttggcgacaaatctgataatttgggcgttattgatgcgcgcgctatgaagacactggaactattcacattcaaaggtcaattactccataccaaattgttccaaacaattttaaactcaaaaattctgaaggggaagttttttggctcttgtcgatgttttgcgtccaatcgaattacttttatgtaaaaaagaaaagaaacaaaatgtttgtatattaatataaaatacctattgggacacataatatcgacaagagcttttataaattttctattttttattgttagcttaaaaactggcttttccagatgaaattaacgagttcgtttgtcacccaaatgggcagctgattttcgtggccaccgacctcggaaaattggaagttcttaggtggattttgttgccgtttcaacccttccataattttcaaaattgtccattttccgcttgccgaagctgaaacgcgttcgaactgtccaggcccacccgcccctttcgacttgcattagtgtcgccctttcccccaacgaaaggtttttggtggtcggtgcttcggacgcctgctgttccgtgtgggacattaacgatttaatatgcgtccaaacactgaccaggtaattagcactgccaaaaaagtttaactgaattaattaaggctcgattatccggtgcgcagtgtttccttcagtcattgcagcaatttgatcgcttcgggcagtgaagaccgagtgatcgacatttcgtggactccgactggcgaaaagtgcgcactttcgaaaaacgcttatacattttcaaatattcaaattagagtcgccgaagttccgatcgccaccgaatgttatgacgtcgcctggcatcctcggctttatcttttagcatatgcaatcagtggaggattgaatgacaacagaagtgatcggagtgatcagtcaaccctcagagtttttggttactctggaggcatttaa

SEQ ID NO: 71623 - DNA, 766 bp, Heterodera glycines
atccattggcacgcctggttcagggtcgttaccataaaatgcactgcttgtgcgttgcttcgtgggatcatgtacttgtacgtgttcttacgttacttgcttagctcggctgtggggttttggtgtgctggcgcgaacttgtggttctaattcgcgttttacggaccgtaactcgggcgcaccaatgctttgcatgctgtggcggagtgcctggattactggcattcctgctttgatttttcgacctgaactcagacgtgaacacccgctgaacttaagcatatcagtaagcggaggaaaagaaactaacgaggattcccgtagtaacggcgagtgaactgggaagagtccagcgctgaatcgcagctcctctgggttgcgaggtgtagcgtatagaccgtgagcttgggttggcccgcttgttcaagtttcccttgaccggggctccagagaaggtgcaagacctgtccaactggcggtgcctatccatctttacgtgtcttggagtcgggttgtttgggatcgcagcccaaatcaggtggtaaacttcatctaagactaaatacggccacgagtccgatagcgaacaagtaccgtgagggaaagttgcaaagcactctgcagagagagttaaagaggacgtgaaattcgatgaggtggaaacggacagaactggtgtatctggtctgcattcccgccgcttgttgctgtacgttggcctgctaacctccaggctggggttcgctgtccttctgttcagtggcga

SEQ ID NO: 71624 - DNA, 60 bp, Heterodera glycines
gcgcccgtccaaggccaacaaatttaaaaacgggcgcgaagcgcccgtcttgagcctcga

SEQ ID NO: 71625 - DNA, 1505 bp, Heterodera glycines
ttacccaagtgattcctattcaccacctacctgctcccttgatgggctagcgttggcaccaccaaatgcccccgtccgctgatgggcacaggtcgttcgagatgacttgtggacgctgcccaacattacggggcagctgcctcacgagccatgcttttggggtgcttccatacgttggagctgtggtataccgctcagtgctgcacgtgtgaaagcctgtgtatggctgctgcgtggcaatgtgtcggtggcgggccgcctcgcttggctggttcgctgcgccaatgtgggatgcacgctcgtggggcgacctaacggctgtgctggcgtctgtgcgtcgttgagcggttgttgtggcaggcacataacacactgactggggatggtggtttcgttcccggtcttacgtgccgtaactagcggtgtgtttgagcttgctgctacgtccgagggcgtgatgagatgacgaggatactgaccgtgcttggtctagcacgtggatttccactcaatgagtgtcagatcgggaaccgccagctatatctttgattttcatgattattattcacacctccgtcgaacaatgaattctaccctcatccgggcactccctcctctcgagtaccgctgaaaaacacacacatgtgcgataattatggcgaccctgcagaaaccttgaacacaaaacattcgaatgcacattgcgccattggagttacatccattggcacgcctggttcagggtcgttaccataaaatgcactgcttgtgcgttgcttcgtgggatcatgtacttgtacgtgttcttacgttacttgctcagctcggctgtggggttttggtgtgctggcgcgaacttgtggttctaattcgcgttttacggaccgtaactcaagcgcaccaatgctttgcatgctgtggcggagtgcctggattactggcattcctgctttgatttttcgacctgaactcagacgtgaacacccgctgaacttaagcatatcagtaagcggaggaaaagaaactaacgaggattcccgtagtaacggcgagtgaactgggaagagtccagcgctgaatcgcagctcctctggggttgcgaggtgtagcgtatagaccgtgagcttgggttggcccgcttgttcaagtttcccttgaccggggctccagagaaggtgcaagacctgtccaactggcggtgcctacccatctttacgtgtcttggagtcgggttgtttgggatcgcagcccaaatcaggtggtaaacttcatctaagactaaatacggccacgagtccgatagcgaacaagtaccgtgagggaaagttgcaaagcactttgaagagagagttaaagaggacgtgaaaccgatgaggtggaaacggacagagctggcgtatctggtctgcattcacccgtttgttgctgtacgttggcctgctagcctccagactggggtttgctgtccttctgttcagtggcgaatggggcatttgcaggcggag

SEQ ID NO: 71626 - DNA, 1719 bp, Heterodera glycines
  unsure (1)..(1719): unsure at all n locations
atgaccaggcgaaatgcattctttcagcgtaattcgatacgtaaaacatgggccagcgatgccgtaagatatatttattaatttttataaaaaaaaatatttaaatttatttatataacttttagttaaacgacacggtgattcgttttttaattggtgatgcaccaaaaagtgatgcaagaaatcaaaaagcccgagatgaacaaattaaattggagcttgaatttaagaaatttggcgatttgatttttttgaatggcatcaccgacaactatcaaaatttgcatttaaaagtaataaataaattatttttagaataagatttttaaatttgatatgaatgaaagcacaataatatttatattttattaataaaataaaaaataaataatgcaaaattattgaaaaaactaaatttataaacaaattaaaaataataaatagaaaaaatcacttttttaataattgattatttttaaattaattaatttattttgttcatgtttcagtggcatgccgccttggaatggcaacaaaatttttgcaaaaatgccgaatttttgatgaaaacggatgatgacacaattgtgcatttgccacggttggaccgttggattgagcacaaatttcggccagcattaaaacaaaatgtggccacatattttggatggatcatttccggcgtaaagccaatccgagacaaagggcaccgatggtaatttataaaatggataaaaataaacaaataaaatttataaatttattccaatttttgtaaaagtttgaattccattaataaaattactaataaaatttttattaaaagaattattctaaataataaaccagaaatgaccatggattataaaaaaaaaatattaactcttttattatttatatttttttattttggttttgagctattttcggtataaaaataattatatttaatatatcggaaataacaaaaaaaataaaataaataaataaacgaataattttttgtataatgaaactgaggatcttgagattataaaataagattaaagtatagaagttatacttatgtttttttaaattattttttttataataaaaaataaataaaaatgtaaaaaaaaaataatttaggttcgtgccaaagagtgcctatccgtacgagtggtatccggcttatatgcaaggtgccacatatttggcgtcggcacaagcaatttcagctgttatgcgtcatgtccatgaggtgaacggcttcaacatggacgacattgttttcacgggcattttggccaaattggccaatgtcacactgtttgacgcgggcgcacattttcgtgtgggaaatgcggtaaaaaaatataattatattattaacaaaaaatagatttttaagcgcgatttcctcttctttccgagcttttgaggtctaaaaatacgaaagaatatgtttttagctgcttcttaaattttaaggaatatattttggcattttttcccaaaatttcatagctaaaaatcggataactaaaaaataaaaataaattttccaatttgttttaggtatttcatggtaaaattgttctttagcttcatgcaaatgaaaaatgcgttgatcgtattcctgaagctgttgcattgtatggagctgacagtttggcacaatttgaagaaatttatgataaattagattcaattgaatgtgcncagagcaangcgtaa

SEQ ID NO: 71627 - DNA, 660 bp, Heterodera glycines
aaacaaaaaatcgatttttttcaagtgtccgtttggggtactcaaacaattatggggagcaaaaatccaacgcagaattaaagtacaggctatagggaagctattcccgaaggattcggtctccccataaatctgggcgcatcggttcggggggactgccccgaaaacaaaaaaatcgattttttcaagtgtccgtttggggtactcaaacaattatggggagcaaaaatccaaagcagaattaaagtacaggctatagggaagctattcccgaaggattcggcctccccataaatctgggcgcatcggttcggggggactgccccgaaaacaaaaaaatcgattttttcaagtgtccgtttggggtactcaaacaattatggggagcaaaaatccaacgcagaattaaagtacaggctatagggaagctattcccgaaggattcggtctccccataaatctgggcgcatcggttcggggggactgccccgaaaacaaaaaaatcgattttttcaagtgtccgtttggggtactcaaacaattatggggagcaaaaatccaaagcagaattaaagtacaggctatagggaagctattcccgaaggattcggcctccccataaatctgggcgcatcggttcggggggactgccccgaaaac

SEQ ID NO: 71628 - DNA, 3537 bp, Heterodera glycines
gctttcatccgcgtcaaatctgacagtgactggcatttgatcagtgagtgttgttgaaaggtgtcggaaaaaaaaacaaatgtatttgttaatgacagggaggataccctaaaatgacgacacaaataagtaaatttatcaaaacatttttaaatttaaaatattttactgttttttattttaatgaaaaaattcacaaatatattgtaaaggttatgaactcattttttcaatggattatgcaattcgacagctccgcctcgcactgatcacttcgcttgggggggggggcgatgggacggcggataatccggggacaatccgccacaatctccagcaaaacaattaaaatggtggtaaaacaactcaaagggtcgcaattgtctcctcgttgcgagtgtttatgggcacattttgcaaattgcattttggccaaatttagtggcaattaaatatttttgttgaattttttaaaaatattttcattattccaccaaaaatgcttttcttcccaccgccgacttcagcagcagcggcggatttgctggttgacccggcgattgacggattattacttaacggagtgataatgccaaagccaagcgaattggaacaagcgcagagaaatcatcaggtcagagtggccaaaagaggaaaacaattcaaaaggggctaatcaattttaaaaattgttaattggcgattaatatttgcaaatgttgaggctgaacagctccaacgccaattagccatcatgggacagcaacttcagcagcaaatgccaatgcgcggaagagaactgtcgccgacgcagccaaatgtgccaagtttaatcggcccattcagcggactgttaacaaccgcgcaaattgatgaaattgaacaaatcggaagcgacaaaggcaccgacatgcaaatgctgaccccggcaaattgcctaatgccggtgagattgtccacttattaaattggttcgaatgtttgccctgattaagccaatcgtcggtctttcgccaatcccttcggtgtcatttggcaacacattcactcaattaactccgccgatcggactacagcagcgtcaacaaccgattgaccacattcagccgaatttgctgcttcattcaccaggcaaaataatttattttgtgaatattccgtttcgttttctgagcttttcccccttttcggctttctctgttccgcgtgccatcggccaattttggatcagagttttttgctggtggatgaccaaaagtggcactctgagtgctgtgtttgtgtgatttgtggccaaaatttggaaaaggatgggcccacctgtttcgtgcgcgatggctttttgttttgtcaccgcgattactttgcgtaagtaactcaaatattttaaaaattgaatcgctttttaagtaaatatggtaaaccctgcgatcggtgcggcattccaatcgcaaggggagaattggtgatgaaagtgccccaaaatggaaactccgaccaaaaatcgctgttattccacgtccattgtgagtgaattcttttttatctttgatcatttttgaattgtttgcttttcgttaggcttctcctgtgtttgttgtggccaaatgctttctcctggccaacaatttaccgttggaatttcgggtcaaccgagcggggctttgttctgtgatggtgagaacgatttggatattggaattttataatccatcctcattttagcacatttccatttgaatccttcgctttcccttggccaattttcgcataaaatgagcgacgaagaacaagtaactctgaagaacttcgaatttttgaataattttttcggaatcagctccattttttgaccgatctttgctcttccaatttggggggccacggccaacaaacgaatcgcaaagttttcgagcaactttcgactggcgtaatttcgccgaataatagccaaaccgacagccgatattcttttgcggaatcgagcaaggaaaacccaggtaaattgcaaaaaatttgattaaggaatatttgaaatccttaatgcaccttgaaatttgatctttgcggaataatgagattgtgatcataaatacggtggcgaaagaacaaataaatcggagagagaagcgggggaggggggggggggggtgttgaatggcacggcacaatgtttgatttgcataaataagggggaaagggataaatattgggaaaaagcaatgcccgaaatccatcaaattactaatagcccaacaaaataaaaatttaattactctttatttaaaccaaaagtttcgcttgaccaattcgttattttatcgtacctcggttaattggcattgtttgtcatcccatttcacatgaggcaaaagcgggaaaatggcgcggatggcattggcatgggaaaggaagaaaaatgagagaatgtgaaatggggagaaaaggggaagggaatggagagaaagggatagaaaatggaagagaaggaagagaacgggggaaagagggaaagggagagaaaacggaaggagagagatagagaaaagggaaagaaagagaaataaaatgagagagaaagagagggaaaagggaaaggagagaaaaagggataaaagaatgaaagagagagaaaagggaaagagagagaaagagagagaaaaggagagagaaagcgaggaaaaaggaaaggagagaaaaaggaaaaaagaaggaaagggagtgaaaagggaaagagagagagaaaaggggagagaaagagagaggaaagagggagaaaaggaagagaaggggagaggagagaaaaggagaaaaaggaagtcgcaatttacaaaagccaatgccattttaggagcaattcaaaaagggaaaatattgtactatatataaatgatcaaatgtgaagtctttccatccactcttctcttaagtgtgccctttttgctttttctcagattcgcttcatctttcttctccttcagtgactccgaatggcaccgacgcattttgcgccgggcgaaacggagggggcagctctaatggaggcgaaacgccgggcgcaatgggcgcaaatgggcggcaaaaacggatgaggacaagcttcaaacatcaccaggcaaatgaatgaatggccaattggccactcgtcaatttggccaattaatttggccaatgaaagatctttggctattttttacttaccaaattcaaggaaatattgaaaatgcaaagcctttagcttcggacgatgaaaaactatttcgcctgtaaccacaacccggacgcgaaggatttgaagcagctttcccaaaagacggggctcaccaaaagggtactccaagtttggtttcaggtcaaactcatcccattggcgttgttttcacctttcttcttcagaatgcccgtgccaaacatcggcggaatcagcaaattcgcggggaagtggcggcggcaatgaacggcacaaatccgtcgctgaccacggcaatgtccggggtgcatgtccacgcttctctatccacctctgtcgagtgtggc

SEQ ID NO: 71629 - DNA, 799 bp, Heterodera glycines
atggtcaattttgtgacgacagtggccacctttttctgtggaatgtaccaaattaggggctttccaactttttcattattttccagtggcatttgccgtcaaatttggaagcgcggcgaaacggccgacatcaaagcgtactcctttctgcttggtgttttgggcagcagctattggttcacgtacggagtgctgttgcagcacccgttgattcagtacgtcaacgcgtgccaattcgtaatttactcggcttacaccgccttttattggacaatgagcacgaaaaaggttggaacattcgcaaaatctgctgcattttttttttattattttcaaaacacagcgtccggaaactgagctcctgtaccaaaaaagatttgcatgtgtggctcagtggtttttgtaagatagtaaagggacaaaggcagggggttcgagtccgttgtgcaacatgaatatttttatttatttttgtccaaaaaatttaaaaacacaattttcggaaattatttttggaggtttttgccaaccaaattgcacattcttggtatctttcgaaagttcttgatgagtagaagcttttcccaagcaaatgctaagcatttttataagtttgaaaaaagatataagcgtttgaaattttattttttgaataattttagatcggagcgtaaaaaattaaaactcgagcgttaaaaatattcataatatttttctctatcgatatgcaaaatttggtgtaattgtatggttagaaaaaaggttatatggagagaagtaaatgttgtttttgctaata

SEQ ID NO: 71630 - DNA, 175 bp, Heterodera glycines
atgactgcctttgatgagttgggcgttttgcccgaattggcaacggcactcaatgatttggaatggacgtccgtctctccctttttccgacttaattttcatagctttcagcttgcctactgacattcaatccgaagcgatccccgccattctcgggggtggcgacgtttgcatg

SEQ ID NO: 71631 - DNA, 839 bp, Heterodera glycines
  unsure (1)..(839): unsure at all n locations
cccgctgtgctcaccgatttggacgatgagatggaaattgtgaaagaaganatattcggggctgtgatgttgattttgcgtttcaanactgacaaagaagcgattgcacgtgcaaatgccacacaatttggattggcgtcgggattatgcaccacgtgagaggggtntaataataaatattgatgagattaggtcgtaaacaattaaaggacatcgtttgatttttagctattatgaatagtaagttatgtagattttgtttggattggagatgcataattatttaaaatgttttcattgtacccttccttaggcataaattaaaaatcgtcaccctgatgtcctaattaccacttattttttaaaatattatccgatttattctcttgttggtcaaatcactaaaaaaatctttggtttacttttagtttaattgggccttaccgcaaaacgacgaataagcttttgctaacaaaaaataaaagtaaaaatatttatttacaagtaatgaaaatttaaattttggttttattgcattttaattccaattttttaaggaatttagcacgagcccatcgcgttgctgctcaattgaaagttggcactgtttttgtcaacacttacaatgatgctgaggtaacaattttgaataattatttgcgaacgattgggtttactgttttgttgtaagatggtcgtttaaggtgcacatcccattcggcggcttcaaaaattctggtcacggacgcgaaaactgtgttgaatgtttacacgaatattcacaagtgaaatcggtgtacgtgaacatcgacgaaggattgcaacacaatttgggatga

SEQ ID NO: 71632 - DNA, 743 bp, Heterodera glycines
atgtgctttccacttgatgaactgctgggtgagaagcacaacggaactgtccgtgctggccaagtctgtccagcttcaaaccaatattggtattacagctgttgtggacgatacgggaacatttgctgcttacaacttcaacccaaggttaaaatgaatttgatttaaatgaaaaatttttaaaaaccgaaatttatattttttattagtcaatgttttgaatttgtttgttgcatatgaaaaataattaacaaaattattttttgttaggtttattaaatgtcaatttaaaaatcgctttgcgtcagtgaaatatttttttcaaataaaattctgaggcattattttccattacccttttctggccccaatgattttaaatatctcaattgttttaactaccctatcaataaccaaaatacaaatttttaccaaaaaaatttcgctaattcgaaaaaagaaaaattaataaaaaacaaatatattcattttttattaaaaatataacggataagcacaaaataattaaatttttttaatgtaattttccaagagttggctcatcctcggctttttcgtccccgttgcgatcggtctgcttgcgcttcagcttctctgtggcttgtttacacactttttcaaattatgtttttgcagctgttgccgccataaaaaagagaacattggcttaaaatgatccgcttttatttatatttcatagatcatttttacatttaaataaa

SEQ ID NO: 71633 - DNA, 808 bp, Heterodera glycines
cgttcagtcataatccctcagatggtagcttcgcaccattggtctatcgaccaagcacatgaaccaaatgtctgaacctgcggttcctctcgtactaagcaggattactatcatagcaacaggtctttagtagggtaaaactaacctgtctcacgacggtctaaacccagctcacgttccctattggtgggtgaacaatccaacgcttggcgaattctgcttcgcaatgataggaagagccgacatcgaaggatcaaaaagcgacgtcgctatggacgcttggccgccacaagccagttatccctgtggtaacttttctgacacctcttgctggaaactttacacattcaaaaggatcgataagccacgctttcgcggtccgtattcgtactgaaaatcaggatcaagtaagcatttgcctttttgctctacgagaggtttccgtcctctctgagctcgccttaggacacctgcgttacgctttgacagatgtaccgccccagtcaaactccccgcctgacactgtcatcggcgcgggtcgccgggccaccgggtggcccgacttaacaccaaaatggacaccctttcgggcgcactcccgttttaccgattaagtaaggaatcgatgaaagtagtggtatttcactggcgccttgcggctcccacttatgctacacctctcatgattcttcacaaagtcagactagagtcaagctcaacagggtcttctttccccgctaaatttgccaagcccgttcccttggctgtggtttcgctagatagtagatagggacagtgggaatctcgt

SEQ ID NO: 71634 - DNA, 1589 bp, Heterodera glycines
atggctgaagcctggaatgggggaaatgacaatttgggtggaggaagaggtggtggtcgtggagcattgccaccaatggctgaagcctggaatgtgggaaatgacaatttgggtggagggagaggtggtcgtggtcgtggagcactgccaccgatggactccgggaccgattttggtaaatatttccataacttcacataataaacctattatttatttatcgtgcgattatgttttattaggtccagacaacagtggtgtgggtgcacgcggcggtcgtggtcgtggagcaccaccgctggtggacttaggactcgatttcggtcagccacataacttatcaaatcaccgtacaaatcacggtttatcaggtcccgaaaccaatggtgtgagtgcacgcggcggtcgtggtcgtggagcactgatgccaatggatgatgctttcaatgtgagaaatgacaattttggtggagcagaaggtcatggagcacagccaccgatggattccggatgcaacttaggttgtatttctcaatcttaaaagtaaaactgaaagattctaggaggagaaggatttgttccgacaaagcgttcaattgctgaacttttcgaggaggatgcccgcgtaaaggacaaatatattacaattcgcgatgaagacgaaaacgtgataatcgctggtccgcacgcagacgaatataaggccattgagtacaaatccagttttgaaacatgttaatttttgttttttatgcgttggtccgagttcgaatttgagccagctttgctgacaaatattcagaaggcgaactacacagtgccacgcaagattcagtcgcttacctttccgttgatcaaagctggtaggtcataacattattcgacggatgcgaattgaaacaaatttaggacacgacttgaaggggcatgcagagacggggagtggcaaaagtgcagccttcctgcttccgatcatcgatgccgtcatgaaacttaaaaaaggtggccattacaaatcgcggcgctgctgtccgtttgcccttatcgtggaaccaactcgtgagctgaccgttcaggtgtacgaccaggcgaggaaattggcagaaggttagtgctcatttcatgaattaaaccaggcaggctttactgttttctttgaagagtgtgatgtgtctgtgtctcgcgcctacggaatgtttctgcgtcatgttaaccttcgtcaaatttctacggatggttgtgatattttggttggcactccgggacgtctttgtgactttttccaatcaaaaaatgtaaaaaaaaactatattattgtctatctcataattttagcttttgtgcgaccaaatcaaagttcttgtctttgacgaggctgaccaattgctggaggacggttttcaggctgttctgcgtcagcttaacaacgttaacaattggccccaggttttgtgtattttatttcttaaaaaatctattttttgttttttatttagcctgaaaatcgacagactctgttgttcagtgccacttttccgttagttgtccaaaactgggcagatgagtggatgcgtaaagactcgatgatg

SEQ ID NO: 71635 - DNA, 703 bp, Heterodera glycines
tttggtgcgtttcagaaccctttctgaaaaaaatatttatgaaacaaaaaaatcgattttttcaagtgtccatttggggtactcgaacatttatggggagcaaaaatccaacgcagaattaaagtacaggctatagggaagctactcccgaaggattcggtctccccataaatctgggcgcatcggttcggggggactgccccgaaaacaaaaaaatcgattttttcaagtgtccgtttggggtactcaaacaattatggggagcaaaaatccaacgcagaattaaagtacaggctatagggaagctactcccgaaggattcggtctccccataaatctgggcgcatcggttcggggggactgccccgaaaacaaaaaaatctattttttcaagtgtccgtttggggtactcaaacatttatggggagcaaaaatccaacgcagaattaaagtacagactatagggaagctattcccgaaggattcggtctccccataaatctgggcgcatcggttcggggggactgccccgaaaacaaaaataaatcgattttttcaagtgtccgtttggggtactcaaacaattatggggagcaaaaatccaacgcagaattaaagtacaggctatagggaagctactcccgaaggattcggtctccccataaatctgggcgcatcggttcggggggactgccccgaaaac

SEQ ID NO: 71636 - DNA, 308 bp, Heterodera glycines
attgtcgcgaaaacgttcgccgattattccgtaattccaatttcaatcgctggcactttgccgttaaaggcgcatatttccgtggcaacaaatgaaattctttcggttggaaaagataaagattcgcaaagcatattgaaggtttttcaacattggcactgattttcctcatatatttgtcgttttctcagtgcattgaaagggatgccacgttccgctacaacgtgctgaccgtcgattctgaggaggctgtcccctgcctcaatgtcaacaaccacctcatctttcggctcgaccttaatgagccc

SEQ ID NO: 71637 - DNA, 102 bp, Heterodera glycines
attctctcattttgacacttacatttgaaccctaaaactctttcaaaagcccgctgtaaaattgtgcatttttaaaggagatgaatcgacattggcaatgca

SEQ ID NO: 71638 - DNA, 1623 bp, Heterodera glycines
  unsure (1)..(1623): unsure at all n locations
agccttcgccacatttggacntcgagacaatttacaagaaaatcaaagagaaaatgttggcacagtttgagggctggtggaagcgcgtgccggaacagaaggagccgctgtacgagttcttcaaacagctcgaggacatttcaatgcgttacgtcatggcaattgttgacgcatttttcgacggcatttccattgagagttttcggcaggaatattcactgggcgtcaaaggtggggctgtgagcggaatgatcagaattggatttgacactttggcactaatccaaacttcgaaatttgtttattttaatgaacattgggaaaaatgccaacttaatctatcagttttaattagagaccggacaactggggtcggaggatcccgagtcttgatcccgaccgaatcccgatcaatcccgacgattttgaaagaacgatcgggacgaatcccaaatttaatcccgctggattccgaaaaaatccagcggtatcccaatcccgtccggtctctagttttaatttaaaaatgcgacccataccaattaaaaatgggttcatgattttaaaagcatttgcctatattacaaattcgaagttcgtttcatcatcattagggctcggaattatatgcaccaaaaattgcaaaatatgcacataaaaagtgaaaaatatgcacataaatttctccaaattgagggtataatttcttaaaatttcttcaaattcgctaaatgtaaggtaaaacttttaaaagtggtcaaatatggtattaaaaatcattttagatgaaaaaaacattataaagctaagattgacgaatttttagctaaaaatcaacccaaaaagcgaaattttcgctttttttaaatttttgacataaatttacaaatttttaagaaaaatttaatttttgcaatttttttttagaaaatttggctaaaaaatgatttttcggaaaattttccaggctttagaggtaaaaaaaggctaatttagctgatgggggccgttctaatagaggttttttaatgctcaaatatgcacaaaaaatatgcatgaaatgccaaaatatgcataaatcgtgaaatatgcacaaatatgcaaaatatgcatatggaaagtcatcctagaagctttaagccgagctaaaaacatgtttttcgtacgtttcaggcctcctgcagttcaggaaaaaaaaatatgcatgtgcatataattccaggccataatcatcattaggccggctgcacatttggaatttatttccatctgtaattaatttaaattttaaaaatatagtaataataatttaattttaaaattcagatgtcaaagttatcaagacaaaggaccaacaacgtcccatcgccaaaaatgaccggacaatccatccaaatcaaagagttggcagtgaaactgagcaaattgccaaaatttcggcgaatgacaaaacgccaactggcgtcattggggagacaaatgcattttttgatcactttttcgctgatcagcacaacaacaatttgttcgacaaagagtcccaccactttaatttgaacatttttattcaaacatttgacaaaagtctgcaaatcaccaaattcctcaccattggactggcga

SEQ ID NO: 71639 - DNA, 487 bp, Heterodera glycines
  unsure (1)..(487): unsure at all n locations
atgtatgtaaatatccgtcgattcccaactgatcagttcgccgatcaagtggatatctaccgggatgatcccagggaggatgtgcatgaattgtggcgcaaattcacggaaagcatcgattggatccatcggctgaactgcggacgaaaattgctccaattcattcagctgctgcaccgattgttgccaaagtacacggagatgaaccgattgaaagcggaagatcaaagggagcaattggaggaggaaatgttttgggcggcggaagaggaagaaactgtgccaacaccaccggcggaaggggcggcgcggggagacgatgagggaaacagtgccaaaaacagaggtaaaaattgggaaaagatttcaaaaaaattattattgtttanattttcaaattatgctccataacaaaattataaactcaagaaaaaatttttttgccacttcaataatatctcacgaaaaaaattttccagccccctag

SEQ ID NO: 71640 - DNA, 66 bp, Heterodera glycines
attttcgaactttagcacatattttggcctttttccataaatttcatagcaaaagtgcaataaaaa

SEQ ID NO: 71641 - DNA, 479 bp, Heterodera glycines
catttgttaacgtgttggacatatttggaatgaaccaattgtcctttcgacttgcaaatgtttctgtgaaaccgtcgatggttggagaggcgagaatactcttccgggcaacgagaaaagccgtggcggacagtaagcacgaagtccatggcggcatttgggacccaaggcaaagccgaaagttcgaaatggccgaggcaaaaatcaataaatcgttggaataaaattgatattttataggcaattagcgaatttgtgaaagcgaaagactcaaatgggtcgatggaccgcttgttgggctttttggacgagttcaacagaacgaatcgttttgacatggtcagaaaggtatgtatggatcataattaatttatgttgatttctcaatgatcagtttatatgaaacaaaaatttacgaagattttgaatctgtcctgtttttttagtcttttaaaataattattattttattaaataaa

SEQ ID NO: 71642 - DNA, 2323 bp, Heterodera glycines
atgcaagaacatttatcacttcgatcaccgaacatcggtcaaagaagtccgtcgattcgatcgccaatgcaagcgctaaaaatcagtccccgaggggaaattgttgcgaatgattcagcagcggcaaatgagcataatgtgtcatcatccgaccattcaaaatatggttaatttttttattccatttattaatattatttctactttatactagagaccggacggagtcgggttctgcaggattttttagagatcccgcgggattaaattcgggatcccgacctcgggatccgtcccgattacttttccaaaatcttctggatttggtcgggatcccgactcggggttcctccgaccccagtcgtccggtcactactttatataaagaatttgttgatttcaaaatttcggcaagcttattttgggctagtaagaatgatagccattttcagcgtggtttgaagcttatagtaagaagttttcttattttccattttagcattatttgctatataagaacccatttttataatttcgaaactgcattagcataaaatttttttgaatccaaaatttaattttaaaatttcaagtatttcgagcatttcttagaatatcgaaatttaggcctcaaatttcgaatcttatatcaatttaatttgagaaatttacgccgtattttgccatttttgttaatatttgtccataggttaacaccaattcatattgtaattttgaattatgaaattattatacatatccgtgctctaagtaataatgaaatatttcgtcagattgccaaattgcggaacaattgctaaagcattggttggctctaaaagagccgaacagaaacaaacgaattcaaatgtatctaagccaaacttttatggacagaaattcgaacggacgaaatgtgctcaaaaaaatgggaacaaaaaatcacaaaaaaattaatgaaactattgaaaaattggaaataattgtaaaggaaaccccaaagaatgaacgattattcttgcggaaaatgagtgaacaatttgacaaatttattactttaatggaacaaataatgaatgaaaagtgcaattatttgccagaaccaccaattgaaggcaaaaaaaaaaaacaaacaaattatttaatttttaaattatttatttataaaatcatttggctcatggaaaatacgacagtagaaagtttcaaattaagctactgtaacttatgtacaaaagcttcaataagaaaaaaataaacaaatccgtaaattatgaacatactataattgtttactgtaaatttgtttaatttagaaaaaagtgctaaaactccacgtggagaactgattgaaatgtattgggatgatgaaataatggaaacaaaaagccaagaaaaggttggcggcgaagtgtccaacgaaaagtcattccaaaagatttcgaaacagttgattaatcagctgagtaaattgagagagcgattcaatgcaaaaccgaaaaaagggcgcggatttattgtactgcttgaagacatttattttgaagtcggatcgccgggtctgagatcgaaaatcaacaaaatttcggaggccatgaaggtagaaatgtatcagttttttttaattaagagaagattgaaaaaaatatattgcgaaataatggtgtccttttcttcttccgtttacgtaatccttttttaaatttcgaacttaattgaaatattattaatttgtatatttcattatatttatgtaaatacaattagaaatcaattaatttgagagttcatttttataaggtaatagtatttttccttctttatggcattcttgtggaaaataataaatcataactttcttgaaatttaaaaaacatgaatttttctaaaacaaaaatagaaattttatttactaaatatatttttattaagaacaataaatagggcttccttttttaggcaaatgcttaaaattttgcgcactttaaacgttcagataagcacgaaaaatgcattttccgcttggtttgggaggctacgatgatttttataatgcttatttttgcctcttccgggatttttatgcctaatgtgcctatttgcaggattttcaaaaaatccttaacaaatgtattgaaaacgaaaaacagaccgctaagaaatgacccaaaaaaatttcagaaaattcccctaaagaaacgaataaatttaatgtaaaaggggggggggaatacatttcgacgtatttttggcaattaatttttaatttaataatttcagaaataaaatcccgaaaaatctcgagttcataagtgggattaaa

SEQ ID NO: 71643 - DNA, 86 bp, Heterodera glycines
ataactctaaagttggccttatttttgtattaaatttccttattaatcgattcagaatttttttctctatcgatatgcaaaatatg

SEQ ID NO: 71644 - DNA, 608 bp, Heterodera glycines
atgccaaatcaattaacgcggctcaaaatatggtatgtcaatattaatcaacaactacggtatgttactcatcaaatatatacagtatgcccttgagttaacgatgccaaatgaatgccaaatttaaatattccgccaaccatctgctggcgcgttgcaaatggcacacagactgttggagtagtcaagccgtgacttttttgagcgcctcgaaggcggcggttgtgccatgttggtggcgacaacattggcacaattgctgccagccggctcaaatgccattggtgtttgtggcgaaccgaacggcgtcatcatcatcaccgttgttgcaagcattcgatggttggaaatggcggatggtgaaagcatttggtagttatgtgcagctagatgtctgactgctgatcagttaacagagtgatcggagctatgtttttatgtcgtttgatacacctttaaggataatctcatttttgggtcatttgatcctaatcaaattttatcactggtcacaatgatccgtttggataagaaaatggtgtcagaatcagtgttttagaaaagagctgatcattttggcaatcacagtaataatcacagatatatga

SEQ ID NO: 71645 - DNA, 681 bp, Heterodera glycines
atgaacgctaaaattatcagagtgccgaaaatcacatgtgatttaatcctagaaaaaaatggtctaagtaaaaatcgtaagtacgctcaaaaagcttctcaaacaattttagcgcttccaattccttctacaatcgcctttatacatcccattatgagcgctaaaattatcagagtgccgaaaatcgcatgtgatctaagcctagcaaaaaatggtgtaagtaaaaatcgtaattacgctcaaaaagcttctcaaacaattttagcgcttccaattccttctacaatcgcctttatacatcccattatgagcgctaaaattatcagagtgccgaaaatcgcatgtgatctaagcctagcaaaaaatggtgtaagtaaaaatcgtaattacgctcaaaaagcttctcaaacaatttttttagcgcttccaattccttctacaatcgcctttgtacatcccattatgagcgctaaaattatcagagtgccgaaaatcgcatgtgatctaagcctagcaaaaaatggtgtaagtaaaaatcgtaattacgctcaaaaagcttctcaaacaattttagcgcttccaattccttctacaatcgcctttatacatcccattatgagcgctaaaattatcagagtgccgaaaatcgcatgtgatctaagcctagaaaaaatggtctaa

SEQ ID NO: 71646 - DNA, 997 bp, Heterodera glycines
atgtcaaaagaagccgaaaacaaattttgtattatttcatgggcattgaggtaataaataattagttaattaatatatgaatctgaaaaaatattgttaaacattttttaaataatatatttttagtaaaattttacaaaaccatttactatatttcctaaaatagagcccccgggggctttatttttcaagccccctcaaaaggggggctttatttcaagggggttctgatttagggaggggggggggggctgtattttagaaaatacggtatgttcgtttaatattataaattttctgcttaagaaaaatttttctggccaatgaaaaagatttaagctttccaatattagaaataaaataaaatttatgaaaatgaatgtgattattttttttattacattttttaatagtttaactaagcgattaaaattttaaaattccataatttatattaataatttaaaagtaaatttttaatttgtggcaatgacggcaccaaattgtcaattattttcttttcagacttccccagcagaataaaacatcaacatcagagcgtattcggcatttggcgtacgcgcgtcgtcatagtgccgagttggcacttgcattatcattgcttggcattatgttcatggtgttggccatggagttcggtttggccaaatggcaaaaaatggatgaagcgatgcgatggacattagcagtaactactgtaacgctgctgctggttactgtacgctaccatgtgctacaggcaaaagtaaacgcatataaaatagagttggcacttaaacaaattactttaaaaaaaatcattcattttagacaagatatttaaaataccgtaatactttttagaattttaaattttttaccattgttcctatagacagacagtgtgacacaataattaatttcttgaaattttcaaattttctatagctaaaaattggtaattttttggcatcaaactttttataagtcgaataaa

SEQ ID NO: 71647 - DNA, 1471 bp, Heterodera glycines
atgaatagccttaaaacagactatgtaagtttattgatggtcggtttcaatgattgtggaccaaaacatcgacacgaaaaaaaggtccaaacaaaatttattgaaacttgacgccgtttgagcatacgtttgagtaccagaaattttagggcattaattttttatcttaatacgatagtttttttttttttaatttttcattttgtcccccattcttaaggcaatcaacaacacattgctaacatcaggcttaatggaggaccatcatcttgagcaaggaactgcaacaattaagcctgtcgatgtgctaatgaatgcttggagtgttgcggaacgattgtacaatgacggcaaagtcaaagcattgggtgtaagccgaacagacatagagatggtcaagctgttgtgtgaacgtgccaaaactcgacctcactgttggcaggtggtaacagacagcatagataaatccactcaaaacaattgaatagaaaccgtaaagcaattagtttatgtctttgatttaataatattttaattttatttccagaaaaaagaaatcattttcttaactcaaacttaatcaaattttaactaactaatagagaacattcgtttatctaatcatataatgaaatttactaagttataatttattattctgcaaataaattaaaattacaattaaatttaaatattactatcattgagacttttgaggtttggttcaatacgaaattatcgataaagcttattgaatgagtaaggacagcttataagggaacactctcaactgtaactgctgttcaaattgctttaaatcactttttgtttaatcgatgctgattaattgttacaaaatgatttcaaattaagaaaattagtaattggaaacagaaaaaatcccaaattgctctatctccgaaatgcaaccaaattattttaccaaataaattaaaatgaccaagtaagtatgtatctatgactttacgaaatacatatacggtaccatattacattattatttgagtcctataacaatacagtacaccaaaaaagccccttaaatttccattattttttagatagatttggccccgttgatggccaattttgatgatgttttgtcactgtgcagtcaccataaagtggtgccaattgttcgcgcaaatgcgatgggtgcaagcagcaaatttggctcacagcaacagcgcggtttctaccacacactgttgcgcgaaatggccaacaaatatggcaaatcggcaacacaggtggcaacaggcactcactgattgccaattaagaaacaaatttaaaaaattttaaatttgatattcaaatatttttctttttctaattgttaagaagagaatttgtattacaataccaaatgtatgaaaagcatattgttttcttgtttttaaagcttctatggcatagttttttgtgcttttttattgatcaaattaaa

SEQ ID NO: 71648 - DNA, 1224 bp, Heterodera glycines
atgagggtgtcatggtcgtcagttcatcattctgagcacacatacattatttgtttaacttctctaacaccaatcaattccttcatctcaacaatgaatgatgagtgtgagtagtgttcagggcggggggcctttgcgaagaatgagggaaatttgttggcgcccccacaaaatgtccaagccacgaaatgtccaaaatttttcaaaatttataaaaacaaaatgagtctaatttggggtttttagggttttcggggtcgctgaatacgaatatagcctttatattactcctttgcctaaccttaggcccatccgaataataaaaaactcaatttcgagacttggacatttcgtggcctggacattttgtgggtcagcgaattttttgactcaaaataaatgtggtgaaatcaaattgttgattgtgaaatttttaacagcagcttttaattcttttgaaaaatgggccgtttatttaagaaaattagacgcaaagaatttgacttgtttttatcaatttatttgattgatgaataaattgttaattaaaaagaaaagtggatgtaaaaattttaattaatttttcaatttttttttgcggaataaatgttaattttaaaaaattgttggaccttcaatttaagaaaattggatgtagaaatttttattttatctaatttttttttgctgaataaatgttaatttatcaatttaagaaaaatggatgtgaatttattttatcaaagtttttttttgctacaataaatgttatgctagtaaaaaaaatgttgaaaagtttctcacacaccacttaacacaaaatccgtttttataacacttcattcattgaaaacaaatattgggaatattgctaaattgctatgtaaacaaatttttaaaaattttatctccgctttttacatttcttcaggcttttattatgtataatatttttaattctaattagtaataatttcagcgctaattaaaaagtattctctcaaataaaatttatttattatttagatttatttaaaacataatcatgatgaatattaagcattaaaattataattatggcgaagaaaatcacagaagaaggcattaattatagttcttcctttttgcttcaattgagcccataatcattaatattcaattattaaataacgtaaaatgcatagcagtaaaaaagtagtaaactattaactattccacaataaa

SEQ ID NO: 71649 - DNA, 840 bp, Heterodera glycines
atggttgtcgctcaatccgtccgtgcagtacgcgttgttttggacgcggacatgggcgtgatcaatccggaccatttgttggagcattttttggcaaaatttgacaccgaattgccacacggaggaacaattgacatggttttctatgagcgcattttcaacggcgaaataatggccggaagttattgggcacggaacacacgttttgccattgaaatgttgcatttttgggccaatttcactgtgccgtcgcgcaccccttttcgcggaggcaccgacaacggggcaatccatgtaattttgttgggggatcgcaattagggattttttatgggcgcaaaatagggaaaaaatgccagattgcagcaaaagttttttttgggccggatatcccggctctattgcagttcacacaccataaaagagacgacaatacatttttttgtaactttaatgcaccataactttttctaaaaggatccaaattaaactttcttggtatcattcaatagtccaacgaattctttattagtctgctaaatttcaaaaaatttcattatgtttcaataaagctatggccaaaaatgtttagaaaaccaaatttttgaaattttctggccataaattttttgaaacaacgaatttttttttttgaaattttgcaggataatagaggatattaaatgctaccgtatgataatcaaaaaagtttaatttggatgcttctagaaaaagttatgatgcattaaatttgcaaaaaaatttatgtcgtgtcttttttttatcgtcgtatgaactgcaatagagccgatatccctccatctattaaatgtttagcga

SEQ ID NO: 71650 - DNA, 828 bp, Heterodera glycines
atgaacgctaaaattatcagagtgccgaaaatcgcatgtgatctaagcctagcaaaaaatggtctaagtaaaaatcgtaattacgctcaaaaagcttctcaaacaattttagcgcttccaattccttctacaatcgcctttatacatcccattatgagcgctaaaattatcagagtgccgaaaatcgcatgtgatctaagcctagcaaaaaatggtgtaagtaaaaatcgtaattacgctcaaaaagcttctcaaacaattttagcgcttccaattccttctacaatcgcctttatacatcccattatgaacgctaaaattatcagagtgccgaaaatcgcatgtgatctaagcctagaaaaaaatggtctaagtaaaaatcgtaattacgctcaaaaagcttctcaaacaattttagcgcatccaattccttctacaatcgcctttatacatcccattatgaacgctaaaattatcagagtgccgaaaatcgcatgtgatctaagcctagaaaaaaatggtgtaagtaaaaatcgtaactacgctcaaaaagcttctcaaccaattttagcgcatccaatgccttctacaatcgcctttatacatcccattatgaacgctaaaattatcagagtgccgaaaatcgcatgtgatctaagcctagcaaaaaatggtgtaagtaaaaatcgtaactacgctcaaaaagcttctcaaccaattttagcgcatccaattccttctacaatcgcctttatacatcccattatgagcgctaaaattatcagagtgccgaaaatcgcatgtgatctaagcctagcaaaaaatggt

SEQ ID NO: 71651 - DNA, 1040 bp, Heterodera glycines; identical to SEQ ID NO: 44116
  unsure (1)..(1040): unsure at all n locations

SEQ ID NO: 71652 - DNA, 1223 bp, Heterodera glycines
atgtccaagtgagagggagaaagtgaaaattactactgtaattagacaatatccatgtgaagggagggtgtgctgtagcgtttcttaaatccgccaatgtgtccgaaaacaaaaaattatacatataaatgcataacttagctcaacttcatccaaattaattcgactgattgaattttgaaaaaatatctgttaatttaattacccagttcaattttggctggacaattggcactgtgctggacctattagtcacctattcggacgaattggcgttgagcactgatactactgtctactgcttggaacaaaaaattgaggaggagccaaatgaatttccaaataattttgtaaataattaaaaaaaattaaaataacgaaattaattttcatgtttttttaagtcggagtacagagcagagaggctaacagccgcacagaaggaagttgatatgatgaacacatcatgggtatgaaatttggcgtcataatggccgggatttggggcagcttcttcccccctcccccgaaaatttaaaataaaatttcaaacaaaaagagcttacaaagaaaaattggaaaatttcaaccgttttttaattttgtgaagaaatattttttataaaaattccagaaaatttgaaaatttttttgcacccgtaatttttagggtctaaagcccgcaaaagaagcttaatattgaaaaatatgtattgtatacatagtaagtattaaaatcacaaagaaaatttgttttgccaatttattttactttcagattaaacactcattttcaggccgttgtcgttgaaagatttgcactgatgaaagatgaggatttcttgaatttttttggcactcctgtcgatgagactgttgaggaggacaaaaatgagaacaacaacatccatttgcgatctgagctgaaggcagccgatggagaggaagacaaaaatgatcttccaactgaatttgacgcacgcgaagcatggaaagattgtgccgaaatcatccaaagtggatatgcacaaggtggattggaggatgatttgtagtgctgttcgagactctcgagtctcgaagagtcgtgggaaattttcggtcccgaacagcattataaaacttaggctggtaccgaaacggcgggcaccgaaccgtcctgttccgaattatttcaactattgtgacgttttgccaaaatatgttaacaaaaatgcaataaa

SEQ ID NO: 71653 - DNA, 527 bp, Heterodera glycines
atgggatgcagagctttagaggacccccttgtagagaatgcgaacggtggaaggaatggtcagagaagttcaagggtaagtggggaaagacaatggaaacagtcaacggacggagaacattgatcagtcccattaacaaagcttgatagaaggtcagccattggtcagatcgctatctgatcagttcagtagggggcattgacccgtgatgtctaccgtactgatcaatctgttcagattccaaatgctttgtgccgactcccaccaaacagcagcagagttttgggatatgttcgatgtaacagctcctcaattcactccatttgattataatttccaattttaaggccactttgtacgattggcttcgtgctcgttacgaatgcaaaagcgcttttctgaatgtttatgagaaaatttgcatggacaatagagaaattgtgtttaaataaataattacacaaatatttatttaatttgatcaaatgattattcttaaaggtggcacatataattatgccaataaa

SEQ ID NO: 71654 - DNA, 624 bp, Heterodera glycines
atgcaagcgccagattggggcaactacgacaccaacggaaccgactacgactacatctacaacaactcggacgaacgggacaactggaacagcgagcaggccggcgtgttcagacatttagtgacccaggtagacgacgcgttgttcgatgaattgttttaatagaaattctcttttcagctcggcaccggtcagactctgcagaatttggcgctgcccaccttcgtgctcggaacgacgctctctcctcgaaatgtaagccgaattcttcggtgaacacagcttttttaaatttttccaagttcaatcttacctcatttcagcttgatgaactgatcgccggcgcctacgagaacactgctgagaagcggtgtttatttcccgattggttgacaacaacgcttttgaatcaacaattttttcagattccttgccgtcctcaaatactacttgaactccttctaccctgcacgcaaaaccgacgacgcgaagaagccgtacaatccgatcctgggcgaagtgttccgttgccgttggaccctgcctggcgtgccgttgtccgcaagccgaaccgccggtggaccgttcccgggctcagcaaccaaccaggtccagtttaagtga

SEQ ID NO: 71655 - DNA, 2313 bp, Heterodera glycines
atgaccacgggctcggaccgaacacaactccaaatgcaattacattttaacgcaaataattcttccgaggcatcccaatcacaaaattcctccgaacaaatgcaaaattgttcaagtatgcatttcctaatctttcataataatctgttgaccattgtttagccaatgaaagagtcgctggagaagattcggtgccattcatcgacagagagacttttggagacgcggagaatgacataggaaggcgaccgccgcccgatcggtttcgactggtctatctgatcgtgcttctccatggaatgggcatgttgctgccgtggaacactttcattacgatcgcaggggatgtaaggcaaaaaaatttcgaaaaacaaacttcaattaaatgttttaatgggctttaaggcacttttataactgcttttttaagtattatttgcaattcaaattcgctaatgtgagcaatgaagacaattacaaagtgtacttcttcaattatctgacggtttgtgcccaaattcccgtgagtttattcatgtttatctgattgtgagcatttttctgcctttttcctattttagaatttgctgctaacttttctgaatttatttggcgtcataagaggcggcttttaccgtcgcatttacttcactttggccgtcatttttggcatatgtctcgtcacaattgcgatggtttacgttccaaccgataactgtgccttgccattccttatcttttcttttcttagggactttcggctttttcctcttcacaatgctttccgttgtgcttctgaatagcgccagtggtgtttatcaaaacagtatttggggattgttcgctgattttcccggggaattcgccggtgccattattattggcaacaatttgtgcgggattctgatggcagtgctagacatcctcatcattgtgttaggtttgcgattcgtccacttcgcttttgttcggttcgcttttagtcggtgccaatgccgcactcgccgcaacagtttacttcggtctcgctctgtttaccgtcgtcctttgcattttttctttccattttcttcaaaaattggttctattctatttattttcaaactttcatctctttaaacattaagaatttctacaattactatgtccaaaaagcggcgaaagctcgcgcgaacaatggaatgaatattctgcacgaggaaacgggcgaagcgaaggccaatagaaaagtgacgcatccgcccgtaaaaacatacatcgcagttttctctgaggtaagcaccaattaaagcatgatatgctgtgaaaatatcattttggcaacttataggtccgtcgccagttgctcgatttttggcttgtcttttttgtcactttggctctgtttccgaccgttttgttgaaagtgtctttaattagtccgttcaacgaccagaaaacttccggtgacattttacacattaattgctttttgacatttctcttaagaatcgctctacaagcagctgacagttttcctcaatttcaaactgccgatttgcctccgtctgctctttcttccgttgatttggttttgcgattaccaatatgacaatttgactccgcgtcgcttcgtgttcatccacaaccaatgggtgttcactgttctgatcactcttatggcactcagtcacggctattgcagttcgttggcgatggtttacgcgccgaagtaacataattcattttaatacttttctcagaaagaaatttatgcagaaaagtcaatgaatccaagtcccaagttgttggcatgatgtccggctttttcctcgttctcggcattgcatctggcattctgttcactttcgttgagcctagccttgtcgatgcggcggaagactttttcggcattttttattaatgggactttaactagtcgactttccatctaacttttcgtcctctccctaatttcctgtcatttttgtgccattatttttgaaattataaattcgttcatttattcttgtaaaatttattgttttcacatacctaactttaataaaaccgattaattttcttagaaattaccagaattcgtttgtttcgtgcgataagcataaaaatacaattttataaactaaaaaatttttctatttttttaaaaacacccttcctcatcaaaataaacatataaattagtttattccagggctcgcagatctgaggctttagcctcattttgtggttttttgatataggtcaatgaggctaaattttcaaaatgagtcgatttttcatagtcagattttcacaaaatgcttatttcaa

SEQ ID NO: 71656 - DNA, 502 bp, Heterodera glycines
ggcttttttgcttgccgaatgaggcttttgaaaattttcatctgcgagccctgggcatatatatacataattatttacacaatctgttgaatatcgttgttgtatgcataatatcgtccatctgattggtcagtcagttcggcactttcttctcaggccgtcttggtgtggctgccgccctccggtgtccacaattccatgttttccctcatcatgcgcaagttgagcgaggcgtcatcagccaatggcaccgtcaatgtggcaatctccgcctgggccaagtcaattgcctaaaaatccggggagaatttagccacattatacaatgaaagaaaaagcatgatgaaaatcatcaaattggtcccactttttgggccaatttgcgcgcctcgtccaccgattttaagatttcgaagttgaacacggagaagttgagtgcaaggccaagacgagtcggattgatcgctgcaattttggaggtggcgatgtccatggcttcttg

SEQ ID NO: 71657 - DNA, 973 bp, Heterodera glycines
atgaagcacaatcaggtggagggaagtgccgtggcctgcaaagtcgtgccaattcgttcagattgagcaattggacgatggccatctccgcaatctgagcagcctttcgttgctcactctcacgggcaacaaaatttctcaaatctctccgaattttgcccaaaatactccgaatttgcgttacatttatttgggcgacaacaaattggaacggatcgacccgagctcaattaagcaattttctgcagccgaaatcattgacctcagcttcaataatttggctgaaataagcgcggaattgttcaacggaatggaaaacctgcaggtgacggaattgggggagaagcggcgccttggagaacagctgtttcatgctttagcatctgaacttggagtcgaatgccatcaaaggcgtcgccgccggcgccttcgccaccactccgctgctccttctgtggctgccccacaactgcttggactccgtgtcgcccaacatgttccaaggcgcgcccttcctcaagcaagtgtcccttgcccacaacaacatccgcactgtgcaggtcagcaaaacaactcgcggttgttttaacctctgcccatctgccaaaaaacccaccaaatactttctactacttttagccgttcagtttcgcccatttggccaatttgcacactttggatttgtcccataacaaaatccaaagcattcagccttcctccattatgggctcagatttcctcacagtccgagtgcaaggcaagtgacaaagagcagcagatgaggcgaccaaacggacttttcttcagagaatccgctcgtctgcacccaagacggtttccacgtgatgaacggacgagaagcgatcaatttgacaacagaagcaaacctcatttgcaagacgaactacggaaacgaagtggaggacaaatgtccacgaaaaccggaaagtgtgccatggaagggatgttgtga

SEQ ID NO: 71658 - DNA, 380 bp, Heterodera glycines
atggccaagcaaatgctaactacggacattcggaagaattctttgccgtctccggaatttgctgattcattagaaacaaaaatggccaaacgccctcttcaggagaacggcgagttcagcagggacgaggaggcagcccacgtggaggttgaagagaagaagccgagccaaaaggaagtggtggccaaacagtgagtgaccggccggcacccatacgatgcttactcactcactcatactgtatttaacattgaattcccaaatatttatttttcataaataacagtacaactccagttcatcctccccatcccgtaattcagaaagaaacaaacaaaaaaaacaaaacaaaaaatatggcccaaaaactgccaaaatag

SEQ ID NO: 71659 - DNA, 4162 bp, Heterodera glycines
  unsure (1)..(4162): unsure at all n locations
tctttgaggtcccttcgggtcgctttgtccgcgagggtcttttttgcgctggntttgnctcttcagcttcgcttgaccgtcctttggccgaaatggtccttctccactcgacttccgacttttgtctgctcggcgttcgcggagggggcaaatcgctggtggtcaacgaatttgccaaaaggttgggctatcccgtcgaaacgatcgtcctttaccaggtaatcgcttaaaaccgacaaacactcaactgatttttgcaggacatgagcagcagagagttgcttcagcgcaggaaaattcttccaaacggcgacacgcaatgggaggacaaccaattggtcagggcggccaaacgcggggcgttgtgtgtgttggacggagtcgacaggggtgggaaacccgagcatttattcttgaacttttatgcattgttgcctaatgattgttgccatttcagtccattggagcaccgccgagtcaatcgcttccctcgtccatcaccgctttttggcactgcctaatggcactcgcttagtcggcaattcacactttgaacttttgaagcatcgcagcggattgagcgaacaaatgcttaacgatcggtgggtacgttttaaagcgtggataataatctgttaatttctgaatggcttactttttcatttcctttctcattttcaatttcttttttcatagaaatgtcttccgaatcccggattccttccgaattgtcgccctcggcgactccgaatccgctccaaaatggctgaatgctcagcttctgtcccagttcctattctgctctctccctagtctctccatcgatgaccgattgcgcatcattcagcagcgtgttcctaatgcatcggttggccatgcgaagcgattgttgcgactaatcgatcggctgtccaattcgcacgacgcttcggtcgtgacttttatgggctatttatttaaatctcattcttgtgtttgttttcctcttcagattcggaccatcgcctcctccctttcgctgcgtcgtctcattcacatcctccgtcgccattccgctcaccccgaagagggcattttcgacgccgttcaacgcgccgctttgacccgtttcgttccgccaattgttcgacgcgcatttgacgcgacactcgccgaaattggcattgtgcccgacgggaagaagaagcacgccgaatttgagaaagaagaattggaaaagatgaggaagagggcggaagtgccggatggaatgtcatcggtcggagagagtgaaacaaaagttgggggccgaccggcggacgaagcaatgatcccatcaactctgttcttcgacaatccccaagtaggaagtgaaggttttcacaccacaataccccacgaatagcatctcattgttatggcgaacatggcacgcgatttccatctcggagcgcatcttttgctgatcgggaaccaaggggtgggcaagaacaaagtcactgaccgactgctcgaacttttggatcgaccgcgcaaatacatgcaattgcacaggtaagggagaaagcggtggtgggtaaaggccatttccaatggcatttctcctcagagacaccaccgtccaatcgttgacagtccaatcgaccgtcgttgacggagtgctcacttatgaggactcccccctggtgcaggccatctgcgacggacttgtgctggtcattgacgaagctgacaaagtgcccactcatttttgtcattttatcttttcactttgcgaaggcgcctctgcacgtcgtcgccattttaaagtcgctgttggacgaggagcctttttatctttcggatggccgaagggtttgccctggaaaacggaaaaagggagatgaaagcgaaaagggcgatggcaacgatatttgtacgtttgagcacaatggagtttgtccaatttgtttgttccgctagttgtccatcccgaattccgtgccattctcctcgccaatcggcccggctttcccttcctcggcaacgatctttacgctctgttgggtgaccttttggccgtacacgcattggacaacccctccaaagagtccgagttggccatgctttccaaatacggaccaggcgagtggacgacggcctttttgcttacctttcgacagatgttccacaggaagtgctcgaactgctcgtttccgtgtttggcgacttacgttctttggtcgaccagcaactgataagttacccctattccacgcgagaattggtcaacattgtcaaacacttgcaaaagtgagtttcaaattcattgtcctgaatctgttgtcccattactaattcactcattttgagatttcccgacgaccctttgcctgaagtgatcagaaatgtgtttgattttgacgcttattccgtggacactgcccaattgatcggtgaagtttttcagcgcaaaggcatttccattggttagaaaaagacagacaatgtaaagttgttttattaattattctctcaaaaaggtgtcggtctttcgtcgtccattggtccgtctgatgcttatgggaattggggtcgaattctcgggatgaaacgtgttcaaggagaagaagaagaacgcgtccaaattgaaagggacggctccgtttttgacttgtccaaaattgacgagcccaaattcggaaaggtttcttcttcaaatgcaatttaagaatttattattcaacagatcgatccgaataatgtgccacatgtcggcggaaacacttgggcgggtggcaccggtaatgtcttatgattttttggctccgattttttttttcaggggggtacaacacggccggacttggaggagtcggtggtccgtttcggtaattgcaattaatcattgacttaaattctgccaaagtttggatgccggccatgcggttcatcaattgccggatagtgccaaggagcaagtgccagaacacattcggaaaagggcgagggaaatcgccagagaggaatatgcgaagcgactaaaagtaggcaaatgaagcgcactcacaatcagcttttgattggcgtctaatgaatgggcctttaaaaggaaattgacatgggcgaatacgacgcggcggcatacgaagaattggccactcgcgtgggccgacaagtgcgggtgctgcgcagtgtgatcgactcgttagagcagcggaagcacgaaagacagtgggccaagcaccagacgagcggagacttggacgatgccaaactgatcgaagggatggccggcgaaagaaacatttaccggtgagggggggggaccgacccaaccctaacacaacgtaaaaggaagcgaattgagcaaccgcccgatccctcaaaccaacaacaaccgaaacgaattcgtctgtgcttcgacgtgtccggctccatgtacaggtcagtcgatgatgagccatgacttactggtgctgcactcacaaactgttcatttgaattctttgcttgttttttataaaattacctacctatatcttaattttactaaataattattgacagattcaatggctacgaccagcgtttacaacgttcgcttgaggcggcgttgttggtgatggaaggactcgacgggaaggaggacaaagtgaaagtgggcgagtgaccgcctcctcttttcttttgccctttttagtacgaaatttatggacattcgggcgaaagtgccagcattcccttcgttacgttggaccaacgacccgccaatgagaaggagcggctgaacgtgctgaaacggatgttggcccattcccaattttgcaccagcggtgattacaccgtcgaggccctttcgctggcggttcgcgagttggacacgggcggagggaatgacttcgatgaaaaatttgtcgtgctgctctccgacgcgaatttggaccgttacggaattcgaccgtcagaagtgagccgtgcgctgcaaatgggcgacagtgtcaacgctttcattgtgctcatcggatcgttgggagaacaggcgaaaaagtttgtcactagttgcaaaccgttcacaagcagaacaaatgtcttcatttttagtcttcaaaggcatcttcccgccgggaaaacttttattgcaatggacgctgctcaaatccctgagattatgcaacaaattttcgcatccactgttgtcaga

SEQ ID NO: 71660 - DNA, 81 bp, Heterodera glycines; identical to SEQ ID NO: 58971

SEQ ID NO: 71661 - DNA, 464 bp, Heterodera glycines
gtatggtcatttttcgggaatcaatcgcaaagttcagctgaagtatttgaagacgagtgccgaaaaggcgaacacggctggcaaaacgtcgtttgtgcttgagtccgacaaaaccttgctgcaaaatgcgcgcggtagagagagaagcgaccaatgccaaaatgcttcttctgtgcctactttgtttctcatcctcaaatggggcggagaggtgctcagggaaaagcaaagcaaaggcattgttaactttttaagcttacaacggccggcattctacaggcggaagcgttgggacgtctctttcgaacactttacccggggattcgccggacggacggcaaagactcaccggaggacacgcagggacttggctttttacggttgcatagcacgtacagacacgatttgaagatttatgcgtcagacgaaggacgagtgcaaatgacagccgcagcctttgctag

SEQ ID NO: 71662 - DNA, 1741 bp, Heterodera glycines
atgatggcttcacccggcactgatttggaagctaagtttcggcttcgtgtgttcgccttgctcagctcggcaccggccttacaccagctcatccaatccaagtcaaacacggccagctcagcacgcatagacttagccaggtaataatagattggtttcaacgcagttccttaattagccaatttatgaatcaattaaatttttcggtgaaaatttcaataaattttattttaaaacaaataaaatttaaaaaatcttctaattactcaatttatcacagattccttgccgcttattatctcggcattgacttggcccgcctttttgaacagctgaaccggtgccatcatgttgaagcagtagtgcctggaggagtggcaacatcaacagtgttgccaaatctgatggtgtgcgcagagttggatgatggggaggaaaattttgaggtaattttctttttttttaattttttttcatccttgaaaattctatgagatggtttgaataattttgatcaatgttgtagagtaactgtcatatctttttttaaacacatccaaaccaataatcttagaatcttttagcatagaaattttcattcaattttcagaaagttataaaaaaaatatccaaaaaattgccaccaacattttgaaactgaatgaaattatctgaagtttttcatgctaataaataaatcaacagctatcatattataccacaacattatttaatttggagaaaaattaagacgaatttctctcgaaaaatctataaatttggctatttttacgaaacgatctagaccgtataattacagtatgacccaacaaacaaatattcaaatttatttttgcttaatttatctaattagtgcgatgccgatcgtccttcatcttcctccgctgtttgggatcgctctcgacttggccaactattgccatccgaatgtagcccaaattttgcgctaaggctactgcttcgagaacaacgctgcttggaagccatatttttttccgatcactttcacgactcgcgcacatcgatggcactgcgatttctcgtcgatcggcacattccggggtgccatttatataattttgcttttaattggattttttttaattaaaaaaattactttataaaaaaatttgcattaaatcatgttaatttttgtaaacagtttaagccttttggcacaatattttcgtgtcacattaattgatcagttgttggatacaatcgaatttgatgaatttgacgggaacgaaaaacggactcatcaatttatcgaggtaatatattaatgaattaaattaaaattatatttaaataacttcatagaattattaatttgaatacaaatttaaaagatataaaaaatatttataaataatatacaaatataaatcagccaactacaacaaaattaaattcaaattatatttttaatagcttcaaagaattatttacgttgaatataattaaaaaaaataatttaacttatataataacaatatatttttttaataatataaaatgaatcaagaaaataatacaatgaatatttattatatttcttttaatttaactataaaaaacatgaaaaaatacgggaaattttttaaattttcactttttaggctgttatccaagcagatgttttattttcggaagaatttggcccctttggactgttaaatgagtgcataaaggcactttcctccagaatggttgcaca

SEQ ID NO: 71663 - DNA, 2196 bp, Heterodera glycines
atggacccggaccagatccgggtctcaagtgtcggcatgttaaaagttggcactcgtgtccattccacaaaattcagaccatttcccgaggagaccacgttgccaagtgtgttggacactgcggaggaggaggacaacaccatttacagcaacttgcgcgacgaagtggagcagtgcaagcaacatgacgttgtggtgaattactctcggcttaaccttggtaatagtggcacatcggcgaccggcgacggcacaaatgctgctgcttctactgctgctgctcaagatgaacaccaacggcacaaggaagaggaggatgggcaaaagatttacgacacaatttgtggtcaagcggtcgtgccacagaagggcagcaaaacattgccaattgtaaataaggcggggccaaatttggggccgggctggctggtgggagactgacccttccttcaaaaacaacaacctatttcggcttttaatgcgataatttaataaaatgaattaaatccgaatcgggctaattctgggtaattaatgggttaaattattactaatgagtttactacaaatgtgccgttttatttgaacattcgcgcagagttatgccgagttcaagccaacaacgaagcgggaattttgcctcaaggagcttcttgacaaggacatcaattacacgaatgccctgaggaggttcaaaaatatttttaaaaaacatcttttttttggctatttgacgagtgatttatatgaattttttggctctatgttatggagaaaggctgaaaaagctcaaaaaattatttctgcatcaaaattttgaatttatgaggtccatataaatccatattttgtgggttttcggggaacaactccgcttaatttgatatttttggggttttcgccattaaaatttccaaaaaaaaactgggggtctagcggtgccgttagacgtagggctcagccttttaccattttttttggatttctaatccatatttcgggtgttttaatccatgttttatgccctcttttgatatttattttttagtccatattaataaacactcgccctaattagacacataattcgtaatttccatcggctttaaaaaagcgatttaaacaaaaacaatttttcccattcagaattgaaaacattttctacgctcgaatgcattttcatttgaatgccgaagatttggcaacaattttcattaacattcgcgaaattttgcggctgagcatcagttttgtggccaaattggagccagccgttttgcatgcgcttaaccttgctgacagtcgccgaaatacggccaattttggcactggcgttgctgacatgccgcccctcagtgtggccgagctgttcataatgtgaacaattaatttttaaatcatttgctaaatttcaaatgccaatttgaattccaacaaatttcgattccttccaaattaaaaaaaaaaatttaatgcaaaacgtttatttaaaatacttaaattcgacatacatttattaattataaactagggttgagcccccgatcctgagccacgattgaaccaatgtttccaaattttgcattttcgtctcgcttatcgaaataataaaatttttaataaaaataattgttgatgttttaaattttaatagatataaggagcgcttcacaatttacggcttgtactgctcgcagctcaccaagtcgacgtgccgaatcaacgagttggaacggaatgaccccgagtttaagcggattgttacggtagctataatcaaaagtgatactgtaatatatttatttattatttttaagaatttggcaaaggatgaacaatttcgactccaaacgcttttaattctgccatttcaacatatcacaaaatatcagctgttgctcaatgtaagttttatgtcaaaaattttttttatttacttttatgactaaaggtgaataatttgaaaattttcaaaaaaagttaatttttgcttattttctcgaaaatgctaataaatataactttttaaaaaattcgaaatttataccaaaaataattcacaattggaaaattctcaattttttacttaattttactcgtaattaataaattttagctttatttttattttcttttaaattgggttttcataccataattagctattttttgagattttatcaaagatttattcaa

SEQ ID NO: 71664 - DNA, 136 bp, Heterodera glycines
cccccattttccattttcttcctattgagtggtgggaacacccaaacacacattcctcaccttttcttcatcatttgctcgtcgtttttgcattcacttttcacaaaaccttattcgcccaattcattatatgaat

SEQ ID NO: 71665 - DNA, 164 bp, Heterodera glycines
taaatttttaaaatttttttgaatttttaaaatttcccggttggtcccggtttttcttgcggtcccggtcccgaacaaaaatcgaggtcccggtcccggcttcacaggtcccggcaagtcccggtcccggttttggcaaaaattcccggtcccgtggcactcta

SEQ ID NO: 71666 - DNA, 862 bp, Heterodera glycines
  unsure (1)..(862): unsure at all n locations
atggccgtcgacatttttggcactgccgccacggcgaaactttccacggcggtcggcagtctgcccgaacttttggagaagaagcggctgatcgacttgcacacgaacgtggccaccgcactgctggacaacatcaaaacccgaaaattggacgtattatacgaaacggaggagaaacttttgacaggccaaggttcgtgcacttcattccgccaccgtcgttctccccactccccgaaaattaataaaaacaaattagaaattttccaaaaaaaaaatccctaggatttttttcatttttcagaaattccggtcattgaaacgttgcgcgactgtccggacaaagacgacattttgcggctgattttgatcgctttgtgttctcggaatatgccaactgtacattttcacgtttaattaaaatataaaaaaattttgcgcaaaattccccttgtcaggctgaacagcgcgaacttcaggctttcattgacgaacgtgcaattagctcggatgcgctgcattttgtgcggcaactcaggtgtacgaaattgggtgcttttaaatttgggattttgataattcaagccctaatttccccaagatttttcttattttaaaaatattaccgaatttgtcagcattttttttagtcccgaaaaacatgattttcgatagtgttgtacaaataacagtgcatttcttttagggctttttctcatttgggtgccgaggcggaacagcaccaaggggccggcaccaagacggtcagcatgttctccaaactgctcagccactcatcgcgcttcgtcatggagggcgtcnaaaatttggtgcccaaaagcataacttaccactgacgaag

SEQ ID NO: 71667 - DNA, 225 bp, Heterodera glycines
ccgggactcaaatgtcccgctcaggccaaaaattttttctatttccgggaaaaaatcgaaatttttccgaaaaaaataccagtcgatagagctcgaaaaactatgttttggaagtggtctccgtttctctgggaaaaatcgttaaaaaatcctaaaattcaaaaacccgaaaaccgttttttaggcctaactcgaaaaattttgaaaattttcgaaattttaaaa

SEQ ID NO: 71668 - DNA, 1747 bp, Heterodera glycines
  unsure (1)..(1747): unsure at all n locations
gcagaaaagcaggtggcttgtgacatggattntaatgggatctggaaaggccggacaatttttcggattttgatttgccaattaccatttttactaagtctaagaaaaacaataaacatttatgggacttgtttaaaaaccaagaaaatccttaaatatccacgaaaattatgattttttatgaaggatgatttacaaaattattgcaaaaatttttaaaccttttttttggcttatgtaaaaactttctatttttaaaataaaaaatccatccaaaattttttttaccgctttttcagttgtattcagcctccttcctcgtggtggcgggcaaaaatttcgtcaaatccatcccgacggatcaaagccacaccaaatcggacgcatttgagccaatttcgggtgccgcgattaccagcgttgatttccaccatgagacaaagtcgattttctttgtcgatgctgccggcatcaacaagggcatcaaccgttttgtgttgggcgattcggagagccaagtgatcgtgaagaacaattatggcgggtgagaaatttactaattatttaattaattttcaaattaatcaattaattatagtaaattatttaattgattggtgattattaaagttgaaattttaggtttttaaaaaatttatttttatagaaaattttatggtatttccccaaaatccctttttgaatctatttagtgttatggcttgatagaaaatttttaagaaaaaatttaataattttttcaaaaataatagaatttttttgaggaataaaaaatataaaattttttttaatatcataaaaaataaatattattttagagaactttaacattaaatttaataccactatatttaggtacatcatcaaaagcgttgcgattgattggataaacagtgagtaaaaattgattttaaagctttatttttgaacaaacaccgaccgattcatactgtatcaatacagtacgaatttggatgagtgggaaatggatttttatttttaccatatttatttggattgtattttaccgtatttattattcctatttcaaatacactttagacaacatttatttcatcaatgccgactcggaccgctccaacattgaagtgtgccaaatgaatggagaaaacagaaaaattttgctcagcacacgcaccgaaacgcccacatcaattgcagttgatccgataagtgcgcgcgcggaattaatcgatttaaaatatcattagcgtgaattaattaattattgattattgtttttttttgcatttagcccgcttcgtttactgggctgatcaaggccaaacgcccgctattcaagtgagttttgcgaaaattttagttgtttttttacaaagaatggaaatttaaaaaaaaatttaaataattttagcccaatccgttaaaaaagaatataaaaaaggaaaactttttcattcttgtttccgacacattttgggctttaagctttttgatatcataaaatttttttaatcatttcggttaaatgaaaaatgtatttaaaaaatattgatattcaaatggcttttaagcgagcttggttggatggaacgcataagcaggtggttgtccatgacgaactcaaagagcccaccgacctgatcattgaccctaacaggggtgaaattttgaagaaatgtctctctgatttcatcgaaattcaaaaaaaaacacaaatttttttcatttttatttgggcaaa

SEQ ID NO: 71669 - DNA, 70 bp, Heterodera glycines
atggatgaaatgaacaaagaaaaggaaaagaaatctgactttatttcgaaacttgtccgacttctcaaag

SEQ ID NO: 71670 - DNA, 649 bp, Heterodera glycines
catgattcttcacaaagtcagactagagtcaagctcaacagggtcttctttccccgctaaatttgccaagcccgttcccttggctgtggtttcgctagatagtagatagggacagtgggaatctcgttgatccattcgtgcgcgtcggtagttagccgacgaggcatttggctaccttaagagagtcatagttactcccgccgtttacccgcgcttaatcaagtttccttggcttaacattcagagcactgggcagaaatcagacacggtcaacgtccacaaggaccatccgtctcctctgttttaattagacagtcggattccccgagttcgtgccagttctaaactggtcgttcagcgccaaccgaagtgcataccctgacgagcatacacgcagctgaagcgctccacaagcagctctcaccactagtccacgcaccatccccaaaagaacagcacacagccacgggcaaaagccgcctgtttcacgcaacagcccggctgacccgacctttagagccaattcttttcccgaagttacgaatctaatttgccgacttcccttacctacattattctatcgactagaggctgttcaccttggagacctgctgcggatatcggtacgatcaggcaggagattcaaata

SEQ ID NO: 71671 - DNA, 561 bp, Heterodera glycines
atggccgaatttgcccaccgtgccggtgctccgttggagtgcctttgcatggctttgaaggtaaaaaacgaaaaacctaaataaataatgatatacttctaataaaaatgctaacaattatatctgctttattaatatatttgaaaggtccaaaagcgtcaggaaggaacggacgccgaaggcaatcggcgatggaagtaatttaatattattaaaaatggaaaaaattaattaaaatattaattccggaaaaaagaaagaaaaatgtccccgtgtcgttaaaatatgtttttttcggagtcgctggtcacaaatctggcttccatttggactagggtccggaccccgcccccgcccccggggacgggacaggttttttggcctcacccccgcccccgcgactcagacccccgcaacccccgcccccgcgaccttcgcccccgcgggggcatgggggtgaaaaacacacccctaagaatagcatattcgtggaattaaaggcaaaaatttatacaattttgaattttttaaccatcttttacaaaatttttatgaaataaa

SEQ ID NO: 71672 - DNA, 304 bp, Heterodera glycines; identical to SEQ ID NO: 51570

SEQ ID NO: 71673 - DNA, 266 bp, Heterodera glycines
ggagtctcgccgccaaatttaaaccgattggcgaactgtcggattaccagcaacaaatcaacggatcacaaggcaaaagctttacatacggatgctgtaccaaacatttgcttatttgtatttttgttttagaagtttcaaacattcgattcgccactcctccgccacaaccgccgccggtgcttcgcaatgttccgttgcctcccgtgacgtcgaataacaacgaaatgatggtggaccgcacttgtcgaaacaacacagcaaag

SEQ ID NO: 71674 - DNA, 350 bp, Heterodera glycines
atgccgaacatacttgaaatgctcaataatgacgctacggttttgctcaatccattcacggcactgtttcaatcggtcaaaaaggccagcctcccggttgttgtaacgcgagattacaacatttacgccgcatttgtttgtaattgttgcgcattctccgagttcacattcctcgtaaaaaaatctgccacgttcccatgcaggtccaacaataacttgatggagaaagctgtaaaaaatgaataccgtattaggccacctttatttttgaaatttgtggtaaaaaattcggcagttatatttttttaaatctgtagacattaaattttgctttattaatgacacattaa

SEQ ID NO: 71675 - DNA, 302 bp, Heterodera glycines
atgaaaattcattgcatttttttcattcttcttatcaacgaacttttcgttgttcctcttatttttggacaaccaattaaagaaaaaaggtatttttaatatttgcttaaattaaaaaaaaaacataaattttaaaataaatagtcagtatggattaacactgtcaaatcaagctgaaattttaatggaaatgtgcaaccttggaattcgctaggtttttttgagttgaccaaattttttttttccaaaaatttccgattttcagtgtattagaaggtgtcccgatcactctaaacgaatga

SEQ ID NO: 71676 - DNA, 983 bp, Heterodera glycines
atggccaggaatggcatggcacgtaaagccctcaacccacaagcgtacgaagccagcgcggtcaaacaaatgcaaagttacaaacagacaaagtcaatggaattgtttaaagagcgcgggatgaaattcacttgtgtggactcatctcaacaacagcaggaggagaacagaaacggacgggcgggagggacgaggtgagcaaggggaaggacgaaacaaagcatggagacaaataacgggatttaagtggcgggacattgtcatcaattggcactgtttcggcatgtccagtcgacatgatggacccaagtgaccgcgaagcaattcagttctatgtgagtggtgacttatttgtaaatcattcagtaggatgaattttatgctttaccaaggaaaataaatgtaaaatttgggacttttatttttgtgagttttccgaaaaaaataattcctttttaaatgtgtaattgaatttcaatttctattcgtttgattttgtttaatatatatgtgaaaaatcattggaattttctaggaaggcgagcggaacggaggccgagaaacgaaaggaagcttagcaaaaagtacggagggaggaggatttggggcttcttcgcttgagcgggccaaacgctttgggcttattccaccaaaatttgaccctcgcattccgccgccaccaattttccaaccaccgaaacgaaaagaaatcgaacagccgaaggaaaagagggcaattaagcaggagacagaagtggtggtggaggtatttctgacaatgagccgattctttttttgctcagaaataatcagttattttgctctgctttatttttcagtaattttcaacctttaagatttccgacgatatcccttcgttccaatgcgttaattctgtcactcccgaaacgacgacctcccaaatttcgaattctgattcaatgtatgctgaaaatgaggagaacaaaaaacgggtaaataaa

SEQ ID NO: 71677 - DNA, 487 bp, Heterodera glycines
atccaacattttaggcgaaaataaggacccagagttcacgattgaatggtcaacaccatgtgaaatgaatgaagaaatgaaggacaaggcgggatctctcctcatagaggtggcggacagaatgctgccacgcttccaagacgaacacaacaaaaaaatcctgcaagaggtaaaaatgtttaatagtttgaaatttgagaactttgttagattttttttccaattttggaaaattttaaggcaagcctggggcaatgggtgctatattttaaatgttgtttctaaaaattataaataatatacaaaaagtacataaataatttttctagctcgccactagcgtcaccgagaaaggatggttgatggaggagcagatttataagtgagacttaaaaactattaactctcaatctttcaaaaattatttttagatatctggatcgcctccattgagtaaaaggacacaaaatataaaaagtttcaatta

SEQ ID NO: 71678 - DNA, 696 bp, Heterodera glycines
gtggcggcactactctactgctgccagctgttgtgccgttgcctgtggcgtctacgctgggatccgaacgtgaacgcaattccgttgctgaccgcgctgggcgacttcctcggcaccacactgctcgccatcgcgttcctcgcccatgccgaactgttcccggagtatagcgtcaacggcaccaattgcactaacggcacaattagtcaacaagacacagttgaggatgccatgttgcaagtggttgagcaacaattgctgctgggcaatgccgacacaactctggcaacagaaactgctgaactgatgttgctgaaccgaacgctctgatcaatgaatgggtgactcatcgtgtcgcgatcatttttaaattattaattacggggggggcggcccggaggaatacgggttgtttcaaacgggcccaccattaattaacacattaagcgtgttttggtcaaaacttttttgattttaatcagagtcctcgcaaatgtcgcgcttaatttttaaggttttgtctttattttcaagagttgggcaatttttgaagatttatcaattctttttcgctttttcgatttttatccccaaaaaaaatcagtgattttccctcattttgcatgcctttaatgcacaaagcttctattgaatgtgagttcattctattttattaattgtgtatttaaattttaa

SEQ ID NO: 71679 - DNA, 2984 bp, Heterodera glycines
gacgcaaattctccaacttggcgcaatcagattgagggccaaatcaatttgtacgatgccattcgtggccaaatccactacgtgaacccggtcacgaagcaggagtacacgctgaagcaggacactgctggttggatacatagagaatttgttgggattttgtttggcggaattaaaacctttgaaaaaattttctttttagaattttttttatggtttaaatcttttaaaaattcttgcggttgattgacattttgccagaaagcctatcattctctaatttacattcttagaatatgaaagatcaaacaaaaaaattagagaccagatcaaatttgatcgttttaattcgataccgtactatgattaactatgtaattaatgtcaatttccatttgccagtgctcaaaatacgcccgcggggttggcatttgccggaaaagcatgtgctgatcaacgagaagcccatgtccgcttcgctgttcgactttgggctttatctgttccacaatgccaaggcgttgcaggagaagggcagcggcccctacttttatctgccgaaattggagaatgcgcaggaggccaaactgtgggccgatgtttttggccatgccgaaacactgctgggcctaccgcacgggacgatcaaatgcacggtgctaattgagcatctgttggccaccttccaaatggacgaaattgtgcatgcattgaagtgggaaaatgttataaattcaatttaaatgccatttttaatttttttttttttttttggcaatgcaatcgaaaacttttctaataaataattaaattttatataattaaagggattacattgttggcatcaactgcggccgatgggattacatcttctcatacatcaaagtcagctttccaaattttttttatgattggagagattaaactatagtgatcagtgatcactgatcagtttgtaattgttctgatgctcaaattagcattaattctctcaattagcccgtaatagtttatctgatcaatcaatcaattactgttgttttttaaaacttctcttatttgagaactgttggaagaaaagaagggttttatagagatcatattcggtccagaccccgtatacgggttttactggcccgtaatctgtacttttttggactgatgcgggtctttacgtgttaaagtttttgcgggttgtagcccgtaacccttacccttaccgtacaacccgaagagtctgatctgtagttgtttgggcttaaaacaatccaagcctactctgaccagtgcatatttcttctcacttcaattttctcatcattcctcaggtgttccgtaaccatcgcaaatttctgttgcccgaccgctttctgatcagtaagcccaaaaacaaagtgatcaagaattaattcggcacccaatttcagcgatgacttccgactttttgcgcgcctacacacttttgtccatcaaaattgcgcaccagcggaacattttcgcgatgggcggaatggcggcacaaataccgatcaaacacgacatggccgccaacgaaaccgcactgggcgctgtgcgcaaggacaaggagcgcgaggcatcggacggtgggtcggcaccatttgtaatgcgtcagggcttggcatacttactgtttatgatggattacggtatttactgttgtactggttaaagcaggcgcttctgatcactagttaaaatgggagcagctcgtccccccgtattgtttcccccccccccccccaaaaaaaatcaatagcaggaggatttggcataatgattatgagggattagagcgttagaatactgtaattccggtagcggttggcacatactaaaattatcacttatctctttgatgaaaatctgttacatattatttttatagcgaaattttaagtcaataaataattatcaatttgtggcatggtggccgataaatacgatcgaagaaatttagacaaatttgaaaaaaaaattgcgtcatttttcaaaaattgccttttcccatcttaattgaattgccaccgccccgttcccagtctgggtatgggcctgaatgtcatcggtttaggccacgacggcacttgggtggctcatccaggacttgttccgattgcgcgcgaagtgttcgaccaaatcatgcaaggcccgaaccagatcggcaagcaactgcagtcattcgagacggacaacaagcggctcacaatggcgccagaaggcgtgcgaacagaagccggcttccgcaggaacatttcgatcactttgggtaggaaaagcaggggaagaaaggcgaccggcacggcaccaaatcggtgttcgaacattttgatcaaagcctttctgagggttatgactcatgatcacagaccttgattttaccatgatcgaactctattccgtccatctttgattacttttttttaggctacatggacaattggcttcgcggcattggctgtgtgccgttgtacaatttgatggaggacgcggccaccgccgagatcagccgcacccaattgtggcaatgggcgcgccatgaagcgcgccttgagggtacggaatgattttttcattttcccgttattattttaattttttctgttttcagatggacgtacagttgatcctcagctggtcaaaatgacaatcgcttctgaaactgaggtagattttccatagtttcccgaaaaactctccattgctaattagtgtttatcaaaattgaaatttcatttttcattagcggcgcctcgtccgtgccggctctgtggtcaatcgcatcccggaggcctcggaactgctcgagaaattcgtgttggagcccgagttgagcgactttctcacattggatgcttacggtactcaatggaattttaaattttgaaatttcaaatttttagacaagctcgtctcggaaggcaagtgaacaacgaacgggggacggacacttctgtaaaatctaa

SEQ ID NO: 71680 - DNA, 603 bp, Heterodera glycines
atgcgtccacgctcaacgccttccgccgccgccggagggacagaagccgcggtcgatgccctacggcgagagaatgagcgacttaaaagagaaaactcccatttgaacaagtcgctggaaaagcaacgtgaagaagcggaacgaacggcgattcggctgagacggatggaaacgcaaagccgcgccaacgcagaagcgtgggaagagcgcaaaagaaacgaacgaaacgcggcacttttgcgaaaacgggtcgaagaaggtgcggagcgagagcgactgcttcaagagcgattggagaggcgggagagacacattgaacagctgagcagggaacagcagggccgacttggggacacagagcgagttcaggcgacgatggcacaatggcgagcgaaagtggcactattggagcaacgagagggtacattgagccaagagcgagtggtgttgggtgaacggtgcaacgaactgacgcggagactcgaagcaatgacacgcgagcacagaaatgccaaaaagcgattggccgaattgacaaaggcacaacgggaagagaaggcggaggagaagcttagggtggagggaaaagcaattggcggagaa

SEQ ID NO: 71681 - DNA, 1136 bp, Heterodera glycines
atggccgccggccaccacctgaccaccttcccgtcgctggacgggctgacggagcagtttggggaccatgtgcggggccacggcttcccgtgggccatatttttggacaaaaattacaccgccccgacaccaccacagccaacaacaacggaagaagaagaagaagcggatgctaatgatggtaccgttaatgaggccgttaatgatggtgatcatgaattattgacggattgggagcagcagcagaaacagaaacaacgacggaaaaatccccgataatttaaatttcatcataattgtttttgtttttttgttagaattatgtgcacatttgatttgtttgttgatcaaattattttgttggccaccaaatgtgaaagaaaataataatttgttttttttaaaatttttttccaatttttctggtacaaaaaaagcggcggcgctgctcttttcgtgtgcgttgtgccgtacaacttttcaaccgtacgtgccaatgccgaccattcattgggttgccccggggcacggacgctgccgctgcggcacctaagcaacgagcaaagagcggcggagagggcaacgatcgctggcggcggtggggcacaattgtcggcacgctcgacgacggcacattccccgaggtggggcagcagcgccgggggcgggttcacagcgccacacaacaaatgaatgcgtttggtccaacaaaaacggtggcggtggtaaacggccaattcggcgccgaccggatcggtgccgttgataacaggtaaatgtaattgatgccagatttgttaaaacttgaactgacaaggaaaaaaatgtaacttttcaaagttggcggcgccgaaacggtcggcgctgaaacgactcagtcccggggggaagggcgagaccagcagagagtagagaatagagagagagggacgagaccagagagtagagaacagagaatagagagaggggcgagagagtgtgtgtaactagggcggggccgtcggtcgttttctcggccgcttttcccgtcacatagtttttgcactttcccattttgcccccggggggcgttttcccccgtttttcactcaacgctgcggtcggggagcacagcatttctttgtcgtcctaataaa

SEQ ID NO: 71682 - DNA, 47 bp, Heterodera glycines
atgacgtacaatccgaaagaagctgatagagaaattgaaaaagcgat

SEQ ID NO: 71683 - DNA, 632 bp, Heterodera glycines
atggacaggataccgtacaatttccccacgccctcgtcccggtcccgtattcttaaactcgcaacatcgacatcggagtccagtaaaacagttcttttaatccttaattctatccgcttaatccccgacgatttttaattaagaaccccaacaaatcttgttgttgattttttgtcaattgtctcaattttttctcgtcctaaggtcggagacaattctaatttattttttttcaaaaataaaaaataggtcaaaaattggtatttcgtgaacaaattaacagaaatcctcaaaaaaagattaaaattagaaaaataattttttaaaataattttatttttaggaaatatattttttccacttcatcttcaaccaatgtttgacgcagcatatggtaatttcaataatattcatcgggaacgaagcaaaattttcccatgtctcagtggatttggatctgccgatggctcagcttttcggatcgaccggttttgcgctgccgacacatccgggtctcgacaagcagcatattgatcaaattgtgatcacgatttatcaattcttcaatgaaacaatgaattagggttgcgccaattggggggagagaaaatatttttgggaaaattgagaaa

SEQ ID NO: 71684 - DNA, 444 bp, Heterodera glycines
  unsure (1)..(444): unsure at all n locations
ggcgcatcgttcggggggactgccccgaaaacaaaaaaattgattttttcaagtgtccgtttggggtactcaaacaattatggggagcaaaaatccacngcagaattaaagtacaggctatagggaagctattcccgaaggattcggtctccccataaatctgggcgcatcgcttcggggggactgcnccgaaaacaaaaaaatcgattttttcaagtgtccgtttggggtactcaaataattatggggagcaaaaatccaacgcagaattaaagtacaggctatagggaagctattcccgaaggattcggtctccccataaatctgggcgcatcggttcggggggactgccccgaaaacaaaaaaatcgattttttcaagtgtccgtttggggtactcaaacaattatggggagcaaaaatccaacgcagaattaaagtacag

SEQ ID NO: 71685 - DNA, 80 bp, Heterodera glycines
gtcctgcccataatatctgtggcatggaataaattttggaactgcgctgcctaaacgcggtgcttaaagtgcgctaaaaa

SEQ ID NO: 71686 - DNA, 80 bp, Heterodera glycines; identical to SEQ ID NO: 71068

SEQ ID NO: 71687 - DNA, 585 bp, Heterodera glycines
atggaagagtttttctttggcgatgatgatttgaatttgcctccagggcaaccaaatcctcgtccacagccaaatacccctccgccacttaacagcgaccaacagaaggtctttgatgctgttttgttggcaatacagtcgaaccctagggattcgactgtcccccgccgtttcttcatatacggcgatggaggcacaggaaagacattcctgtttggccaaattattaggcgcttgcgaaaggccccatacacctacaaagtgcttgctacggcatccactgggtgtgcagccattttgctgccatatgggaaaacagcccattccacgtttcgtctgggtagagaagtgtcattagacaaactcccaagcattccgctggagagcttctttgcccgtcggattcgtgaggcccaactcatcatcattgatgagatcaccatgcttcacaacacggtgattgaggtcatcgaccgagtgtgcaaagagatggcaattcgccagcacaaggatctcctcttcggaggaaaaacggtcattttcagcggtgacttcaaacgagtcgctgccggtcgtgcctcatga

SEQ ID NO: 71688 - DNA, 351 bp, Heterodera glycines
atgacttgcgcatacgctaaactccttggtccgtgtttcaagacgggtcgaacagatgaccggcttttacaccgagaacgcacaagtgagagcctgagctggaccgaactggttgctggtacgtgtcgcacgcgaccgccaccgacccccagctcgagtcaacacggacccgaaaccattgcacaattcacccagagtaaacagcactcccccgatccgggtaccagaccccaaaaggctggcctcaagaccgagctcacgcagctactccgagcatctcagcgcactccgcctgcaaatgccccattcgccactgaacagaaggacagcaaaccccagtctggaggctag

SEQ ID NO: 71689 - DNA, 112 bp, Heterodera glycines
atgtgtgccaaggggccgggcgtggacccaaattacaacgcggaaacgtgcaggaaaagcgcatttgacaagctggacaaaatgacatttttcatcattggcgacatgggag

SEQ ID NO: 71690 - DNA, 1096 bp, Heterodera glycines
atgtcaaaaatatggcatatatttgcgcattttttacgaatatttgtttcggctctatgctggaggtatgtatttatttttaaatttattttcacgatttttcctaattttgatctgtaactggaattttggatttttttaaaattttgttgtaaaatagcttattttggaacgcgaaatttgttaaagaaccgcttaaaattttgattattgaaaattaaaaattgattaagaaaggctcaaaaaaattttaaataatttttagtctcggctttttgtgtctcgggttttcggtctcggtctcggggtcgagtctcggggtcaaacctcgggaaattttggtctcttcagtttctaagtctattaaacccaaatcttttcatactaattaccagattttaaattataatttttgttcagctaaaaagcaagaagaagcgaggcaattgccagcggtgaagccaatatttttaacagaaggctatttgattaattttattgtgcttgtccaaaggttcaatgatcattcgaaatattttcggcaaaatgatcccaatttttccattaattttgaacttcaaaatgaattggaaatgaattatgaaataattacggggaatgagaagaattggcagaatagattaatccaaaaagcaatggaagaatttaaaaaagcgaattatgaagcaaaaaaaagcgaaatttggcgtaaaaaattcaagcaaaaaacaatggaacaatttgaaaaggaatttaaaaaactatgggaaacggaaaaacttcggatggaatttgagaataaaatgaaaaaaatatatgaaaacgcacaggaaaatgttaaaatggaaaaaaatgtgagcaacaaaagtgaaacgcagagaagaaattatgaaaagaaatttgctgctttaatttcgtcgccattttacgaacatttaattgagccaattataattgattgagcccggattttattaatacaaacaaagtgaaaatagagacaaatcattttaaattagtcgaaagttcttttttctcatatcgtccgtctatgtatggaaatatgtcgatcacacatttatccgctgagaataaa

SEQ ID NO: 71691 - DNA, 1106 bp, Heterodera glycines
atgctttcttttataattattattattattcttcaattcttctttattccaatttcacatgcaaatccatcggtgagtttttacttgtcgaccaaatgttagggtatttaattaattggtctattttaattagatggacgacaatatgttaattgcttttatgaaatgtcatcaacaaacacaaattagtgaatattccacgcaaaaatatgaagcttaccttggcactgtgtattttatgagaaagaattggcaatgtgccaaaatagggaagagatttgaacaatatgaacggacagaatgccaaaaatatcgcaaatatttggggattttgtacgaatatttgtttagagaattcgccggtcacaacacagtgaagccaaaattcatgcttaaaagacaccaatttgaaatggaagaaccatcaattatttacgttttgcattcgttggccaaagttttgcgcttttatttaaatccatttaatagcaatcgttatcaatacaaattaaacaatttgttcagtaacaaacattttattaatgaatttgaaccaaaattgttgaacgcatttggtaatgataatgagcaggaagaaatgccaattaacgaagccattttaaagttggcaatttacacagcgaatggccaatcggatgaaattgtggaaaaaattattaaccgaataatttttgatcgaaatttaaagaaaatgtttaaaaaggcggaacaaaatgccaaagaaaacggtccatggagtgcaaatgaaataagtgaagacgcacataaaataatttggagatcaaaatttgatgactcattgaattgggtgagaagaaagcattcaatgatttgaaatttaatcatgtcaaatttagcaggatgacgtgttatttgtggaatttgtaaagggacaggcgacgaattttgacaaattcttcaagctcattcttgatgagggtgccaattatatgggctatctaatagagcttaaatgcacgaaaaatataattttagtttttttttccataaaattccagattttggattaagttttcattttaaagaattcaggaaaacagagaagaattgaagaattgaataaa

SEQ ID NO: 71692 - DNA, 237 bp, Heterodera glycines
atggctatctctttttttgataaattttatacacatacaaatgctctcgagcatgatagggagggcggtgcgcaatttaccttttatttttgagggaatttttaaatttatactctatcccagaaaaatggctatctctttttttgagaaattttatacctcacaaaagcgcttgcgtatgagacggagggctgtgcacaatcgccattttatttcacagaggatttttatatttag

SEQ ID NO: 71693 - DNA, 304 bp, Heterodera glycines; identical to SEQ ID NO: 56071

SEQ ID NO: 71694 - DNA, 304 bp, Heterodera glycines; identical to SEQ ID NO: 69803

SEQ ID NO: 71695 - DNA, 374 bp, Heterodera glycines; identical to SEQ ID NO: 62678

SEQ ID NO: 71696 - DNA, 755 bp, Heterodera glycines
atgttatgctcaaattttcttgcatttttatttttattattttattgccatttttcatgtgccatcaatccggatccaaagtttccagttcacacaattcaaagtaaaatatttaatttaatttgaaacatatttaaataaaacaaatttcaattggttccaatatggaatttccaactcataaaatccaaaaacacttaaagtaattttattatattttaaaacccatcaagcgtgggaagaaggctaccccccccccccccccctgaatttttgcgcgtgccttttttaaattttttttaggttgattatttttcaaaaatttccccattgttcattttaaaaaattttcgggaggagggtggctatagctagccataaatcatcagattccgccctggctacgcccctgggaccaaaaattttaagatttaattatataatttattaaaaataacttccaaagcaattaattaaaatgaaatttaattggtcgcaatatttccaatttactcaatctgcattaattagccaattcattaattcaaatagctcatttgtcagttgatgcaccccatcgtacagcaacatttggtggcccacccggcgtcagaccgttcatttcgggcagcattttcaccagcggcgttggcccggctgccgcaggtgcgatcagctcatcccataaccatcagccaaccgccgtctgttccgagaacgaatttcgctgtgacgatggtgaaatttagaataaa

SEQ ID NO: 71697 - DNA, 691 bp, Heterodera glycines
atggcgcagaagattcaagcatcaggattcgactccaaaatcaaaggcaacgccgaccaagaaacgcagttcgtccgggaatgctatgagcaatttggaataagcatcgacccatcaaaaatggctgtcaaaaaaaaggaaagcggtcgattgcaaagctgtgtctgaataatttatgtgggttttccttttcaagtgtcaataataatcggattaatttaaagggggcgtttctctttgcgcatctttggactttcgcagacgctgataactaacgacccggttgtcttaagggaacacttggacaaccgatcaatcgatgtgaccgcaattgacgagctcgatgaggagcacatcctcctcagctacgaaaataaaaaagagtgggttgaggagcacgactgctccaacataagtatggatcaataaattagcgcaaatatatatataatataaaaatttcagtgatatctctgtggatgacctcggctgcacggctcctactactaaaggcaatgcagaaagtggtgcgaacgcctgggtgcgggctgctatacactggtacaattattattagttcatcaacaaataaatagaaaattttcccagacacggattcgttgatctttctccacccgtaagacatctgcccgctcaaaactggcccacatttgggtcagttcacggatga

SEQ ID NO: 71698 - DNA, 131 bp, Heterodera glycines
agtacaggctatagcgaagctattccggaaggattcggtctccccataaatctgggcgcatcggttcggggggactgcctcgaaaccaaaaaaatcgatttttttcaagtgtccgtttggggtactcaaac

SEQ ID NO: 71699 - DNA, 199 bp, Heterodera glycines
agagaaaataaaaaagaaactcgtaatggctgctgggaaaaaggcagacggagaagttgccgcaaggcaaaaaaagcgaaaacgaaaaatgtccgacgaatcaaacggagacgatgaaagcgacgagaaggactcggcatccgaagcagaggaaggttggtgcgccgaacgagcagatattgggcattcatggagttga

SEQ ID NO: 71700 - DNA, 1311 bp, Heterodera glycines
  unsure (1)..(1311): unsure at all n locations
cctcaatgaacagccgccgtttgagtccaagtgccactgacagtgtggaacaggaaaaggacacggtntaaggtgggaaactgaggacggacgaggggaaggcgatcctggcattggaattgtaatctggcaaaggttaggttgccaatctcgcaagccaaccaccagggcccaacgacctcatcgtggtnggaaggccttgagcagctgatcaccgctcgcttttgctacggccccatggatttggtggttttgtctcatgaaaatgttttggtgtatgtgctgcccagcggcggtgaatggtttctgaagggcgtggagacgaccgacaaaaacgggaggctaagcattgacttgggacggagtttgcccatcggaattcacaatgttcgtctgattgtgcagggggatcgtaagtgctggcccttagcagttcattgccggtatctcctccctttttcagatacttatctcagtgtgaatatcgccgtcgttcctaccgggactcccgtggtcgtgttcagcatcgacgggtgagtaatttgccgatggttgtatcgtccgtacccatcctccaattgcctcccgtttggttgttttcagctctctgactgcctctgtttctgtgactggtcgtgacccacgtcttcgcccgggcgcagttgacgtggtccgtttttggcagcagcaggtgcagtcaaattcggagttgcttcccataggagtcgaaaacgcgattgcctttcagggctttttgatcatttatttgaccgcgcggcccgacatgcagcagcgattagtcagcgcatggctcgccactcacaacttcccccaagggctgctctttttcacgccttccctttcaacggagcctcttcggcagaagacgcaacacatcaaacacttgttggacatgggcatttgcatccatgctgcgtatcggcagtgccaaggacattccggttggtcgaccgtgttctgctcattggcagtgcttttgtttcccttttaggtctattcaaatgccggtttggagtcggaacgcattttcaaagtgggcggccatcgtcgacgcggttgtgtgtctttggacgacggttattgttaccatttgcatgaccttcattccggaaaaattgtcattccccggcgcgtcgagaatcccgtggggtcgccgtcggcacgggaccaatggcacaatccatcggaacagcagaaattcttcgctggcggacggcaccaatcgccgattcaacggactctttcttttgggccgaggatgggccgttacacaaccaaaaagatcagcca

SEQ ID NO: 71701 - DNA, 503 bp, Heterodera glycines
atgctttcccatgttttttatcggttcgtttatttttttttaattttatttttacaaaattcacattttagaaaattctttgaactcctaattgtgaatttgacagagtttcaacattatttgtgctaccataaaaatattgataattacaaaagatggcttccttatttaatgggaataaatgaatcatatttattggaagaagaattcccttacataatgcatatcggtaaatttgagttaatcacattaattacataattagatgaaattattacataatgtgcatatcggtaaagtttagttgagctaattacataaatcaaatggaaattattcgcaattaaaaaaaataatgtgactcagttggttaaagagcattccacgggtttggggagggccgtgtgtttgaatcccacctgctgctggcaaaaaatttttgttttctaattaattaatgtcattttggaaaaatcgcgctgaaatttaatggcaaaaataaa

SEQ ID NO: 71702 - DNA, 875 bp, Heterodera glycines
aaaaacaaagatgatctgttggaatgcccaaaagaaaatgtgccaatttctgtgctaagacaaaatgacgcccataaccaagatttgtcagctaaaggtaaaaaaaatagaaaaattttttcaaaattaaaaatatttcaccgactccccccaggcatttgtaaattgacatttttggattttctcaaaaaccgggccaaaaattttctagttttccaagacgcgcctaataatacagggccggtcctgcttcatctctaggaattagtaaaaagaattgaatttttttgtttaaagaaaatttaagtcattctccgatcggggtccccgatcccccgacctgattccccggcgctccccgagaatttattccacaatgggtcgggaaaatattaattacaatctctgtaaatgtatgcttttttggtccatggttttttatggttttttgatcacaaatctaatttttaatttaaaaagacaaaattctcgatttttaactcatttgaattaaataatttatgtgcttaatttaattcgactctttgcttagaatacaaaattcttgacgaaatgcaaaatgaattcaaaaagattttgtccaacgaatcgaagtcaaattacaaaaataactttgtaaaatcggaccgaaagaaatggctcgacgtaaaaatgctgttttggcatttcaatctttccattgaagacgcattcggaaaaatggatgaaattaatgtatataatttgtttaaaataattatataaaaacccttgtatttttttaccatgagcgtaagttatctaatccgtaattttcgaatttttaattttaaaacaaaaaacccatcgaattatagttaaaaaaccagaataaa

SEQ ID NO: 71703 - DNA, 99 bp, Heterodera glycines
  unsure (1)..(99): unsure at all n locations
atgaaacaaacacatttaaaaaatttaatccgttttgtcacggtatttttaattgcgattanattaattggcgctgacaatgcagaatcggacgaagaa

SEQ ID NO: 71704 - DNA, 337 bp, Heterodera glycines
atgaaagatgtctgcccgaacccatcaccagcatttgatggtgccaccaatgttccgttgttggccaaaacgcttaatccggccaccgccgacggcaccggcgcgtccagcacaatgggatgctcaatgtgccagtcgtaggtgcgcggagtgtacacgcggaaaatcggccaaacggtcaaccattcgccgttgtccgtgttgcattggtggtaaacgcgcaggtaaaattcgggcctatcaaaagtataaaatttttttattttttagtaaaaaattcacgtccagacctttgcctgggtttttgcgtaccgcttatttgttagttaaatattga

SEQ ID NO: 71705 - DNA, 733 bp, Heterodera glycines
atgcaccaaattggattggtattgtcattttcggcaacatttgtccttcttgcaactctttttccatcttgcgcagcaaacacagaatgtgtatgggcaacagggctggtcaagtgcaacaagaatcagaccaaagtgttgggggcggtggtggaactttgggacttggacagtccacaaaatgtataaattaatacaagtaattatgactaatggtctttgattatgttttaaacatgaaagattcataaatgttctataaatttacaatatattaaaaattatataaaatttgaatattaaaaaagaataaaaaaacttataacaaattttaaaaatgccaaatgaacaaaaaatcaaaatgaggcttattatttttaatttacgatcacaatttcagacggattttcaaaatccgctggactcagacgacaaggcgacattcacagaggtggacgacccgactggtttatggaagttggatggctgcgcatctgatcatgattggtttagcatcaatcggtatcaaaaatggtgtcatgacaactcgtacaattgcttcgatttggcctaggctttaggcttaggccgtaggcttatggtttttttaaaatacgagtttccttttacaacattatacgagttgccattgaccctcagaaattaatgaaaatttgtcaaagcttaaacattgggtgtcatttggatattaatcaaatttttgttgaataaa

SEQ ID NO: 71706 - DNA, 739 bp, Heterodera glycines
atgccaaaatatgtgcaaaatatgtgccaaaccccgaaaatgtgcgatatgtttttatgtgcgaaaacgccaaaatatgtgtttttatgtttttataagtcgctctaaatcaaaaattgttcggagaaaatgctatttttgggcttctctcgccataactaagccgcaaaaaaaatatgttaaaacataaaaatcccagccctaataataaacaaacagagaatattgaacaacaccaagaatgcttaatttgtattgataacggatgagaaaatttgttgttatggaaaaaactttttggaaaagtatggtaatttttaataaaaacaattggtaatttttttgcgcgatccgccacaactttttcggttccgcttctcaccccatggctctcttttctccttgaggaggaaatacttttttttgaaaatgccgccaaataaaacgcaacaccaaaaaaatataagtacaattttcatttttttatttaaattttatgtcaaatgattaaggaaaaatggaatatttcagctctttcgttgactcttcagcaatggaaatgcaaattttgagcaaacaaagagagaattatgaagattttttctatttcctggcaaaagttttgagcaaatttggtggaaaattgacaaaaaatgagaatagggaaacaatcgaaattggcatcgatgggggccacaaaatattggaaagtttgaaaaatatgccgataatatgttga

SEQ ID NO: 71707 - DNA, 790 bp, Heterodera glycines
atgagacaagagcactacaactgcaccactgaacaccacaaaaccagtgaaatgtttgttctttttatatactacctaaacaattttggtacgtcaatctcggcgcagatgcttattccgcagcagaaaatttttttgtaacacaactcaggggttgtctacgcacctacaaagtttcatttggaaatcccaacatctcctgaaaactctcctttgtcaggggaattgggtctgctccagcaattttctaatacataaaacggagtaagggttttacgggtttttagtccgtaagtccgttgtccgtatggatgcctagtccgtagtcctggtcctgatccgtattttctcaaaatcacgaactctaatttatattaatttcttgtaaaaaatatttttttaaatgaaaatgtactcataaaaatcttttccaaaaatgtgatgtcaaaaatcactttgtaaaatatttaatagtgattctaagcctattttggtcatttttatggcattttgtgcctatttcactttttacgaagaattttttttctaaaaataatcattaaaattttttatttacatgttttggtacatatttctgggtttttgtacatatttcttagatattttagcattttttatacatattttatttacatatttcgcgatttttcttacataaaaattccatccctacatatagtaaaagtaaaattgcaggtggaagaattttttgcggaacaatatttcaattttaatttgctttcattaaaaatcaaatttcaattaaaga

SEQ ID NO: 71708 - DNA, 331 bp, Heterodera glycines
gtttgcgtttcaaatatcgtaagattgtttgatagggccagacaagagaaggcaactgttggtaccaagtttgcggtaaaaaaatgagaaaaaagagatagccattttttggtcaagaattttttttgtttgcgtttcaaatatcgtaagattgtttgatagggccagacaagagaaggcaactgttggtaccaagtttgcggtaaaaaaatgagaaaaaagagatagccattttttggtcaagaattttttttgtttgcgtttcaaatatcgtaagattgtttgatagggccagacaagagaaggcaactgttggtaccaagtttgcagt

SEQ ID NO: 71709 - DNA, 228 bp, Heterodera glycines
aatttatcaaaaaaagagatagccatttttctgggataacctctaaatataaaaatcctctgtgaaataaaatggcgattgtgcacagccctccgtctcatacgcaagcgcttttgtgaggtataaaatttctcaaaaaaagagatagacatttttctgggatagagtataaatttaaaaattccctcaaaaataaaaggtctattgcgcaccgccctccctatcatg

SEQ ID NO: 71710 - DNA, 291 bp, Heterodera glycines
atggaaagatacgctttcaattttttacaatccaccgcagatttatcaatttctgcacaagaatatttatggtcaatttttggcattaaaacatcatcagccgcggtcaagaatctcgtgcaccatcagcctgaaatcgaaagtcaaattttcacattttgtggcactcaaattgcgatgaattcgttggctcgacgaattgccggactttcgggcgccgctgcagtggcaatggccggctttagcgcacacagaggtagaagagaaattcccgttttgcaaaagccataa

SEQ ID NO: 71711 - DNA, 519 bp, Heterodera glycines
atgatacgcaggttcacattggaatgtctcagcagattcgggaccgaagtggaagacgtggcaagtgaaaaaatacatttaaagagcctttaatcttgggaaattggcaagggtaaaagttgtttttgtgaccaggaaggaaatccaattcaaatcgaacacgataaaacagtatatgtattgttaagaaactggttttgggcaaccaacattcgtatttccgcaaattgagcgacaccaagcggaggcaattcgctaatttgtaccaaagggcgctggaggatttgatatctagcgattatgaactgcacggaatcctcataacaagagtcagattaaattagacaaatggattaaagaaatatgtttttttgttttaaattagttacaattcaaatcctatgggctggttataaaaagatgcgtttcagatagaagtgcccttgattttgaagcacattcaaatccattggcgctgcaccggcgacgtgcagcgcgacgaagtcagtttttgggaag

SEQ ID NO: 71712 - DNA, 932 bp, Heterodera glycines
ggagtgtttcttcgctttcgtgtcttcaaatattttttgttaaaaatgatgaacattcggtccaacggcaaaattcggtttgctgtcagttgctcgtcaaacatgaaccgcagcatggaggcacactttttcttgcagtgagaaaatttaaaagaagaaaaagcaaattttgaattcttggaaaactattcaaaattgggaagtgttttttgattggtttagcccctgaatttcggcataaaataatgaaaaaacgagttaattgtaagtcgaagaaataaaaaaatgggattttatttggcctagatctgttttctggacaaaaatacagggagtccaggtggccaaatattgcctggaataatatgtcgatggtaccaatctgtttttttaagccaaaaaagtatttattggttttgggtcgctgggatcgaaaagatcattcgcaatttgtttaagttttgggccgggattgaaaattggctattcaaaaaaaaaaaaaaaattcatacctaaacctggtttgagccaaggaaaatccaagcctgggtccagctcctccacaagtcctccttcctcaaaagtaaactatcgtcctaactttgttgattaaaaaaataaaaatgaattctgcgaacccagaaatgggaaaataccctaatttcggtatcaaaatcaaagtcctgctcttcaaaaaatttgcgacaaatttctatatttaatttataaattttattaaatttcaattttatgggcacattttctgtaccccccccccccctccccccattagaaaacgtggcttcaacgtgcaaagctttggctccggcaattacgtgaaattggccggcccaagtgtggacaagccgaaatttacgagttcgactcaccacaaagagcacattttgcagacctgaagcaaaagacagcaa

SEQ ID NO: 71713 - DNA, 407 bp, Heterodera glycines
atgtcatttatcctttttccgtcaacactatccttggcctattggttgtgctctggatttggctcttgggttcggatccccatgtatgttgccgaattaattgaattaaatcctctcatgggtttggacccctgcccctggtacataaaccttgggtggtctcgacattaaaaaacattggtaaaaaatgggtgttttttgggcggggggaggaatttggacgcccgtaaacgtggtcttatactactcttgaattataatgattaattaattttgttatttctcatttaatgaattattttaggcttgaattattttaattaactaactcggttcttttttttattactattttgtatctgaagacgaattaatgaattcgatttgatttttgacattcgaagtaa

SEQ ID NO: 71714 - DNA, 655 bp, Heterodera glycines
aaaaaaatcgatttattcaagtgtccgtttggggtactcaaacatttatggggagcaaaaatccaacgcagaattaaagtacagactatagggaagctaatcccgaaggattcggtctccccataaatctgggcgcatcggttcggggggactgccccgaaaacaaaaaaatcgatttttcaagtgtccgtttggggtactcaaacaattatggggagcaaaaatccaacgcagaattaaagtacaggctatagggaagctattccggaaggattcggtctccccataaatctgggcgcatcggttcggggggactgccccgaaaacaaaaaaatcgattttttcaagtgtccgtttggggtactcaaacaattatggggagcaaaaatccaacgcagaattaaagtacaggctatagggaagctattcccgaaggattcggtctccacataaatctgggcgcatcggttcggggggactgccccgaaaacaaaaaaatcgattttttcaagtgtccgtttggggtactcaaacatttatggggagcaaaactccaacgcagaattaaagtacagactatagggaagctattcccgaaggattcggtctccccataaatctgggcgcatcggttcagggggactgccccgaaatc

SEQ ID NO: 71715 - DNA, 463 bp, Heterodera glycines
gtttcaaatatcgtaagattgtttgatagggccagacaagagaaggcaactgttggtaccaagtttgcggtaaaaaaatgagaaaaaagagataaccatttttggtcaagaattttttttgtttgcgtttcaaatatcgtaagattgtttgatagggccagacaaaagaaggcaactgttggtaccaagtttgcggtaaaaaaatgagaaaaaagagataacaatttttggagaatttttttgtttgcgtttcaaatatcgtaagattgtttgatagggccagacaagagaaggcaactgttggtaccaagtttgcggtaaaaaaatgagaaaaaagagatagccattttttggtcaagaattttttttgtttgcgtttcaaatatcgtaagattgtttgatagggccagacaagagaaggcaactgttggtaccaagtttgcggtaaaaaaatgagacaaaa

SEQ ID NO: 71716 - DNA, 1098 bp, Heterodera glycines
cattgcgtttccgcaaaatgtcaaatttgaattttgaagacaatttgcaacgcgtacaagtggaaattcaagtaaggtgttaataaatgatcagcccaggtgataaagcttttagtccaaggggaaaattgtgaaaattcgtttgcaattttaacagatatccttcaaaatttgatttaatgttacttttggcggtttaaacttttaaagccacctgcttcccaactgatattggcttaattacctaattaggtgacttaattcagtggaagcaatgcctttataatccgatcgtcgctccgtttgccgacgtcggctcttacccaattttcactgacgaattcaaagggacgcgcaagtgcactttggatgtgtacgttcagggaaacttagagcatttggacgacaaagttgtgagttatggcagttctcatggcacttttcgtgccatcaattcatttgtctcgagaatcactcaattgagactcattgcttccatctcgtcccccacccaaaggttttcctcaccgttcatgacgttggcaagacgtatttgtcttgcgtggaccttgccaacagtccgacgctctctccgctggtcggtcagcgtgccgttttcctccacgtttctgtgccagggcaagcgcccggcgctgaaaattttgtcggagagtgcgtttaaaaattgaaaatgctaaaggcattatttgttatttgccgactactgcttttaagcttcccctcccatggaacaattgggggacggactttcacaagtgatggagcagttcaatctgagcaaatgcattgccgattggggagggcgcgggtgccgacatcgtttgtcgttttgcggtaacgcgtctcattcattagctcccgctttggtcactgattcgttccgttgctcgagatgagcttcccccaactcgtcgtcggtgccgttttggtccgttgcgtttcgacgacccacggaatcgttgccggcgtcaaagagcatgttagtgcccattcccatttctcgttaccgtcacgcgttaagttcaccgatttcgtgcggaatgatggtgaaatgactcacagcgcgtggaattggct

SEQ ID NO: 71717 - DNA, 884 bp, Heterodera glycines
atgacattttattatttgtttgcttgcttatacattattttgctcctcgctaattcatcgaccggtgggaataacaaaaaaggcaaacaaaatgctcaaagttacaatgaaaataatcaagcttcgaatacctataaagaatatttacctggatctgttctgaaaaatggtagaaacattaaagagctgaaggaacttttcgtgaaaaaaattaaaaaaattatgaaagaagcatcggaagaccgaggacaacgaaccacgaacaatgaatgcgctgttgatctgccagctgatttttgggatcaatttcaagaaattgcaaaactacctgaaattaaaggggttaaatttgatgggaatcgcatgataatagaagaaaagtgataaatgaacaatattttgaaacatgaaaagagatggatggaaaagatgcttttttagatttggttagtcataaaatttaacaattttttgctgttcttttatacttccgataaatttttgttgcgggaatcagtcagcgtgaaaatcttacagttttggatttattttaatgtactttctaatttaactcaacaaattggtttatttgcacaatcgttgaaacaaacattccatagtttccggaaggcggagtcgtacacttgcaaaaggtacaaaaaaaattttggggattgaagtagccaaggcccatatgactaaggctggcaagctaagcaactcctaaccaattgagtgatgatagggcaactgacgatacaactttaccaccaatcataacaattttcagcatttgcgcacagtcctaaccaccactaacttttgtgcctcctgccctaccgctcgtcggaaatctccactctaaattcaattttcttcaaaaa

SEQ ID NO: 71718 - DNA, 612 bp, Heterodera glycines
atgaacaatataggctccgatcgattcatggaaacaatgtttttcgatgaagattttcgggtagggtcgagaggaattccagtcagaatttgaaacgttgtaaaattgaaaaaattgggtttttattcctttgaaaatgttattctccaaaaattattccggcaatttcgctggggaattagaaccacaatttagtatgaagaaaagtcatggaaagtctttaacgcttaaatggaatgaaagtttgtcaaatttgcggagcgtgactcattaggaaaaaataataattaatgtttcagctggatcaccctgaattggggcgacaggtaattgttgagcagccagaatttgaccgggtgtttggtgttcttcagcacggacagcatcatgatgcgcaggaagcgctcgtagagatggccggaggccagcgagaagatgttaatccgatcgtacgattgaccggtgcccatcaatttgctaaaaatgggagtcgaaagtgatggctatttgtttaaaaaatggttttaaaagatggcgttcaacagggttgattttttgtgatttatccattagaaaatgcaaatatctttggattcccaggcgtaatgaaaa

SEQ ID NO: 71719 - DNA, 1058 bp, Heterodera glycines
ttttagccaaatttttaccattttaagacaaaattttgaaattgggatcctgtggtgtcgttggcaccatcggggtggtgggccaaattcgttaagtaaattgagtaaaatttaaaaataatactcaaatttttctgaaaaatttttatttttcattacgcctgggaatccaaagatatttgcattttctaatggataaatcacaaaaaatcaaccctgttgaacgccatcttttaaaaccattttttaaacaaatagccatcactttcgactcccatttttagcaaattgatgggcaccggtcaatcgtacgatcggattaacatcttctcgctggcctccggccatctctacgagcgcttcctgcgcatcatgatgctgtccgtgctgaagaacaccaaacacccggtcaaattctggctgctcaacaattacctgtcgccccaattcagggtgatccagctgaaacattaattattattttttcctaatgagtcacgctccgcaaatttgacaaactttcattccatttaagcgttaaagactttccatgacttttcttcatactaaattgtggttctaattccccagcgaaattgccggaataatttttggagaataacattttcaaaggaataaaaacccaattttttcaattttacaacgtttcaaattctgactggaattcctctcgaccctacccgaaaatcttcatcgaaaaacattgtttccatgaatcgatcggagcctatattgttcattttttaaatttttgttgatattttctaccctcatttttttgattgtttaggaatcccttcccgtgatggcttctcattacggctttgactatcagctgatcgaatacaaatggccgagttggctccaccaacagacggagaagcagcgcgtcatgtgggggtcagtgttacgctcacgacgatgggaggcttttactatgcggacccgctaatttgctattttccaagaatttaggacatttatccccctaattttaataaatttggcgttctctgcattttttaacgttttgaaaa

SEQ ID NO: 71720 - DNA, 226 bp, Heterodera glycines
atgaaagcagagaaaagcaaagtaaaaatgacaattagaagaaacattgtgaataggtatttgaataaatattagcaattaaataatatattttctaaattttagaaatattttattgagtgattattttataataaaacggaattaaatacaatttgaattgggtgaatgaattatttttacacgggaacaggacaaaatttcgtcgccggaaaaaaaaattaaa

SEQ ID NO: 71721 - DNA, 215 bp, Heterodera glycines
atttagaaacgggcgcgaagcgcccgtctgaggccgcgaagcggccttaatagcccaacaaatttagaaacgggcgcgaagcgcccgtctgaggcctcgaagctgccttaatagcccaacaaatttagaaacgggcgcgaagcgcccgtatgaggccaacaaaatttaaaaaacgggcgcaaagcgtccgatcgagggcgcgaagcggcctaaaa

SEQ ID NO: 71722 - DNA, 135 bp, Heterodera glycines
atggatcaacgagattcccactgtccttatgtgctatctagcaaatcctctgacaaaggaacgtgcttgacaaatttatcgggtaatgaagaacccgggggcgaaggcccaccacgaggccgcgaagagaaaaga

SEQ ID NO: 71723 - DNA, 273 bp, Heterodera glycines
cagcccggctgacccgacctttagagccaattcttttcccgaagttacgaatctaatttgccgacttcccttacctacattattctatcgactagaggctgttcaccttggagacctgctgcggatatcggtacgatcaggcaggagattcaaatagcttccctcgcattttcaagggccgtgtggagcgcacgagacaccacaggaaccgcggtgctttacgggcgcaacatccctatctcaggctgagccactcccaggcacgcacaccct

SEQ ID NO: 71724 - DNA, 1956 bp, Heterodera glycines
atgccaaaatattgtacctgggttaaaaaagataaaaagtggaaatatccaagacaaggttaccaaaataaaattggtagaatggtaccagtacgcccatctgaaacagagaaatattatttgcgttttcttttgctaaatgtttatggaaaaagttttaaagatttaaagaccgttaatggagttgaatatgattcattcggtaaggcatgtttggctagagggttggtgagagacgatgaggaatggcacaaatgtttagaagaagccacgtatttttctcgaaaacacgcgaaaggcttaagaactttatttgtaaatatattggtacattgtgcaccaaaatatcccgccagattatgggattcattcaaagagcttatggttgatgatattaaaagaaaaaatccttccttttcaataaaacagataaataatattggattaaaattaattgatcaatgcttaagatattatgacaaatcattgagagattttaaggatatgccacaaattattaacaagacaaaaattgttgatgaagatgagatttacgatcctgaaaatgaattagaattagcgaatagattaattatgatgatgaatgatgaacaaaaagcaataatagataaaatgcgtaatatcttagaagaaaaagacggacaaaaatgcatttttatagatggaccgggcggaaccgggaagtcattcactttaaaaactatttatcatttggttagatcttttaataaaaatatttgtaacatggcattctcaggaattgcggcaacaattttaaaaaagggtcggacattgcataatcgatttaaactccctttaaacattaaaaaaacgtctacttcaggcattgaaatcaatagttcagacgcagaagaaataaaaaacattgaagtatttatttgggacgaagctccgatggcatcacgttttattattgatattatcgatagaaaattaaaagaattaatgggtaatgaaaaaccatttggtggaaaaattttcatactaagcggagattttagacagtgtttaccaataaaagaatttagtacaagatctgaaactgttaatttattgattaaaaattctcatctttggaatttttttataactatgaatttgaccaaaaatatgcgggcaaatccaaatgagagggaattcgcaaggcaattaattgaagtcggcaatggaaccgctggagaaaatggttttataactgttcctgatcagtgtataagcaagggtgatttagctaatgaaatatttggagaaatcataaaagaaagtaattttaatgaattgtctaattacgcgattttatcaccgtataataccgtagtcgatcgatacaacgaagaaataatggaaaaattccctggtgaaacccatacttatcttagcattgacgaaactgatttgattagcgatttaactgttacacccgaaattcttaattcgcttaaatgccctagcatgcctaaccatattttaaatcttaaacaaaaatcgatggtaatgttgttaagaaatttaaatgtaagagaaggattatgcaatggtacaagattacaaattgttgatacaggtgaacatgttttaaactgtgttataagaagtggtgataaaataggagaaacaacccttataccacgtataacattaattgaaaacaaaaattttccgtttgtattaagaaggcatcaatttccagtaagaattgcttttgcttttacaattaataaaagtcaatcacaaacatttgaaaaaatagggatagattattgtgacgaaccatttacccatggacaaacttatgtggcactatcaagggccaagtcatggaacggcattaaaataaaactatctgaagataacaaagaaaataaaataaaaaatatcgtatggcacgaaacattactgtaaaaatttttacga

SEQ ID NO: 71725 - DNA, 280 bp, Heterodera glycines
gagtcgaaaagcgacttcgagggccatgaattcgattgggtaattatggcaatttgcatggacaacaaaaacgaggaggaggatgccaagaaaaaaatggaaaaggaggaaggagaagttgatgaagagtcggaggaccgcgaagatgaaattcaactggttggtgaggtgaaactgtccagtactgaggctgcaaaaaaatcgaaaaagaattgagaagggaaaaatcaatgatgatgatgatgatgatgaagagattgttgttgttgttgcaccataa

SEQ ID NO: 71726 - DNA, 519 bp, Heterodera glycines
atgaaacgaagatgggactttcgttcaatgagcttttttgaacagcccagcttgcccgaacagtcgtcatcatcacaacgacaaagccaacaatatgatgatgataatcaacagtatggcgaaggtgacacaacaacaacagcagcaagaacaggaggcagaaaggacaaacaacaaaaggcagaggatctgtttaagcaggtcacccactcagtgcatagacttgaacgcttctccgtctcccggcatataactgaatttgttttgaacgcaagtgttgaagaaccggaagaagtgatgcgcagcgcattccagatgctaatggcacgggcaatccaacattcagaacagcaaagtgggaggaaagttgtgaagattggcgttactctgcaaggcagaggtctattgattgggaagtgtcgccattgctatgctctaacccatccatttgaacaggcctacatgatcccatcgtcctacctcttcgaccaccagagcaaaacagcagcgacacactga

SEQ ID NO: 71727 - DNA, 579 bp, Heterodera glycines
atggacttaagaaattttggcggtgtgagtttcatggcccggcagaccaatgcaagggtatgctaatatattattttgaattttgaaaatcttttaaaatccaggacgcttgcacacggatttaaataacgttgtgcagaagttggtcggagttcattcgtgcgacatgaacgctgcgcatgtgtaatgtcagcgtcttgtaactggactcaagcgacgtgctgctgagacgtgcgaagcacctgcgaccattcgtgctcaagtgcttcaaaacacatgcacacctgtgctggcctcttttccgagcaaagatgccacaaaaaaggtgggttactatcaaaaacaattttgtaaataattttgttttctttttattcaggtcatcaaacgtttgcgccgtgatgaaaatgcaccgcgagtcgaacctctcaatttggagcagttggagattccgaatacctatcgtgtttataagcgcactgagattgacgaggagcaattcctgttggcggacactggcgtttttcaaattcacggacagaatggaccccaacggtaagatattaatcgtttaaacca

SEQ ID NO: 71728 - DNA, 372 bp, Heterodera glycines
tctccccataaatctgggcgcatcggttcagggggactgccccgaaaacccaaaaaaaattttttggataaaaattatttaaatgaactgactagataatatttaaaataggttatttctcttcctttcagtatccctgcaaagtttggtgcgcttctgatcagtttctgaaaaaaaagttaagcctaaactttttggcctgtttaaaaaggaattaaaaatttttaaaaattttattcatctccctttttgatagaaaaagcatcagagtgcctaaactaacatgtaaataaaatttggtgcgtttcagaaccctttctgaaaaaatatttaagaattaattttgcaaaaaataaataaaaacgaaagact

SEQ ID NO: 71729 - DNA, 439 bp, Heterodera glycines
aaaatggtgtaagtaaaaatcgtaattacgcttaaaaagcttctcaaacaattttagcgcttccaattccttctacaaacgcctttatacatcccattatgagcgctaaaattatcagagtgccgaaaatcgcatgtgatctaagcctagcaaaaaatggtgtaagtaaaaatcgtaattacgctcaaaaagcttctcaaacaattttagcgcatccaattccttctacaatcgcctttatacatcccattatgaacgctaaaattatcagagtgccgaaaatcgcatgtgatctaagcctagcaaaaaatggtgtaagtaaaaatcgtaattacgctcaaaaagcttttcaaacaattttagcgcttccaattccttctacaatcgcctttatacatcccattatgagcgctaaaattatcagagtgccgaaaatcgc

SEQ ID NO: 71730 - DNA, 66 bp, Heterodera glycines
atgaacgttatgaagactggagaagaacatgacatcaccaatttcaaacttgggaaaactcaaaag

SEQ ID NO: 71731 - DNA, 764 bp, Heterodera glycines
tatgttccgtggagacaaatcacattcacgggccggctgttcgacgttggtgaaggcagagcgaccacattgctattcttgctcaaatgcttaatttatatggctttggacattgtcatttgggttgcattgacatttctgagctacaaactgttggtttggactttcttcactccctttgaacgaggttgttaattctaattaattcttttttggattctttttgatttaggtttttattgcaatgatcaaagcatcagagagcccttagtccccaacactgtttcaacgtcccttcttatcgcaatcactttgggcgcaccgttcttcttcatttttcttgccgatttgatgcgtactacgaggcctcgcaggaggaatataactcgtgggtttggccacctgtttaaacattgcctttacttttagattttcattttaactgttgcataatttaaatccttttcattttgacggctgaataattcccttacttttcttttacttttgtagttaagatttatgctttctttcttattgtataatactaaatttcaaatacgctttagaggtcatcaaccgttccactctcgagtatttgaactactgcatcgctttctggctgatgactttggccatcgacgcttttaaatgcttgatcggtcgcattcggcccaactttttgtcaatgtgcaaaccacgggaatggagcgaagtgtgcactgtcacccctgatgcctatgtgaagctcgcccattgtaccc

SEQ ID NO: 71732 - DNA, 384 bp, Heterodera glycines
atgacattccaatctctgggactcaacccaccagcatttcaatctctgagactcaattctcaggctttccaatcactgggactcaattctccggcattccaaacaatgggactcaaatctccggcattccaaacactgggactcaacccaccagcatttcaatctctgggactcaattctccggcatttcaatctctgggactcaaatctccggcattccaaacactgggactcaacccaccaactttcaatgacattccaatctctgggactcaatccaccagcatttcaatctctgagactcaattctccggcattccaaacaatgggactcaaatctcccgcattccaaacactgggactcaacccaccaactttcaatga

SEQ ID NO: 71733 - DNA, 382 bp, Heterodera glycines
ccaaaccgatcttataagccacaacataaacaccggaaactcaaatccaattaaaagtgctccaaggccgattccctttggcgtaagagcaaaagttaccgaaatgatcaaggattacctggacaggggaattattcggcaatcatcttccccgtgggcatccccaatagttttggtcacgaaaaaggatggaagtgttagattttgtgtggattacaggaaattgaatgcggtaacagtgaaagattcttacccactcccaaacattgagcaaattcttatgtatttggggaaccgaaaatttttctcggttttggacttaatctcaggcttttggcaagtaaaagttaatgcggaggacgaacccaaaacggcatttact

SEQ ID NO: 71734 - DNA, 161 bp, Heterodera glycines
gccccgacgttccaccatggcacacgagtgctacggctttggcaatgtgcgagcaattaagcacgcacatcgggccagatgctggggcatttgtgctgcaccgcaagcggcgcataagtagaaagcccgacaccggggagcaagaatattgctatcttcct

SEQ ID NO: 71735 - DNA, 2932 bp, Heterodera glycines
  unsure (1)..(2932): unsure at all n locations
atggagctgatcaacancactctgacaanaatgtacaatgacccatcctccccagtgcgttttcaggtgttacagcactgtgaaagaagcgcggaaaaagattaaacatttacgaaaagaagaagtgcagagatatttggagggacatcgcacctatacattgatgcgccnccgcagggtgcggtttccaagagcaaaaactatagctgccggattcatgaccgatgtccaggtggatttggctgattttcaagccctttctcgtcataatggaggccaccggtatctgctcgtggcggttgatgtcctgtcaaaacgtttgtttgtcgtcccactgaaaaataagagggctgaagagatgttggaggcattcaaggagcttattgagcaaatgcccatgttcccccatcgaatattctccgacaaaggcactgaattcaaaaacaaactggtcaaagaattctttgaggagcacgagattgcgaagcacgagcccgtgcattcatcagtgaaagcctcagttgctgagcgagccatcagaaatgttaagcagcgactatacagatattttgcggaaaagcagactctcaactgggtggatactgtacagcaaattgttgatggaattaacagtgcaccgtctcgtgttcacgggatgcgaccaattgatgtcaattttcggaatgctcaaaaggtgtggaaacgaatgtatggacaacaattacttaaaatttcacaaaggcgagcaccacgtttccgtaaaaatgaatttgtgcgcatgagcagagagaaggggcagttcgagaaggggtacctgcccaattacggcgatgaaattcttgaggttgaccaagtgttgaaggcagtgcgtccaattcggtacaaacttcgtgatgatcgcggcgaaaagttcaggggcactttttatgagcaggagttggcacgcgtacgtaaggatgatgagacaagctaccgaatagagaaggtcttcaggaagagaagaaaacccgatgggtcagttgagatacttgtaaaattcataggctatcccgagagggaatggatcgatgaatctcagcttgtataaaagcattcagtttgttcattattttttacatttggataaatctttttctaatgacatcaaatagcttctttgtgtttttgccaagtaatgtatcagattaccccgacaatcaaccgaacaaatatagggtacgtcttccaaaacctctacattttagtgggtcgtgggtttgtgggctgcatagcatcagttatccctattcctggcactctacaattggtacattggatgaccaatggattgacattcatttcaccaatctccattccgttgatgatgaccgacagcgtgtcatcagagtacctgtcccacaggcgtcacacaaaaaagttgagcaactcagggattttttacaagcaacattgaagagtcaagaaaaagtcagacttaagccgcttgcgcatgaagaagggtacttcgataaaccggtagtgctcggctcgcctccacacgccaagcgccttaagagatcaacaattgatgatctctcttcactgccctctcccccgagatatgatgagacagatgagcaacaatcacagcagcagcagcctcagtctccccccagattcgatgagacagagaaagaggataaaaaagtcaaagaaacaacccctccttctgccgctaagcaaccgataccgccggctccaatacttgctcctccttcacatcctcctaccgaagcgccaaaggcagtcacagcaacgaaacaggcagctccaaaatctgccacagcaccgcccccaaagccaagtgtgacatctactattactgctgccaaaacaaccccgcctcccgctcccattccacccattaagcaagctccatcggccccgaagccttctccgtccaaaacagcggctgtgccgaagccaactccaacacccactccagcatctaaatcaactattccgactcctgcttcatcgaccaaggcgcagaatatccctaaaataccaccacctctggcagctaaaccaaaggagccaaatgtcgcaaagaagtccactgtaccaactaccgtatctacaacatctatttctagtttaacttctcagattgggcctacaccaacaacaccgaaaccaccgccgcctcctattaagcctattcctacttcaattccggcaccatcaccaccaccaccaccaccaccaccaccaccaccaccacagagtatagcaaaggacgctaaacgatcagtcgaagccccaaacgaaagcaataaggaatcaaagagattggatgtggatgataggttttttggcggtttagctgccggagacgagtttcccgacgacgatgacaaagagtccgaatggccatatgatcctttcaaaaacattgtcgatgatgtagaaatacaatatcttgatgactttgagcgattcaaggtggtgttcaaaaatccagtgatcagtcacttgtcattctcacctcagctaggctatgtgcttggatttgaaaacccccaacacgttgggcctcaagaaatctcaaaatacggctgcgacttacggggtggcttctcaagtttcgcagtctactcaaaaggactgaccgagaacatgattgttggtaattcgctgagttcgctgcttcgcgttgtgtcagtgagcggtgccacacccggtgactacaatgagaagatttatgattcgccaatatacgctcgagtgctgccacgggagatcagcgaaattgaaattgagttgcgcacgatggacaagggacgactggtgccattcgcctatggcacgaccatggtggtattaatatttaagaaagtgataaatttttaaaacccactcatttttgtattcattcactcattttacgcaa

SEQ ID NO: 71736 - DNA, 591 bp, Heterodera glycines
atggttctcgtcagcgaattttgtgctcaatttctctcctgcccgacaaagtcacttcgtgatcgactgaaccacccagaggaccgagtccgagttttgcagcaattgattgggaaaaaggtccagacaacatacaaggatcggaatggaatgtgcaagtgttttttcgttggtggaatgactgaacgaggcgcggcatttgaaccagcatatggacgtctgcgtaagccgttcaacattaacgtggcagcgcatttttacgctcgccaccgtgtcaaattgcactacccctatgtgccatgcatcattgaaggctttacccgtggtgaggaccgttattatccgatggaactgcttgaaattgtcgacgacaaaaagggagggcgattatttggtcgattgttcactgaaattgaggagcaggaggaggaggacaccaaaagtgattgttcacactcttcaaacacttcctatttacaatttaacggtaaaggattcaaatggtatgaaagcactgacgaaattgccaacactgggcgtggtgagtgcagccaaccatcgtcatcatcaccatcacacacgtattggtga

SEQ ID NO: 71737 - DNA, 1858 bp, Heterodera glycines
atgcttctgaccaatggaaaatcagccggcgaagtgcgagaccggctcgcgaagcggctggactttctgcgcaatcaaattggccgcgtggatgtgtactgggaatgtgaaattaaccaaatgttggcagcagaccctgagatgcgacaaatgtttggcagctatgtggacgacggcccacttgagatccgagcgtccttcatgggtgggcgaacggggccacgcaaacttttccacaaggcgaaggagggcgagaagatatcgtactttgacttcacgtcactgtacccctttgtcaagtttgttgccatatttgtgcaaatttttgcattaatttgacatttaagttttgagacccgctacccaaccggccatccaaaagtccatgttctcaaccaacaagtggactggcgttgcgctaccgacaatccgtacgatctgtcacttctcaaagtgtgggtggtgcccccgcggcgctgcgatgtgccagttcttcctgttaaagtgggcgatcggctgtgtttccctctctgcatcaagtgtgctgttgactacccaaacggaggcgttgacaacgagtacagctgcacccacaatgatcagcagagaggatgggtttcgacatgtacatcattggagttgaacgcagcactcgacgaagggtaccacgtcaccaaattgttccgggtgttgcagtacgagagcagtgatgatcaactcttcaaatcgtacatccgtgaattcatggcacaaaaaatacaagcaaccggctttgacgcaaacatcaaaggcaatgccgacttggaggatcaattcgtccgggaatgttacgaaaaatacggcatcaccatcgacaaggcaaaaatgcagccgaacaaagggaaacgatccatcgcgaaattgtgcctcaacaacttatgtgagtgacataatggaatttgatcattgataaaattttaagggggacgattctctttgaggaactttggattgtcccaaactttgatcaccggcgatcctgcggttttcgcggaatacctggacaatcgctcactggatgtgacggcaatcgatcaacttgacgacgaacacatgctgatcagctatgaaaagaaaaaggagtgggtggaggaacatgcctgttcgaatatcggtaaaaattcatcaatttgcttttaaaataaaattaagttttttagtaatttcgctgtggacaacatctgccgcccgactccttctgttgagggcaatgcaaaaagttgtgcgaacacaaggctgcgtgctgctctacacagatactgacagcctcatttttgcccatccgattgggctgtgtccgcttcaaactggccctcacctcgggcagttcaccgacgaatacccaaaacatgagattttggaattctgttcgggaggtgccaaacaagtaaattttcatttttaaaatttagatttttaattgtttaattttagtatggactcaagctgcgcagaaaagacgcaccagccgacgcagacaacgaatatgtgctgaaagtgcgcggtatgacgcttagctatgacgtcatccagaaccaaggacttcgctacgagacgttcaaggacaaagtgctacggtttgctgagacgggtgagccacaaccaatcaatgtgatgtatccaaatttcctacgaccaagcatcaaagatgggcgagtcatctcctgtccactacaaaaaatttataaaccatttgtcggcaaaggtattgtcggagccgactttcaaattttcgactttggtcacactctgtaatttttttgcactttcattttgtattttattttattgtgcgcataattaatgaatggaaaataaa

SEQ ID NO: 71738 - DNA, 1567 bp, Heterodera glycines
  unsure (1)..(1567): unsure at all n locations
ccccagaagaaaatgtgcctcctctaccgccgcgctcacccgcgccgaacgaaaacgagccacctcgaccgccgcgctcacccgcgccgaacgaaaacgagccacctcgaccgccgcactcacccccgccgaaagaaaacgagccgcctcgaccgccgcgctcacccccggaagaaaacgagccgcctcgaccgccgagctcacccccggaagaaaacgagccgcctcgaccgccgcgctcacccccggaagaaaacgagccgcctcgaccgccgcgctcacccccggaagaaaacgagccgcctcgaccgccgcgctcacccccggaagaaaacgagccgcctcgaccgccgcgctcacccctagaagaaaacgagccgtctcgaccgccgcgctcacccccgccggaagaaaacgagttgccacggccacctccagaaccaccacgatctcccccagtaccgcctcgaccacctccagctgaaccgaatgagcctgttcgttcaccatcagaaccaccgaaatcttcgcctcttaaggaaagacatttgttataaaatattgctgcagctcacttatcggctttatcggctgaaaaactgccgaaacttctgccggtgccgcctcctctgcccccgaaggatgataccccagttacacctctgacaccacgcccaaacgaagacattcaaataaaggatgatttctttggctctaaatattaataatcttgatagtcagagctgtgctcgaattctaaaaaaaggtcatcgcaggtcaaaaagagattgtgatgtcaaaaataaggattttttaaaaactcgaaaaagtctcaacttgcattttaatggtcaaaagaaagtgttaacaatgacgctttccataatattttaaataaacatataattttgagctttttgtacgaaaccacctacctatgtatttacgatttagtccaaatgtgcaaaagttatggcttcttaaacctccttggaatattaagaatcacacaaaaaaaaaatcggaaagtgtaaatgaaaaaaattacgcttttttccgaaaaaaaattcttggcgctataatttcttacagagcatatttaattcaaaaaaaataataataatctgtgactggcatttgaaacggcatggtacgggttgaatgttccacctacattgaccttttgattctctttctcttatcatcagtagggatgccaatcatatggataattttaataaattggcataatgtttgacaatcatttacacgagggcacctcgtttcccccccgccgtttcccccccgccgattccccccccgccgtttcccccccgccgtttcccccccgaatcgtttcccccccgagaaaatttttaaaaaaaaaaattgctaacttagaaatttttcaagaaaaaaatcttagaaagtttttttacaagaaaattctaagaaaaaaaattttttgagaaatttttaacgatttttttgaattttttttgaaaaatcttagtaattcacaatgaaaatttctcaaaaantttttttttcatagaatntttcttgt

SEQ ID NO: 71739 - DNA, 950 bp, Heterodera glycines
  unsure (1)..(950): unsure at all n locations
catatgctcaaagaagaattggtagtggccttaaagcataattgntaaattcttattttctgttcagatccttatggaacagatgaaggttttggttttggatgaggcggatcaactgctggaggatgagagcgctcgtgatttgcgccaaattgctaagattgacggatggcccaaggtaaaatagtgcatgacggaggttgtattgttttatttttacacttaaaacccgtgctttttcggtggaagaccgccagactttgctcttcagtgcgacttttcccgatgaggttcaaaaatgggctgacgaatgggtgaagccaacggcgctctttgtctccaacaagaaacctgtctcagcgaatgtgaaggttgtccaaaagtttatccgtgtcagtcgatcttcaaaaaaccatgagttgcttaaggttggtattattgtaagcaatccttcaaaaatgcaactatttcgttaagttattcgagcaagagcgtgctgaactgaaggcggaaaaacgtgtgttccctccccttaatttctattcgatgttccatcatttagcagatgagcccgagccaaaaatccggcctactatggtgtttgtgaagatgaaacgcactgctgatgtcatctccacatatttgaacctcaacaaagtgccgtcaaccaccatcaatgggttgattggttcttttaggctctttcttaatcaaagtgtttcagagaccggccgcaaaaacttcgacatgcggccttggatgattttcgggctggccgttaccaagtggtcgtcacgactgatgtctgtgctcgtgggatcgatctcaaggaattggaccatgtttgtctgggatgggttggaattataaacgaaacaccaaaatgcttataggtgatcaacatggacttacccatcgactacacaacttatgtccatcggatcgggtaa

SEQ ID NO: 71740 - DNA, 376 bp, Heterodera glycines
  unsure (1)..(376): unsure at all n locations
atgcacgcgttttgcgctcgagctatttatcatcgggcttgtcaatctaaagcgaaacaacaaagatggtgttttgaacgaataaagggcataggttattttgaagaagtgtcaaagaacatgcagcaataagcctgcaaaatctaataagtggaaaatacctgagtatagaatttattttcagaaagtgtcaacagacttttggaaaaatatatttgcaatttatcaacaattttgagaagtgagttagaaatgataaacttcacgattcaanaccagttttcggtgctctaattaaccgcgataaaaacatccgaatcaattaaatagcttctgagataataaggtttatcataaaatttcatttaaaaataaa

SEQ ID NO: 71741 - DNA, 567 bp, Heterodera glycines
atgcaacaaattattacatattggttttatgaaatagtatttccttttatataagaagcaattaagtgatgtatttttttatagttaagtataattaaggaattgatggacccgagcagaggattttatgacaaagacggggacaaagtgacattggccatcgatgttattgtgaaggaagaaaatgcggataaattggattattcaaatccaaacaaaacaaacgggaaaattgtgatggaaattggcaaattggcggaattttcgcgagagatttgtttgagtgaacggagcagcgaaatcaaacaaataaagggactttcgtggaagatattggcactgttaatcaatcagaataataaaagcagtgaaaagtgtttggcattttaccttttgtgtgccggctcaaaaaatggcacaaaatgggaatttatcccattaaatcaaattggcaattaaggtgaaaattggagttgcaaatgttcggccacaattcaaattgtctcacaaaagggcggggcggagaatttaattgggcaattcaatggccgtattttcaacaataaa

SEQ ID NO: 71742 - DNA, 610 bp, Heterodera glycines
atggacatggaagaaagcagtgaactcgaagtggcagccgtcgattatgtgttccaaacaacacttgatcaactgccgatcactgccgaagaggttgctccacggacgcaagaagatgacgaattgcagcaagtgcttcatcagtgtcgcacacattggcccaaaaccgcacattcgtcaactttggccgcatatttcactcaccgcaacagactcagcgaaatcaaaggctgcttgctcatgggcgaccgagtcgtgatcccagccaaactacgacagcgcatcctcaccacactacatttcacccatcctggaattgtccgaatgaaaaatttggccaaacaatttgtgtactggcccaaaattgatctcgacgttgatgggtgggttagaaattgtgaagagtgtgccttagcatccaaagcgccacccaaagtgccgcttcaaccttggcctgcatccactcaagtctatgaaaggcttcacatggatttcgctggtccatgtgcagatggtaacaaatatctggtagtggtggattcattcagcaaatggccggaaatcattaaaatgaagtcaacaaccgcacaccttttgatcgataaaataa

SEQ ID NO: 71743 - DNA, 188 bp, Heterodera glycines
aattcgaactttttttgctctgatttttttgtgcatagataaaaatttttgaaaatttgcaggctaatagcatttttcgaatgctttcgaataataccaagaatgtttaatttggttgagaaagaaaaaagttatggtcgaaaaattcgttcgacgacgtttcggctgacgacgttttgtcctactcc

SEQ ID NO: 71744 - DNA, 175 bp, Heterodera glycines
ttataaagtgattcgcgcaatcccaacgaatgacagccaagtgttggcattgcgtcatttcgcaaatttgatggagtcgtcaaacagtcgcaaaggcactgtccaattctggcaacatgcgtacacgttgcattcaaatgcggacatttttgccgattctgacagtgccaaaaag

SEQ ID NO: 71745 - DNA, 2637 bp, Heterodera glycines
  unsure (1)..(2637): unsure at all n locations
agcaacaagatcggagggatttccgacgcgaaatntaccaagtgtccatctacgggtcgactatgttgcgctacaaactgtacacatttgcgaacaacgaagacagtacagcggcgtactcatgggtacgggtttaaatgaacagaaacactaaaccaccccaaactgagttgccatttgtgcttatttgaataagattttaggcctaaatcccacaaatttcctcggcggcgcctttctttttagttaattgttagctcaaaatggtttattttcggactaaaatatatatagctgtatccaaaaaactcaaaatattgtaatataaaaacatcttgtttacaccttttaacaagttttcgttaaaattggcacatccaaaggacagttgcgtaataattttttggttcaaggatcgcttttgcgccgactctctccaattggttgagcacatttcatccctcaaagaacgggaaagtcggtgcatcaacgagactaataaattacaaatttgttttagcttcgattgcccttccctcggcttctcccctcctcggcgtcgttttgtgcggaattgcagcagcggcggttgtctattttctcatcgccaaacgcactgccgccacattgacttgacactgtttggtgttgggagaggcgagaaaagaaaaaccaacgaacgcattcccaaactcatcattttgaatggtttataaatgttaaattaaatctcccacaaaaacctctcattttaattttattatgccttttctttattattatttcattaatgttgtatttttattccatttataagttgaagcacatttttcattttttcaaataaaattgacaaataatcaaatgaaaatgtaaaatgatgatagggaatacttaattccttcttctgttattcatgagttttattcgtaaataatcacgggtattatttttgttttttgcattcctttggttttgtctcacaacggatagactcttttgtacacaatttgagtgtgcaaaagcatgtgataggtggcacaccggggcgacttgccacagttcgggtggacggtggccatgtgcagacgcgcctccaaatgggtggcatttagcaaaatccactcacggatcatctaaaaagcaattcatttccatttggcacttttttcgcaaacttaattaatgagactgaattggcaattccccgcttttctaaaattcggattttgttaaataataaaaaaaattttaaaatttcagcaaaaattattcaattttatggccgattcaacttcaatttcggcttcttctcgtgccgattatctaaagcggtacatgacagatgagaagaaaaagaaaaagggcgcaaaggaacaaaaaagcggaaaaagtgccgggtaaaaagcaaaaaatttggtttaaaattacgaaaagtgtttttagaatgcgactgctcgacgacgaggacactttcattcggacgccgcatgccaagccgagcaaaatcgacgaagaacgaattgaggaggatgaggacgatgagctaatgggacgacatcgaccgcaatttgatggcattgaaacggaagggcaaagaaatggctgggcccaatttcaaaacggactcattcgtcaccgtcgaaggaggtggggaagtgcattttactggagtatttatgattcaattacttattcattaactgaattttagccctttcggacgacgacatcaaaaaagagccgctttcccccgcccatttggaagcggacgaagaaaggggcaaaagtcggtcaaaagaaaagaaacgacggacaaaagacacaacagaggcaaagcacgaaattaaggaggaggaaacggttggtcatttgaacaatggaaaaccgggggacagatgtaaaatttagtaaaaaaaaaacgaaaattcccaggggaagagagcagtgacagaaagacaaaacccccaattaattgtcatatttccgcttttccaaattttgtcatcgattctttttaatagtaaaacccggttttgcaattgcaaaacatttcccaaataaattcaccaattataaaccttaaatgttttttggcatttattcctttcttaattgatagctttttaaatttgtctttatcaaagtgaataattcctttgttttgaccagaacgaaatgccaacaatcgccaaaaagcgacggatggacaacggaggacgcgcggggcttttgagcaaagaggcgatggagcgggaggaacgcgagctgcgcgagagggacctccaagtgagcaaaacatgggaaggaaatgggcgacggttcgttccattttaaaatttaaattgcacaaaattccacctgattagtgaggaaaactggcccggcactttttacgtccgtatttacaaatgatttgaccattttaagcgcctcaatgagttggaagcgtccaccgcggagagtggtcgcgacgcggaaacgcgcaagcgcgagacggggtttgagcgaaggcggcgcggggagaagcgcgagacggcggaggacgcggcacgcaaagagcgcgaggcggccaaacagaaggaaatggaggccaaatattctctgtggaaccgaggggtggcacaggcggaggaa

SEQ ID NO: 71746 - DNA, 304 bp, Heterodera glycines; identical to SEQ ID NO: 51570

SEQ ID NO: 71747 - DNA, 234 bp, Heterodera glycines
gtataaaatttatcaaaaaaagagatagccatttttctgggataacctctaaatataaaaatcctctgtgaaataaaatggcgattgtgcacagccctccgtctcatacgcaagcgcttttgtgaggtataaaatttctcaaaaaaagagatagccatttttctgggatagagtataaatttaaaaattccctcaaaaataaaaggtctattgcgcaccgccctccctatcatg

SEQ ID NO: 71748 - DNA, 116 bp, Heterodera glycines
tgccggtttttatagcaattaatgacccgtcgataaccgccgatcaaattgacgcgttggtcgccgacattgccaatggactgttcgccgtctgtgtgacgcttggtgttgtgccg

SEQ ID NO: 71749 - DNA, 440 bp, Heterodera glycines
caaccatttttgaccactgatttcggctgtggtaccatggcgagcaatgaggggaaggtggaggcgggcaattggttgtccatttggaaattgtgcaatttcacgtgaagcgtctgctgatgagtggtctgacgatattgacaccagaaaccggtggccattttgagcgactcttcgtcacttttcttctgttttcctgcagaaatggcctaaattttgatattgaattaaatatgtactagtgaatgaatcaatgaccatgtaaaggacttcaatgcttttcaagttgttgaccagggagatgcccagcccgtgcaagtgcagctccaattcgatgtccggctgttccatctgtgaaattttaatgattgaaaaaccgatggaatgtgaaaacaagataaatggttctgcccctctgtccactcacttcatacgcttgg

SEQ ID NO: 71750 - DNA, 81 bp, Heterodera glycines; identical to SEQ ID NO: 58971

SEQ ID NO: 71751 - DNA, 838 bp, Heterodera glycines
gggggactgccccgaaaaccaaaaaaatcgattttttcaagtgtccgtttggggtactcaaaacaattatggggagcaaaaatccaacgcagaattaaagtacaggctatagggaagctattcccgaaggattcggtctccccataaatctgggcgcatcggttcggggggactgccccgaaaacaaaaaaatcgattttttcaagtgtccgtttggggtactcaaacaattatggggagcaaaaatccaacgcagaattaaagtacaggctatagggaagctattcccgaaggattcggtctccccataaatctgggcgcatcggttcggggggactgccccgaaaacaaaaataaatcgattttttcaagtgtccgtttggggtactcaaacaattatggggagcaaaaatccaacgcagaattaaagtacaggctatagtgaagctattccggaaggattcggtctccccataaatctgggcgcatcggttcggggggactgccccgaaaacccaaaaaaaaattttttggataaaaattatttaaatgaactgactagataatatttaaaataggtttttctcttcctttcagtatccctgcaaagtttggtgcgcttctgatcagtttctgaaaaaaaagttaagcctaaactttttggcctgtttaaaaaggaattaaaaatttttaaaaattttattcatctccctttttgatagaaaaagcatcagagtgcctaaactaacatgtaaataaaatttggtgcgtttcagaaccctttctgaaaaaatatttaagaattaattttgcaaaaaataaataaaaacgaaagact

SEQ ID NO: 71752 - DNA, 707 bp, Heterodera glycines
atgcttatgattcatccaatgactgaaccatcggttgacggttaatgaatgctttaatttttttattattaaaaaattaaaaataaatctgacacaatttaaaaaataaaattcatttttaatattgaaatctttttcatatggatgggataaaaaaactcagagtcgtccgaaaattttgaaaaaactagaccatgaccatatttagagttggatccgggtcaggatttcggattaaagttaccctgacccaaatacattttttttcataaacctatgtttaaaaagcatatgaaaatttattatatagttgctcaaaatttaagcccaaatccacttaaacataaatattaaaattcctttttaaatactaccgtcttcttcgacaccaaatcttttggaattttcgaattaccaattttgttggctttaaatgtaaatcattttaaaattaacattaaaaatcattgctaaaaagcattaatttttatttatttgtaggcaaaagtcaacaaaaaagtacggcttcagcaccagcggaatttcagcgtgccaaatgtttagctgaaagtgaagtgattaaggaaaagccgagcattcgaactcggctcattgtttgtgtggtatgtggtgcgatcattgcgttctgtttgatcaaacttttcatatggaaatgattattttgttcaaaaaatgaagaaaaaaaa

SEQ ID NO: 71753 - DNA, 49 bp, Heterodera glycines; identical to SEQ ID NO: 60106

SEQ ID NO: 71754 - DNA, 848 bp, Heterodera glycines
acaacttcggtttcatattaaaattgtcggaattcactttgacacatttcgacatttataaattgcttgaaacaattttgaatgaatcaccatcatcaaacaaaaaagacacaaaaagtgccaaaaacaaaaacaaaactgcttccgcgccatcgccaccgaaaatttacacatttttgatggacaattttatcgcttcatcacattataaaaaacatttggaaacgagcaaaaaaattgacaaatttgtgaaatgtgcttttgtcaattttggccaacttttgcttttgcgcgggaaattcaatttcccggaattcaaaaaatttgctgatgaaagagaaaaggaatgtggcaaattgccatttaaagatgacattgacatcgataatacacctttatcagggtaggaaatctgtaaataccaccggacctcaaacttttttaaaaattcatcgaaatttgccgcgtttaaataaaagctatacaaaattgaaaaatttcattattttcaccaccaccacaaatgcaatacttaacaattttcagatgcaaacaatttgcgttgcaattgtttaatgatgaacctttgtggaattatgctagagcaattaaaattgagcaaaatgaatgcaaaagtaaaatgaactgattgcctaattaattattaattaatgcctaactttttaatccttttaggcgtgttacaatttgctgatgccttatgtacaattgttgaaatggtcaaaaatgatcagaaacattcaaacacaaacattagaaaagtgaatgagtacaaatttttgaaacaaatcttggaaagaattggtgacacagaaaattatgaacaa

SEQ ID NO: 71755 - DNA, 398 bp, Heterodera glycines
atgcattggcgcttcgactttttcgccctcggattcaatgccatcgtttttttcctctttctgttcgccttaaattcggagggccctgagaagtggtcgtgggaaaatgtgttgttggtaattattcacaatatttaatggtcggaatgtgaacatttttagctcggcgcatttgcctcgcaaattcctcttcaaatttgggcaatttctgtgttgaaggcgtgctatgtaagcaagagattttttagaaatcccaaaaaattttcaggatttttatgtgcttctttacgtgttcgtctcattatgcgagaaatgaactccattttattatttaattttcattttttgttgccatctccttttttcatcaaattcacttttttagagcgaaaaataaa

SEQ ID NO: 71756 - DNA, 193 bp, Heterodera glycines
ggtaaatattgatcataggccccaaactcaaaaatgcttaaaaacggtcagaatcgatgtaaaaaggtttgaaatgggttggaaaaatagaattaggggcgcgcttgcccttttccaggatgaaaagtgccgaaaatggagtgcctaactcagctgggactcaagtgaccgcactataaaaagcacccaaaag

SEQ ID NO: 71757 - DNA, 49 bp, Heterodera glycines; identical to SEQ ID NO: 51181

SEQ ID NO: 71758 - DNA, 385 bp, Heterodera glycines
atgtccgacaattcccaaattgctatccagcttcaacgaatggcttttttgctggacgaaaaggaagccggattggaaacaatccaaaaacttttggtcgccaaaaacgaatttttggaaaaaaacgcagctgatatattggagcgacagaagattcagcatgcgatcgaatcccagcaaaatgcgcgtgctcagctgctgatcgaaataacgaacaatcttttgaccgctgcgagcgatttccaatttcatttggatttgcatattattggggaaaaccccctatcagaaagtccttaacctcaattttctgttcccggtgcccaatcgctaacaatcattatttttagagacaccggtgatacgtatagttatttgtcactta

SEQ ID NO: 71759 - DNA, 420 bp, Heterodera glycines
atgaaccgacggtaatgcattttaaaaatcaaaattcatttgccctaaatattttccccaatttcagttgggtttgtattgacgtttggatggacattttcccactttttgaccatgctcaactcggcctcaaaaggtcactgatttcgttgtgattattagagaccgcattttgaggcatatgtcttttttttctgcgcactagttcccgtatattaagcataaataacacattttccacttggtttgagacttctatgttgacttttattatgcctttttttgcctttttcgggattttcgtgccttaaatgccttttttggcattttgccgttttggtgccttttttgacgttttttttccgattttagtgccctttttggcgttttttccgaaaattccattaaaaatagaataaa

SEQ ID NO: 71760 - DNA, 941 bp, Heterodera glycines
atgccgtcccttttctccctcattttcttcctcatgctctttgtcagcagcccttctcggcaccgattagtcactgctgtcagcagcaactcatcgtcgtcgcccattggcaccagcaccgacgcttttggcattccttcgccgaccagcccaatctctactgctttaacatcctacacgaatggcactgccacttttggcatccccccaccgccgatcagtccgatcattaatgcttcatcctctctcccaccgattgatccgttggaagcatcggttcagttaaaaatcggcttcctctttgccaacggcacccaacggttgcgaacgcttttcggctttggccaatccgcgcccgccgtcactttggcacttgaacgggcgaggcaagagcacctcatcgacagcatcaacttcacgtgggcaattagaatggatttcgaagctcataattaaggcccggatttttagaggcgaaaaattccaatttaggagcctaaataagggcgaaagaatcgcgaaatttttgaaagaaattttcaaaaatgccaaagcgaaaacagggccgaatgctaaaatagaggccaaacttttattttgggagcgaaaattcaaaaataagaatttttaaggtcgaataaccaaacttgggattccctagtgacggataggggcgttaaacgaagaaatttcgcgttaaaatgtgtttttcgtgcatttctcaccgaaacaaagccgcagaaaaaataagtaaaaacttaagaatccggggccctcctcataatcttaaatcaccttaaatgattattggccgtaaatgccaattttcagttacacgtggcgaatgtgcgactgctttcagccttgggctgtcggctacgctactcaactgattctgacggaaaatgtggacgctttgatcggtccgccttgtgttacca

SEQ ID NO: 71761 - DNA, 49 bp, Heterodera glycines; identical to SEQ ID NO: 51181

SEQ ID NO: 71762 - DNA, 404 bp, Heterodera glycines
atgcacaggcatgccttaaaacagctaagaaaattaaaagatttggtaattttttttcattttttttttaattttaaattttttttttacagaaatttccaacttcacaacccttttaccgtgcccttgttgattgtcataatcaaatatttgccttctacaaaactgttgggcccggcgaatcgggctgtctgtcctacagtctttgcgttttgccacgaataccaaaagcattgtgtacagtaaccaaaagcaaatttgatactgtggttgcaaatggcgcagtctttcatgtcagaacgaagtcggaatttgttgaagagcgctgcacagaaaacggaggcggaatataatcaaaatcacattaaaacattaaaaaagcattttcaattttttcaaataaa

SEQ ID NO: 71763 - DNA, 631 bp, Heterodera glycines
acaaaacggcgattcttgtgcccttcggtcaagaccaaagaacagatgatcttcgagatagatttccgaatttcggcgacaattggcgaaaaaattatgtttggtaaaaaacatgacggttcaaccgatgatcttcgcaaggcaacgagggtaagaaaaaatgtttttcaatggatcaaggggatatttgattttgttttttttcattcgaaaacacacgaatcctgttcaccgtctgaataattattttttagatgatattagacatggtaaacagcggaatgttttacgacgaattgggcctgcgcgaatttactgtaaaaatgttacttctctatgtcttaaaacaattcctttttgaggttgccccaccaggaccggcactgaaaaacaaattggacaaatttgtggaccggaaattgaatgaatgtgtggcacgagtggagaaattagtgaataacaaaaaggttaaattgagtataataaaacattaaattgtgaatggtgcaaatgatttcaggacgaagtgaaagacctggccgagcatttggaggcaagcgacggttggcacttgaacgaggaacagatccatcaattcttcaaaagcagaaacgcaaatgcgtccccatga

SEQ ID NO: 71764 - DNA, 423 bp, Heterodera glycines; identical to SEQ ID NO: 65209

SEQ ID NO: 71765 - DNA, 857 bp, Heterodera glycines
gtggtgcatggccgttcttagttcgtggagcgatttgtctggtttattccgataacgagcgagactctagcctactaaatagttggctcattgcttctgtgggcacaacttcttagagggattttcggtgttcagccgcacgaaattgagcaataacaggtctgtgatgcccttagatgtccggggctgcacgcgcgctacactggcaaaatcagcgtgcttgtccttccccgaaaggggttggtaaaccggtgaaaatttgccgtgattgggatcggacaattgcaattattgtccgagaacgaagaattccttgtaggggcgagtcatcaactcgctctgaatacatccctgccctttgtacacaccgcccgtggctgcccgggactgacccatttcgagaaattcagggacggatagagtaccggcttcggacggtatgcatactgtaacctatttaatcgcagtggtttgaaccgagcagaagacgaaaccaagtaactgtaagtgaacctgctgctgtatcattaccctagtgattcctattcaccacctacctgctgacctgttgcgctagcgatggcaccaccaaatgcccccgaccgctgatgagcacaggtcgtacgagatgacttgtggacgctgcccaacattacgggatagctgcctcacaagacatggttttggggtgcttccatacgttggagctgtggtataccgctcagtgctgcacatgtgaaagcctgtgtatggctgctgcgtggcaatgtgtcggtggcgggccgcctcgcttggctggttcgctgcgccaatgtgggatgcacgctcgtggggcgacctaacggctgtgctggcgt

SEQ ID NO: 71766 - DNA, 170 bp, Heterodera glycines
tgaagtcagagttgcttgactctgaacccaggcgttgaatgttatgagctacaggtgggccatttttggtaagcagaactggcgatgtgggatgaaccaaacgagcagttaaggtgccaaagtgcccgctcattagaccccataagaggtgttggatgatatagacagca

SEQ ID NO: 71767 - DNA, 49 bp, Heterodera glycines
attgaaagccatccattgcataccggttctcggcacagcaaagcactaa

SEQ ID NO: 71768 - DNA, 501 bp, Heterodera glycines
atggtaagacgacgcattcatcgtgagcaggatcttgctgaaaatgagttggatatgtcctgcaaggcaatttgtagccgagatcgattttggcacggtgccaaggatgaacaacaaggggagcaggatgagaaggagcatgacaattgcccaatggcacaaatacgaacagtgtacaaggcgggatatggccgaaacgagcggcgccgaaacgagggtgtcccttaaaaagaggacctttttgaaaattttttcactttttttgtctaattttttttgtttaaaaagtcctgaagccaagtacccgggagttttagaggtcgctgatcacgaatatgacaattatttgggcctattaatcaaatttggcgctagttataaagtctcagaatttgaacaaaagggggacccttttgttttgcaaaaattttttgagataaaaaatcgtgaatatactttttattcaccataattgtgcttaatgctcatcattatatgtaa

SEQ ID NO: 71769 - DNA, 547 bp, Heterodera glycines
atacaaatttggacatcccattgcatttggtggacaattcgtttgaggacaatttggcgcttggccatggtcaccaatacatggaacgattcggttaccatgacggcaatgaacgcgacgaatttttgacaaaacgtccgaaacgacaggcggtgataataataaaaacaactaattattccttttattatttttaaataatcatttataaacattttcacataataatttcttgtaaagcaaatttgattataatttcgcttcataccaaccatggacggtcccaggatttcggcttggggggggcggagtaggacaaaacgtcgtcggacgaatttttggaccataacttttttcttacttaaccaaattagacaatcttggtaatatttgaaagcttttgaaaaatgctattagcctgcaaatttccaaaattttttatccatacacaaaaaaatcagagagaaaaaaaagttcgaaatactaggtttttgagttccttctggccataacttttttgctaacgaaaatttttgaaattttgcaa

SEQ ID NO: 71770 - DNA, 596 bp, Heterodera glycines
atgggcatttggtcatccatttggccacaaattattttgccaggaattttcgcattggtctccgttttgttcaatttttcgttaattttggtcacttttacgaaaatgtgagatttaaattttaaatttaattcatttttgatttttaagaaaggatcacaaggtgtgcaattggctgttggccttcgattcgttttgccaattgtttttcgtcgctcctttccttgtcaattttttggcccagattttacagtacaccacagttgattaccgtatttgtactggtagtcttatggcatcaactgtggcatcgtatgcctcttttttggcactttttttgatctctgccgaacgtttattaattgttttgttcccaatcaagtaaatattttttaaacaaatttaattatcttgtatatatttttttagaatgaattggatcaaagaacaaacaattcgacgattttctttgttttttctttattttctatcctttttggcgttatgatgatggtctacatattgtatgaattgactattatcactgtgccctttgaaaggcatacaattttttattttaaattttacagtaataa

SEQ ID NO: 71771 - DNA, 477 bp, Heterodera glycines
cctacggccgaggcgaaaatggagaattccataaaccggcatacatcgctggacggtaccgcttattctacgtcaactcgaaaaacacgaaggtcaagtctgccgcgtggtatgcgaaccgtggagtccattacaagatcgaggactgcccggacaaaccggaggacgaagacggttacgtgccaccacccgaacaagaacaacccggagtcatcgctggccaaccgcctgtgactcttgcaaatgcattgcatgatgtttgtgaatttttaagccttccattagagtaaacaatttaggatttgcatggacctgctgatcgtgaggctatcatcggccttcagccgaccgatgaaattgcgtcagcattcgacgcttttgcagaaaaagctgaagacttcgtggacctattgcgtacacgaatcatggaattggagcagcagacgcgaactctgcagcgcaatctgcgacaaaaag

SEQ ID NO: 71772 - DNA, 1223 bp, Heterodera glycines
atgatcaaatcgatggtacaaatggcgaaaatacggcgaaaacggcggaaaaattccatgacattttgatcgatgtaactgaaaatgtgataattataaatcaaatccaaaaatcaatttttacaggatttgaatgcgtcagaatccgatgagtttgttgggcaacggatttcgagggattggcaatggatttccatcgaccaaaatatgctcaacaacatcacagaaattgaagaaagcctggccaaagaaaaggagctcggacggaatttgaagagacaaaacgaaaacattttgatgaaccgacaaaagcatttaaatccttcataatttcgcctccgtccgttcaccgctttttgtccccgtttagcaagactgtcccaagggccatctgaccaaagagcagttcatcaaattgtacaaggtcagtgccgtgccgatttaatcggtcgaggactgactttagccttactcatgccccgcttcttttcaggactttttcccctccggctccgcggaaggcttctgcgaacacgtgttccggaccttcgacacggacaacagcgggttcatcgacttcaaggagttcttgcttgccatcaacgtcacttcctccggcacacccgagcagaaactcgaatgggcattccgggttttgaattttgaattcaaaacgatgccattgcctttgtcccgttcagatgtacgacatcgacgggaatgggacgatagacgagaaggagttgatcaaaatcatcgaagtacacacaaatgggggcttgacatttccaacattttgccgtttttaggcaatttacgaaatgttgggccccgaagtgaccaaatcggcggacgattcgccaagaaaacgggcgaaaatgattttcgagaaaatggacgtaaataatgactagggctgccaaaaatatgcacgaaaagtggccaaaatatgcgcataaatatgcaaataacattttttaaatcaaaaattttgtaatgaaaaaaaaatttggggaaacaatttttgaaaaaattttccaattcttagtggtgtatttttaaaaacatttttggtcgattcttaggggtgtattttttaggacctatttttaggggtgtattttccgtttgtattgcatttttgttaacaaattttccaaaaaatggcaaaatatacataaaaattcataaaaacccaaaatatgcaaaaatatgcaaataaa

SEQ ID NO: 71773 - DNA, 94 bp, Heterodera glycines
atggttcaaattcaggtccagaaatattccaagcaggacaaattgttggaaatgcttaaaactgatgccatttggaggccacgcccaaacggag

SEQ ID NO: 71774 - DNA, 282 bp, Heterodera glycines
atggtaagacgacgcattcatcgtgagcaggatcctgctgaaaatgagttggatatgtcctgcaaggcaattcgaagccgaaaccgattttggcacggtgccaaggatgaccaacaaggggagcaggatgagaaggagcatgccaattacccaatggcacaaattcgaacagtgtacaaggcaagaaatggggaaatttggtctcacatttccatgcctattctttgccttttgggacagactattctctcttttgtttcggattatgagggaaattcttga

SEQ ID NO: 71775 - DNA, 59 bp, Heterodera glycines; identical to SEQ ID NO: 52421

SEQ ID NO: 71776 - DNA, 59 bp, Heterodera glycines; identical to SEQ ID NO: 52421

SEQ ID NO: 71777 - DNA, 59 bp, Heterodera glycines; identical to SEQ ID NO: 52421

SEQ ID NO: 71778 - DNA, 59 bp, Heterodera glycines; identical to SEQ ID NO: 52421

SEQ ID NO: 71779 - DNA, 59 bp, Heterodera glycines; identical to SEQ ID NO: 52421

SEQ ID NO: 71780 - DNA, 59 bp, Heterodera glycines; identical to SEQ ID NO: 52421

SEQ ID NO: 71781 - DNA, 59 bp, Heterodera glycines; identical to SEQ ID NO: 52422

SEQ ID NO: 71782 - DNA, 317 bp, Heterodera glycines
atggagaaggcctgcaaaattaggagagattatatcgattttagtgcgctaggttcgatgaaactttttaaaatataagcctaaatagggaagctattcccgaaggattcggtctccccataaatctgggcgcatcggttcggggggactgccccgaaaacaaaaaaatcgattttttcaagtgtccgtttggggtactcaaacaattatggggagcaaaaatccaacgcagaattaaagtattaaaaatttttagattttttattcatctccctttttgatattgaaagcatctgagtgcctaaaataacttgtaa

SEQ ID NO: 71783 - DNA, 76 bp, Heterodera glycines; identical to SEQ ID NO: 53797

SEQ ID NO: 71784 - DNA, 648 bp, Heterodera glycines
aaacaaaaaaatcgattttttcaagtgtccgtttagggtactcaaacaattatggggagcaaaaatccaacgcagaattaaagtacaggctatagggaagctattcccgaaggattcggtctccccataaatctgggcgcatcggctcggggggactgccccgaaaacaaaaaaatcgattttttcaagtgtccgtttggggtactcaaacaattatggggagcaaaaatccaacgcagaattaaagtacaggctatagggaagctattcccgaaggattcggtctccccataaatctgggcgcatcggttcagggggactgccccgaaaacccaaaaaaaaatttttttggataaaaattatttaaatgaactgactagataatatttaaaataggttattactcttcctttcagtatccctgcaaagtttggtgcgcttctgatcagtttctgaaaaaaaagttaagcctaaactttttggcctgtttaaaaaggaattaaaaattttattcatctccctttttgatagaaaaagcatcagagtgcctaaactaacctgtaaataaagttttgtgtgtttcagagcactttctgaaaaaatacttatgaattaattttgcaaaaaataaataattaatgaaaaagt

SEQ ID NO: 71785 - DNA, 565 bp, Heterodera glycines
atgccgccactgccaaaggagccgatcagctcaaagcccgtctccgaaataaaagtgcccaagttccagcagcagccaccgcacgctcccgccggcgactccaccgccatcactggacaacgcagcgaaacgcgagtgaagatgaaccggatgagactgagaatagcggagcggctgaaggaggcgcagaacaccagcgccatgctgaccacgttcaacgaggtcaacacaaatgggggggaggcgggtgacatgagtgaatgtttgtagcgagtcacacatttatacagcttgctatttttaaaaatcttaataaattgatttgtccgtttgcatcacaaaaaacaaaacaaaaattctaataaaaaaacaaatcgaatgatagaataattatctttttaaacatttttattccttgctcttttcaggtcgatctgtacaacgtggtacggatgcgcaagcagtaccaagaggcgttcacgaagaagcatggtgtcaagttgggtctgatgtctccgttcgtccgcgcgtccgcaattgggttgcaggaactgcccgtggttaa

SEQ ID NO: 71786 - DNA, 82 bp, Heterodera glycines
gaaataattaattaattcaatttgtattttctcgcttcttatcaagtgctattagtagaaagaaatgaatcgtattgttcag

SEQ ID NO: 71787 - DNA, 208 bp, Heterodera glycines
tttggttttattgcatttttgttaaggaatttttcaaaaaatgtcgaaatagtgaaaaaatagtgacaaaacgccaaaatagtgatttttaactattttagtgacgaagtcgccaaaatagtgatttctagtgacgaaaagtgacgtccaaatgaaaaaattttaatgcagaaatgcgttttttgagctcctttcttcaaaacaattg

SEQ ID NO: 71788 - DNA, 1798 bp, Heterodera glycines
atgggacgcatggaattggatttggaccaaatggtcaagggaaagccaaatttggtggaggaggaggccgcgtatgggcagcgaaagcgcgagatcactgcctccatcgccaacatgttcgagcagtacgtcgactcattggtgagggaattttgaataaatagcggggctctgggaccggtctcgtctggtattctcaaaacggcatattttcagtctcaagaaatacaaataaacgttcgaatcagaaatacagattttcatctcattttccgaatctcctggttctttttttgattttagagagtcgaactctaattattaaattaacaatgaaataacgattcgattatcataaactgcaactataagtaaaacttcaaaattaagaatcggttgcgccctttgagcgtgaaatgtgtgctggcggatgacgaattgaaaaggctgaaacgacgacggcgcgtgatgggcatggacgacgacgacattggtgaacagctgaacaccgttaaggtgggaacattcaaaaaaataataattccgaacattggacaaaagaggagaggaacttttggctctactgcagttcaaacgaccaaaaaataaatttgacaatttatatcataactttttctacaaatattcgaattaaactttcttggtttcattcaatagccctaagtgttctctcttagtctacaaaatctcaaaaatttcgtaatgtttcaaaaaagttatggccaaaaatgtttaggaaattaaaatgcattttctttaatggcaatttatgctttctcatgtttagaaacgttaccaagcacagtgcaaaattcgtgaggatcacaaaataaatgtggaggaagcgaaggacgcattcaaaactttggccaaatattcgccggcagagaatgaacagtcccacgaggaaacgagggcgttcaccaaaatgaaaagtgttggttggcactgcgggatccatgccatggcattttttgtgatttaggatttcacgaaccatcaaattccggacgacgcggacgcattggacgaacggatgacgagggaattgagcaaagcgtccaaagggcgtcaggagggcactgaaaaggcatggcacaaaaattatttggaaaaaataaaaacttgaaaaatagcaaaacaatcagacccttggtaatttggagggtaaaatccaagaatttttttttgttcttcgggctaaaattatttctccagtgttattttaatattttcagcgccgggggaaatgcatgaatttgtagctatttttcgccacaaaatgactaattttggccattttggatcaaattttcaacaaaaaaacatggtaaaatggggaccggcggtgcctttaagcgttgtcatgaaaactcttggaaattttaatataatttgttaagaaaattcttaaaattttcaaaaaaaaaaattgccaattgaacacttggattctaaatatagcgcgaacgtctcatcccaaaatcaattaattacccatttaatactaaatacatcattagataaaatatcgcattttttgcaggatgtccacgagtaccagcgactgttggaggagcacgacaaattgggcacggaagtgcggcgagtgggcgaacggaacgaacggtggaagcgcgaaatggacgacagactcagcgagtggttggacccgctgggcgagttggtggcaaacatcagcaacaacttcaccaactttttcgcccaactcggctgtgccggcgaagtccgactcgacacgccgccggagaacaaa

SEQ ID NO: 71789 - DNA, 576 bp, Heterodera glycines
aaatttctatttttaattaatccacctgtggaccaaactcgcactcgtaaatggccatttaaatgccaattttattttgatggtgggattgccatcttggcatcaacaaaaacgcaatttcgtcctacgatttttgcaatgttagacaaggtttgaggatgacaatatagtggaatgtgatttcgtgccccttattatggaggtacatccattttttgaggtaaaagaggagattgaatttgtaacaacacgaatgataaccttcttaactcttgaaaaaagaataatttcacgacctattattttttaaaatagaaatagaggaaaatgggtattcttcaaataaccctatttatgcgacaacgaaattacaacattatttagtcaatttcgccacttcattcataaacatttccgcccactttttctcattcattcgcactaacgagtattctgatggcatttttgagaatgcctcttctatcaggcgcaatggcatattcataacaataatccgcaaacaactcatatcgcgtgtggattctccattgctaaataacccaattattaaataaa

SEQ ID NO: 71790 - DNA, 659 bp, Heterodera glycines
  unsure (1)..(659): unsure at all n locations
atgactttcagtttgttttcatgcatttaagtcgttttcgagacattaacccaaatttctaaaatttaactttcgattctttgttcgaaatcgggtcctgttttaggaattggtcgaaatggatgccatattcgtgatcagcggcccaagtaacccccgacggtgggcacaaacaacttcattcttttgttgattatgtacacaatttcccctccatttttaaggcaaacgggcacaggacttggccgaagaaggaggacttgccgaaatgatggacatttttcgcactaccacgacagccgaacgaacggaggcggcggaacgttgaagggtgaaaatgacattttaaaaattttcactgactgattaaatgaaaaaaaagaaaattcattttcatattgcaaaacgacagaccaacagcagcagcagatggacacggcactgacaatgatgagagggaattgcggctcacaaacaatcggacggatgtgattttatattcgatcattttccatgtatggatacgtactacatatgtatgttttatcgccatgtatattttgatattttgcttgtcacgctcgatatttgctgctgctctgattgtacatatgttttgtattattgtgcctaacaacattanatactcgataaataaa

SEQ ID NO: 71791 - DNA, 93 bp, Heterodera glycines
atggggagcaaaaatccaacgcagaattatagtacaggctatagggaagctattcccgaaggattcggtctccccataaatctgtgcgcatcg

SEQ ID NO: 71792 - DNA, 968 bp, Heterodera glycines
cccgtgccgaattagactcaatggatttaccccctgtctctttggatgctgctctagggcatttacagagcagattcgaaaatgagaacacaaagagtatagcgagacaaaacctcgcgatttgcagacaatacccgggagaaaaagtttttgattttgccactcgtttaagtgaggcagttaggactgctttggccggggaaacggagggaaacattaggaaaagactgttggaagaatttttggatcggttaatccccgagctacaatacgaagtgaaatcggagaggccaacggactatagcagggcttacgaattagctcaacattatgagcttctccaggcgtcgcgcaagtcgacttcaaatgtggccatgaatgaacttattgaaaaagtcgaggcgttggccatgcaaaatgtgagacatgccccaaatttttctgatcagcgcgatcaccgggtttgtttttattgtaaaaaagcggggcatgtgataagagattgtgcggcgagaagaagggaagcaaacaatgggccaaattggcgaagagatgaaaacagccgtagaacggaacgcaatgggaattattctcggccattcgggcagggatatgaaaggaaccgagagacgtggagaagcggaaatagccaacaaaatagtcggccaaatcagaactatcggcgatacagagaccaaagtggtactagacgggaatgcgatcaagaaaatcgtttcccaagaacacccacaccaagagtaaaccctaggggaggcagaatagcaggtgcccgagtggcaagcccctactttttggcaataatcgctattttcggcagtgttctctccaacctcaatccttgcaaatgttccaaaacggcagccgatgatctgtttaccggacgctccgtcgagtttatcggaaattcgccagaggagccaatctcgccccacgtggcaaccgactga

SEQ ID NO: 71793 - DNA, 178 bp, Heterodera glycines
atggttagacgaaaagaggaatttttaggatgggacgcaccccatctgatattcccatttttctgtttcacaactggccaacggcgactgtgctcattgacacgtagttgtccaattaaggtacttggactttccacagtaaaatgtggtgcaaattttggaactgtcccgcctcacg

SEQ ID NO: 71794 - DNA, 443 bp, Heterodera glycines
gctcattgacacgtagttgtccaattaaggtacttggactttccacagtaaaatgtggtgcaaattttggaactgtcccgcctcacggcggggcttaaaagcatttgtagcgcaataaaagttttttgttttgaatttttcacaatttatttaaaaaagccaaaaaatccggatccaattttaaaaacgaaaatagtgcacaaaaaggagccgcctcacggcggggcttaaaagcatttgtagcgcaataaaagttttttgttttgaatttttcacaatttatttaaaaaagccaaaaaatccggatccaattttaaaaacgaaaatagtgcacaaaaaggagccgcctcacggcggggcttaaaagcattgtacatcataattaaaagcgaaaataattttcgtatattttttcacaatttatttcaaaagacaacaaaaaa

SEQ ID NO: 71795 - DNA, 304 bp, Heterodera glycines
aaaattccctcaaaaataaaaggtctattgcgcaccgccctccctatcatgctcgagagcatttgtatgtgtataaaatttatcaaaaaaagagatagccatttttttgggataacctctaaatataaaaatcctctgtgaaataaaatggcgattgtgcacagccctccgtctcatacgcaagcgcttttgtgaggtataaaatttctcaaaaaaagagatagccatttttctgggatagagtataaatttaaaaattccctcaaaaataaaaggtctattgcgcaccgccctccctatcatg

SEQ ID NO: 71796 - DNA, 109 bp, Heterodera glycines
ctcaatgttagcattccatgcgaggatgggtcgaaaactgtgcagattccgtccgccacaaattgcagctgtttcgactgttcccgcaagcgccggaggcgataattag

SEQ ID NO: 71797 - DNA, 209 bp, Heterodera glycines
gaattggctgagttgtttttccgcgaattgctcggcgactcgcccaccggacaactcgaccaaagccgcttctccgccattgtggacgattatttgtacttcaccatgggaatttttccttgggtttttcagaatttattttcaggttttccgacctcgcaagtggcggaggcaatgacggaacagtgggaaacaaatctccgaaaatt

SEQ ID NO: 71798 - DNA, 321 bp, Heterodera glycines
atggcattccaatctctgggactcaacccaccagcatttcaatctctgagactcaattctaaggctttccaatcgctgggactcaacccaccagcatttcaatgtctgggactcaaatctccggcattccagacactgggactcacccaccaactttcaatggcattccaatctctggggctcaacccaccagcatttcaatctctgagactcaacccaccagcatttcaatctctgggactcaacacgccagcatttcaatctctgggactcaaatctccggcattccaaacactgggactcaaccccccagcattttaa

SEQ ID NO: 71799 - DNA, 1375 bp, Heterodera glycines
atgcatcttgactataagccggacaatttggtttatgttgaattggaaaatggaggcaaaattctcaaagtgattgacttcgatggcacttatttgctgcccgatgcaaaagaccgtaagggaaagttggcaattgtcagcgatcgtttgaaaattttgaccggcaccgaaaggtataatgcgcccgaattttacgcggaattattcgccaaaaaggtcaaaagttgtattccaattatctatccatttaagaaattgcaataatttagctttcaacaaaaacggacatttgggcagttgggataatgctttacgaaatattatttttgcagaaaaaatatacaatttatgaagaaatgggaagtgacacgcaggtcagttttatacatacatatgtataaaataaaaacaatgggctttgattaaattatataataaaaagagaccgacttttgaggcatattcatttttttctgcgcattagttccggtagattaagcataaaaaaacccattttctacttggtttgaagcttctacgttgacttttcttatgcctttttcgggatttcgtgccttttcatgccttttttcaattttttggtgcctattatagtgcctttaatgcgatttttggtgcctttttagtcggtctctaataataataatacgtaatttaattttttcggaaatgaatttcatcaaaaaacgatttttaaggtaaaggtgaaaaaaacagtttcaaatgggaataatctgcagcaataaatattcagattagtgatggtcggaaaccgaaacgggatccgggaatttatccaaaaagaaaatttgcaaaataaaaaaaaattaataaggataagaaaatctaaaattttaaattcactcaatattcatcactatttaatcacactagaatatgtttttgtaaattacatacaattcccattcttttatcataatttttccgtcatgacgtatcaaaatcgtctgtagaacacaaaaggtaactcgcttggtgggactcgaaacagagagtgtgacctaaaacccgcgccccgggattggtataggaattcaaaattacggtttagactagccaatttttaggtgaaaaaacattaaccatttcaaaagtcgaaagagtaattattgtatttgcagagctttaaaaatttgttgtatcatctcaatgaaattcatcgtggttttacagtgtcaaaagatctcattaaatacaatcaccatccaatcacttattccgctgaatggctctcaaaatttaatgtgaaaattctattttggatgttccaagcatggacagattttccaagggttggcctactgattacggtaattatctaattatatttaaa

SEQ ID NO: 71800 - DNA, 1629 bp, Heterodera glycines
atgagtgccaaaggaattatggactttttggacggcaactgttgtccagtggaattatacgaagaaaagttagaaattgagaacatttttaacgatttgtcagtgaaagaattgaacaaaaacattgatcagagagtagaaatggacacaacggaatttgaggaaaagcagaaattgttggcgatgaaaagaatgatgaaaaaagcgcgagtaaagcgattggaaattgccaatgtgctgaaactgatcagaacgcattgcgacacagagacaacgggggactgactgattagcacagaagcgatagctaacaaataagcacaacaaactcttatcatcccatctgaactccgtaatcatcattagaaggatagcatttttaggacccaaaaaatgagaggtgtatttttctctgcactctcaattttttgattcatctctcgtttttcggaagatgtgtaaaagattttccaaaaaatatttttgagcttgcttttgaaaatctagtgtaaaagccatccatgtcaacaaaatttttattaaaactttcaaataaaataaaatattttttgattttaagttttgtaccaaaataccggtattaatggtaagattcataaatttatcaaaaacttcctagtgaccgttcattcagagttaaaatctctgagcggtattctaattcaaaaaacatttactctggggtgcctgccacaaggtaagtgtcttaggccctttgctttttcttatttttattaatgatctcccgaataatttgcctaacaaataagcatgttggtattaagatgtgagcatgaaaatgataaaaatagagataatttatcttccacgcttaagccaataaataaattgtcataaaataatggcctaaaaatatcaataggaaaaacaatggtcctttacctgggtgaaaataacacaaaatttttttttttcttgatggcgaaccattgccagaaacaaaaaagtgtaagggatttgggcattttaatcggtcaaaagctttccttttctaaccatattaataaaattttaaaaaattcatatttttcttgttttcagcttctccgagcgttaaactcggaagcttgaaacattaatttcggcatataaaagctatatcagaccacagtagaatacgcaacagaaatttggaatccattaaaaaaagaaaatgtccgcaaaattaaagcagttcaaaaatttttaacaagaaaagtcttcaaaaattgtgggcttgttagaggagtgatttgtttcattgatatttattgtttgttcaatttgacacttattttgtgatttgacacttattttgtgatttttgactaccatttatgttttttttattattcgctggcattttatgttgccattaaatcatgttcagtaccgtcttttttggttagccgacttttgcgccgcagacatttgcgccacgccatttgcgccgcgacacttgcgccgctcagcaaaaaatactcttgcgccgctgacatttgcgccgtgccatttgcgccacgacacttgcgccgcctaacaaaaacgacatttgcgccgcgacatttgcgccgtacagcaaaaaaagacatttgcactctgattaaa

SEQ ID NO: 71801 - DNA, 328 bp, Heterodera glycines
  unsure (1)..(328): unsure at all n locations
ccatcattggacatcgtcgagccggaaatttcgcaaaagctttccaaaaaggtcgacccatcggcggcacttttcgccgttttcgacgggcacaatggcgccgaatgtacgctggccattttttaaattctacattaattggggactaattaattcctcgacaatttccattttaaggcgccacttttgcgagtgcccatttgacggagtgttttttggacgcttttgagcaatcggacgatatcgaaaaaatattgaatgacgcatttgaacgactcgacaaacgcataacagaaaaatgcacgagtgaggttggaattgngaaagg

SEQ ID NO: 71802 - DNA, 413 bp, Heterodera glycines
atgtcgataaatggttccgcgttgagcgctttccaacggatttggcatgggtttctctcaaagaaaaaagtttctcgcgccgaagtgatgagtttggctgaacagattgatccggaagtgaacgacaatgagctttttgacgaaattacggcgctgaatgaaatacttgaaagtatttctgaccagaaatttggtgaaatgaacgcagaacaggatcacctcttatgtcgagtttatttctccaataaaatgtaattcctagaaaagctgtcttttgttttaacattttttgtagcttttttggctctattgctctttatgagtccaatcaattaatcatagttggtttttatacaataagtttgctcatgttcgaagcttttgggtatcattcgaaagcacaaagtctgtag

SEQ ID NO: 71803 - DNA, 437 bp, Heterodera glycines
atggacactgcgctgccctcctcctgctggtccctttccgtgccgtcgtcgactgccgccgccgccggtggcatttgcaccggcggttccatgccagcgacgacgaacccggcacaaattggactgatggcaatgcgccggtccgaaacggtgccaccccttggccatcccgacacctcactgttctacatgtccaattttccgtccatggaaatgagcagccgacgaccaccccttcccccgttggtgccgttgccaacattcaccgaggaggaagaggaggagggggagagagatgacgatggcaccggcatttttagggaaattgaaaaataggcattcttttggacattttgaaccccaaagaattttagtgccatacaatgaatctgaaaaaggtttttatttttataaaacttttaacattttcgaataaa

SEQ ID NO: 71804 - DNA, 68 bp, Heterodera glycines
tttcaaatatcgtaagattgtttgatagggccagacaagagaaggcaactgttggtaccaattttgcg

SEQ ID NO: 71805 - DNA, 179 bp, Heterodera glycines
tgtttgatagggccagacaagagaaggcaactgttggtaccaagtttgcggtaaaaaaatgagaaaaaagagatagccattttttggtcaagaattttttttgtttgcgtttccaatatcgtaagattgtttgatagggccagacaaaaaaaggcaactgttggtaccaagtttgcggt

SEQ ID NO: 71806 - DNA, 704 bp, Heterodera glycines
gttttcggggcagtccccccgaaccgatgcgcccagatttatggggagaccgaatccttcgggaatagcttccctatagcctgtactttaattctgcgttggatttttgctccccataattgtttgagtaccccaaacggacacttgaaaaaatcgatttttttgttttcggggcagtccccccgagccgatgcgcccagatttatggggagaccgaatccttccggaatagcttccctatagcctgtactttaattctgcgttggatttttgctccccataattgtttgagtaccccaaacggacacttgaaaaaatcgatttttttgttttcggggcagtccccccgaaccgatgcgcccagatttatggggagaccgaatccttccggaatagcttccctatagcctgtactttaattctgcgttggatttttgctccccataattgtttgagtaccccaaacggacacttgaaaaaatcgatttttttgttttcggggcagtccccccgaaccgatgcgcccagatttatggggagaccgaatccttcgggaatagcttccctatagcctgtactttaattctgcgttggatttttgctccccataaatgtttgagtaccccaaacggacacttgaaaaaatcgatttttttggttttcataaatatttttttcagacagtgctctacagcgcaccaaat

SEQ ID NO: 71807 - DNA, 144 bp, Heterodera glycines
atgttcaccagcagtgctcaaaagtatcttggccgtaaagcaagcgaaatccggatgatggaacaggacggagacggggaagggttggctaggcttttagattccttcattggaaagaagattgtagccaaaataactattaag

SEQ ID NO: 71808 - DNA, 1251 bp, Heterodera glycines
  unsure (1)..(1251): unsure at all n locations
atgagtccacaattgttggcatataataatgtaagagattatcagagaaattgtgattattgaatagtgcaatttattgtatttcaaaaaagatgctctcccaactctccaaatggcttatatgtaattagaaagcattaatcagtaaaaggctaatcaacttataaagccgttaaattcctttttattttttcccctatccttaccctattttgagatatacagtatgcctattctcactaatcttacaaaaattcaatgcattatttatattattttattgcattttaatttgttatttgcatgccccaattaaaatgcaatgcgtatatggcaataaattcaattataattttatttagaattaattttaaacatggaaaatatccttgatcgtgttggcgagaatattttggagcgcatccaaaacaaacagtttgaaagagatgtactgtaaattcaaaaaaaatatatataactttaaatttaatattttattccttcattaggtagagggattcatcccggtgtcgggtgagacaccgtccccatcatttgatctgctcagagaccattggctgcaggcaataaaaattaattaaattataaaaataataataaataatatattgttaatattatagagagatggtctctatgaagatgcaaagtttccagtggagtcaattcaattgtacttcactgcagggccagtggcgatccgatggctgaggcctggtgaaattgttgctcatccacagttcataaaccaggagcccattgctggggatgttcggcaaggaagcattgggaattgctgggcgctgtccgcggcatcggtgttggcgcagtatgggcccctgttttacagggtggtgcccccggatcaggggttcgggcataattacgccggtaaatttaaaataattaaatttaaatattcagtcagaatttaaaaaaaaattgttttgaaacgattccttttttcaatgacatacaattttggtagggatcaactgcgacttgggtcaacttcatctgacaatgagccaatttcgtctcgccaactccgttttggtatataatgggctaactccgtctcagacaaaaattcaaattannatttattagttttttttattataaaacgccattttttggcaataatattttaaaattaagtgataattntatccgactaccacaaaaatgttcaatttcccttgnnanntactgtagtttttgngacta

SEQ ID NO: 71809 - DNA, 1221 bp, Heterodera glycines
atgaaagctaaattttatttattagcttatatattactagtatgctgctgctcaaaactttttcatggaattagttttgaggaattaacatcaaacaatcacgccaaacccttaattgatcaatatcttcgaaaggaaataaagactaaaggagaattattggaaaaactggctgaaatcggagtcgacctaagcttgagaagcttggaaagatatatttcaaaaataaaaaatagaaaatcaacagaaggaaacaaagtagatatggaaaatgccgaagtatcgcaatgtttttcaaaatttgataacaaatttctttttatcattgggcatgaatccgaatatcgaaaattcaataaaactaacgagagagaaggcgtaatttatttgtactgtatgtgttgcaaaaaattgaaaaaacccaattctgacaggttagttttaattttaattataatttttatatagttatgtgtatttaagtttaatagctagtgcaatattacgcgatggcttattagacagaactcatcaaataattcatgataaacaatgtaaaggagtaccgcttgagcaactagctgctgaacaaatagataggagccaaagacgagatcttgtgcaatgttctataaaccctaaatctttgtggcgagaagtatttctctttattaaaaccagaactttttttgttaaggggtctgatcgggctagagaacacgatgttgctgaggatattgaaattgaagatatttctggaatttcatttaactaccctaattggcaatctgtaagaagctcttactaccgtagaagaagaaatcacctaggggattgttctgatccctttaatgtcccagaaaggcttcaactaaataaacggggttcaataaaattgcttcttaaaaagaaaatttccgaagaagacatgtaagcattagttgggtaaatttattaaataaaaactttaaggtggttgcgatttagagataaagaattaggtgtaatgctttttatttcacattctcaaataaaagctgtcagtcactgtaaagttttaggtaatagtacctaatgatcataaagaaagattattttttagtttccgacggtacttttgaattggcgcctttgaaattccaacaaatttggacaattcacggattggttagagcttttccgttggcaggtgtattcgcccaatttagaaatttcggttag

SEQ ID NO: 71810 - DNA, 699 bp, Heterodera glycines
atggccctcggccctgcacttttccgtcttcgccagcacatcacctcagccgagaacttgctggatgaagacgatccggatgcccaaacagtcatctccctgaggcaggaacgagaccacatcatccgaatcctgtcaaggatggaagctgaaatggatgcatggggtacaatcatgaacgcacttcaaggcccggcacgagaggcagaagaagcgctatttgccaactttgtgagagacgaccgtcatctgacggattggttggaggatgcgcgagaactgctggctcacatagcagcagagctcgcaaatccacccaaccaagtcatgccagcgggaggacagcagccagtagctgctgtgaaccaagccatgccacaaatgccagccataccggttgcaatcaatgctgctgctggtgcaaatcttcagcagccagctgctgccaatcatgcctatctgccacctccagtgccggtcgccaatgttcacaatatgccaattttgccgccggcagctgctcctcaagccactgctcggcttccacagtcagtcttcctgttttttcgggcgaaccaatggaatggcccgcgttttggcagagtttcgagagtgccgtcgaccgtgccgcccttgagcccgtcgacaaactcaactatctccacggttgcctacgcggaaaggctgctcgtgccgtaa

SEQ ID NO: 71811 - DNA, 1021 bp, Heterodera glycines; identical to SEQ ID NO: 44314

SEQ ID NO: 71812 - DNA, 205 bp, Heterodera glycines; identical to SEQ ID NO: 54900

SEQ ID NO: 71813 - DNA, 217 bp, Heterodera glycines
gccaaaagggattccgctgattatcaatgaccatgtcgatgtttgcctggcctcgggcgctgacggagtgcatttgggtgccaacgatttgccggttgagtctgcacgtgaactgcttggccccgatgcaattttgggctattcagtgaacaatgaaaaagcattggaacatgccattcgacttggccataaaattgattatttgggcgttggaccg

SEQ ID NO: 71814 - DNA, 518 bp, Heterodera glycines
cgcagcacattgctctgaacacttcggacattgttcacgccatccaatcgctgcgcgcccgcggcttggagtttctgagcatcccggacagttactacgcgtctctgaagcagcggctgagcgacgcgggcgtggagttgaaggaggacttggagaaactgagggagctgaagattctggtcgattttgacgagcagggctatttgctccaaatattttcaaaggtaaatttacgaaaagggaaaaaccgaaaatgaatgaacgaggactaattgatcaataattaagccatgccaagaccgccccacccttttcctggaaatcatccaacggcacaaccaccaggcaagtgggcacaatgccaatgtcgtcggcgttaggttgccaatgccaaaatgaccaattccccccagggctttggcgccggcaacttcaaagcgttattcgaaagcatcgaggcggaacagaacgaacgtggcaatttgttctacaaagacgtggcggtgggaggggaaaaa

SEQ ID NO: 71815 - DNA, 90 bp, Heterodera glycines
aaatgtcaaatcaatcaacttcttctgctgctgctgctgccggatcgacggcgccgccatcgccttcgaacgaagcttcttctccttcgg

SEQ ID NO: 71816 - DNA, 997 bp, Heterodera glycines
atggcggcgccgtcgatccggcagcagcagcagcagaagaagttgattgatttgacatttaaataaattttcgggtctattatcacttaaactcggatttttagtgctaaaaatcatgaaatatgtgttaaaaaatgctgaaatacatatatgtgctaaaaaccaaaaaaaaatgtcaaaaatgtgcgaaaattaaaaaaatcaattgtatttataccagggatgcgatcgaaaatttttcaaaataagaacattgagcccaaaaaatcagattttggggtcgaaaatcaggacattttgcttcattgcttcaaaacagttatttttacaatttattcaatcaaaaatgtattaaatattatattttttcacctcccattaacgattttaacaattttggggaggaaattagcaaatcgtaaattttaatgcaattttttagcggcgtaatttttccaaaaaacttctgaggaatgggcgaggggagagggtccggcggtgccattaggcaccccggaaaattttttttagattttcaccaaaaaaggccaattttttcaattaaattaagtcaagcgacgacttttttgctttaaaacactttttttgcggcgcgtttttaaaaaaattttggaggatggacggagggtccggcggtgcctataggcgccgcagggaaaaatttttgcgatttttaatgcgatttgttaacagatttttgtcaaaataaccaaattttgccacaaatcttatattttcttaataaaatagtgacattatgccatacaatttcaaaaatgtgagtttatttaagaaatcaggacaaaattttcaggacaaatctgataaatcaggacatttttattttatcagatttggaccctccaaatcaggacaaatttgataaatcaggacagatcgcatccctgcagtactatcacatgttactttttggggaacgggaaatggcgttggcattggccaaatgccatcagat

SEQ ID NO: 71817 - DNA, 634 bp, Heterodera glycines
caagttttttacaaccacttattgccaatttaatttcttgcagatttaaagccatccattgcctgccggttctcggcacagcaaagcactaatacggtgtttgactcactttaaaaaataattcattacccaaaagttttttacaaccacttattgccaatctaatttcttgcagatttaaagctatccattgcctgccggtctcggcacagcaaagcactaatagggtgtttgactcacttcaaaaaataattcattacccaaaagttttttacaaccacatattgccaatctaatttcttgcagattgaaagccatccattgcctgccggttctcggcacagcaaagcactaatagggtgtttgactcacttcaaaaaataattcattacccaaaagttttttacaaccacttattgccaatataatttcttgcagatttaaagctatccattgcctgccggtctcggcacagcaaagcactaataaggtggttgactcacttcaaaaaataattccatacccaaaagttttttacaaccacatattgccaatctaatttcttgcagattgaaagccatccattgcctgccggttctcggcacagcaaagcactaatagaggtgtttgactc

SEQ ID NO: 71818 - DNA, 136 bp, Heterodera glycines
atgcacattgcgccattggagttacatccattggcacgcctggttcagggtcgttaccataaaatgcactgcttgtgcgttgcttcgtgggatcatgtacttgtacgtgttctcacgttacttgctcagctcggct

SEQ ID NO: 71819 - DNA, 452 bp, Heterodera glycines
gattctcgagttacggaggcattggaacaactcacatcggaccaaatcgaacgtgaggacggagggggaaaatgggagaaatggggggggggacaaaagggcgaaaagccaaaagaaaaacgcacagagttccgaaagtacttcaacatgttcgacaaggagggcaaagggttcatcaaagcaactcaggtgaagaaaaaagtgaatgccattggatggaattgggggggtcgcaatggcattttgaaaataaagccaaaaaaagcataacattagaaatgccattttggcataggaaatgaaaaagcgcattaaaacacaaatgacaaacattccgtcaagaataggtgggccaaattctgcggacaatgggccaagcattcgaggaacgcgacctgaagcagctgatccgcgagttcgactcggacgggtcgggcgaaatcgaatttgag

SEQ ID NO: 71820 - DNA, 844 bp, Heterodera glycines
atgatgtgagtttgggcattttatttttcttttcattttcaaatttgaattgttcagtgaaacactcgagacgagcgaagtgttgaagcgggtccttaagtctgcgctgattgtcgacggagtggcacggggtctaaacgaagcggcacagactttggacaagtattacgaaattccttctgcaccattttttaaaattgctttttttctgcactatttcaggcgtgaagcgcacttttgtgtgctggccaaaagctgtgacgaggcgtcctttgagaaattggtgcgctcattgtgcaaagagcacaccattccgattttggaggtggaggacaaggccgaactcggtcaaatggttggccagtgcaaatacgacaaagacggaaaagcgcgcaaaatcgtcggctgttcggtggcggtggtcaaagactacggacgtgacgaagaggcgaagaatgacttgcaggaagtgctgaagaaaatcagcgactgatgaggttcctatgtcatcatattgttgtttttgtttggttgttaccgcggctataaaagactcttctgtttaaaatgacatttttgggtttataaatttaggcctttttagttaaaattaattaaagttgcgttgaaattttttgatagttaatgttaacttgaaaccaattttggacgtaggcgcaaattcatacaacagcatcccttttatgggcagtgttgggcaaatgctctctctttacaatcgttcctttttcactttctccttttcggtaacatcatttttacgcatcgtttttcctctcaattttttaattttctttctgaatggacggcacacaaaaataaa

SEQ ID NO: 71821 - DNA, 1257 bp, Heterodera glycines
atgccgacctttccgtggagtaaaaagagaaaggcatccgacgatgaggtggtcgagagtgggatgacggtacgccaaatattggaggagcgggaggagtacgtgaaaaacattggcattgagtatcgattcggctgctacgaggaaaagcgcgccgattcgtgccaatatttgggcgaatatttcgaggccgtccaaaccgacttcaaatccgccttcgacactttccgccaaaattgtgagcagcgaaagttcccccgcagttgcttcaaatacggccaatatttggccgctgggagggcgtgcgaggcgagcttcaaaaaggtcggatggatgaagaggggggtggggggggggggaaggtgatatttgcacaaaaatggccatgagtgttgcagaccttaaattgcaaaattctataaagggtttaattaaggcgatcgaaccgctcagattgtcctgcgatgcgggcatcgccaagggctgtcgcgtgttggcgctgattttgtggaacggggagtcggaccgtccgccggactcagcccaggccgagcagttcatgaaacgggcggccgaactgggcgattacgaggcgagctggacattaagcacttggtggtcaatggagggggctaaataaacatttccaggaggggtgaatcatttttttgtgtaccattcttttccagggcatggattaatcattccaaaaaacaaatttaagttggaattctttctaatgcaattttctttattttaaaatttaaaggtatttgggtgatacaataaaataccaacgtgaaaagtcggcgccctatggtcacaaaatgggggaattgtccagggatatgcaaaaggcgcttatgtacggactcaaagcgtgcgacgagggcgacctttttcaggtcgcataattaaacaaatttagggcatttattttaaaattcttcttttatttcagtcttgtgtaaatgtgtcgctaatgtatcgaaatggagaaggaatcccaaaggacgagaaaaagtaagaaaaggacaaattattttaatatcgggtaataatgtactttgtaccccccccccccttttacgaaaaaaaattttcaaaattttttcgtagtaatgtgtttttttggggccgaaaaattcgattctgatatctatttcggcccattacaaacccctgacccggactcgaacaaaaattcgaaaattcaattttcgaaaaaattttaagttttgcaaccaaatgcatgaa

SEQ ID NO: 71822 - DNA, 500 bp, Heterodera glycines
atgcacgaaatcattcctcgtgaacagatgccaccgctcctgaccccggaagaggaaacggtatttaaatttaattaaatgttcccacttatgaattttgaaggtgtggcagccacttttgggcgggggagggggcgccgacttttcggcaatcttttgtttacaaggcggtgagtcaattgtgcataattttcatacattcgaatttgtcaaaagatcatttcagatgcctaaactgttgcacggctcctacaaaaatttggtggcgttcctcgacacgaattccttccgttttgaagacaaagtttggctctttgagtcagagtgagtgaattacataattaaaacaaaagcaattttagtatcattcataagacggtttttcgcatggtcaaagtccgtttgtatttggccttcaaatctccgcacaacttgagaggcttggcattcatcacggacccggacggctattggattgagattttcaatccaaacaacat

SEQ ID NO: 71823 - DNA, 1419 bp, Heterodera glycines
  unsure (1)..(1419): unsure at all n locations
tttcacttncgcaaanaagcagaagggaagacctttccgaccttttacaacgctacattcgacgtgcctacagccgatgggcacattttgttgtggcacacacatggaaaattgtggtcctctgctttattgcctccgcaatttgtggcttcaaaatgttgaacacgaagtagacttttaaaaaaattgttttaataaatttaatagattatttaataataaaaatttttaatttaatatatataattaatcaaatttcgaatatcttcattcattctcattaattataatttaattaaaataagcaaataaataattaaataattttttatttcattttcttcaaataaataattatttatatgtataatatttaatatcaatgtaatcataattatgatcataacaattttatctataaacaacatattttaagatttaaagaacatttttatttaaaaataaaaaaaagttttattttttaagaattaatgtaattatttttccccctcattaaacagagtcaaaaatcaaatcaccggctacacaccgtatggctcgcgttcattgaacgaatttgctgtccaagatgaattcttcggacagactgggctcggagtcaaaattttgttgctgattttgccgaaaaagggcaacaatttgatgaatttggaatcattgcgcgaaactgtcgatgtaaaaaattttcgtttttttttgctgaatttttcaaaaaatttttttttttgtttcaggttgacaacctcgtccggcacaatttgaccttctacaatcaaaaacatgaccgtgatgaatcattttcaatgatttgcaacttttattgcaacgtcagcgaacctgtccaattgttttatgtaagccaaaaaatttttttcataaaattaaattttcaaaaaaaaaaaaattttagactggctttcaagaccagtacgatcgggtaatgaaacacgaaccgctgaatgaccgcatcaaacttgactacccattttcattgatcatgggcagaaaagtcaatttacaggtcggttaaaaattgaaatttttgtaaaattttttgcaaaattttagccaaatttctacggggttcatgtgtcgaagacgagcaagcccaagtttgggaacatggacaaaattgagtccatcgtcatacggtaccgagcggaaaagacgagagggtaattaattaactaattaatgatgaaaaataattaactccattaattatttgcaaatttccattacctaattaattttccaatttttaggtggaccgatgacgacataaggttaattaagaaattaatttaataaatactttttatttaatttgtcaattttacagtgcatacgaagatacgatcaccgactacttcgaaaagtaaaaaaaaaatgaataaa

SEQ ID NO: 71824 - DNA, 370 bp, Heterodera glycines
tctccccataaatctgggcgcatcggttcagggggactgccccgaaaacccaaaaaaaaattttttttgaataaattatttaaatgaactgactagataatatttaaaataggttatttctcttcctttcagtatccctgcaaagtttggtgcgcttctgataagtttctgaaaaaaaagttaagcctaaactttttggcctgtttaaaaaggaattaaaaatttttaaaaattttattcatctccctttttgatagaaaaagcatcagagtgcctaaactagcatgtaaataaaatttggtgcgtttcagagcagtttctgtaaaaatacttatgaattaattttgtaaaaaaataaataaataatgaa

SEQ ID NO: 71825 - DNA, 439 bp, Heterodera glycines
aaaatggtgtaagtaaaaatcgtaattacgctcaaaaagcttctcaaacaattttagcgcatccaattccttctacaatcgcctttatacatcccattatgagcgctaaaattatcagagtgccgaaaatcgcatgtgatctaagcctagcaaaaaatggtgtaagtaaaaatcgtaattacgctcaaaaagcttctcaaacaattttagcgcatccaattccttctacaatcgcctttatacatcccattatgagcgctaaaattatcagagtgccgaaaatcgcatgtgatctaagcctagcaaaaaatggtgtaagtaaaaatcgtaattacgctcaaaaagcttctcaaacaattttagcgcttccaattccttctacaatcgcctttatacatcccattatgagcgctaaaattatcagagtgccgaaaatcgc

SEQ ID NO: 71826 - DNA, 421 bp, Heterodera glycines
atgcaaacactgcgacacgcgcttttcgacgcaatcaccgccaacggcaaaaaaagtggcgaatcaccggttaaacaggcaaatgatcaaaatggataagcaattataaaacaaagaatcgaaaataagaaaattaaatttcagacgccgttccgactttcagcaaaacagcaaaagaagcgcagaacaaacgaaggggggtaagaacaaacattggcaaaaagagaaaataaaccaattagaaactaattacataattatttcagaaaaattaattccgataatattttatttattgcattctgttgagatcggcataacaataacattggcaccccatcgaatggaagtggcgatttgccaatgaattcggcggcggaaagggcccggcagcgtaaaataattcattcatattaataaa

SEQ ID NO: 71827 - DNA, 1185 bp, Heterodera glycines
atgagccgttcttcaattgacgctctgtttgcgaattcaattaagaagcagagttcgtctcagaatggtgaatattttaataaaattacacaaataaataaatagtatagtatttttaattaattttaaaatggcaattaaaatatttatccatttttatgattttggtaaattctctgccgacgaccgaatgttctccaatcggtgctctgcagaaattcatcacttatttggacagccgaccctcaacgagtcaacagcagcatcagaacgatggtggcttaattaatccgacaaatttaatctgttaatgacgcaattagcactaattatctttttttattgtttaaggtcttcatctctttcctcagttaccgtatttgctctaattatcccccatgggggattatttttcaacctcttcagaaaggggggggggataattagagattgggggataaatggagaaggggggattatttttcgacagaattattttgtgtaaaatttttgaaattttttgaccatgtcgccaaaaaatgtcatcgagtcaaagaaaaatcattttttattgcattttttaaaagaaattctgttttttctagttttttaactaggtatctataattagggttgcaaattatatggattaacatattttttctgcgcatatgctatgaagaaaggggcttaaaaataacatttctgcgttaaaatttttcgatttggtggaaggtttttagtccatataaatccatattttgggggttttcggggataaatcaatatttcgacattttggcgtttttagtccatattttggccatttttggcaaattttcacaagaaaatgcaaaaaagcgaaaaatacacccctaaagttcaattttttggaaatttttaaaaattacaccccaaacatatgaaaaattttgggttttcgtcgtcattttggcatttttaaatcactattttgggcttgccactataaaaaacattttggaagtcggctttccaacttttttggttataacttttttcaatcttaactaattttttcaaatttttgcaagctattcatccctcattttttttgtcaagaattttggatgtaaaaaatgtcaatattttctaaaatattagaaggaaatgtaacctcatttgcaacagcacccagtgaataaa

SEQ ID NO: 71828 - DNA, 491 bp, Heterodera glycines
aacaaattgggttggaaattattccgcttgtgcaaacatttggccatttggaatgggtgctcaaattggagcagttcgcccatctcagagagcatccaaagtttcctcaggtgaatttctattgattgatggttaactttagaaatgtacaataaaatgaaaacaccgctttgaaaaattatatgaaaatattatttttgcaaaattcggcaaatttttgtattgcattaacagtttttttgattcttcggcttgttcgtattaatgcatttattaattttgtttgtttttggcaggttatttgtattgggaatgacgaagcatttgaactgctcaaaacgatggtagtccaagtggcggaagtgcacgcgcggttcggcatgcgccattttcacatgggggcggacgaagtcttccaattgggcgtgtgcaatgaaagtgtgcgcgagatgagggcacagggcggcagagaaagggtaagggcgaagaat

SEQ ID NO: 71829 - DNA, 849 bp, Heterodera glycines
atggccaattcgccctcaaccaccgtcacattttctgggatttcgacaatccgtgccggtgtgccggatgtttccaggtcctttaaaaaatagaaataaaaaaggggtgcccaaaaattgaaaaaaacaattaaaaagtgaaagatttttgtttttgtgctgcttttctcaaggaaaaatattaataaataaaaaatccaaaaaataggcgccaaaaatggcgaaataggcacaaaaaaggcgcctaggtattaagcacaaaaatcccgaaaagcatacacaataattttgaaattttttttaccaaaattgccatcctttttgtcaccaccgccatgtcctgtcgctcctcctcgttgttgtccacctcgtctgttgcctcttcgcccgcagcgcaaaccgctgctgcagcctgtgcaggccggtccgccgcggtgctgccaacgcgtcgccttccgctactggacgcggtccgctcctgttcatatttttatacattaaatatttaaaagaatattttgtaaaaaaaaaacagtaaaaacgaaaaatactccgttaaaattaattagaaaaaaattcaaaaaatccattcctaattgttttacaaatatgcccctctcatcattttctgtttacaaaaatattcccaatgttcagcaccttcaatgacccctcgggcggtgcagggcgatcgaccaccttcaggcgcaagtccaccgaatccgagcccaagtcgttcacaatgcgaatggaataggtgccggtgtccgattgttcgcatttcggatagcacagctggatgagagtgtctaaaaatgggagaaaaaaacgtgaatataaaaaaataaa

SEQ ID NO: 71830 - DNA, 1482 bp, Heterodera glycines
  unsure (1)..(1482): unsure at all n locations
acactctcatccagctgtgctatccgaaatgcgaacaatcggacaccggcacctattccattcgcattgtgaacgacttgggctcggattcggtggacttgcgcctgaaggtggtcgatcgccctgcaccgcccgaggggtcattgaaggtgctgaacattgggaatatttttgtaaacagaaaatgatgagaggggcatatttgtaaaacaattaggaatggattttttgaatttttttctaattaattttaacggagtatttttcgtttttactgttttttttttacaaaatattcttttaaatatttaatgtataaaaatatgaacaggagcggaccgcgtccagtagcggaaggcgacgcgttggcagcaccgcggcggaccggcctgcacaggctgcagcagcggtttgcgctgcgggcgaagaggcaacagacgaggtggacaacaacgaggaggagcgacaggacatggcggtggtgacaaaaaggatggcaattttggtaaaaaaaatttcaaaattattgtgtatgcttttcgggatttttgtgcttaatacctaggcgccttttttgtgcctatttcgccatttttggcgcctattttttggattttttatttattaatatttttccttgagaaaagcagcacaaaaacaaaaatctttcactttttaattgtttttttcaatttttgggcaccccttttttatttctattttttaaaggacctggaaacatccggcacaccggcacggattgtcgaaatcccagaaaatgtgacggtggttgagggcgaattggccatcatcaaatgcgtcgtggagggcaacccggcaccgacaattgtgtggaaaaagggcgcccgaaaaatgccattgaccgacgaccgagtgcggtgccaaacggacggtgacacgggacatgtaagtggcaatttttaaatgaaatttttaaacacagaaatttaaaaaaaactgctgttttttggaaaaaactttttttgtgaaaaagtcatttatcataaaactgagaaatcataaaaaattttttgttttaatttcaataaaattacatttttcataccgtagccctcaaatggaggacaagaaaactttttactgtagttctaatcttggaagggatttttacggcactcaattaattaattaatgtagctcatttatttctaaactaaattcaaaacttagcagcaaatttaataaaaaaaaatttatcaaattctaaaataatgttaaaaatattttatcaaattaaaataatgttaaaaatattttatcaaattaaaataatgttaaaaatattttatcaaattaaaataatgttaaaaatattttcaggtttctctgatcatttccaaatgtcggccacaagatgggggcgagtacacattgatggtgaagaacgcgcatggcaagcacaangttggcgccaagctgcttgtcacgccagcggncgaa

SEQ ID NO: 71831 - DNA, 639 bp, Heterodera glycines
atggatggtgggccccctttttggaaaaatttttttattattaaaagtcgcgaaaacatgtttatgggggttttctgggtcggagaatccgaatacaacattcatttttaccaattctgaatcccggaccagaattcaaacaaaaaagtcgaaaattcaaaaatttcaaaattcacttttatgttcatatctatacagaataattatttttcggtgtttcaatggtttttgactggattcagcttgttttcaacaattctggaacaaaagtgagaattttgaattttaactttttgttcggattcgggttccccaaccctgagaacccccatagacaagtttttcacgagttttttgaacaaaaaaatatcttccaaaaagagggcccaccatctatagtattaactttattttgtttatacatgcataacattgcacttttgcagcaagagatgaagaaacactcaacgacccattgcagcctcaggacgcggagggcgatcactgatgagaaggcgggaagaaccactggtgatcaatcacaatctttgttgttctgcatattttcatttcatgttttgttattttttgtataaatattgcacgttttgtatttttttaggctccgattggattaaa

SEQ ID NO: 71832 - DNA, 59 bp, Heterodera glycines; identical to SEQ ID NO: 52421

SEQ ID NO: 71833 - DNA, 59 bp, Heterodera glycines; identical to SEQ ID NO: 52421

SEQ ID NO: 71834 - DNA, 59 bp, Heterodera glycines; identical to SEQ ID NO: 52422

SEQ ID NO: 71835 - DNA, 59 bp, Heterodera glycines; identical to SEQ ID NO: 52421

SEQ ID NO: 71836 - DNA, 59 bp, Heterodera glycines; identical to SEQ ID NO: 52421

SEQ ID NO: 71837 - DNA, 59 bp, Heterodera glycines; identical to SEQ ID NO: 61858

SEQ ID NO: 71838 - DNA, 59 bp, Heterodera glycines; identical to SEQ ID NO: 52422

SEQ ID NO: 71839 - DNA, 577 bp, Heterodera glycines
atgctcgaccaaatttataatttttcgctcagtcatcgacagttatttaattattttggaatttgcactgacattccttcgacaattgtttacattttggaaatgattaccatcataaggcataaacaattttcaaagtcatcattttataaattgttcttcatccgtaccgttgctgtaagctatttaaaaaaaatatttcaaaatttatgaaaaaatgatttttgtttaggatcttcttaatttagtgcctaataactttggcaatttgcttcctgcattctttggccaacaattgttgccaatttacagcaccgtaccaaattgggcaatcgttttcttaacctttttcgtaaaaactttcgaattcaaagtctcaaacattgtgacagttttcattttgttgaatcgtttcactgcaattgcatttccattccgtcacaaaatggtaattaataattagttaaattaattcgttattttttagttatggaaaaagtacttttggcatttaattgtgtttatgttgatcttaccaatgataattactgtgccaagcacaacaattattttttag

SEQ ID NO: 71840 - DNA, 1820 bp, Heterodera glycines
atgaaacgtttttccctctctcaaaattcttcctcctccttccccaaaaaatcccaaccaaataaatgcattcgtaaaattgataacctcacttcaaaaagtaaaaaatatcaactggtgcgctcaaaatccaagttcgtcattgaggaaattgacaaatgtgctgaccccgctgctgagctccgttcatgtgtgcaccattcgattgaggaagcaattttagatggacaaaacacacttggcgctgcaaataaggtaggtgtcataatttcttctgaacttttagaccagggtgacatcatactgcccattacaccaattaccgcaaatgtcgtggacgccgttttcaaccagttttgtaaagtggagcagagcaaatcgaaacacgtcaacttatatggcgctccctttataattaccgtcactgtcctaaacaccaatggactaccgcgacaacggacaacaaagggaaaagggcgaccacctgtctcctcacaatcgcacattttcaaagtcaacaacaacgacaactactgtcttttttacgcgctggaactgatgcgctactactctttgtataaacgaggaattatcacgcgtgataactggcggtggattaacaacaaccaaacaacggttttacgacaaaaggcgctacaactactccgcgaggcgggtatcccgacaacggagacagagtacgacgcagaagtttatatacatcaagtgcaagggttgtggaacgtcaagtatcccggtgagtacaaaatatttatttttaatgattaccagatgcgcccaatcaccaaatccgatatcaccgactaccagtttcccattcttctctaccacaacaacaaccactttgacggcatcaaaactctttcaaaatttttcaacaaacgttactattgcatctcctgtgaatctgcctacagtcacaaatttgaacactcttcaaaatgctcttcactctgtcacgggtgccgtgaggtgggcgttgactatccctgcgatccccagcaaggatacagcaaaaaatgtgagcactgtaacacaccttttacaacaacagctgttatgggcgccacctccacaaggatttgtgcaccaaatttcaacgctgcgaagattgtggggtaatttataacataaaggttcatgggagtgttgggcataaatgtggggaacagttttgtaaactttgcaaacaatttcatataaaagaagacgacgaagacgggatgaacccctgcacgaaatgcttcatccaaccccttaaacaacaaagaattaagtcatacaggatcatcgcatacgactttgaggcgacacaggacaagaaggtggagaaccgtttcgaacacgaggtcaactttgcagcggctaccatcatctgcaccgactgcattatcaacggctactggaacaaatcacttcagggaaaaaagtgccaaatttgcggtcctcaccgctcaatcaccttttcaccctttgactacacggagacaacagtcgaccaaaaagtcgtcactcaacaaccgctgtgcgaattcgtccagtggcttcttttcgaccacaacaaaaagtttccaacagtcgcgtttgcacactttgggggccgctacgacatgacgatgatcatcaaggaagttttgtcgcaagggattcacaacccggacatcatcaaacaaggaaatcgcctctacgagctgaaaatcagggaaaacgagcatggcccactcaccatttttcacgacagctacaacctaatgcccatcaaactatctggcctcatcaaaatagtgggcttcatataa

SEQ ID NO: 71841 - DNA, 569 bp, Heterodera glycines
atgccgaaagttgcccaaccgatggttaagaatgttgtgaaaaaagggaactcgaatgcgttcattgtggtcacaaaggaacgtccttttttggtaatgaaaatttgtattgtacttactctataatcttatttacacttttagtggaagactgagaccgaattgaagaaaaaaatggagaaaagggttccaattggatttatgcctttgaagaaggtattagaaatatcaataaattcagaactaataaattaagaactgtgcaaaaaacttggaaaagaagtcggcaattttgccgaaatttgacaaaacaatgcaatgggaaaccgcagacgcatgggaaggagttgtttttgttgaaagaaaatttgaggtttttgttataaattaataaatcaaatttttaaattaaagactaattttaactgtaaattctttacatttaagcctatgtctacaaattttgcaaagaagacattttactcaaacacaattgctgccgaacctaactggcacatgtatatcaaaaaattccattggtaaactaagacaaaggaaaagtaaataaa

SEQ ID NO: 71842 - DNA, 576 bp, Heterodera glycines
atggcgcaacattcggccatgcgatttgtgatggcttcggaacaatctgatgtcatttgtaattaatactatcatatgtaaagggtttttacagatcttggtgcatcagaattttgggcaatcattgtattttcaatgctttcccagcggtccaacaatcgacgacggagacacccgatgacgtgtccgcccatggttatgcctgcaccaccggcatccatgatttcggctatcacaccattgatgtgtaacagctccgtcacattgtcacgaccctttgatagattttagtcaaactatttaatagaaatttgttaagaatatgaaattttaattacttatttcattttattttttattttcaatttgttacatttagatgaatattttttattaatattttttattaacctcaatgggctttgacaaaatttctagatcgtactcttcagcacacttaagatccagtttgtgaccgcagatcacgagcttctttggagttatttggacaatcaaataacgcatcttggcgaagaattttttggagatagaaagggaggaatagctgatatttag

SEQ ID NO: 71843 - DNA, 180 bp, Heterodera glycines
aaaactctaaatatcagctattcctccctttctatctccaaaaaattcttcgccaagatgcgttatttgattgtccaaataactccaaagaagctcgtgatctgcggtcacaaactggatcttaagtgtgctgaagagtacgatctagaaattttgtcaaagcccattgaggttaataaa

SEQ ID NO: 71844 - DNA, 659 bp, Heterodera glycines
atgcgcacccgtccgatctggcaagttaagcaacgattgctgactagccaaaaggttcggtgccgtgatgaaacgaaccagcactgcttaccccgcggcacccggcacggtcccccgaaggaatggatttaattaaattctctccttcggggatttttttccattaggtcgtccgttagcgttcgattgctctagtcaatttttcaaaatttttgttgaaatatttgtcgtgctctgaagggcgtgggagggggggggcgaaggcccaccacgaggccgcgaagaggccgagtgagtaccttcggtgcaggaaaattattaaattttaaaattttttaattgctttttaaatatgccaaaaaatgtaggcttaacttttttagtgaaaattcgatcactcatattttttgctaattgagcagaagcgtaccaaactttgcagggatactccccggtaaaggactaacttacactgaaatgagcgccgagctagctggctcaaaaaaatttttcgaaaatctgagtctttcgtttttatttatttgcaaaattaattcataaatattttttcagaaagggttctgaaacgcaccaaattttatttacatgttagtttaggcactctgatgctttttctatcaataatggaggtgaataaa

SEQ ID NO: 71845 - DNA, 563 bp, Heterodera glycines
cccggagttgctggcccagacggtgtccaggggaaaatcggactgcgcgggtcggacggaattccgggggcaagtttggctgaacaagaatggtgtgtattttcattaaaatccgaattttatatgatttgcattcgcaggtgctttgactgtcctcaagcaccgcccggcccaaaagggccaaagggaccgaaagggccgaacggagtgccgggactgccgggaagagcgggaaaacgttctcaaattaatttatcccttaattatatgggtataagtttagccggagagaaaggccctcccggggtgcccggttcgccaggattacccggattggtcggtccgaacggtccgcccggcccgaaaggggagccgggcaaggtaataagaaaataaggtgattttttaattacaaaataaaaacacccatttagctgaatgatctgccggcagcaaagggtcccacggggcttcacggcctcgacggccctctcggaccccccgggccagacgggccctccggcaaaccagggccaagtggaccacccggacaactcgtttga

SEQ ID NO: 71846 - DNA, 652 bp, Heterodera glycines
atgtcaagtggttggaaatttgtgctttatttcctcctgctgctgctgctgcttgtacaattttttgctaatttgtcaaacaattaataaacaaatttaggcctcaattacaaaagccaaaatttttgttgataagcaacctgccattgaactgaatgtgattgttgatgatcgcacgcctacgcgtaaaaaactaattaaatttaattaattatttgaaaaattttagtgggagccaaaaatgatgaaaagccggcaaaaatccaagttgataatgagcaacaaaagcgtgaagaacgtggcattgaggcgctgccttttttgtttaacaaaaattgtgaactcgacgatttgatatgccaacaacgtgaatgtaggaaaatattatttcatatcatataaaaagggtgggatacgaccgaaattgaaaattcgaaatagggttcaacgtcgggaaaatttgcgaatttgcaccaaaaaacccagaatttgactaccttttttaagggcttaaactgagtcttaaattttaagacgaaagatagggaaaggcaaatatgtttgaattttcattgaatttttagagaaagttggcattatttccagcatattccctcattatgtacagaaccaaatcccacattttacttaa

SEQ ID NO: 71847 - DNA, 304 bp, Heterodera glycines; identical to SEQ ID NO: 69803

SEQ ID NO: 71848 - DNA, 108 bp, Heterodera glycines
atgactagagcaatcgacgctaacggacgacctaatggaaaaaaatccccgaaaggagagaatttaattaaatccattccttcgggggaccgtgccgggtgccgcggg

SEQ ID NO: 71849 - DNA, 73 bp, Heterodera glycines
atggcaaaaacatttggacccatgggacaaatgccgcagcagaaacagcagcagggaaagtgccggccgatcg

SEQ ID NO: 71850 - DNA, 1560 bp, Heterodera glycines
cgttgggcactgattctgctcaactacgacttctcgattgagtttgtcagaacggactgcacaggacaagccgatgctttgagccgactgatcagcgaccaacgatcatgctctaaagacgaagacgtcgtcattgcaaaattgttggccgacacggaagcagatgtggcacatgtattcaacacgcaaacggaacaattgccactcaccgcaaaggaaattgccgaggcacagctcagtgacccgctgatcagagaagttttagagtgtacaatgggacggtggccaaacaaaggccttaatcccgaaataaaaccatattttactgtccgaaacaatctgtccataatctcagattgtctcgttttcaacggacgtacgatcattccacaggcactgcgcgatcgaattttgaaggcacttcacctcgctcatcctggcattgttcgaatgaagagcttagcccgagaattggtctactggccgtcaatggacgccgacattgaatcacttgtcaaaagctgtgttccatgccaagaagccgccaaacaacccacaaaacatcctctccaaccatggccatcaacaacatccgttttcgaacgtgttcacattgatcttgccggaccatgcagtaatggtagaacttacctggttgtaattgacacttattcaaaatggccagaaattttccagttaaacaatacttcgtctcattcagttatttcacagctacaatggttgttcgatcgttatggtgttccaaaaacgcttgtgtctgacaatggaccccaattttcgtcatccgtttttaaggaattttgcaaaaataatggcattaaacacattttcagcccgccatatcatcctcagtcgaacggagcagctgaacgctacgttgactacttcaaacgccaactcaaaaaatgcagtggtgaccgaaattggcttagcaaatcacttctctcatatcgctcaacaccaattgctgttttaggccaacgctcaccagctgaattgtttttaggccgaaaattgcgcacaaaattgtcactcatgaggcccgaaaccattccaaagcaacaacatcacgaacacacgtccaaaatgaaattgcaatttgacaaaaagcacaatgtaaagccggtacagtttaaaattggagagcaagtccaatttctcaattaccgaaatggcaaaacactttggctttttgggcgcattgtttcaaataaagggcttatttacgaaatccgttcccctcagcttggcaatcgaattgtcacgcgtcatgccaaccaaatccgaacaacaatggcacagagaggtgacgaaacatgtccggtcgccgatgacatcatctttgcgagggaggagcatggaactggaaatgaaacgacggacgatcaacagacaaacacgcagccacaacaacgggcagcgcaacaagaagaacaagggcaaaaccaacaaccacttcctttgcgtcgttccgaacaaacgaggaaacgtgttcgttttcttagtccgacgcacactggacagagttacgatcactga

SEQ ID NO: 71851 - DNA, 1339 bp, Heterodera glycines
agcaattgtcgtacgatctgatcaatgtcatagaaaaatgtaacagagaacgcattgaagttgaaatttctgaagatttggtctatgatgagtttgctgaaattggtggaaaggaagggagcgaatcggatgatgaatttgaaatagaaggcgaaagtcaatttgaaagtgaagaggaatcaccaacaagtgatttaaattactgtatttaaatatagtaaatttaatcagaatcatcgtcatcttcaaattatgtgccatcaccaaaaaaagtgatgtctcctcatatcacacttgaagacaaaaagaaggcccttattttttatcgaagtgctcaaaaaggatatagatcactaacggcaatgtcaaaaaactttcgttggatcaaaaaagaatctgatttaaagaaacttcgaaagtaaaattgaataaataattatataaaaaaactttttagctttgaaatcaacatgaaagacaaaatatcggcttataaaaatttggatcatctgctttttgagttttttatcgaaaaacggaaaatgaatttgccgatcaaaaattctgaccttcgtcgatgggcattacaattaaataaccaatcaggaaataaagtttctggatttaaagctggaatttattggctaaaaggatttaaacggcggaagcacattgtaacacgaaaggtacaacaaatttttttgttggttttttagtataatttttagattaccaaatttgttggcaaaaaatgggcaaaagaccaagaaaaaatatacactgattcggcagaatttgtttctgataccaaaacactcattggaaaagaacaccctgatttggtccttaatacagaccaatcagggttcgaattagaacttcattcaacacatacgctggaaatatccggcacaaaaaaagttgaaggatatgttcagagtgttggatcaactactcattcctacacaatctgcccaatattttctgctgatggacttttgtatagtccaatgttgattgttattggagaaaaaagcggagtttttccaaaaaaaggcattttccaggcaagaattttttaagaaatgaattattttaaaatttaaaggctgaaaatattttgtctgttgcgggacgatctcatataatgaccaaagaaattgccaaaaaatttgtctctgatgttttattgccaataatttctggcaaaaaaaccgttttgatccttgattcgtggccaacttggaaaagtgtgattggagaaaaagagagcacttccgagcggatggtggtggatgacattcgcattcaaacaattccaccgggatgtactgggcta

SEQ ID NO: 71852 - DNA, 488 bp, Heterodera glycines
atgttggcgggtttgacaaatttgtacaccgactattggatctcagcagcaatgagaaataacaaacagaaaagagggagaaaagggcgttggctttggaaaatagctgataaaaaggagaggcgagcagacgatgagtgagataaaaatagtggcaaaaatggacaactgctgcattgggagagtcataaaggggacacaaagtgttcgcacagcatcgaatatttccttcattttaggcgtcattcttccccactgcacttctttcttcggtttaattacccaagtttgaggtacttggcgtgtcctgcccataatatctgtggcatggaataaattttggaactgcgctgcctaacggcggtgcttaaagtgcgctaaaaatgatcaaatgattatcaatttttatttttcttaattccaaaatgaattcgaaacgcaaaaatttaatcataattcatgtggtaaaaaatgcatttaaaaataaa

SEQ ID NO: 71853 - DNA, 82 bp, Heterodera glycines
gtatcctgcccataatatctgtggcatggaataaattttggaactgcgctgcctaacggcggtgcttaaagtgcgctaaaaa

SEQ ID NO: 71854 - DNA, 359 bp, Heterodera glycines
atggcaggaaatctccaaagaagtgatcatcaaatcattaagggtcagttaaaaaattaattcaggaaaaatgtctaaacttttaagtctgtgggctgactacgccattggacggaactgaagacgaaaaaattgcttgcttcaagccggaaggagcaattggaccgatagggatcaaatttttgcgcaagtttaggacaaatgaaacggcgaaagatggacgaaacaatcacgaagaagacggcttatctgatgacgatgatgcaggctggatggagtcggagatgacgacgaattgttcattttttgagccccttttactgttgaatttattttaatttttttggaaaatgtgccaa

SEQ ID NO: 71855 - DNA, 304 bp, Heterodera glycines; identical to SEQ ID NO: 56071

SEQ ID NO: 71856 - DNA, 304 bp, Heterodera glycines
aaaatttcctcaaaaataaaaggtttattgctctccgccctccctatcatgctcgagagcatttgtatgtgtataaaatttatcaaaaaaagagatagccatttttctgggataacctgtaaatataaaaatcctctgtgaaataaaatgtcgattgtgcacagccctccgtctcatacgcaagcgctttagtgaggtataaaatttctcaaaaaaagagatagccatttttctgggatagagtataaatttactaattccctcaaaaataaaaggtaaattgcgctccgccctccctatcatg

SEQ ID NO: 71857 - DNA, 452 bp, Heterodera glycines
atgaattcccagcagcgccaggcagaacgtgcccaactccgtgcaaggttaaacttacttgtcgacgaggtcgactttgtggtccaagggctgatcagcaattatcaggccgatggattgatcaacgaggtaagttttctttattttttatgctgtttttgctttttttgaattttaatcttgattgaacaggcgccgcatgagggacagctgatgggcatggaccatggacaaggtctacagcatgagcagcagcagcagcagccgtgggaactggacccaccaatgcctgcacagcaattcgaaattgggccacagctcccggatgcgtgggaactggttccctaccagccgacaccacaatgggcccaagttgcacatgtggaacaacacccgcagcagcagcaacactaccacccaccagcacaacaacaacagcagcagcaaggcgc

SEQ ID NO: 71858 - DNA, 1061 bp, Heterodera glycines
  unsure (1)..(1061): unsure at all n locations
atgttggatgtgagcgggctcaccgaagcggatcaaaagaagaacccgggcgcaattgttcgtgcattgaaattttacgctgccgcggtcaaacaacgggaaaatgacaaattcatgtacccacaaaaatcggtaaatttttcataattttcatggattttgcattccaaacccattaatatcaatcttcacatagttcagtaactcaaaagccttaaagactatgattttaggattcaaaaatccccgggtttttagactaaccatccattatacttttcaaaaaactctctgaatcgggaatcccgcaacattccccgaccgttcctgataaaacactcactttttagcaatcatggttaggtttaatcagttatttgactccccaattttgttacccttttttctaattagtcccctaattggagtgcttcctccaactgttaaatttcgtccggcatttttttttgttatgtttccaaatacatttttaaggtttatcccgtctccgaggatgacattgaaacggacgaatttgaatttgcgtccggctccacgaccgcgtcaaatggtggtgcaattccgcgccgcagcagcagcactccgcaccaatgcaacagcgaaagttgcggcaacatcaacagtggccacgctctggagcagttcaatgcgacatggtattatgacacggatgagtcggcaaccgtcgctgatcatggtaaggacacacactggccaagcagggacttggcaaacgtgtcatgtcccgagattattgggtttgttgttttttgcaagggcttccaagtgtccataaaaccctccaaaatgggagacacttcgctccgaggaggggccggtgtaaaagaggttgcggcgggtgtggcgaagtcaccgaccaatcgtggaaaaatttgctattttttcgataaaaattccattaaaattccaacatttttccccgccgtcgcccgtcattttcagaatttttttttgaaaattggcacgctgcaaaaagagtttcaaaccttcaaacttgccaaattgaaccgcanaattag

SEQ ID NO: 71859 - DNA, 1257 bp, Heterodera glycines
ttcgttgaacactcaaacgtacccgaacaaactgtggcacgaagggcgagtgccgtacatgcttgaggagggaatgagtgcgctgtgagtgaggggttggcactacggagacaaatggactcatttccagtcaaagagccgccattgccagcgcatttgacgaatacaaaggcaagtcgcaatttgcaagggaaggattggccaaacgaatgaaagaaagggccaatgccttaaggcaaaacgtgcattcgcttcgtcccgagacaaagtacagaatccgacttcatttatgtgagacggaacttcgggttggggtgcgtaagccgtggttttggcatgaaaagcggcggtcggtccctttgtcagatgctcttcgtacgtcggaagagcggggggaaatcagacggtgtctttggagttggacaaatgcttctccaagggaatcattgcccacgaattggcacgtccaatcaaactttgccaccgattcatcccccccccctcctctgttcagatgcatgcgttgggctttttccacgaacattcgcgcacagaccgagacgaatacgtggatcttttggaggacaatgtgcggccgggaatgctgcgaaacttcgagaagtacccaaagaaaatcatcgaccctcttgggatgccgtatgactacggctcggtgatgcattaccacaaattggcattttcacgcaatggaagggcgacaattgtgccggtttgggaaaagggagggggcattctgacaattgcatttgtaagaagtcgaaaagcgtggaaattggacaaaggtttgaagggaaatttggcaaagaaatcagaggacgaatttaggcacaaattgagtgaaatcgatgcgatgaaagtgaacaaattgtaccgatgcgacagcgaaggcccagcgacggaaacgacgacgacggcaccgaagcggacaagcgaaacgactgcggaaacgaagacgacgccggaggggcagacggaggagcaaacgacgacggaagagagcgaaccaacgacgggggaagaggaaacggcagagcaaacggaagagacgacaacggacgacggggcaggggcagagacggagacgacgacggaagagacagagagaggcacaacggaagagacagcggcaacgacagagacggaaacggagccagagaaaacgacgacgcatttggcattccgaaacaaaacgaagccaaaggagaggagaacgaagtggccaaatgtggccaagaa

SEQ ID NO: 71860 - DNA, 178 bp, Heterodera glycines
atggatccgagaaacggcttttacgacaaaaatgaggacaaagtgactttggccattgatgtcattgtggggcaagcagaaatggacagagcaatttccgctgatcagagcaaatcgaaagggacactttttatggacattgaaaaagtgtcacaatttgcgcgagaaatcatttgga

SEQ ID NO: 71861 - DNA, 304 bp, Heterodera glycines
taattaaatccattccttcgggggaccgtgccgggtgccgcggggtaagcagtgctggttcgtttcatcacggcaccgaaccttttggctagtcagcaatcgttgcttaacttgccagatcggacgggtgcgcatgattccactgttccaagcaccccaccaaaagcaaaacgatataaccaaaatataaggaaaaattttttaaaaaattttttctccatcttcgtttttgatactaaagcatcagagtgctaaaattaagtaaagataaaatttggtgcgctttagagcactttctgaaaaa

SEQ ID NO: 71862 - DNA, 1620 bp, Heterodera glycines
atgtctttgtctgtggttgatcggatgaagcggatgttgagcactggagaggacgcggatgtgcactttttggtgggggaaggagaggaaaaggaggcaagtttgaaaataaaagtatttattaattaatttttatttttatttaatttttaaaaaaacctttttaagagagttgcagcccataaagtaattttgaagcatgcttccgaagtattcgaggcaatgttccgttttgactcacagaatcaaaacgtagaaaatggtaaaaatttgatgaataaattaattggtcaattaatttattagcctgcgctaattgtgttgtggaagtgcccgatgttgaggcagcagcgttcaaagtgatgctcagcttcatttatgccgacgatttgagccaattggacggagacaacgcaatggcagtgctttacgctggtcaaattgtttttgtgaaattaatctaacaatttaattattcattaattagccaaaaagtacaacatcgttggcctggttgtcccatctttgcaaattccaatttcaaaactgcacaatgttttctttgcctatgcccaggctcagctctttgaattagaggtgggatgacagagcactcaaaagcatcactctttcaatagattaaattgtttataaaatttttatattgaacaaattcagaaaaggcaaaaattatgcatcaattattttgaaatatagaaatttaaaaattcagtattgggtattgcgagtttcggaattttaaggaggtcggattatggcgatttttgtaccatgcgaaaatatcgaaatattaattatttagttttttgagttaagaactttgcctatcattgtttgttttatattgatgagaatgcggacactttgctcaattcggtggcatttttgcaaattgaccaaaaaacgttgtgtgaaattttgagtcgtgacgaattgcaaatcagtggagaaatttcaatttggaacgcagtatgatattaatttatctaagaaaattacgttgatattttttggctatccgttgggctgacgagaaatgccgtcaaaatgccgttgagtgctcctctgaaaaccgtcgtgccaagctcggcccagcactgttcaaaattcgctttccgctcgtgtcaaaagaagaattttcgagaaatattggtaagaaactaaagtctacaaggaatttaagactttaaatgttcgaaaatatattcccattaaattaattaaaataatttaattaattccgtttccaatttatttatttttcagttccgtccggtgtgttaacagtggaagaagtgatcggcatttatcagtttcattgtcatccgaatttgcacatggtttccgagctttacccattgaaatttccgaggcagggaagaatttcggaccgaacagaagggacacttcagctggaaattgaaaaaatgtcggaatttgcgggcaaagttatggggagctgccgatacagcaaaactgtgcacatccgagggcttccatttgaaatacttgcaaaaataaatgcgacgacggaaaacgatgaaaattttgttgggaaatggctgggcattttcctttggtgcacagcgccaacagaag

SEQ ID NO: 71863 - DNA, 950 bp, Heterodera glycines
gttcgtcaagcgtatttaaaatggccaagcgctatcattccatacacagttagccaacaatatttgctgtatgggcgtgatcaaattgtgcaagcaattgatgaatattccactaaaacgtgcattaaatttcgtcccaaaacacccagcgatatggattatgtaaagcaaataaattataaattaaaaaagatttaaatcaaataaaaataattttttttaaattaaaatcaaataataaatatttatttttttaaagattcacatttttcctgatgatggatgttattcgttggttggaaaagtcggtggaaagcagccggttgttctaccaaattaaaaatttgttttttataaaaatgatttttcaggtaagccttggagatggatgcatgagtaaagggattatgtaagtacaaaagattaacaaaataaattacattttttaatttttttttccattattttagaatccacgagctgatgtaagttgtattagatttgaatgaaaattaaaaaattaaaatatttttgaggcatgctgttggcttttttcatgaacaaagtaaaaaataataataatttttatgcaagtaattaattatttaaaaaatgacttttttaaggtcgcagcgatagagataattatgtgaatatcaaatgggataacattgatcaaaatctgcgtgatcaatttgacaaatattcccaaaacatgatcgactttttgggaacacaatgtaaatttaactttattaaaatttttgctacaagaaattcaaaatctttttagatgattatggttcagtgatgcactatggaccatatgtgatctttgatttatcagataatccttttaaaatttaaatattatttaggcatttaccaaaaatggaaagccgacaattcaaccaaaacagcctgggaaaaccattggacaggcaatttaa

SEQ ID NO: 71864 - DNA, 304 bp, Heterodera glycines; identical to SEQ ID NO: 55978

SEQ ID NO: 71865 - DNA, 384 bp, Heterodera glycines
atgacggcaatcgcagcagtatcgccaccctttgagtccgcaagccgaaatggcgctgccggcaccggtgcaggtggttgtgttgctggaactgctcgccaccgacaatttgccgagtcgcgctcactgtccaccgcaacgaattggtgcaaaatgagaaatgcaattgccgaagcgggcaatggcaatgatggtggtggcgtggaagctctgctgctgacgaagaggacgaaggcggcggcacaaatgccgaattgtgccgctccatccacaaaagcggcgacagcggacaaatgccacccgattacgacaacagtggcgccggaggcggtaccgtactaccagcttaacagtgccgaaaatgtcaatggtgaagcaaattga

SEQ ID NO: 71866 - DNA, 49 bp, Heterodera glycines
ggaagctattcccgaaggattcggtctccccataaatctggacgcatcg

SEQ ID NO: 71867 - DNA, 109 bp, Heterodera glycines
gggggacccttttgttttgcaaagtttttttaagataaaaaaccataattttttatccggggttttaaaggtcgctaatcacgaatctgacatgtattttgactaattt

SEQ ID NO: 71868 - DNA, 1168 bp, Heterodera glycines
atgtcaaacattgcctttataagaattcaaaaagaatgcaaagaaatcattttatgtaaagaggtaattaaatagaataatccaaaaaagaaccttttttacagttacaagaaaatggtgtaacaattgaacctgtaaatgagacgctttttgaaatcattggaaagatacgaggtccaccaggttggaaaattggactttttagttaattgtagaattatttcagatagcccatacgaaaacggaatatttattttggtacaacttaaatctttttttttaaatttattttttggtaatactttggtttgcccccccccccctattttcaaaaaattattttttgttcgcgatcagcgaccccggaatgtctctgaaacattttatttttatcttttgaataaatcaaataattgaatggcgtgaaacaaagtattaccattttatatccttttgttattctatttttaaggacgttaaaattccacaagaatatcctttccaacctccgaaggtttgatcgaataatatacaaaggcaagagagtattttttacttataggttaaatttactactcatatttggcatccaaacattagttcgcagactggtgctatatgtttggatattctcaaggaccaatggttttgtgtgtttatattcacattattcaataaaatacgatttagggcggcatctatgactctccgaacaggtgaaattaatttaatataaaataatagggagtttatagcttctggactggttgttctctttagtgcttctcagtgtgcaatcgttgttactttcaccggagccaaaagatccacaggatgcaattgttgcgaaacaatgcttaagtgaccctgcattattcagagtcagttgttaccaacctttgaataatgacttggtttgtttatctatttaagtccactgcaaaatattgggcacaacattatgcaaacgctccgggggaaatagacagaaataaggcaaaatgtgtgtccacattacaggagatgggagcaagtaaggtgaacaagcaaaatcaattcaaagcagcactcgttttaatcttcatcttcattttaggacgccagtatatccgctttaagctgctataattggaaccttgcaaaagctaccgaatttctctttacataa

SEQ ID NO: 71869 - DNA, 856 bp, Heterodera glycines
atgtacaccggagatgctgcaatttcggggtcatctgcacaacaggcaaaaacgggcaccgaatcgagcacgagcaagccaaaggcgtgctgcgtctgcaaggagacaaaaggggtaaacggggagttgggtataattacacactcaaaattcatcattcgggaattgtagacctcttcccttcccacattccgagctaaactcggaaaatcataaattaaataccattagatagagcagagtcgacttgcatgctatttttaattttagcggtgtctggcgcctatttcaaatccacttgcctgcaaacacttaaaattttagggtttttgtgacggttgatcatgaatatggcatccatttcgcccaattctgaatccttgacccaaacttgcattttttaatattctatttttaagcatttaattattaacctcctacagctttaatcgcacatttcttttttgaattgatgtaaaattatttgttctagttgggtcgggggttcagaactagccgaaatgaatgtcaaattcctgaccaacggtcccaaaaactcaaaataaacacaagacgaccttgatctatccaatggtatattaacttatatggggtttcaaaagttacacctcggaatattcccttttaagcctattgtacgaattttttgcaccaattttctatgtactaattttcgaccatttttattcggaactaaatatggaattggttaagtaaggtgttacctaagtccattattcagaagcgggacgaatgtattattctgaacggtgaagagaattgtggtcaactgatcgaagcacacaaaaaatgcatgagagaatatggatttgaa

SEQ ID NO: 71870 - DNA, 186 bp, Heterodera glycines
  unsure (1)..(186): unsure at all n locations
acggggtaaaatgcgcaatttgcgtcaaaatatcattgaacacttcactagtcaacccgttcaaagagtgtagtcaaatgctaccgttatgttgcgtgtttttagtcgatgaactttgaggatgggtcttcttattaagatttgtgtgttttctncccttccttttatttaaaggttaaaggatta

SEQ ID NO: 71871 - DNA, 1685 bp, Heterodera glycines
atgagtaaattttaagctgtatcgtgtttttttctcctaaaatgctttttaataccacatttagccatttttgaagattttactttatgtttaacaaatttgaagaaattttgagaaattacaccctcaattggaaaattttatgtgcatatttttcactttttatgtgcatatttcacgatttttggtgcatattttatgcgcatattttgcgattttatgtgcatatttttgccaaccctaaagattaggggcgacatgaagtttgggcactgggaagtttgggcaccgggaagtttgggcaccagaggggggatttcaaaaaaataaaacaaaataaataaataaaatgttatataaatcattaaaatttagtaaattttagcaacccttttttcttaaaatttatatgttcttgaaaatcaaaaaatttatgtatgggaacctggcaatcttattatttaatcaattcttacggttgtttaaacgtataattaaacgtgtgctagtttctgtttggacttatacctgaataccggcttagttgggcccgaaataacaagaacccgtctaattttgtttaaactcataaactttaagtcttgaacatactgagccttgtaatgttataagttataaataatacatatgtatggcattgatattgaattaattgtaatgagtttagcaaaataagcatgcttaatcgaatgaatattcgttaaagaactttctatttcctaacttgattaaattttctatgcttttaattagatggttgcaattcatagacaattaaaaaatatttttattttttaactctttaagttggtgcacaaacttcccggtgcccaaatttctggtgcccaaacttcccggtgcccaaactttccccgccccccttttgttggattggtcaaaaataagtgacatattcataatcagcgacccccgaaaacccctcaaaagagtccccctaagggtttttagtaaaattacattatttttcgtcccacctaaactataaaagttccaattactgtatttaaggaattaattctgttcattttcaggaagttaaaaagaactccattgaactgagtctattcgaatacgaccgacgctttgaacagaaatttccgcaatttttcatcaattatgactaccgtaaaccattggatgtgccttccaatttgcatcacaatttcgattttttgatagctgatcctccatttctatccgacgaatgttttattaaaattgcccaaacaattcgcctgctgtctaaaaaagagaccaaattgataatcaacacgggcgctgtaatggaaggactgctccaacggattttggatgtgagaaggactgaatttagacccgtacacaagaacaatttggccaatgaatttctgtccttttcgaattaccctttatccattttgtaacttattcttactttcttttttgtaatttaatgaaattaatttaaattctgtgtttttattttgacattgttttttaccatatatgtatttaattttttcaagacaatttatattcataatttaagcaacaaaaaaaggcatttttgacgctgtgattccgatggcatacggcactgttcagcaacagttgtgggccgagttgctctgttgttcaaactgcggaaatgtatgagttttaaa

SEQ ID NO: 71872 - DNA, 623 bp, Heterodera glycines
atgtacgagatgaaagtgcggaagcagaaaaagcgaaatcccaacgtcgtcttccgagattctttcaatctgatgccgtgttcattggctgcgcttatcccttcctatgggctggacgtggaggacaagccgttcttccctcatctcgccaatagaccggagaactacggcagagaaattcagcctacacctgacgactacctggctaacggaatgatgcccgggaagaggcgccagttcgacgagtggtacgccgagcaccatcatgagcctttttggctcgatgaagcgcttgccaggtaatttctttatttttatttaattttttattgttgatttttcagttattgcacgaacgatgttgaaatcctgatggcagctctcgtcgcattccgccgtgaattcttcgagatttcgcggcgacaggagtacattgatggaattgacgacagggaaaaccatgacggcatcgacgtactgcgcgagtgcatgaccatcgcgggagcgtgcatgcggcatttccgcacaaatcacctgccctctgaacatctggccatcgtccctgagcgcggctatgacaacgcgcagaaccagagcctacttgcacttcgcttcttccactg

SEQ ID NO: 71873 - DNA, 364 bp, Heterodera glycines
atgcagaccagatacgccagctctgtccgtttccacctcatcggtttcacgtcctctttaactctctcttcaaagtgctttgcaactttccctcacggtacttgttcgctatcggactcgtggccgtatttagtcttagatgaagtttaccacctgatttgggctgcgatcccaaacaacccgactccaagacacgtaaagatgggtaggcaccgccagttggacaggtcttgcaccttctctggagccccggtcaagggaaacttgaacaagcgggccaacccaagctcacggtctatacgctacacctcgcaaccccagaggagctgcgattcagcgctggactcttcccagttcactcgcc

SEQ ID NO: 71874 - DNA, 524 bp, Heterodera glycines
cattcccatcactgggactcaacccaccagcatttcaatcactgggactcaactcaccagcatttcaatcactgggactcaacccaccagcatttcaatcactggcactcaacccaccagcatttcaatcactgggactcaacccaccagcatttcaatcactgggactcaatccaccaacatttcaatcactggtactcaacccaacagcattccaatcactgggactaaacccaccagcatttcaatcactgggactcaacccaccagcatttcaatcactgggactcaattcatttcaatcactggcactcaacccaccagcatttcaatcactgggactcaacccaccagcatttcaatcactgggactcaacccaccagcatttcaatcactgggactaaacccaacagcattccaatcactgggactaaacccaccagcatttcaatcactgggactcaacccaccagcatttcaatcactggtactcaacccaacagcattccaatcactgggctaa

SEQ ID NO: 71875 - DNA, 709 bp, Heterodera glycines
atggatgtgataaatgaaagtgccaattcagaaattcgtcaaaaactcattcaaatgccacaaggctccgctgatcaggcccagccaatgtcagaagggacaataattatcgatttggaacgaactggatcaacaacaacaattgcaaatgaatttgcttcaatcccacaacatgatcaaactggaacaaatgataatgcaaacccaaatgatcaaacaaattttgttaatccaaatgatcaacaattggtcaaaccaagggaaactggtcaattgatgccaatgaccgctgataatttaaatttggcatcccttcatgaagcggataatgttgaacaatttgtgatgatccctaccccaaatatgcgacaaatcaatgcggaaaatcgcgtcaattcaaaacgcaattcaaaaagcggtgaaaaaactgattttggcgctgccgaaagcataaatgaggcttctccgtcaactgtacaacgaaaacgaggacggtcaaaaacgctgaaaatccaagacaaaaatgcagtgggcaaatcaaaaatgggagtggaaaaaccatcgatgaaatcggcaaagggcaaatcaaaaatggtatttataattaaatattagaaatctaaggtgattacataaatgttgttgttgcattcctgttttaaaagataggctaacatggtttttgttttgttgcacttttgaatggaaa

SEQ ID NO: 71876 - DNA, 759 bp, Heterodera glycines
atgcctttcttcttcttttttctggagttcgccaaagcctgcggcggtggcactgaattaataccattttttggctacgctttgcgcatcgttgtcgaggcgcccatcgaattggggacggacacaaaaacggaggaggacgatggccaacagcagaaacaatggggcgagtgcgcaacttttgggagtggaaagacggagaaaggtgggcatttaaaagcaaaacatttagtcaattgtgccattctcgcaattttcagaggccgaaattatcttcgaaaagaattcccaagaagcgccggcggagacatttagggacgaaccgttcttcgaatttgtcaaggcaattgtcagcgtaagtttgggaaacagaaagatgacgaacatataaatgggaatgtaaaattttaagaattttttcgacggttggggcaccgaacgctttcgtcatgggcgccgttttgcgggcggcgaagcggcacacgggggaagcaaacgggccaaattctgtgcaaaacttcgcctcaaagtgggcaagggatggcgcctggaggagcatttgtttgaagagttggccaacaacaacacgggcgaagtgctgcgcattttccaagtgccaattgccgaggacgacgaccaaagcgaagagggaaaattgtgagcaaaaaatgggggaacttttggttgaattaagaaaaaattcaatggaaaaatattgttttaaattaattttggttgtattttcagggttctcattga

SEQ ID NO: 71877 - DNA, 1099 bp, Heterodera glycines
atgagaaggtcacaaatgctagcaagaaacgaatcctttttggagacactgtgtaatgccaaaaaggcgaatgaccttattcgagacgcaaccgatgagcaacttttgtgcctagtcgaaatatgtctcaacattctaaagggtcgggttccattgcgtactcggcatttgaataagctgaaagctcatgcacaggtgcttcgtcgtctcgcccgcacacgctgctcgcgctctgccaaaaaggttttgctacagcacggagatggcctcccagctattgtggggctcattgcgtcaattgctcttccgcttattatggatgtcattgaaaattataaataaggtgcaacaaagtaaaaaaaaaagaagtaaaatgcagcatacaaagcgctatttgtttgtccccgaagaaatttatcagagtttggcatcaccgccaccgtctgacggaacaccaattgggctggtacgtaacagaattaaacaaatcaaaaacgatgacggcataaatgaggcagaacgggcaatcaaatatgagcaggaacttaagcgtctcaacaagctgactcgggacgaggatgaacgtcccgtgggtgttaaattagaaaatttgagtgatgtggttgacgctatgccaaaaccagtcaacgtcaaaagaccaattgttgtcgctacgcgtcgccatttaaaggttgggcgtgcgcgaaaagcaaatgttgaacaactagaagatgttgatgatgatgatgatgatgatgaaactccaaagccatcgagttcaaataaacgacaacccacacaaacggaaatcttaaaattaatttataaaaacgcccaatctcttggagtgtctgaggaaggacaggtcttgagagcgggtgggcggccttttataaccagcagtgtttatgacattgttagtcacctgatgaacaaggacaagcgtggccaaaacaaagagacaactgcattcaaagaatttgttgaaagggcaagacagatcccgctcttgagtaggcacttatttcccgaaggccaatccggcaaaggcatttataaaaacaccacactgaaatttaatccatctttatggatttga

SEQ ID NO: 71878 - DNA, 956 bp, Heterodera glycines
atgtgctcatatataatcaatagaacccgtacaggaccgggatcccgccgggattttgccggtcccggtccccgtcccatattttttagacaaaccaccaagaccggtagtccctttaaaacgggagtcccggtcccgagatcgggagtcccggtcacgagatcgggagtcccggtcccgagatcccgtcccggttcattttccaagtcccggtctcggtcacggccatttgggccggaaaaacggtctaaattttaccagtgtaacagccccaaatttgataaataggtgaaacgtttctaatttaaattttcaagatagaactttagattttttaatttggggcaatttcaactgttaaaaataccctgaattcaatatgaaaataaataacatttgcataactttcttttaccaaaaaatatttccaaatttatgaaaaaatcaacaaatttcacaataaatttcattaaaactcaaaaattttccgcagcgtcgcctagtacaaaaactaaatttttttctaaaaaagttagctcaaaatagtaaaatttggccatttttggtgtaaattttttttgaaaaatgtgctaaaaacacttgtacctaaattacaattgaaaataaagcaataataagcacaaatggtaaaatattcatcaattaataaaaataatgcatttggtcatctcttaaataacactcaagattattagcaagaatatttcatcatgttaaatattgaaggccgaatccatgcggattttgtaaaaaaaatttatgagaaattttaatattgcagacaattatcatttttacattgtatttgtcggctatttcgttattttaattatataaggaaataatgaaaaacctttaattatttaaaataattattattgaattgtaaatcttccatatttttgacttgaatataattgcattgatttattaaa

SEQ ID NO: 71879 - DNA, 326 bp, Heterodera glycines
atgacgcaaaatgagagagtgcagaactttcagtccaagtcatacaaaacatttttgatcaaggaggatagagaaaataattttaatagagagtgcaatgggaagaagtttagttcccaatcttcgctgattcctttggtaatagacggagaattatcattatgtttctattgtctcgatgtctttgaatctcttccaataacactctctattaaaatgtttgttctctgtctttcttcatcaaaaatgcttatgtctgaccagtactgaattttttagctctctcattttgcgttatctcttctcaagtgatatttcccgctgaa

SEQ ID NO: 71880 - DNA, 560 bp, Heterodera glycines
atgtatttcgagaagtatcgtgcacttgcgaccggtcttttcaaaagttcacttcgtttttcaatctcttctttaggtgttactgtttgcggtgctggagttggtaatttctgttattttttgtctcatattttgtaaaattcatttaggaacatttggtttctctaaattgatcagcattttgattgtccactttgactggcgtacagtttttctcatttacgcaggttttgcctttcgagttctagagacaacctttctttcatcaatttgttttcttttgtcagttgttgttctgctgtgtgtgccgtgcggtgccctttaccggccgattgaatttgtgccgatttacgaaggagagggggaggaagaggaggaggaacacggaatgacggacaatgcaaaagaaatgaccaaagaggagaacgacggcgaaacggacgggcaacatcagtacaaaggtcgcacccgcaaagcccaaaaaacaaaaccattctgatgatagtttagttttcttttttttttttgctcttcaggccaaccagtaatgccttggacaa

SEQ ID NO: 71881 - DNA, 338 bp, Heterodera glycines
atgccaattgccaacccaacagatggttcttccgttggctttgtcaccagcggatgtccttcgccaactttagggaaaaacattggaatgggttatgtggacaaggcgtatgctaaagttgggaacattttgacggtcgaagctgggcgagacagaatgattgaggtcgaagtggtcaaaatgccatttgtgaaaagcgcctattatctgaagccgacttctgtggacgaagacaaaaagaaatgattaacattaattattgtatttgcattttacattaaattatatatttccatttttaatcacttattatatttgcatttctaattaatgtacaa

SEQ ID NO: 71882 - DNA, 1884 bp, Heterodera glycines
atgccagagttggaggcggagcggaagggcatgctgaatctgaccaacgggacggtatccgcaccgggcacggacaagcagctgtcgctggaggaggcggtcctgcgcaaggatagaatacaccgaaaaggtgagaaatagcttttagtttattctaagggtacaaaaaagcattaaagtcaattcggatacaatgctttctagctcggttgttgtttgtttgttttacggtaatatacccggacgggaattcccggtcctccgaggtcccggttcccggatattgaaaatttagttcccgtcccggaaaaacaagcactggtaagaatgggggtctgagtgaaaattaatatattctttaaaagtaacgctgccaattgtgcaaatggcctagtggctgatctttttgattttctagttctttcccatggttcaatccctctacgtaaataaaatattttgaattttctttttgtatattcgtgggtttcctatcgataaaatatgattcctcatattttttttattgacacatattttatcattttttaaagaaatccgccaaattgagcctagtaatctcaaaaaaccagtttttttgttgaaaatctgttaacaaatcacaaatcaaattttcaaaatttctcgccggaccccttctttcacaaaagttttttgaaaaagcgcgccgaaaaaaagtgatgtaaaaagcaaaataatattcgatcatttagtccaaaaaatgattattgtttgaaataattgaagaaattttatttgaaaattttcattaatttatttatctttaacttttggatttcataaaataaataacaaaataaaaatttatttttgtgttattttcacttgaataaaatttgaattttcttaattttttgattcttttaaattctaaaaaattcccggttggtcctggttcccggacaaaaaccgaggtcccggtcccggcttctcaagttccggcaagtcccggtcccggtttttcttgcggtcccggcttctcaagttccggcaagtcccggtcccggttttgcccaaaattcccggtcccgctctactctaatattcatttataactttttctttttttatgataagacaaaatctgtcaatacataatagcctttgcaaatgtgctttgtcgatacggagattcaattaaactaaaagatgagtgagggcgcatctaagagatcgttaataaattggctgattttttaaaaactttattctttcattatatctacgaaaaattaaaaacaaatatgtattagtatttttgacctcatttgtattttttttaattttaggctttttcctgctagtttgggcatgccttctctgctacctcctcagttatttgcccggtgcatctgctgaacaaggcactgttgaagccctccacacgcgctgggagccggaagcaattggccccatcactttctctgacatcaactacgattatgaagactacggccaaacaacagaggagccaccaaccacgactcccccgccgccgtccacaacaagtccgcctcccacagaaccggaaccgccctctgcgaccacgccaaatccaacagtgccaacaccgacgtggtgccctgttgccatcactggtttggcagcgctggtcgtccttctgtgcctctgtttgtgttgctgtccgtcagtgccacaatcggttgcaaattggtgccgccgttttgttcatcgcttctgtacatgtgccggcgaaggtgaaaaattttaatgaactaaaaactatcaaaagctacggcacaagtgccacgccaaactttttccgcctcggtctcggatcccggtagagtgaattgaaaaaatgcacaatttttaaagcaa

SEQ ID NO: 71883 - DNA, 1058 bp, Heterodera glycines
  unsure (1)..(1058): unsure at all n locations
gctttttcctgctagtttgggcatgccttctctgctacctcctcagttatttgcccggtgcatctgctgaacaaggcactgttgaagccctccacacgcgctgggagccggaagcaattggccccatcactttctctgacatcaactacgattatgaagactacggccaaacaacagaggagccaccaaccacgccacacatttttgaaaaaattcaaaaaattttaaaaatcaataaaaacaagtcttatggtgtttcggaggttccgggttcgggattcgaaatcggtcgaaatggatgttatattcgtgatcagcgacctccgaaaccccataagacttgtttttattaatttaaaaaatttttgaattgtcaaaaatgtgtggtaccatctaaactattaccaaaatatagtttaattttatttatttgccaccaatttgttgcaattaatatatgcttcggtaaaaatttgtaggtctcccaaggacgactgcccaaaaaaaacaacgttcactctttctattttaacggtgacaacacttttctttgaaatcgatgaaaaaaattaaccgtttcatggtcaaatcgaaatttagaagacagggatgttgtctgcagtacgtgcgaaacacccggacacactgctgtgaattgcgaccagctgaacccggacgtgtgaatgggaaaaaataccgatcnaaatgatgagtagggcgaggatttctagttttttaactattttttctgcggcattattttgatgagaaatgcacgaaaaaccacatttttagctcggaaattcttagttttaacgccactattcatcactagaaaaaattattttgtaagttggccactaaaatccgcgtcgaagaggtgtgccaccaatttcggcatctgctgcggttgtcgcctcatcaaagcgagtgccaaaacgagttatggctcagcgcatcgcaagaggaaaactaaatccggcttgcccattaataatgaataatttttttttaattttgccgaaatttggccgcggaggctcgagaccgagataaaa

SEQ ID NO: 71884 - DNA, 95 bp, Heterodera glycines
tccaagtttagcccacaaatctgctgactaattccctactcattcactccgttccgaaatgccgaccactgtcgtgcgcacaacaaccactcgga

SEQ ID NO: 71885 - DNA, 385 bp, Heterodera glycines
aaatgttgatttactgtgcaaagccgacttcaccagaagagccactcagacagaaatcagacggcgtttgaatggccgaagggtcgatttgctgctcagtgacatggcaccgaatccgaccggtgggaggcgacagcaatttattaaatttatttttgtcattgctcaaatttcgttccgttaaggcgaatcctacatggaccatttacggataatcaaactctgccgtgacctctttatgttcggcactgtgcccgatcccgagccaatccttgcgcccaatggaattttactttgcaaagtttctattcattattcaattttcaaaaaaaaattcctagattttcgacggcgttcacagaaatgacttaatcaaagaattgag

SEQ ID NO: 71886 - DNA, 283 bp, Heterodera glycines
ctgttcgattccggccttttcctggaacaatcggtcagcggaagcggaagttggtggaacccaacgccagcggaccaagtgccgaccaacagaccaggcacggtacgatgccggcactttcccaaaccatcccataaaaatgccaaaaccaatcggaatgcgaaagcattgactttgcctctcttcgttaagtgtcagtccgactcgcgtcaactgtccgacgaggagcttcactttgccaagtcgcatctgttgatggccgagtccgtgcctccgtttggcg

SEQ ID NO: 71887 - DNA, 50 bp, Heterodera glycines
  unsure (1)..(50): unsure at all n locations
atggcgattgtgcacagccctccgtnctcatacgcaagcgcttttgtgag

SEQ ID NO: 71888 - DNA, 1216 bp, Heterodera glycines
atgagagaaaataaaataggaatatacaataatcacttaaacgcatttgtgaccactgtgagttaaggaacggtggctgattgtgtgcaaaataattgtcctacggtggtaaagtattatcgtccaactgtggcacaaaaagcggtggcaaaggcgatggattcgcttgctacgagtaaaggagtgacaccccgagaggtaattaataattaattaattaatcctaacaacaaaaaaaactaaaattttgatataaaaattctttaatttctcctataaatttttatttgtaaaaattaaacaaattgtttttataggattttacaaaagtgtttgcttctaaaaagtcgaaaaaagaattgtataaaattgcttctggagaaatggcaccccattttttgttgaacgttggcgacaatttttacgacgaaggcgtaacaaaagaggatgttgcagagcgttttgaacaggtaattaattgttaattaaggataatttataaaacaaactataccacaaagtatttatttaatacgggaaaagaattttttaataaaaaaaatatttttatataaataccaatggttttctttttatagaattttactgaagtgtacaattatgacagtttgaatgtgccatggtatacaattgctgggaacaacgattgggaaagcaaagatggaattgagccccaaattgaacacccaagtggcaaatggtaaatgtaaacgttttaaaatgagagtaaattctcttgaaaattttttaaaaattaatttgcctgcaaaatttcggaaatttcaaaaggttgtgacaaaaagaagcgaaaaacttttgtcaattttttccgtaaataatactaaaaaaacaaattttttgaaagtatgtactttttggctaaatatctattttattattttaaataataattttacattttttaaattttttcaggactttccctgcccaacattatgtggtcaattacgaatttggagaaagcccggacaaccgcaaaactgctcgtttcattatgatcgacacaacagtgctttgtgggaatggggcaaccgttttcgggaaaatgcagaaaaaagacacacaaaaatatgccaaaatgattgagaatgccaaaaagcatttcaaatggttgcgcaaggagttgcgagaggcgaaacgacggttgaaatatgaacaataaataaattaaaaa

SEQ ID NO: 71889 - DNA, 1333 bp, Heterodera glycines
atgtacggaggacaaacaaatgcgaatggaagtggagttcaaatttgtgttgaacctttgaatgaatgggaaatacaggaggttggatatgacggagtcgagaaatacataaagttagtcgtcagaaagtttgtgagaatttctccccattttctttgttttctttaagaccgctcgcatttaaagaccatctgaggaaaaatgcacaaaacatcgaatggagcaaaataattggggaaaagacaaatgcggacactttaacggaagaaagtgactcggatgacagccaactcgaaggaagtccgatcggattggctcagacgaccaaaggattcattgagcccattgctggaccatgggcaatggtggccaaacatttgcagtgagtcaacccaattctaatttctccaaaaaatggctgattgtaaagattttagcaattcgctgcaggaagtggacattctgatggattgcatgcgaatcgcccgcactgattatttgagtccgatggtcaccgctttggtccaagacgagcggacggaggccgaacaagtggccgtgtccaaggcattccaactgcacactcgacgaagagtgctaaacgaaacggcacgggaaatcgaacggatggcaaatgcacggcgcggagcatcgtccgaaactgacaaaaacgacttcttcaatgaactgagggaattgcgcgagaattggcgtatcagaaaagtgggaccgaacatttttggagacctcggctacaaaacatgtaattattgcaaagggatgagagagtagggcaaagagcgacgaattcccaaagtttttttggtcattaggtcactcattgttagcccttaattcataataccatttttaaacaaaatatttttgttgacatttttctcagttgtcccaaaatttgcacccaatgaaattttcgatgttacacaaaaatcagcatcaaacagacgtgaaagtaccataaagcataacaatcggtcgttcattgagctgcgactgcctcagaatctaaggtatttcatttcagtatttttctttcaattctatgaaatttgtatttaatgtgtcgcaccgatttgttggtatatatcgaaaaaggtaacttttttaaatgttttattccttctaaaattcattttcaataatttgagacgatgaaaagacggccgaatcgttctttaaagtgaccaacagaccatcgactagtgaagaggacgttaaacacgtgcactggcgcaaggctttgccatgggctcaaaattctttgatttgcagagaaattttggcacgagtattacgcattccattcgattga

SEQ ID NO: 71890 - DNA, 920 bp, Heterodera glycines
atgaagggctgcagaaaaatggagaaattcagtaccaactttgtccacttcagtcccaggcgaataactcgccagggtttgaactgagcgagggggtgccagcagacttattgtagagttcaatgagctggatttttccagtttttaaaatttcgaaaattttcaaaatttttcgagctaggcctaaaaaacggttttcgggtttttgaattttaggaatttttaacgaattttcccagaaaaacggagaccactttcaagcaaccgtttttcgagctctatcgattggtgatatttttgaaaaaatttcgattttttcccggaaatagaaaaaatttttggcctgagcgggacatttgagtcccgggtccataactcgttaggggttggttttatcgaaaaaacgccttagggcaaaattgtagagcttttgaagctctatcgaatggtgtgccatatggcgggaaattttcaaaaattttcgagctaggccccctagaaattttcgaaaattttttttgggttgaaaatgggggtcaaaaatatttttctggggtattttgatgtgctgagcacgaatatgatgtttatttttcgtttcaaaatttttggaattttttaaaaattctttattttttggcaattttttggccctcgggattttggcctaatatttgaaaattcataacaaatcgaagggttgatcaattttacaggaataaagccttaaaaatagagaaaaatcaggagaattttatgggatttaaatgaaatttatatcttcaaatgaaaaaaagttattcaagaatttctggaaaaatccgaattttcagaaaaaaattcagaactcggttccgtaaaggtgcttttgaaattttaaatactgaaaaaatccgcaattttttgctctaccaaataaa

SEQ ID NO: 71891 - DNA, 405 bp, Heterodera glycines
atgcccgcgccacacgataaaacgtcacttcgatcgtttttgggagcgcttaattattatggccgattcataaaagaaatacgtgagatacgcactccgcttgatcagctcctaagaaaggatgaaaattggaatgggagcgaagagcgacagaaggcttttgaaaaggcgaagatcatgacttctgatctgctgttgacccattacaatccgactcttccaataatcgtggccgcagacgcttccaaaaacggtattggcgcaacgactggccatgtttttccggacaaatccgggaaagtgatcgaacatgcctcatgtgttttgtcaaattcccagcagaattacagccagatcgaaaaagaagcaatggctcttgtgttcgcagtgcagaaattccactga

SEQ ID NO: 71892 - DNA, 828 bp, Heterodera glycines
  unsure (1)..(828): unsure at all n locations
atgaacgctanaattatcagagtgccgaaaatcgcatgtgatctaagcctagcaaaaaatggtgtaagtaaaaatcgtaattacgctcaaaaagctcctcaaacaattttagcgcttccaattccttctacaatcgcctttatacatcccattatgagcgctaaaattatcagagtgccgaaaatcgcatgtgatctaagcctagcaaaaaatggtgtaagtataaatcgtaattacgctcaaaaagctcctcaaacaattttagcgcttccaattccttctacaatcgcctttatacatcccattatgagcgctaaaattatcagagtgccgaaaatcgcatgtgatctaagcctagcaaaaaaatggtgtaagtaaaaatcgtaattacgctcaaaaagcttctcaaacaattttagcgcttccaattccttctacaatcgcctttatacatcccattatgagcgctaaaattatcagagtgccgaaaatcgcatgtgatctaagcctagaaaaaaatggtcaagtaaaaatcgtaattacgctcaaaaagcttctcaaacaattttaacgcttccaattccttctacaatcgcctttatacatcccattatgagcgctaaaattatcagagtgccgaaaatcgcatgtgatctaagcttagaaaaaaatggtctaagtaaaaatcgtaattacgctcaaaaagcttctcaaacaattttagcgcttccaattccttctacaatcgcctttatacatcccattatgaacgctaaaattatcagagtgccgaaaatcgcatgtgatctaagcctagcaaaaaatggt

SEQ ID NO: 71893 - DNA, 85 bp, Heterodera glycines; identical to SEQ ID NO: 65905

SEQ ID NO: 71894 - DNA, 141 bp, Heterodera glycines
tgtttgatagggccagacaaaagaaggcaactgttggtaccaagtttgcggtaaaaaaatgagaaaaaagagatagctattttttggtcaagaattttttttgttgcgtttcaatatcgtaagattgtttgatagggccag

SEQ ID NO: 71895 - DNA, 1056 bp, Heterodera glycines
atgaacatcaccgcagctccgatcagcgaatactccacaatgcttgtgtacatcacttcgttgaagcttgctgtcattaaaaattacccattttctttttttcggctttatccctcatttagcaattcaaattcagcgataattacccaaaacgcactcggccccgtggcattttcgcaccgatcgtttgacggtcagtccggcaccaagcaaaaggccggtgccaccgatggaaatgtccaaatttgccccgttcaaatgttcggcattttcaaccgacggtgcgtcccaattgacaaactctccgccgccttctccgtccgccgtttgggacagttcgatcagttgcgattgtgctgttgtgattggctgcggaaaggtggcatgacgggcaaacacttgtctgatttgtttttttctatgttttttttcagtttggcattttgcccaccgaatttcgtctcccatcagcgattcttcaatgagaatgtaacggatccaagtccaaaggttggtcgcgattaaatgcgcagtgccaaaacggcaaatcacttggtaatcgcttatggccaactaaacaatggtagggttactgtattttttacgtttaataaatatgatttatttattataattgaaaaattaaaaatgccttccaattgcagaacacaaaatgcatttgcacaaagacaaacgcaatggccataatgtccaaaacaatgacataatgtgggcatgtgccatcgctggcacacagaaaaacattaaaagctgaaaaagagagtgccaaaatcacacaaaatggtacaactctaagcgattgcgataccgtaatacacagtgccaattacgccgaaaacgacgcagccgaggcgcaggaaaagactgccggcacttggcccgtcgtggctaacctgggaaaagcaaaaatcaaacacaaaacagacaaaggcacacaagtggaaggaaccttgcgcaattcctggaactgctcggaattgcattggttcacaatgtttgcggaagattcggcactaaaaacggcaaaaaaataaa

SEQ ID NO: 71896 - DNA, 2384 bp, Heterodera glycines
  unsure (1)..(2384): unsure at all n locations
caaatgatcagtcggagagggcaaataatttgttnnaattagtcaataaattntgaaaatgnactattnntnacgttttntaatgtttactcaaaagcatatgcttaggaataaaaataaatgttggcttcagtttgtatttgtttagtacaaaaaatgattgtttctcaagtttaatcaatcattcccccggggggggggggggcttttggctgtaagcaaagcgccattaaagcaacaaattgcccgtataaatgccaacggatcatttttcaacatcctgaaatgccatttctatttttaattgcataacaaacgggggaaaggggcacagaattttgaagatttggtggttatttgagaaacctaaatgctcaacttattaagcattttcatatttctttgtgcagaaattcggtgatgtgcggcctttcgttgttttattcaatgcttgttaccatattcggtatcattttatttttgtgtttattgtatcccgagataaaagcccatacattttaatgttttagctttggttttggagctgtcccatttaatggtgacaaataacagtcggcgaaatttgggcttcaatgacatggtaattaacgtaatttattttttttaattgaattttcattttgctcagatgttcggcatttacatgtacggctgttccatcctttttctgctttactgctattgtgcgcttcttctcaatccacgatggaaacgcaaaattggaaaattactaagaaaaaagtatttccataaaatgcataaatttaatttataaaatttatttttttgccgtttttagtgccgaatcttccgcaaacattgtgaaccaatgcaattccgagcagttccaggaattgcgcaaggttccttccacttgtgtgcctttgtctgttttgtgtttgatttttgcttttcccaggttagccacgacgggccaagtgccggcagtcttttcctgcgcctcggctgcgtcgttttcggcgtaattggcactgtgtattacggtatcgcaatcgcttagagttgtaccattttgtgtgattttggcactctctttttcagcttttaatgtttttctgtgtgccagcgatggcacatgcccacattatgtcattgttttggacattatggccattgcgtttgtctttgtgcaaatgcattttgtgttctgcaattggaaggcatttttaatttttcaattataataaataaatcatatttattaaacgtaaaaaatacagtaaccctaccattgtttagttggccataagcgattaccaagtgatttgccgttttggcactgcgcatttaatcgcgaccaacctttggacttggatccgttacattctcattgaagaatcgctgatgggagacgaaattcggtgggcaaaatgccaaactgaaaaaaaacatagaaaaaaacaaatcagacaagtgtttgcccgtcatgccacctttccgcagccaatcacaacagcacaatcgcaactgatcgaactgtcccaaacggcggacggagaaggcggcggagagtttgtcaattgggacgcaccgtcggttgaaaatgccgaacatttgaacggggcaaatttggacatttccatcggtggcaccggccttttgcttggtgccggactgaccgtcaaacgatcggtgcgaaaatgccacggggccgagtgcgttttgggtaattatcgctgaatttgaattgctaaatgagggataaagccgaaaaaaagaaaatgggtaatttttaatgacagcaagcttcaacgaagtgatgtacacaagcattgtggagtattcgctgatcggagctgcggtgatgttcattgtgtggaaaaacatcggacaacgccaaaaaaagtcggagcaaaaggaaaacaaaacaacgaccgcaaaagggtaataaaataattgaaaaacagcaattatttattaattaattaatgtttaattgctttttgagttatgtgagtcgaaagcaccgaattcgaatggactgctcaaaggtaaagccaaagaatgggccaaaagccgaattgaatttctattttaaccccaaaattcagagcacaacaggtgggacgatgatgggaatggcagaatgccaacgaatgaggattaactcaaaaacaaccaaggactcttcttcggattggcatttttaaccaccactttcacctcaatatccattttctccnattacacaatcatnnnacanaacacacanncnatnatnntnttcnnctcnaccnacatcatccatntannnnnaantnctttacattananctcnntattttnaaaaancctncctnnattccatttnnacctnnatntcctnnaccanaatccannaa

SEQ ID NO: 71897 - DNA, 304 bp, Heterodera glycines
aaaattccctcaaaaataaaaggtctattgcgcaccgccctccctatcatgctcgagagcatttgtatgtgtataaaatttatcaaaaaaagagatagccatttttctgggataacctctaaatataaaaatcctctgtgaaataaaatggcgattgtgcacagccctccgtctcatacgcaagcgcttttgtgaggtataaaatttctcaaaaaaagagatagccatttttctgggatagagtataaatttaaaaattccctcaaaaataaaaggtatattgcgcaccgccctccctatcatg

SEQ ID NO: 71898 - DNA, 228 bp, Heterodera glycines
atgaatgaaactcaaataaaagagaaagaagaaatggtcataatgcaggtgatttattataatttttataatctaaacatttttttaataaagatgtgttctgatcaaaatccttgctggccaatgattggttatggcatatttttgctcattttgacaatcggtggaattttgtcaaatttttcagtgattttcatcacaattcgaacaaagtttaaaaatttttaa

SEQ ID NO: 71899 - DNA, 223 bp, Heterodera glycines
atggcggtacaatcatgtgaattacagtatccatcagtacaacagtgagaaaaaaagacgagttgaatttcattatggaaaaaagaaatttaaaaaattgtttttaaatataatttttatactttagcggaaaaaagcacaacaaacaatcgttcaatgccaatgaaaagcattataaggagggatcagccgatgcttgttaaaggaataatgccaaaataaa

SEQ ID NO: 71900 - DNA, 53 bp, Heterodera glycines
atttaaagccatccattgcctgccggttctcggcacaacaaagcactaatagg

SEQ ID NO: 71901 - DNA, 637 bp, Heterodera glycines
gatttacatattaaatttggaccttttctcgatgaaaaagcagcagagtttgattctgatactttgaatcgttacaaggagcaacagagggtaagttttgctttgactatttcttaaaaaatttataaatttaaaatttcttactattttttttgaattttcttataaaaatttctacaatacctaagttttcttggaaattttctttctttaaatttttattaaaaaactgatttcatttggcagaataaaaacacataaactgttgatcaaagagggagcatttttagatggtgggaaattagtacaagtacttaaccatatcaacaatgcttaatttggttaacaatgaaaaaattatagtccaaaaattttccggcaatgttttgggatgcaccagaaatgtttaattgctttccataacaaaacacccaaaacattttctgcaaaaaaaatggcgctacttgcaaagagcgctcttttgaattctatcaaaaacaaaaggggggacccttttgttttgcaaaaaatttttgagatacaaatccatgaaaatttgttatccgggggttttagaggtcgctgatcacgaatctgacatctaattcgaggtcttggaccccaagaaccccaggga

SEQ ID NO: 71902 - DNA, 104 bp, Heterodera glycines
atggaggcggtgcacaacgaaactccatctggaatgccgactcacaaacggacaatcaaagtgaacaaaattttatttgattattgtttaaccaataaatccag

SEQ ID NO: 71903 - DNA, 754 bp, Heterodera glycines
atgccattgtcagcaaattctaccaaattagcagttgtttcaattggcattttggcgttattatcaattttatcagcagaagcgcaagccatgcaaactgcagatgttgagggaattgacgagcagaagctgctttttctcgcttgtattcagggcaaattggaatcgggtaagtgagtggggcaggactgatttggtcggtaattgtcagaggccgggatttcccaattctatgagtacaggtaagagttacgggcttgacattaatacgggttacgggttaaaaatcctcaatccgtaagaacttgaatcagcctgaaaaagtacgggttacgtcccctatacaaattccgtgatttttaatcttcgtacccttcggatttcttagcttttttcctacatttttttcatttttgaggagtttttaaggaaatttttttattaaatgcccaaaaatccaaaatttcgcaatttttccatacatatttcatttttttttacatattttgagaatttttgagaatttatagaaattattgttaaaaaaaatttttggaggcgtaccccttaaatcagtttttttttaaatagatatcaaaaattaattataaaatacttgttgtgtccaaacacttggacttctcggtttttagccctttttcttttgacaagaggtttttggaaaagagtttattcaagtcagaaagcaaaagtaaaaagaaaagattaaatgtgattaatgcaaagaaataaa

SEQ ID NO: 71904 - DNA, 1419 bp, Heterodera glycines
aataaactagaaaacagtaataatacttccattgacagcatcccgaatatttttctcaaaaactgtaaagaaaatttggtttatccactatttcatattttttgtttttcaatgatgactggccaagtcccaaacatttggaaaaaatcaattatttgtcctgttccaaaaataccgaacccaataaatcccattgactttcggccaatttcgcttttatgctccatctcaaaaattttagaagaaaatattacccagaaaatcactaattttgttgagacaaatgatgtacttccgaattgccaacatggctttaggagaaaacactctgttacaactcaacttttggaagtcattgatgactttagtttggctttggaaaacaaaaaatcaattgatgttatatattttgatctagcgaaggcatttgatactgttccgcacgaaagattagtttctaaactcaaaaatattggtataaatggtactttactaaaatggcttcaaaattatctacaaaatcgtacatttttcgttagagttggctctgcgttttctgatgaattcccatgcttaagtggtgttccgcagggatcaaatttgggtccgcttttatttttaatttacatatcagatcttcctaatttttgtaaaactgaaaatgttgaaattaagctttttgctgacgatcttaaggcctattctatactctcaaaaaatactatttctccactccattctttcattaataaatttcggaattattgtgaattaaatggccttaaaatcgctcctaacaaatgcttagtttcacatattgggcctaaaaaccctaatgaatgttactttataaataatattccaattttaaaaagtgaaaaaggtgaaccagttagagaccttggcatttatttttcaaatgacttaaaatgggaaaaacatatagaatttattaccaaaaaagcaataagaacatcttttgctttactcaagtcacttaaaacgaaaaacccaaaaattcttataaatatatttaatatttattgtcggtccattttggaatttggttctccggtttttaatccatatatgaaaaaagacatcgatgctcttgaaaatgtccaaaaaacatttttacgtattgtttttagacgtaataataataaggatgatatacccgggtataacgaacttcttcaactctttaaacaagaatcccttttaaaacgcagaacaaaaatcgatttaaaacttttccatgatataattttgggaaagatccatattcagcataatgattctttttcaaaaatatattcaggactgaaaaacgattatattataaaaaccgcttattgttcaaccaatgttcggtttcattcgttttttattcgtacctctcgcctctataggagtttg

SEQ ID NO: 71905 - DNA, 525 bp, Heterodera glycines
atggcagaacaattcaacgccattgctgaacgcctcaacgaaattgagcgcaaaatcaacagcaacaataacgacaattccagtgcggaggaaaaagaacgcaaacgaagcctcgttttgattggcctgccggaggctgtggctgcaaagccgtcagaacgcgccaaagagcacgcggaaacagttgcggaagtgttggacgctttggatgtggaggtttgcccgcagatggtgtatagaatggggcggcggattgatgagaagcgaaaggggccgcgtttggtcaaagttgtcttgccagcgacgacgttccaacgttttgcattggcacaatgggggcgcaaccggacggaactgaagcagcatgttggttggcagcgacttctcgtcaggccctctctgacgaaagaagaattggcggctgagcgggagattcgtgaacagaggcggatgaattatgaagaaagcaaaaagaatgaaatggtgacgacgcggcgtggaggcaacatgggaaaaaacttttga

SEQ ID NO: 71906 - DNA, 718 bp, Heterodera glycines
atgggtcgactaagatttttcgattggatccgacggtaaaaagttgatcggaaatcaaattattaacggttcataaatttgactatcgatatttttcactagtggtgcattttctcattgaaaactcaatctttaggggtgtatttttcccgaaacttcgggtaaaatatccgaagccgaagcacaaagttcgacggtcgaagctcggcgtagttttcgaagccgaaggcgaagcccattttttcgaagcacgagttttaggcgttggtgtgaaaaagtgctaattttggacctgtatattaaaaatatacattcatcattacattttgaaaaaaatgatgtaaatgatatttttaatatatttgaaaaattaaaagaaaaacaattacttagaggtgaactgatcaaacgcaaaaatagagaaggaaaccaagagcacaaccaatttgaccacgcatgaaaaactaatgatagatataaatctaagcttagcaaaagccaataattaggggtgtattttcaatttgaaaactcgatctttaggggtgtaatttcccgaaacttcgggtaaattacccgaagctcgaagcccaaaaacgcaaagttttcgaagcttgaagcacgaagctcgaagtttcgcccgtcctgatccggacctaaccctcccccccctccctcagaatgatgcttcaatctgtagcgttatcgatgtaataaa

SEQ ID NO: 71907 - DNA, 65 bp, Heterodera glycines
aataaaaattgggcttcgccttcggcttcggcttcgagtgctaagccgagcttcgcccagccctg

SEQ ID NO: 71908 - DNA, 174 bp, Heterodera glycines
atgcgtaagtgccaaaaattagaaataaaaaaacacagagaaggtgttaatggtgttgatcaagcaaaattggacaatgaaagagatgcgaaagtgagtgatgaaaaaaataattaaattttgtaaatttattattcgagttgaatcaattataaatactagataagcaattga

SEQ ID NO: 71909 - DNA, 159 bp, Heterodera glycines
atgatgggaatcccgagtcggaatcccgatcaatcccgaagattttggaaaaacaatcgagagggatcccgagttagggtccgtcccgtccaaatttcggtcccggttaatctctatgcattttttcagaattccgtggtattatcggaatttgcttaa

SEQ ID NO: 71910 - DNA, 535 bp, Heterodera glycines
atgttcgatttcgtgccgaaactgcttgccgccggccttggcattcttttgttgttcatcagttccacttccgctggtggtcctttcgacggcggctcctttggcatttcgccatttggcacttcggcatttggcgcggcaccgccactttttccccctccgcctgctccgtttttcagaaattacgggcgtaagtgctaaaatttccatttcttataaataataataataatttagtcttaaataacaatttaacaataatcgagtttttaataaaaattagaaataatatattaatttagtattaaatatcaatttataattgttgaagcctttgcgcttcataaattgtttgtctacatatatccatatccaatttattcagcatctgggtatggcggttacggtggttcatttggcggtttcggcggctccgggtacggtaaaaaatgattgaaaaattgatcagacattcagtgattgacccgcatacatttttacacttatacttctattgtaatatatgttaaataaa

SEQ ID NO: 71911 - DNA, 1118 bp, Heterodera glycines
atgcgtcatcatcgctggacgagtacgacagctcgctgctgctgtaccattcacggtcgccggcacaaatgtgagtgaatgaatgtgagaatgggatttgggggatttttggctgaattttttggtgttatgtgcgttattgggtattctatgtataagcagcgttaagaatttctgtattaatcgcacttttttataatatatttccgccgtatgctcatttatataaatatactgtatatttcatcattgtaattttcttaaatatctcattctatcgtgtaaaaaacttgttgtttcttttttgcttttccaatattttatttgttttagttataataccaaaatcaaaacttataattttcataaatttatttattcacataaaaaaagccagcatttgtcatttcagcgttttctcattctaacaataagtcattcacatttttcactttgttattgtcgattagaccgcccaattagcaaagagtggacacattcgtttctatgtattttaaggattattccagagcaaaagtttcaggaaatttatggtgtttttctttggatttatttaatttcactattaaaaaattcttagaaatttaccaatatatatatatatatatatatatatattatttacagccaaatgtatatgaaatttaaaacttttactataaatgaaaaaaaaatcaggatttttgaaattttcgctacagaatccggaatttataaaaccaccttcacctgcctacggattttgttgttttttataatcaaattttaatgcattcacaatttctgtcgtgacttctttttttagtttaatatatttaaataaccaaaactttttctctgctttagagggttggacattttttgcctccggcagcatgtgttgcatttattgagcccaatgctttcatcaccagcagatgctgcgtatcactgatttttattttattttgttttgatttcttttttgtcgcattttttttatatgaatatacttttgttttttatataatgatgatagttattctctatttcacttcttttcttatgttcattatctatcatctgttatgaaatggaatggaacaaaatttaataaa

SEQ ID NO: 71912 - DNA, 768 bp, Heterodera glycines
atggaagatttaagtgacttattgccagaaagttcagtttggagtgttatttataccccacgcaatcaaattgaaagaatcaaaagggtcaaaatcccactgattcaacttaaaaagtttgatggatcggttgagagttggataccattttgggaaacatttcgagtacatgttcatgaagacaattcagtaacaaaaattgaaaaacacaatttgttggaatcaaatttagaaggggaagcaaaagacttaatagaaggcataccaatttctgaggatggctaccaatttgcgattgatctattgttagaaaaatttggtcgcgcattaaaccaataaataattttgattccacaaagtgacacagttgaagaagacgaaaaattatacattaaattcgaaaaaatttgcagactgttgtcaagcttaaaccaaaatattgatttgtctcctcattatttatttttagaagggaagttatcaccattagttttagacaaatattttgttattaaagacgcagaagacaaccaaaattgggacacaacaaaattcagaaatgccttatcaagagcaattgaacaaataaaaaacagacaagaagtaaaacaaaaatgtggaaaagaaagagatttaaattataatagaaatgattcagaagttactatgaattttgcagttaaatttcgagaagaatgggaaaagttgctgaatgaacaaaaaaccaaaaaattggaaaaaaccaaagagataacagaaggagtttag

SEQ ID NO: 71913 - DNA, 135 bp, Heterodera glycines
  unsure (1)..(135): unsure at all n locations
tagggaagctattcccgaagaattcggtctccccataaatctgggcgcatcggttcggggggactgccccganaacaaaaaaatcgattttttcaagtgtcccgttggggtactcaaacaattatggggagcaaa

SEQ ID NO: 71914 - DNA, 120 bp, Heterodera glycines
ggttcgatgaaactttttaaaatataagcctaaactttttggcctgtttaaaaaggaattaaacatttttaaaatatttattcatctcccttttgatagaaaaagcatcagagagcctta

SEQ ID NO: 71915 - DNA, 436 bp, Heterodera glycines
ggttcgatgaaactttttaaaatataagcctaaactttttggcctgtttaaaaaggaattaaaaatttttaaaaattttattcatctccctttttgatagaaaaagcatcatagtgccttatttaacttttaattaacatttggtgcgtttcagagcacgttctgaaaaaatatttatgaattaattttgcaaaataataaataattaatgaaaaagtcagaatttcgaaaaattttaaaaacaacaagcgttggcattttttcaggttaagttagtcctttacaatggagaaggcctgcaaaatttggagagattatatcgattttagtgcgctaggttcgatgaaactttttaaaatataagcctaaactttttggcttgtttaaaaaggaattaaaaatttttaaaaattttattcatctcccttttgataga

SEQ ID NO: 71916 - DNA, 303 bp, Heterodera glycines
atgggcaatcagcatagatttcaggtacacattttgcatttgtctaatttatgcccccctcccttcccacaacggcattttcagccccgtggcaacggaccgtacggcggcggcggtggtggtggtggtgaccgtggcgaccgtggtggaggcggtggtggtggtggccgcggtggtggaggcggacgctacgggcgcagtccgccgcgtgaccgaccgcgcggacgctttccctaccgtttggcggtgtccgggctgcccatcagcggctcgtggcaggacttgaaggaccacatgcgtgat

SEQ ID NO: 71917 - DNA, 119 bp, Heterodera glycines
aattttcgcccacgtacgagaacatcgtggtgacaacactgctctccggcagaacaggatcggcgatttcgacgcgcaggaacagacttttcatgggcgatttcacaatgtgatcgcag

SEQ ID NO: 71918 - DNA, 279 bp, Heterodera glycines
atttataagcatttgtagggttctcagcagtttccctgcaaaatttggtgagcttctgatcagtctagaacgttgggtgataaaatgaaaaaaataattaaaaaaaaataatgctggtgtggtaagtgtgaagaactgtgttcctccaggcaaaaaattctaagaaaatttataagcatttgaagggttctcagcagtttccctgcaaaatttggtgagcttctgatcagtctagaacgttgggtgataaaatgaaaaaaataattaaaaaaaaataat

SEQ ID NO: 71919 - DNA, 323 bp, Heterodera glycines
atttataagcatttgtagggttctcagcagtttccctgcaaaatttggtgagcttctgatcagtctagaacgttgggtgataaaatgaaaaaaataattaaaaaaaaataatgctggtgtggtaagtgtgaagaactgtgttcctccaggcaaaaaattctaagaaaatttataagcatttgtagggttctcagcagtttccctgcaaaatttggtgagcttctgatcagtctagaacgttgggtgataaaatgaaaaaaataatttaaaaaaaataatgctggtgtggtaagtgtgaagaactgtgttcctccaggcaaaaa

SEQ ID NO: 71920 - DNA, 1156 bp, Heterodera glycines
atgcctaaaattaaatccaaatttgaatggatgggcgagtgggtaaacagttagtagcttcactgatgaaaatcttgagaaatttttgattttcaattgcaaaaacaaccgatgaggaaaattttttaaaattatttgcacccctaattttcaagtttttttgtgcatatttggtgcatatttcacgactttatttgcatatttatgcgcatattttggccatttttcgtgcatatttttgacagccctgtttattatggttgcaaatatatatatatttttcgatttttgaatgcatttttccaaaataaatagtttaaaattttggtcaagaaaaaataaataataaaattaaaaaaacgtgaaaaaatttgaatttttgagccgccaaaaaaataataattttttattgcattttcattaaggaatttttaaattttatatgaaaaatttgaaaaatactaaatttcaatctctttttcttccttagcaaatgtttttttaattaaaaaatgattttcgtttagaaaacggactgaaaagagtgaacaaaaaatttaagaaaaatgaaaagattgtcttaattgaaaaatttgaaaaaatgaaaaaagaacagttaatcaaaaaaagaaatataaacaaaaaggcaaaccaaattgaaaaggaaattgccaaaaaactcgacgtaagtctgacgtcaatttacacttggaagagacaatttgaagaagaaaacaaaaatgaatggaccaaaatgaagaagttgatcaaagtatttgaagaagtgaagcacagattcattttggaaaagggaaaaatgacgagaaaagtcatgaaaattgttgagcaaaaaattgcaaataaaattggaacggatcgccaacaaattttcaaatggaaaaggaagtttaaagtgaaaaatgaggcaagaaaagatgacaaaagtgccatcatagcggaatttgaagcaatgaaaaaggaatatttgagaaaacatggcaatttaaacaaaaaagcaaaagaaattgaagaagaaattgtcaaagagttgggcacaagtcggacaacgattcgcagatggaaggcacaaatggcaagtcaaaagaaaaatcataacaaagggagacaaggggaaattattgaaaaatattgaaaa

SEQ ID NO: 71921 - DNA, 1295 bp, Heterodera glycines
atgccctcgcgctccaccacctccatctcggttggcattggcattttttttgcccttttttgctccatcttctttgccatagttactgttgctggtgttattgttggcatttccgctgccgttgttactgttgctggtgttattgttggcattttcttcgccgttgttactgttgctggtgttattgttggcactttctttgctgatgttactgttgttgttgttattgttgttagacattttttttggtattttaaaagttctgtctaaatttttaaaaattgtgtcaagtaggtccatatctataattaaattaagtaaataagttcgcgctataatcagggcttcgatttgttcttatttctaagaaatgttctgatttggagggtccaaatcttagaaaatgaaaatgttcttatttctaagaaatgttctgattttgggttattgttcttattttgttcttatttcttaaaattattcaaaaattttgaaattttatggcgaaatgtcactatgtatcaagaaaaaatttaagatttgtgtcaaaagttggtaatttttgacaaaaatctgttaacaatcgctttaaaaatcgcaaaattttcccggcggcgcctttcggcaccgccggacccccctgtccatcccccaaaattttttgaaatgtgcggcaaaaaaagcgttgttaaacgcaaggaaaagccgtctcttgcttttaattgcaatttggcctttttttggtgaaaaactattaacaaatcagaacaaaattacaaaaaatttttcgacggcgcctatcggcaccgccggaccctccctcttgcccaatacccaaaagtttttttggaaaaatgcgccgcaaacaaaattgtttaaaatgggattttttgatcccgaatgctctgaaatgtacgatttgcttatttcctccccaaaattgttaaaatcgataatgggaggcgaaaaatataatatttaatacatttttggccgaataaattgtaaaaataactgatttgaagccattttgcaaaatgttcttattttggaccctaaaattttatttttttgccttgatgttcttattttgaaaaattttcgatcgaagccctggtttaaagtaaagttatgaccaaaaatgttcaaaaaaacttaattttttgagtttctcagttcataactcttttgaaacaacgaatttttttgaaattttgcaggataataaaaaacacttaagactatcgagaagtacgaaggtttaaaaatttggtttattttggacgaagttgtga

SEQ ID NO: 71922 - DNA, 201 bp, Heterodera glycines
atggaggccagtttttggcacaaaatccttaaaaaacattcaataaccctaaaaaacttgccgaaattcgcctttgccgttgaaatgtttgtccacaagtgcattgaaactggacgaaagcaatgccaaattagaggccgagctgaggacggtcaaataaggggagaatgtccatccaaacatccatgcaaacgcaactga

SEQ ID NO: 71923 - DNA, 1100 bp, Heterodera glycines
  unsure (1)..(1100): unsure at all n locations
atggcggacatcaacatcccccgctggggcgagctggancagtggaagaacaatgtgcaccnaattcatggtggtgtgaaagagcaacaccttcggcacacaccgcancccccatcgccaaggacaacgacggncatcgccatggaacaacagtcaacgacgacgacaaaacgatcgccaaatggtggtgccggtgccaatggggacgacggtgatggaggaaatgattgtcatgctgcagaaaatggaagcgaggagaaaaagccaacaatgacgacaacgacggtggcggcggtgaagaatgaggacgaaaatatggcaaggcgctgcgcgagtttctcggcttttgggtggtcgagaaaatcctcccaagcgtctttgatggcaaaccggggacgatgccattgcgtcgtccagcaaacctggcaggctgtcaaaatattctgccagagactttctcggcatattgttgaaactaaccactcattttcataaaattctacgcttttttgaaaattttctgcgggttttttccgagaaataaaattgaccaagaccgatactgacagacgccgtctgggaatttttttttaaatttcggccccttaccctattctaatgaacagtgttattacatttattaaatgctaaccaaatttggtttaaattaattctcaaccttgtacgccatagcactgctgctgctaattgtaaggaaatgaattggttcatgtttcagctggtcggatgtccggtgtgccatggcgaattccaaatgcgcgaaattttcaaacacatgcacacctgctttgtcaattatttttatttgaaaaaagcgtggtaaattcctttccctggtatggttttgattttgatttttttttagataccgaacaatcagtacaatttgtactgcgaggcgtacaacaaaattgacggcaccttttgaaaagctctggtgaatatgtagttagcaccgaatatcctttcaaaaattcttagattttttttagaaaactcccattggcactgtgttgaatgcttttcgcaggaaaatcaaagacganaagctggccanacgatgcaaggcattgatcagg

SEQ ID NO: 71924 - DNA, 275 bp, Heterodera glycines
atggctaattcttcgagaattgtttggagtgtgaatttgttcacatttaaagatgcgttttgctccggaaattttggggtaattacagtcattacactttggccaattaatgggggccaacgtgacacaattgcattaattgtcattggcgttaacaattccaagcaaaatcgaagcattgatccaatccatgaaatatttattccgagtagattttggatttaaattatttaaataattttcatttattatttttttttaccattttgaataaa

SEQ ID NO: 71925 - DNA, 855 bp, Heterodera glycines
  unsure (1)..(855): unsure at all n locations
agagtcaggcattgccgtgggaatcggtggatacataaacaaaataaaccaccaaattattttntagattntcattcggtttcgaacgtgatcaatttcgattttccgctctcaactgatatgtctgatttttattgaattttttatactaatttttgcttgaggtatgtccatcgagtgggcagaacggcacggggatttaacaaaggcacagcaatttcttttgcttcccaggaagagttgaacctttttgaggtggttcgaacggagatcaatgaacgaagtcaaaaaaaaaaattttttttttcgtttcttcgatggttttttatcaccttttttcagtgggccaggcggttatccaaccttatgaagtgcgtatgaaagactttgaaagtttccaacttcgagcaagggtacttcctttgtttttgttaggcttttaaaaaaatatttttataggatgttatagcggcgtgcacaaagacggtaatccgtgaaacgcgaatggctgagataagggcggaactgctcaagtcgaaacgattggacgcatattttgagaagaacccgcgggagaagcgtgctctggagcaggaccggaagcagttcaagctgaatgtgcacagtgctggcattgccgacgtgccggattatattggtaaagaaaagcgagcaaatttgtgaatttacaatcgttcagttccgaaagcgcttcgtggacaggactttaacagtgagcaaaaacggacaaaaagtgaaaggaacaatcggaagagaaaacggccatttgagaaggcgggggcaaaacggaagcacgcaaaaatgttatccgatccgttgcaaagcttcaaattt

SEQ ID NO: 71926 - DNA, 106 bp, Heterodera glycines; identical to SEQ ID NO: 66704

SEQ ID NO: 71927 - DNA, 100 bp, Heterodera glycines
ggaaataagcttaatagggcctagttaagctgtaaaaaaaatttggagcgatttgaatgagaatagaaagagccaggttcgatgaagttatggtaagcca

SEQ ID NO: 71928 - DNA, 1016 bp, Heterodera glycines
atgtggcttgaattacaggttacacaactggaaatggaagcgcaaaaaattcgtggcatttatgacgccacccgtttggaagcacaccgtgcaattgaggtattaattactaattgccgttaattacattgcaattagtaattagcaatttttataactgtaaattaggtaattaattttactaaattgaacaattaatgatttaggcggcgaatgcgttcacgcaaattgcgcacgggttgctgcaggcgcgcaacaacactcgcaccgcacaacaactgatgaaggagacgcaagggcatctgcgcggcgttgctgaagcggcaacaaacgcaaaaagtgcaagcaaatcgatgggcgcaacaattgacacggctgcaatggaagtgtctgcggcgaggtaagaggaaaatttagcgatttttttttgagtaaaattaatgatcagtttaaaaaaaataaaacttagaaatgtttcaaaaaaattcaactatttttttataagaaaatttcaagaaaaaaaaatttttaaatttttctggcgaattttcaaaattttatgatgaattactaaaaagaatttttctttaaaattttctccaaaaatagcttaaatttctttctttcttgaatttcttataaaacaaataaatgatttttctgaaaaatttaaaaatatatttgaataaaaacatttttttgatttgcttcatttagatcttcaaaaaacgattattacattttaaaacttaaatttaaaaacaatttaactaaaaattaaacattaatttttgattataaattttattttaattgcacgctttttttattgtcaatccctcagggcccagggcgacactttggacgtgcgtttggccaacattcagccaaggctttctcaggccaaagcggacctggccaaagtcagccggacaaacggggagctgaacgcacgcgaggacacagttgccgaaattgacaaaatcatggacaaagcggagaatgcctatcaaaaa

SEQ ID NO: 71929 - DNA, 1071 bp, Heterodera glycines
atgcgcatttcgacagcgtgcaaaatagcaggacaaattatgatgaaaatcaaaaacttttccgggtttgccagtgaaaagggcgggggcgagcagttcagcaaagcggtgtatgtgaagggattgccgtggcgtattttggcactttcacaagcgggcaaagggacgaagaaaagcctgggcttttttctgcactgtgatggaggcaaaggtgggggcattttagatctttgatgctttcattttgattttttgaattttgggtgggcaatggcgattctcatcgagcaaatcgaaacttaaaacgaaactgcataaaattatcaaaacgaaactcggaacccaaaaaggcctgaaattctcgaaactttcgaacgctcgaacccatttttattattatttttttttaattttggaattaatttattttgattcctttttattccattaaaaaatatcaaaaatttgatttttaatatcggatttaaattagggtaggagccagaaagaaggggcgggggaggagggggcgaatcgcgctcaaaccggggaacggggatgaaatatttttatcttataaaagaaatattttattataaattttactcctatttatattttcatttactaattaattgtgatgcgccattttatttttatttttttgcattaaaaattttcaaataaaaatcttttcattgaattaagctgtcgattggagctgtaagtgttcagcttcgcttcgaattctttctcgatcgcaaaatgaagaacgcgagaatttcactcggagattcgataagcaaatttttaatccaatttcgaacatctggggcttcaattcgttcatcactttcaaggcaattagttataaaacaattacaaatggtaaaaattaattaaggaattgatggacacgcgaaacggactgtacaataagaaaaatacagtaaccctgggcattcaatttactgtggaaggcgaagacggaggtgaacaacaagcgatggaagccgactgaagaagcatttcgaaacacaaagcttgaagccggacactatcagtaccaaa

SEQ ID NO: 71930 - DNA, 136 bp, Heterodera glycines
aaattagtcaaaatacatgtcagattcgtgattagcgacctttaaaaccccggataacaaattatcatggttttttatcacaaaaaaattttgcaaaacaaaagggtcccccctttttaaaaaattttcaaaaagg

SEQ ID NO: 71931 - DNA, 922 bp, Heterodera glycines
atgcaaggaaattgcaacgacatgtttgtgttaaatgattgtgctgaagcggacggaaagtgcggcaacggcacaatggacaaattctgtgaaaagcctttgaagtggaattgcaaagagtgcaacggcacaaaatgcaacaacatttccaaattgtccaccgcatcgacagcgaagccgatgataaagccaataacggtgaaaaatgatgaaaacgtgagtctttgaagtggcgctcaaaaacgcaaaagttccgtaaaaataaatacctgaatcgaaaggcgtctccgggaaatttttgaatattctgtaatttgttgggaaatactgtggaaaatttcgcatttttcaccttataaaacaccttaatcgtcgaaaaaccgtaagaggtaattgaatagtaattaagacaatttgaaaatgactgataggtaattattagggaccggctttagatatatgtacttcatttttttgcctaactttaggccatctaagaagaatgaaaaacgaatatgactttgtttgcggcttctagacccaaaattttttcatacttaaagcggatttttgtgcttaatgctttatctgagtcaaaaattagagatgaaaattagagttaaaagggaaaaatttaaaaaatatattaatatattccttaaaaggacactgacaattgtctcactcaaattttcaaaatttcccccggcggcgcctatcggtaccgccggaccacctttttccccaaaagttttctggaaaaagcgcgccgaaaaaagtgatgtgataagtaaatctaaatttcaaataatattcgaccatttggtccaaatgattaattgcttgaaataattgaagaaatttgatttgaaaattttctttaatttaatttagctttaacttttggattttattaaataaa

SEQ ID NO: 71932 - DNA, 896 bp, Heterodera glycines
atgacagatatactcaaacaatgggatatcggcgaagctcaggaagcgcatagatgcgtgggcagctgccagacataccgttgctcagacagtaagaaattagaaaaagtaaaaatgacacggtaattgccctggccgcttacgccaaaaatttttctcaaagaatcggaatttctctaatttgcaaaaaccgatagagcatcaaaaacagatggttcaaagtggtattctttttttgagaaaaatctttaaaaaagctaattcaaaaaccgatttctattctctcgaaatttttgaaaaattttcggcttccttaacatggaaaaaagcaataatttgacttagagtatggaggcgatcttttcgtgatcaatgggtgcgataattgggagaaaaaatgcctcgacaatcaattggaaaaattttgcaacgaatcattgacaaaagtgcaagttgtggggaattgtacgcactgtaccacctctttatgcaacaaggaccaactcaaattgtcaactggtaacaaaaataaggaaggaaaaagagcaacaatgttaacgctaatatgccaattaattaatttgataattggtaacgaaatgtttgtccccagccacgaaatgctacggcacccttctcccttcgaatgattacaaggtgcccaaggagttcaaggagctgttcaccaattacaagaagcgaagcacaattaattgcaagggagagaagtgccaaacattcacttgccaagacggtgaaaattgggcaaacaaaaagagggcaaacaattgggaatgattgtcttaattttatagaattgaggaaaatgcctttcggcacctttcactgaacactttttgctttcgtttttttgactccgatcccaactcattaaa

SEQ ID NO: 71933 - DNA, 318 bp, Heterodera glycines
aatgagaaaaaagagatagccattttttggtcaagaattttttttgtttgcgtttcaaatatcgtaagattgtttgatagggccagacaagagaaggcaactgttggtaccaagtttgcggtaaaaaaatgacaaaaaagagatagctattttttggtcaagaattttttttgtttgcgtttcaaatatcgtaagattgtttgatagggccagacaagagaaggcaactgttggtaccaagtttgcggtaaaaaaatgagaaaaaagagatagctattttttggtcaagaattttttttgttcgcgtttcaaatatcg

SEQ ID NO: 71934 - DNA, 289 bp, Heterodera glycines
ggtcaagaatttttttttgtttgcgtttcaaatattcgtaagattgtttgatagggccagacaagagaaggcaactgttggtaccaagtttgcggtaaaaaaatgagaaaaaaagagatagctatttttttggtcaagaatttttttttgtttgcgtttcaaatatcgtaagattgtttgatagggccagacaagagaaggcaactgttggtaccaagtttgcggtaaaaaaatgagaaaaaagagatagccattttttggtcaagaattttttttgtttgcgtttcaa

SEQ ID NO: 71935 - DNA, 513 bp, Heterodera glycines
atgaggcggtccactccaaatctgttcagcgtccctgactatcagcagccgagcgcatttcgaccgccgcctcccgcagccgccgcggttgccaaccttttgcagtcgcagcaaccgcctcaacagtcgccctcctcagtcgccgcgaacgcgtcagcgacggttgcggcggtcgcactgagcaacgcactgtcttccgttcagcaactgctccaacaccagcaacaacaacaccagcagcaacagcaacaacaacggcttgccgcgatggcagtcgctgccgccggcgccgctaccgccaacggactgttccggcaacactcatttggcggcatcggcttcaccgagcagcagcagcagcagcagcagcagcagcagcagcagcagcagcagcagcaacaacagcaacaactggtgcaactgcaacaaatcgctgctgtgccgcaacaacaacaacaacaacaacaacagcaacaagttgctcacaatcagcaacaaaattcgccaaaatga

SEQ ID NO: 71936 - DNA, 153 bp, Heterodera glycines
atgcgattcaatgggaatttcaagacttctcagatggtatttacaaattctgatcaacgtaaaatttatccttggctcagtgattttcaaaaagttgctaattttttaaaatttttagatatcgatataagagagatgaagctgaccgactaa

SEQ ID NO: 71937 - DNA, 1253 bp, Heterodera glycines
atgcaaactttcccaggttgtccaaggcgttttgcacaagaatcggctgccggttgcggtggaaagcacaacagcgagcagtacaacaagacgaactacccggcgagtgcacaacaaccagcgaccggtggtgctgaacccgttgaagacgttccattgccaacgccggctgttgtgccgactgaccgtcgacgacaacacgttcatggacccggaggatgggccaacctcacggctcgccctttcggcacatgccattggcaaccacagcaactttttggtgccattgcaaggcgacaaccggatggagggtgtgccgttggagaacggcgagtacagcttccggctgcaagcccgggaccggatgggccaggtgggcatcggctttttgaataccgtttttatatacgagagttggaaaatgacgagaattttatttgtttttcattgccccgatgtgaaatgttgctttcataaagagttaattaattgcgattttttttttgaatttattagttaaataataattagtaaattttaaattaaatttaacccataaaaagttttgaacttcttttttttgataattcttaatttatacatttcatatatatttaatggcacttttcctatgccgcaccccccccccccaaaatgtcattatcccgacaaacgaaaaaacttttctaaatctttgagttttttattttgacatagattttgattagcacctcaaacagccccggaaattgttttggtttgtcggggtcatgacatttttaggggcgggggcataacggaaaaatacaaatttaataaacagaaataaaaatttaatttttttcaattaaattcattgtcttgcaacaacaccgtattcttggagtcatacaagaaagcacaaattagtacaattctgtacaatttttttactatgtaatagcttaatttgagaaaacaattttgtgtcgctaaattttaattttaaattttattaaaataaatattcaggcaaattcggtgccattccaagtgattgtcaaggagcacagctcacgtgaaaagccaacccacagctattcattgctgatggatgtgccgttagaacgctttttggaccagccgcagtttatgcgcgactttgtgtaccgccttggctcgtctgttcatcgaatttcggatgccgaagcggccgcagaaggtggtgaccgaatggcacgaattgccagcgaaattcaggtgggtttaagaaa

SEQ ID NO: 71938 - DNA, 355 bp, Heterodera glycines
atgaacgcgcaagtgggcaacagtcaaactcatttgaatttttgtttcatgtttattaaaaccgaccttgcgcacgtggaacttgctgcccatggccttgagaaagtcgtgccgtacccgctccgtgctggcatgcatcatccgatcacgggtggcattgatctgacgatcatcacaaattttgcgactcaatgtcgcattggaccatttcagcattgtttgatgaccaccattgtccaacagttcctcaacctaaaacattttgccaaaacataaaatttgaaatgattaagaaatatgctcgagagtctctgttcatgactcgagaattttctgcctttattatcgtaataaa

SEQ ID NO: 71939 - DNA, 223 bp, Heterodera glycines
tcggtaccagcccaacaacaacagcagcaacaacaaaacgtctgcattggcccatgccccagcggcgaattgcccctcgggggtaaaaacccggtgttgtgcggcgatcggtcggactcaatcggctgtccttccggctttttctgcgccgatgggcccccgtcggtgtgctgtcccggccacaaaagtgccgcttctgtcggcgatgtccgacgaaagccgt

SEQ ID NO: 71940 - DNA, 359 bp, Heterodera glycines
  unsure (1)..(359): unsure at all n locations
atgacagagaaatataagcaaaaaaganaatattcaaaaaatgaatggaaacaaaattatgccgaaatttgtaagaaaattggagttagcaaaactacaataataaaatggaagaaacaatttggcattagcaagaaaagaataacggaggaagaaaaaaaggagaaaatgaaaatttattcgcaaataaaaagagaaaatacaaaaatgagtgataatgaaattgccaaaacattgaaaattcaccaaaataccattataagatggaagaaacaatttgtcgaagaaaattttggaggattgaattgatgcttctaaaaaattagataaatttgaccaaaaattttaaattgaataaa

SEQ ID NO: 71941 - DNA, 1167 bp, Heterodera glycines
  unsure (1)..(1167): unsure at all n locations
tcttacgtgccgtaactagcggtgtgtttgtgcttgctgctacgtccgtggccgtgatgagacgacgcggtagtgcccgtgcttggcctagcacgtggcttaagactcaatgagtgtcagctcgggcaccgccagctttttctttttttttcattatttttttttacacttctgttgaagaatgaattctagtcttatcggtggatcactcggctcgtggatcgatgaagaacgcagccaactgcgataattagtgcgaactgcagaaaccttgaacacaaaacattcgaatgcacattgcgccattggagttacatccattggcacgcctggttcagggtcgttaccataaaatgcactgcttgtgcgttgcttcgtgggatcatgtacttgtacgtgttcttacgttacttgctcagctcggctgtggggttttggtgtgctggcgcgaacttgtggttctaattcgcgttttacggaccgtaactcaagcgcaccaatgctttgcatgctgtggcggagtgcctggattactggcattcctgctttgatttttcgacctgaactcagacgtgaacacccgctgaacttaagcatatcagtaagcggaggaaaagaaactaacgaggattcccgtagtaacggcgagtgaactgggaagagtccagcgctgaatcgcagctcctctggggttgcgaggtgtagcgtatagaccgtgagcttgggttggcccgcttgttcaagtttcccttgaccggggctccagagaaggtgcaagacctgtccaactggcggtgcctacccatctttacgtgtcttggagtcgggttgtttgggatcgcagcccaaatcaggtggtaaacttcatctaagactaaatacggccacgagtccgatagcgaacaagtaccgtgagggaaagtgcaaagcacttgaagagagagtaaagaggacgtgaaaccgatgaggtggaaacggacagagcntggcgtatctggtctgcattcacccgtttgttgctgtacgttgtactgctagcctccagactggggtttgctgtccttctgttcagtggcgaatggggcatttgcaggcggagtgcgctgagatgctcggagtagctgcgtgagctcggtcttgaggccagccttttggggtctggtaccc

SEQ ID NO: 71942 - DNA, 351 bp, Heterodera glycines
atgacttgcgcatacgctaaactccttggtccgtgtttcaagacgggtcgaacagatgaccggcttttacaccgagaacgcacaagtgagagcccgagctggaccgaactggttgctggtacgtgtcgcacgcgaccgccaccgacccccagctcgagtcaacacggacccgaaaccattgcacaattcacccagagtaaacagcactcccccgatccgggtaccagaccccaaaaggctggcctcaagaccgagctcacgcagctactccgagcatctcagcgcactccgcctgcaaatgccccattcgccactgaacagaaggacagcaaaccccagtctggaggctag

SEQ ID NO: 71943 - DNA, 976 bp, Heterodera glycines
atgcaacgcgataatttgctcacttgccttgccgatttgttctcaaacatttcgagtcagaagagaagggttggaacaattgctcccaaaagattcgtcacaaaattaaagcgagaaaatggtagtttcaattaaaaaaaagatcaaaatttaaacggttctaagattttttgcttttttaagaattgttcgacaactttatgcagcaagacgcacatgaattttttaattatttgttgaacgcaatttctgaagttttaatggaggagaaaaagaaggagcaattgggcggaagcctaaggaaagccaacagcgcaatggcaccaaacaaacggtcgttttccgcgaatgcaaaaggccaacccaacgatttgtccgcaaagcaattgaccaggtactatttatatgtaaaactatgttgtatacatgttatatcaaaaaactaaaaaaatgcataaaatgggttaggagattttttttttgcttttttactgtttatttttgcaaaatgtcgattttcaagaagtctttctttttaatgggtttttgttaaggcaacatccctaaaaggtattaaattacgtgccgagcattatgcattattacaaaaacttatttttttcttcgtattggccaaagaacattagcagaaaaacccgccctaatgatatttttaagcacttctgacatcactggtcaacaggagttgacgtggattcaagaagttttccaaggaacgcttacgaacgaaacgaaatgtctgaactgtgagacaatcagcagcaaagacgaggactttttggatttgagtgtggacattgagcaggttttggccattcgatgtgccattgtcaagccgaattggctctttttcagaatgtttccattagccattgtcttcgcaatttttccaacatggaaacactgtcgggtgaccagaaatatttgtgcgaaacatgcggcagtaagcatgtaa

SEQ ID NO: 71944 - DNA, 862 bp, Heterodera glycines
  unsure (1)..(862): unsure at all n locations
atgagcctgggactcgtgtttttctcattggctgacagcaaagtgttgcncaatttcgacccncgcggnnctatgaatgatttcactcgctttggtggcggatgcgattattggcaatgtgcaggagaaagcgatgagggaatataatgcatcaaacgacgaaaatggtgaatggacggggatagggcgctgacaaattgaataaagcgaaaaatgacaatttttaaattttttggggattttcatgccctaaaatcgaaccgatagtcatttaaaggttcggttccgttcgcagtttatggctatggctaatgtccattttgatggttaaattgaaggtgctgttctcctattccatcggtttcgcctatattttggtcggcctttgcctttccggtcagattggcgaggctttccttttctttgcccaagtttgtcttcttcgtcctcctctgtcccccttccccgcccctatagcgccctctccaaacttacggctattccgttctgattggcatcgtcggctatttcggcgtcaatgttgtgctcacaatggtcagaacttcgggtgctttggtcaccgttacggtttggagccgaacagagtccgactttcttttcccattcgttaatttaggtcaccacaatgagaaaggccgttaccattgttttctccttttactttttcgccaaacccttcactttgggctatttgtggggcggtttggtggtccttctggcaatttacctcaatgtgtacacgaaaaacaaaaagcaatttgacgcgaaattggctgagtggtggtcgaatctcgcggagtcatacaatggccaaaagtttgccgctgagcgtaaattattg

SEQ ID NO: 71945 - DNA, 636 bp, Heterodera glycines
atgcgcgactgtgccaaagcgaaggccgaaacaattgccatcctccgaatcatcgcccatttcaaaaacggcaaaaacgaaacttggcgtttcgtttgtccgctgattgactatttgaaatatttgacggaccgaacgtttaacgcgaaagagaaatggccagcgaattggcaatgttatggtgcggaaatggcaaaaactgtgagagagcaacgcaaaatgctgaaaaataaacattttgaattaatcgacacgcttttaaatgatgggactgaagaaaacgccgaatttttaattatcgtacgcgaacagcgcggtacggtagcgaaacttgagcaattactgtacctaaacggcatacttaaactgtgcgaaaggccaaaaatgcaactaaaactgatgaataaaaaatgtaaaatgattatttatttataactaattaatcacaattaattaaaatgaaaaattaatttaaaaatattaatagtgactaatttacatggacaaaaatcattaatacgataaaaactataaaatatgcaaaaaacaatccaaaaatgaaatatgattaaaatatatatccataaaattccaattaaaatctaaattaagcctcaaaagtacaaaattaataaa

SEQ ID NO: 71946 - DNA, 756 bp, Heterodera glycines
gaattctctcgtcgctgcttggattacattgaccaaaatgccgaaactttatttgaatcagaggaatttttacaaattgatcaaaatttgttgtgcgaaattttcgggcgtgaccaattgaaaatcgccgacgaactcatcatttggaatgctgtactaattaacgattatattctattaaaatgctaatttttattaaaaaattattttttcaggcactccgttgggccgacgaaaagtgccgtcaaaatgccgtcgaatgttccgctgagaatggtcgttctgcgcttggcccggcactgttcaaaattcgctttcctctcatctcgacggaattttttaccaaaagcatcggtatcaattgaatttttaagctaataaaattagttttccggtttatctcagttgggccccggcacgtttgggccaagcggggttttggctataacttttttcttcgccaaccaaatccaacaatcttggtatcattcgatagccctaagtgtcctatattagcctgaaaaattttgaaagatttcgctaaggttcaaaaaagaatgataccaagtttgttggatttgtttggcaaagaaaaaaattatagcaaaaaccccgctggggcccaactgagcgagtccgattagtttcatatattatttttgcagttccttctggcgttttgacaaccgatgaatttctctccgtttatcagttccattgcagccccaatctccgtgatgtgcccggccttaaacc

SEQ ID NO: 71947 - DNA, 435 bp, Heterodera glycines
atggcgtcgtcaaaatcgggcattttggcggatcggatgaagcatttgttgggcacggctaaacttgcggatgcgtactttttggtgggggacggaaaggaggcgagtttttatttcaatttttatatatttctaagttttatttttgattttttaagcttttgtcggcccataaactcattttggtgtccgcttccgacgtttttgaggcaatgttccgttttgactccaaaaatggaaaaccggaaaagggtaaaggaaaaatgcgttgtgtttaaaatttttttgatttttcaatgtttttagcctctgtcgacaatcccgtggaagtgcccgacgttgaaccaacagcgtttaaagtgatgctcagcttcatttacgcggacgatttgagcgaattgaacggagacaacgcaatggcagtgctttgcgcgg

SEQ ID NO: 71948 - DNA, 62 bp, Heterodera glycines; identical to SEQ ID NO: 67267

SEQ ID NO: 71949 - DNA, 986 bp, Heterodera glycines
aaaacaaaaataaatcgattttttcaagtgtccgtttggggtactcaaacaattatggggagcaaaaatccaacgcagaattaaagtacaggctatagggaagctactcccgaaggattcggtctccccataaatctgggcgcatcggttcggggggactgccccgaaaacaaaaaaatcgattttttcaagtgtccgtttggggtactcaaacaattatggggagcaaaaatccaacgcagaattaaagtacaggctatagggaagctactcccgaaggattcggtctccccataaatatgggcgcatcggttcggggggactgccccgaaaacaaaaaaatctattttttcaagtgtccgtttggggtactcaaacatttatggggagcaaaaatccaacgcagaattaaagtacagactatagggaagctattcccgaaggattcggtctccccataaatctgggcgcatcggttcggggggactgccccgaaaacaaaaaaatcgattttttcaagtgtccgtttggggtactcaaacaattatggggagcaaaaatccaaggtaaaaataaagtagaggtatatcgaagctattcccgaaggattcggactccttataaatctgggcgcatcggttcagggggactgccccgaaaacccaaaaaaaaattttttggataaaaattatttaaatgaactgactagataatatttaaaataggttatttctcttcctttcagtatccctgcaaagtttggtgcgcttctgatcagtttctgaaaaaaaagttaagcctaaactttttggcctgtttaaaaaggaattaaaaatttttaaaaattttattcatctccctttttgatagaaaaagcatcagagtgcctaaactaacatgtaaataaaatttggtgcgtttcagaaccctttctgaaaaaatatttaagaattaattttgcaaaaaataaataaaaacgaaagact

SEQ ID NO: 71950 - DNA, 661 bp, Heterodera glycines
atggacagtttgtgcggctcttcggatgacacgccgttaccgcagaccaaaaagtctaaaatcattcggaagaaactttcggctacattcaaggtactttggaattgattagaaattcgttttttgaattggaagatcatggaattttagggacgggaaaaaatttcaccgaattttgccgttaaactttgaaattttcaaaaaatcttattttttacaagaaaatttgaggaaaaattttgtcaatggttcttttctggaattttcatataaaaatttttcttattgttagattttttcttgaaattttaaaaactttttaaaaaatttcttcggtgaaattatgtcccggctaaattttggggtgcacccggaatttctgtttttttttgcgcggacatttcaattttgtttcaggccgactcgaaccgcgactctgtgcaggaggtcttggatgctttagacgttgttcaaacgagagatagccatttttctgggatagagtataaagttataaattccctcaaaaataatcggactattgcgcaccgccctccctatcatgctcgagagcatttgtatgtgtataaaatttatcaaaaaaagagatacccatttttctgggataccctctaaatataaaaatcctctgtgaaataaa

SEQ ID NO: 71951 - DNA, 484 bp, Heterodera glycines
atggagcaggaggagaacagcgagaagagcacaacgccaacaacggaaagtgacatcacactgtctgaccgcatgcagcgcaaaagcgacacatcgtcctcaacaaatatttgttgcgacgaaacggccgaggcattttttgacgcaattttgccgcatgacaaacttcaacaaccgcagcagcaaccgcttcagcgtacgtacacgacaacatcaacaacaacgacagcaaagaggcagttgacggaggacgagcgacagctgttagccgacgtgatcgtctccagcatgtttggcacgtcgagcaatcaaacgaacggcgaagacgctgcaacaaattcagctgcagcggaccatgctggtggcagcaacagcacaatacgtcaggcggagattgacgagcagcagcattacgctgcaagcacaacttcatcatcgtacgcctgcacagtctcttccacgtccaaacaagctgatggtccag

SEQ ID NO: 71952 - DNA, 1316 bp, Heterodera glycines
gtatttacggagaatcagcgaaggtgcggatccgactttggtggacattgagagtttagacgaggaaagtggggacggggaggagcgggacgaagacggaccaatggtcggacaaacggtggccgcgtcgtgcgaagcattcgccaacagtcgaatgaattgtggtaagaacacagagatggatgaaggggtgttgtcagagagagtggcgagctcaaaagtacaaaacacagcagatagtcataaccacaaaaacaaacaggaattctcgcttttctatgacgaaatttttgttattttggggttcaattttcaactaatgataaaatgggtggtccagcggtaccgtcggaaagcgccgccggaaatttttttaggaaataaaaaaggttcacatttttttgaatttttaaaaatattataaataaagaaattttcgataattttttcgctgggttggggagcaaaaaaatttaatcagaaaaagaacaattaatgcgtgctatttgtgagcaccgtggcgcagtggaagcgtgctgggcccataacccagaggtcgatggatcgaaaccatccggtgctatcatttttttctttttttactgacaataattgttccattaccactaaaattattttattgtataatttaggaagacgagcaaaaccgaaaaggcaattcattacgccgaaagtacggcaagcagctccaaaaggggtgatactaaatgggtaattgttttggaatcattttaaatttattttgccagagtaaatttgtgtctgccattacccattcgcattggaagtgcaaattgtgcagtgccgacatttacgcggcggttattagtgccggcgttataaaacacttcaaaaaattccatcgttcatttttgtccactgttcaatttgagctttgcaaagtaaacattttattggacacataaccgtaaaattctactcgaaaattaaggcgagactcgagaaaataagcgacggaaaaatggaatttgttggagaaaagctaatcgaatgttcaatttgcagccaaagttttcccgtgacacctccgttcaacatttgtagagccatcagacacatcaaactaaagcatccggaagtgatgccggaacacagaggcggacagagtgcccgggtgggtgggaaaggtgcaatacgtttccatccctcttcatcgtattcaaactccgcccgaaaaaattaaaaaatttttttaatttaatgagattttctagtaacaattataaattttgttttttaggatggatttcaatgccaagagaagcagcagaacg

SEQ ID NO: 71953 - DNA, 623 bp, Heterodera glycines
atggaatggacgtcgcccggatcaacttcagtcaagaggaccaagaagtgagttttttcacttctttgaatttttgagggccatcttttagtaaaataataaaattgcagtatcaccgtgttaccatcaaacatgtacgtgaagcagctatcaaatgcgacggaggacgtgaacaagcgcatcgcgtacggcatcggagtgggcaaggagcgcgggttcatccacaacggcgactttgtggtgattgtcaccggatggcaagcgggtcagtgtggttgggaagtgacgcatttactcattcatcccccgtctttgcctccccaaaatttcaaaaaatagagaattttgatcattgattgggcatggcctaattagagcattccttgcttatctttttgtttaattgacaatgagtatcccaccacatgtaaatgattgattgccccatttgttctcaggtgccggctccacaaacacaatccgtttgcagaaagtcgaataacagagggacgtgtccaatgagcttttgaagacttcgcgtgaccgatgaaaactttttttaggaatttacgcttttgtgacttttgttttcatatttttgttgactcggtgtttatgctcaa

SEQ ID NO: 71954 - DNA, 563 bp, Heterodera glycines
  unsure (1)..(563): unsure at all n locations
gcacgttggccataatttataagggtcgagggtcgataaaatttggtatatttttatgtatgaacttggaatttcgaaacaaaaatttattgtttcactgaggcaaacgaaaaaaaaggcaaaaaaaaaaatcggtttgtaaatataaaaatgaaatattgtgtgtgaaaagatagaatcaacaaatgacggatcgaaaatttcttttataaagattttgacaaaaatgaccatggtcatgaccatagctatgagagtgggaagagaagcaaaaaaaagaatcgacatgccaattcaaagcaaaatttaaaaatttactttttaaaatgtaaattgttatcgcccaccccatattagagaaatcctgaaagaatgaaacaattcatttattgaccattttctttgcattcccaggaaattcacttttatgttcgtagctgtatagaatgatcattctttgatattccaatggtttatgaccaaatttagattttttggtcaattttggaaccanaagtgagagatgagaaaattttcgactttttgttcgaattcgggtccgg

SEQ ID NO: 71955 - DNA, 653 bp, Heterodera glycines
atgttatcccaagaagagacagaggatcgattggtaaaaattttaattattatttaaatgttgatttaattctttttatttattcaggagcgaacctctgtatgcggaattgaaggatctgatggtttgtccgggcgatttgcggaaatgtctgtcacacttcggacatcggaaggatcagcgcaacttggtcgtcgacgagctggattggcacgacgacgacgacgacgacgacataacagaaggagcttggtgaaagagctatgcttgtttaataaatgtcgaccggaatatctcgcgatgatgcttcgaagaaggaagaaggaaaatatcaaatttataggcgatcggaaaatcgaaactgtacatcttcgacagaatttacaaatttatccggaatcatttactctttttggtgctaatcgtatgtacgcctatcgtggtatgcttggtgtcacggtagagcaacatttatacgctaagcatcgtgtccgtctaaaatttcccaacctcccatgtgttgtacaagatggcggcaacggccatcaaagttatttcccacttgaacttttgaaaatatcttcgttagctatgcaagatgaaactgcttaattatttgttgtatttttttaatggctgcaattataaagaaa

SEQ ID NO: 71956 - DNA, 177 bp, Heterodera glycines
aaaatgttaaaaatttcggaggtattttttctaggcttaaaaaatgcgctgatcacgaatctgaactcagattttgaaaatcattgatttttatctaggatttttcatcaactacttgatttttttccaaaattttaagaaaattagtcgggcttaaaagtcacacacagatgttgt

SEQ ID NO: 71957 - DNA, 881 bp, Heterodera glycines
atgacagatgctcagcgttttcaaacgattgtccaagttcatgcatttgacccattcagaaacactgaggcggcgcttgaaaatgcgaataacattgcggaaggttttgttttttattttcttgtttgattattgtttttagggattatccacgttgatttgctgaactttttggaggctaatctaccgaaaaaaaagaaaaaggttctgcttggagttggtgatcagcgtttgtcagcttctctagtagaggcattaccaggtacattttatttttgcgaccaatgaaagattatagcaatcatcgaagcacgaacccattcgctctttcatggaatcataatttaagcgaaaaccatttaatttttcctcattttttatgtattcgtgttgctttcaatggcgtcgtgcaggaattgcttcggggcattcggatgcattttcgcgtgttggccaaggatttgccacatgcacaactcggaaaggcacaactttcattgggccatagctattcgagatccaaggttaattcaataattggtaacggatggataatatgaagttctacgatttaaggtgaaatttgacgtccatcgtgtcgataacatggtgatacagtcaattgcactgcttgaccagctggacaaagacatcaacttgttcggcatgcgcatcaaggcttgtccattccatcgcgaatttattcccgtattgtttgaatttaggaatggtacgcttaccactttccagagttgattaaaatagtgccggaattatacaaatacgtgtgttgtgcaaccgcaattatgaatcgagaaaaaatggatgaagcggggaaacgaaagtcaaaggtactaccgagaaaatttgacaaagtttaa

SEQ ID NO: 71958 - DNA, 514 bp, Heterodera glycines
caaatacgccgaaatatggtcttttgttccattcgactttcattggacgcgctcaggccaaacacaaaggtcgtatcagtcgtttcttggccaataaatgcagcttggcctctcgcatcgactgtttctctgatgttcctgtgccctctttcggcgaagcattgcgtcagcaggtaagcatatccgaaaataaccaaacatgaggaaggtcaacgagaaacactaagggtcgggtttcgataaacgaatataaaacaaccataggtttatattgaaaccataaaaaaatatatgattaaaaaggggaagcaaattaagattgttcaaagctgcttttttctaacaatgaatgagttatttatttgacctatgtaataaatgtttaaatcttaagatgtcaattcctgtttaggtggaagagcgtttagtttattacgaaaaaggagtcattccgaagaagaatcttgatgtaatgcatggagctgttgaggaggcgacagtcgaagttgaaaag

SEQ ID NO: 71959 - DNA, 485 bp, Heterodera glycines
atgccgaaaagtgacgaaaggattttgggaccatcagggaaatttgagcaatttattctggttatgcatgtaaattaagagatttggcgacggaaggtcatttgggggtaaatgcgaagcaaaggaaaaagggcggatgggcgagacggagcaaaaggcggagggaaagggggggagggactggttttggtgttggtatttggtacatccgacggtttggcgccgtcgcaacttatgggatgatgacgaacgctcaatgcaaaacgatgacaataaataagtgaacaacggagcaattgcagaggatgagaaaggcgaaagaaagcgggaaaaagggacaacggaagcggaaacaaacggagaagcggaaaacgaacaacaaccaaaggatggataagccaattgcgttacttctgaacaattaattaaggaaagaaagtcctctcccatttgatactctaagcaatcggaatttcgagaaacaa

SEQ ID NO: 71960 - DNA, 557 bp, Heterodera glycines
ggtttggaacgcgtgacgatgcttttccttgggttgcccaacgtgcgtttggccagtctttttccgcgcgacccgaaaagaataacgccatagaaggaagtgagagtttaagcgactttactgttgttttgcaaatattcattcatataagttgttttacaggaaattgtttttgaacaaaaaataaatattgttctggtctcacattttctggattcaccaaatcgaaactcaatgacctctctcttcaagcgaaaatttaagtgaaggattgcacaacaaaaagctgaaaggatggagaggcgacacttgtcccaatttactcttctataaagcccaatctgccgattttttctataaccttaattgtaagtataacatccctcaactaatgaaaaaggattcggcgacctctcaccgcaatatttttatttgtttctcgaaattccgattgcttagagtatcaaatgggagaggactttctttccttaattaattgttcagaagtaacgcaattggcttatccatcctttggttgttgttcgttttccgcttct

SEQ ID NO: 71961 - DNA, 80 bp, Heterodera glycines
gtcctgcccataatatctgtggcatggaataattttggaactgcgctgactaacggcggtgcttaaagtgcgctaaaaaa

SEQ ID NO: 71962 - DNA, 912 bp, Heterodera glycines
ctaatgtaatgtatcatttcatattggggttttaagtcctcccagccattttattggccttgatcttgagatggctttcaatttccattaccacgaagtaggccattacaccataattagatcgtctaattcttttaccgtgctttgaaggttcttcaaactattgctgagatgttcattgacctgttcaaatatttgcaaggcaattacattgctgaaattgaagcagtccgtcggcaatacccagccgagccgtttctctttacacaaagtccactcgttttgcagtgagttattttaaatacactttcacatttattctcccattccgtcgtttttatatttatggggttttgtttttctccaatgggtcttttaagtctaatcttcttggcatcattttttcgtagaaccatttgcttgttcccctactcgtttgcccttgaaaattcgtttacataaacttttccgacaaagactattctattgccgctttctacgggtaaaataataatagtggatgtgctcatcatgttctacggctcctacattattataaattagtgcatttaaattgacttaaattctgcaaattccctcacattctatttttcattactttcataaagataccccgaagcggtggccatgttaaagaaagctggtgttgagcagggagatgaagaagacttgagtacgccaaatgaaaagcttttgggcagattggtgcgtgagaaatatcaaacggtgagtgacggaatgagtgttgagggaaatgaaaaaaatttgaaggatttctatgttctggacaaatacccattggctgtccgccctttctatacaatgcccgacccaaatgacaccaaatattccaatagttacgacatgttcatgagaggtattgcctaattg

SEQ ID NO: 71963 - DNA, 779 bp, Heterodera glycines
atgacttcgcagaaaccggcggaagacgatccgattggtgctgaagaaacagttacgacagctgcagattgtgtcaatgaactgctggaaacaacagaaattcaagcggaagttgatgaattggtaaagagtgtcgttgaatttgtttcggaagcggcctcagcagcggcggatgatgttgaccatcagcagcagcggaatgcggcggatgagtcggcaaagagtcgttttggcatttcgtcacatgaaattgccattccctgcaaggaattcgaccgtctgttgcgtaaaatcggtttaaaatcgggggcaaagaggcaatgccctgggaagaggatgtgccctccgcgcaaagtgaaggcatcggcatcggacggagtcagtgcgaaaatcccaaaactgagtgagaatggcacagctggtgggaagcagaagaagaagaaaatgcaaaacattgtggaatttgaccaaggttatttggggactcacgatcagaattaaaaaaggaaacgagcagggattttgatatcatattcttgtctggcataaattccgaatttaacgaaattactgatgattgaaaatattccttattataagggtaaatcgctaatttgttttgttctttaagtgatggcttcccttttgggcaacttcgaagatgacccaatctttctgaagtgcaaagaagttcagggaatgaccaaagacttggctcaactcacctttcaaatcaaccaatttttgtgccatttcattacgttcatacccgtcgagat

SEQ ID NO: 71964 - DNA, 505 bp, Heterodera glycines
caaaagttttttacaccactttattgccaatataatttcttgcagatttaaagctatccattgcctgccggttctcggcacagcaaagcactaatacggtgtttgactcacttcaaaaaataattcatcacccaaaagttttttacaaccacttattgccaatctaatttcttgcagatttaaagccatccattgcctgccggttctcggcacagcaaagcactaatagggtgtttgactcacttcaaaaaataattcattacccaaaagttttttacaaccacttattgccaatctaatttcttgcagatttaaagctatccattgcctgccggttctcggcacagcaaagcactaatagggtgtttgactcacttcaaaaaataattccttacccaaaagttttttacaaccacttattgccaatctaatttcttgcagatttaaagctatccattgcctgccggttctcggcacagcaaagcactaatagggtgtttgactc

SEQ ID NO: 71965 - DNA, 983 bp, Heterodera glycines
atggcacgactcagccacaatttgtccattgcactgctgcagagcggcagaacacagctgagcaaaaggaacaacaacgacggaccaagccaacggaccatcaaacacacaaagtaacgcaaaacggggggggggtggttaaggacttgagaaagcgggaaggtcaacggcttgaggggggaacggtaacgcccttcttttaccgtatatgctctaattatagcccagtctctattaatcccgcagtctccaattatcccccagtctacgaggtgttttgaaaaataatccctctatcataatcccccagtctctaattatccccccttttctgaggaggttgaaaaataatcccccatgagctataattagagcaatacggtattccctcaccccacccgaatttttttaaagaatatttcaagaccaatttcttttagtttaaagtttttttgtttttgttttttctcaaatgtttatgatgaattacttagttttttcaaatttatccaaacaaaatcgctgtgaaaattttctaaaaatttttttgaaaaattcctaattgtggatagggcttgtctaaatcttctgtgtaatgttaagaaaactatcgtttcagggcgctgatcaaagaagtgcctgaagcgatattttgccgaagttttctcctctccaatggctcgctgaaaattgcttcttcaattctgaacgcaaaaaaggccgtttctgcttcttctgatgatgatccgtccttcatttcggagttcgttttgtgcggcgaggcgccgcgcctttgggcaaaagtgaaacaattggagggccaaaaacgctttttggaggcggcgcaacttttggacggtgtcgaagtggagaatttgcggttgatccatcaattcttggccaatcaaatgacagattctctcagacttctactggaccaagcccgtctctaccgaattgcgggaaacacaaaaaggcgttga

SEQ ID NO: 71966 - DNA, 92 bp, Heterodera glycines
ggattatttttcaaaacacctcgtagactgggggataattggagactgcgggattaatagagactgggctataattagagcatatacggtaa

SEQ ID NO: 71967 - DNA, 280 bp, Heterodera glycines
atggtggtgtctgcaaaaaatttagcaccgggtttaaaaaatctaggaaaattagtaagcatttgtagtgttccgatacgtatccctgcaaaatttggtgagcccctgatcaattacaaattatttatggacgatcaaatttttagaaatttttatttatttttgcataattaattcataaatatttttttcagaaaatgctctgaaacgcaccaaattttatttacatgctagtttaggcactctgatgctttttctatcaaaaagggagatgaataaa

SEQ ID NO: 71968 - DNA, 425 bp, Heterodera glycines
atggcacctcctccacccccgccaaaaagcaaatcgtcaattgaggtaaatttggtataatgctgattttttgcctgaataatgctaatttttttacaggaggatcaaactcagcagcacgagttggcggcatcgcccgaatgggcacaaaatgatgtgccaacaataaaatgaatttttggcattttgtttcctttttgttacttttaggtggagcaccccgtagtgaaagtgttcggcttccaaccgaatcgattgggccgggaatggccaccgaacccacaacagcccgaagacacacagctggggttgggagactttgtgttctttttaatcttcatttatccataaaaattattttaggcaggccaacaaacacaaaacgttgggggacattgactggatgacagtaaaatgaataacaa

SEQ ID NO: 71969 - DNA, 305 bp, Heterodera glycines
aaaattccctcaaaaataaaaggtctattgcgcaccgccctccctatcatgctcgagagcatttgtatgtgtataaaatttatcaaaaaaagagatagccatttttctgggataacctctaaatataaaaatcctctgtgaaataaaatggcgattgtgcacagccctccgtatcatgctcaagcgcatttgtatgtgtataaaatttatcaaaaaaagagatagccatttttctgggatagagtataaatttaaaaattccctcaaaaataaaaggtctattgcgcaccgccctccctatcatg

SEQ ID NO: 71970 - DNA, 608 bp, Heterodera glycines
atgtcaagcgatgtgaagccaatttttgttcacatatttacacttaataaacaaaaagtaatcttaatgaattgtcaaaataataaattcaaatagtattttctgaaatttttgggaccgattcttagaggtgcatttttcgtttttagtgcatccgtaaaaacttaaaaatctcagccgggattttgcggggtcctagcatttcatagaaattgcgggattaaccccgcgggatcccctcccacaaaaattatgagttacaatccttcaacgggatccgaactgctagataggggtcgcacctgttatgatttatcagaaatcttctaatttggatttatcataaatagggatacgatttttaggtgctaaaaactgctaaaatagttaggttttaggttctaaaaaaccaccaaaataggtgctaaaaatgggaaattaggtgccaaaaatttcggaatttatgggtgtaaaatcgaaaattttttcaaaaagcaaaaatattatgccaaatcataaatgagatacataattttaaaaatcaaaaaaatatataaatttttgagatgattttttgagaataataatttgttaaatgccgtgaaaaa

SEQ ID NO: 71971 - DNA, 590 bp, Heterodera glycines
atgcgggatgttgaagggctcccggacatttggacagtgatgtcatttgacagtaaagtgatttggacaaaattgtccggttctgtccaaatgtccgtaacagtttgaagaattgttttttgttatttaaattattttataggttttcactgaaaatcaattaaaatattttatgcttatcattagcctgctgaccgttttaatgaagaaaaccctcaaaataattagctctgtgaaaaacgccaaattttttaattttcatattgttcctttagcaaaaactcattacacgaaagaaaaaaagatggaaattattagaacatttaacaaggaaaaagagaagcagccaaatttgacaaatgctcaattagcaaaacgattaaaagtaaattacaattacatttacaaatggaagcagcaatttaaaaagggtaaaatttaaacgattctgaatatgaatacttaattaaaattaatggaaacataaatttagacatttcagagtcaaagcatgctttatcgcttaccgattctccttttgacgacaattttttgggcttggaatcgcacaactaaaaacagaaattaaa

SEQ ID NO: 71972 - DNA, 514 bp, Heterodera glycines
atgaaaatttataaatggattaaagaatttggtcttcaaaaacaaacacagaaaagctacaaatcaaaaactgatgaagaaaaaatagaaattgttcaaaaattcattgaaatgtcaaatgaatttaaacgaaaaagaaaatattcaagaaaagaatggaaacaaaattatgccgaaatttgtaagaaaattggtgttagccatggaacaattaataaatggaagaaacaatttggcattcgctgtaaaagaataacggagaatggaaaaatggaaaaaataaaaatttattggcaaataaaaaaagcaaatcaaaaaatgagtgatgaaacaattgcaaaaacaatggaaataaatcgaaatatttttttaaaatggaaaaaataatttggggaaaaaattttggaggattgaagaattaacgatcggaagaaatcaaataggaaaaacaaatgaaatagtgaagcataataattattttttattcgtaagtgattttattttaacatctata

SEQ ID NO: 71973 - DNA, 1355 bp, Heterodera glycines
atgaagaaaaagcaaattgatcaatttcttgaagaaatttatgacaaatgtggagaagaaaaggtggaaaattcagaaataattaataaaatattaaaaaatggaaaaaaaatgatgaaaatcattgaattctgaaaataaaagatgaacaaagaattgaaattattaatcaatttgttataatgcaaaatgaattggacgaaaatggaaaacgaaaaaaatatgaaaatgagaatgaaattgcgaaaattcaaattttatttcaacaaaattccattttttttactaattattgagatggagtatggccagccccaatacctttgaagtaagggtaacggcgcccaaaagaaaggcgcgccctgggaaaatgaaaaattttggcccggtttgcaagaaaatgaaattttgtaaaatttacccctcaatttggaaaaaattatatccatatttcgcgatttttggtccctattttatggccatatttcgcaattctatatccatataattccaaaccctaataatgatattaaaaacaaaaattttaaaaggaatgtattggtttgtgttggatctgcatttttggcttaattcattttttccattatttatttgtttctcttttctccgtttttggcatttgctatgttgtaatttccctggcccttctgttcctcactcactcataaaagggaccccttcgtccaatccatcgaaaaatattcttctaaacaattttgtgtaattccatctgtttggcccctcccatttgtcattggtatttaagtctttgcttattctcttatccttaggatttcactcacccattcgttgactcaggttccctgcctaaagcgatacaactcacttaacaatttgctttgtttttcttactatttaaaaagcgatcattctttatttaactttgcatttccacttttgatttccattttaataaattgtcttaaaagaagccttgctgaaaagtaaccgggaaaagttcagagtttgggtacggacacaacacattttggtgccacgacccgggacccctaaaagagtattttaaggggcatctcaggctttgtgccgggagaaaaaaagcaaggaaaatttgagctggtcaaagctgtgtgcttccagccgggctgttgtgccgtttaaaaaaaagtgaaaaaggctggtcaaaagtgtgtactttccagtcgagctgggtgcttaacacgagaaaaaaagaagaagaattgaatttgaaaatggaaagtgaaatcaacatttcacctaacaacgtatcggactttgatcccgttcatttcactcccgaagaaaatacttggtcgaatgcgagcatttga

SEQ ID NO: 71974 - DNA, 1484 bp, Heterodera glycines
atggacacatttgagaccaaagaaaagtttattgaagtggaggaagaaattggaaaggtaagtaatcatatggaacgttatgagacgttcacaaaggttcgatttgggaaaattgttggaaaactgaaggaggaggttcggaaaattaccgaaaatttggatgttctaaaaggccgagtacatttgttggaatttgaacaagataatccagaaagacttggtgaatggtatgaggacaatcccaagaacataatcgattgcctgatgacaaaggggcaacggaaggggaagacaatatccaaattggggacgaaagttgcgaaattatggttgcagctccatttttagggggaatcacccccctcgagggttatgatggaaacccaagtgtatcattctcacggtgggttgcacgtttcgaggatatgctaacactatacccacagtattctgaagtgcaaaaattgagcagattgagaattttactcagtggacaagcccgagccgactttgactcaagtgaaccctcacctgtctctctttctgatgttctaaaccatttaaaaagaaaatttgaaaacgaaaatactcggtcaattgccaggcaggcaatggcaagttgcagaaaagcaccgggcgagcgtgtctatgagtttgcaaaccgactaaatgaggtagtcagaactgctctatcaggagaaaatgaggagacaataagaaagagacttcttgaagaatttcttgaaaaattaacccccgaattgcaattcgaggtcatattcaaatgcttatgaaattgctcaagattttgagcttcttcttgccactaagcggactaaccaagtgtctgtggcagattcattcgctgaattgacgcataaagttgaagcattgtccatccgccaacattctgtacctaaaagaggaatagaacggcgcgtctgttactattgtcggcgtccaggccatgttctaaaggattgtagagacaagaaaagggacgaagaaaggagaggacatggtggtcaaagggaccgaccgtttatggggaaagaaaatggaattatgagagaaatgaaagagaacaccggcataggcatttttcaccccacgacaggccaactatggaggaaatgagagggaacaccgacaacggcacttctcacccccacaacaggccgagccatggcagaaataatcatcggtcaccaattgcttatgaaggaatggaatatgaaaatgagcgaactcagtcgccggggaggcgagttcaatttggtggccatagaataggagcagcaaggattgctagcccaatttttctagcattaatggttattctttcattgttaggtgcaaattttgcgacaaattcggtggagagcccaatgatttgccatcccgattctcccgcaactttatggtcaatcccaattgacccggtttgtccaagttggacacaacggaattgcctgtggcaatga

SEQ ID NO: 71975 - DNA, 1838 bp, Heterodera glycines; identical to SEQ ID NO: 9586

SEQ ID NO: 71976 - DNA, 407 bp, Heterodera glycines
atgcctatctctttttgtgagaaattttctatgcaacacacgctctcgaacatgaaacgaagtgcggtgcgccatggccattttatttttcaaataattttctatatttaatagatattccagaaaaatggctatctcttttttggagaaatgttctatgcgcccatcgctctcgtgcaagaagcgaagtgcggcgcgacatgcccattttattaatcaaataatttttatatttaatagctcttaagggggatacaaacgccaatgagtcccgaaaacttcaaaaagggtctttcataaacttatccttaaaatttctctgtactgcctcaaaattatttataaaatgaaaagtgaccatttttcccactaattgaattctatttttcagctcattttatgccaaa

SEQ ID NO: 71977 - DNA, 308 bp, Heterodera glycines; identical to SEQ ID NO: 54826

SEQ ID NO: 71978 - DNA, 555 bp, Heterodera glycines
atgccgctcctccgatgcaacagccgtccggtgggggtcacgttcctcgtccggtccgtcccaatgttgaacaaaatgccaatggcaatcaacagcaacaggttgcttgtacccccctccctcattaccaaatttttctcccgcttataaccattttttcctccaccttttttctttccatacccactttttccaaacatttttcctttccctagcgccgaggcgcggctccttaccgccgcaacaaccgcaactgcggtcaacagccggcaaacgccacaaatgcccaccagtccgggtgccaaggctgtcccagcccgcgctccgactccgcgagtcgaacaaatcctgaccgagttgttgggtgaagtgcacaacttcactggtcaattcgcgcacttcgctggtcagttctctcgcttcttcgcccatgtgaagaagaacaccatccctccgcctttgctaaacggtgatgacgaagaggaggaagaagaagcagaatcggaccaggaggagggggaagtcgaaaaggaaaacggacagaaggatgattga

SEQ ID NO: 71979 - DNA, 65 bp, Heterodera glycines; identical to SEQ ID NO: 59656

SEQ ID NO: 71980 - DNA, 1800 bp, Heterodera glycines
  unsure (1)..(1800): unsure at all n locations
atgacacgtttttcacacttccgcaaanacggtggtgcttctacaacaactgatgatgatgatggtgttcatgtgctaattgccaaaattagggtacttttattatgctaattgccataattagtgtccgtttatcatgctaattgccaaaattagggtacatttattatgctaattgccataatgcttttatcatactaattgccaaaattagggtacgtttttttatgctaattgccataattagtgtccgtttatcatgctaattgccaaaattagggtccgtttatcgttgctatgtcgttataaaaaagccataaaatagggcgttataaaaaacctcaaatgaaattttcaaaaaaacaaaaaacaactacctataacctaaacccaacttaaattttattcttgatatcattcgatagcactaacagttctcaattatcataaaaatttcaaaaaatttcgtcaagtttgaacaaagttattgcaaaaagtacacaagcaaccaggtttgcaaaaaaaattttggccataacttttttgaagctttaactaaattttacaaaatttttcaggctagtagaaaacacttagtgctatcaaataatatcaagaaaataaaaaattttggccttaaggatgaattgattaatccgcttcgacgaatgaatgcacaaaacattgattttgcttgtcttaaagcgattttattgctgcaaccggacgttgctgaaatgagtgagcaagcaaaaaattggtaagacttagaaaacaatgaaattttaaacaattttcatttctaaataaatttccctcttatttttacaaaatcgaaaatttgttttttaaattgacgagcttttttaaacgactttttctaaattttgcgacttcgagccaattttttgaaaatagaaattagtatttttttagaggccagttgtgctgataggtgccgcttggaaaatttttttttgagggcatttttaataattttttttgcagaaaatttttaaatttttttttattccttcttttaatggtatttatttaatttattggcgccgccaccggggaaattttttaggcatttttattgattttttttgttaaaaaattgggttaaattttaaaatttttcttatctcctcccttcgatggtacttatttaatttatttaaatgaaaaactatttattttaacaaaaaaatggttttttgaacaaatttaggattctccaaaaccgtgacggccttttgcgtgccattttggtcgctggaaattccaccactgaagcatccgtgtgtttggcccgaatgcttctgttactgcctgcattgttcacaattggacaggtcctaaaaaatttttanaatttttttaaaataaatttaaaaattttttaggcaatcgcacaaaataaatggatggctgaaatgcttggcattgagccaaaaggcgtcgcaaatttggatgtttcaaattcaaactcatcaccggaagcaaggccagtgagcttggaaatgccaaaaaattcggtaaaaatttaaaaaattaaaattaaaatttttgaaaagcaattttttttttaatttttaggcgcaaaatgttgtgaaagaaaataaaattgctgaaaaaattgatgaaactgctcaaaatgatacagatgttgttgtagtggaagcaaataagatgccaataaataatgtaaaaatttgtttttttaataaaaattattttagttttaattttttcattaaaatagaattatttaatatattaaaaaatcaaaataaa

SEQ ID NO: 71981 - DNA, 1123 bp, Heterodera glycines
ccgttttacaaatgtgtgccgtgtggacaaagaacggcgaaacgcgtgccgttcatgccgttttcgaaaatgtgttgcgaacggaatgcgaccagatgcaattcaaaatgagcgtaggaaaaaaagcttttccttttttattaatttaatattttagctaatttaaataaaaaaataataataattcgtcaatcaattcaaaatattatatatatataaattgatttcttttatattgttactttatggcaaataatatataaaatttcttctcaatatattaattaacattagttacataggattatttcttttaataattatcgcattaattaattagtgtatcaatctttaattaaatatattttgtaaaattattttttaattacctataaataattatttaattttttaaaggtgatcgcatagggtcaactcgtcgtataatgaaacaggttcttgatgatgcgcaaacatctccaacaacaatttcagacggaataaccgacgaattaattggggtaattaataaaaaaaataaagaaaattcattttgttatttacctaattaattttattttttataggactcaaatagtgaaaataatcataatagcaaatcgccattgaatgttgttcaacatcaaaaacattattcatttgtcggacagatgggaacaaatagcaaattaattttggaacaattggtaaaaaaaaattaattaattaaatgtataaattttaattaattaatttaattaaaaaacttagttggaaattgagtcgggtgtccaatttgcgcccgttttgcactcgtcaacagcaattcgagatcgaactttccaatatttgaacaaatggtcaaactcattgcacggattttctgagttgaaattcaatgataaagtaaaattaataaaatcataaaaaatattattttatataaaaagagaatttattaaaataattaattgtgtccctttaaaagtgattttaattatttgcccaatttattaattatataaaaataattaatatataaatattttgtagataacatttaaacttatatttttttaaattttttctttaattttaaataattgaaaactattttaataaa

SEQ ID NO: 71982 - DNA, 962 bp, Heterodera glycines; identical to SEQ ID NO: 44502

SEQ ID NO: 71983 - DNA, 1472 bp, Heterodera glycines
atgcatatgcaactgcacagatgctcctacagttggtgtggtcctagcgacccaatttacgggcggtgcaagaaggggttcccagccccttactcaaaatgtacgattttgcgcccggacaggcccgcgatgtatttccggccttcaccaactgatggtggtgcccaattagaggtaaacggcttaatatacgacaactcacatgtcgtgccgtataatccttatattctgctacgttaccgagtacaccataatgtactgtttgcatatggtaacaaagcaaatattaaatacgcactcaagtacccttttaaagggccaggacattgttatgtcgagtgcaaagaagagtccggcaataaaatcaaaattgacgagccggctcaatatgccaagatgaacttccgtggtgcaacggaagcatatgccattgttcattcaatgccatttgcccgtctttcgcatcatgttgtcaaattggcaattcatttgccaaaccaacagcccattgtatatagggcattccagctggtgagcaaagctcaacaaatccagcaaggcgaactgccagaaacgcagtgttcagcctattggaaacaatggcaaaatgagtggaagaatgatccaaagtttaaggacattcttttcgaaaaagtcccagagcggttccgatgggcaaaggacaaatgggtcctgtacaaaaggcagcaaattaaaaggccacctatcggccgaattgttcctgtacccccatcggacccggaaaggttcgcgctctattcacttatgcgtcactttcctggagacccagaccatcttaagatggttaatgggttgctttgtacctcattcactgaggctgcaataatgcatggtcttcttgaagacgacaaaatttgggacaaaactctggcggaggcagctctgtcgcgctggccagatcagatgagatggctctatgtgagcatcctgctctatggccagccgagtaatgccatagaattgtggaacaagtacaaagaccaaatgtacaatccgcaaggcattattactccggcacagcataaagtagcagaggatagagccttagccgacattgattggcggctccacaactttggctacagttgtgtccattttggcctgccagacccgccaacttcaattgccaaaaatactggcgcggcaattgaagagtttttctttggcgatgatgatttgaatttgcctccagggcaaccaaatcctcgtccacagccaaatacccctccgccacttaacagcgaccaacagaaggtctttgatgctgttttgttggcaatacagtcgaaccctagggattcgactgtcccccgccgtttcttcatatacggcgatggaggcacaggaaagacattcctgtttggccaaattattaggcgcttgcgaaaggccccatacacctacaaagtgcttgctacggcatccactgg

SEQ ID NO: 71984 - DNA, 265 bp, Heterodera glycines
atgttaatcactaactccattccagcgctggtaaacctcgaggaccaatcgctgcagtttctcaaccagtctttgcacgacgcggagatggtaattgcggtgtacggtggacatgacgaggacgaccatgatgatgcggaacaacaacaacagcagcaccagcagatggccaaggagtacttgctcgtcttccaaaagctgggcatttacgtggatggccaaggtcaacccgaacagtgatgaacatgaagcggacttataaata

SEQ ID NO: 71985 - DNA, 479 bp, Heterodera glycines
cgagtggattccctgctgattgtgccgttgatgacattgacgaggaggagagggaacgccgaaagcagcagtacattgacaacccatggaagggctgtacggtgcggctcgacgccaacaacatcaagccgaatcccggcatgcggtacctttcgaagctgtgcctcaactcgctgtggggccgtttcgctctccggaatcggctgacgaaaacggagatcatcgactgccacgctgatttggccaagtttctgaacgacgtcaaaatcgacatcagcagcatcgaccaactgacggagaaattctggatggtgtgctacaaggcgaaggatgagcacgtggtggagcacgacaccagcaacgtcgccattgccctatggactacggcagcggccagagtgcacttgctcaactcacttcaattggtctacaggcagcaagatctggttcagcgctacgacacgcgcattttatacatg

SEQ ID NO: 71986 - DNA, 711 bp, Heterodera glycines
atgcattggcagtgcttccgagcttccagatttgccgttggcacaaattgttcaatggcaatgggatgggaatgggcaacaagtgatcaaaacagtgagtttattcgtattaaaaaatttagttttttaaattaataaattatctacctatactatgattatttattcgattagagtaaaatgatcaaagctcgtgagacatttaaattctacgtcaattctctgtgttccattgtgattagaattctcaaaaagcgggaaaaaagtgccaagaagtaatgccaatttttgtttggcaaaatataaatgtattttcttgttttagtctgtgcccaccgatcagtttgccagacgaccaatttacggttctcattggtgataataaggtgaagtcatacactgtttatcagatcacggcacctttaggctaggttcttaaatccgccagaaaggtcggatcgacaaataaaaaaataaaaataaaacttgcaattttaaatgatcaagaaattttaacaaatacatttttatattataacaggcttttaaaaaattatgatttttaaaattttagggctaatagaataatatgtgaactgtagaatgattttaaaattgaaaattcgttgtttttgacaatttttgatttatttaaggagttttcgcaagataaaatcatcaagaaaagtaaaagacgctcctccccaaaaa

SEQ ID NO: 71987 - DNA, 48 bp, Heterodera glycines
attgaaagccatccattgcctgccggtctcggcacagcaaagcactaa

SEQ ID NO: 71988 - DNA, 1035 bp, Heterodera glycines
atgtctttcaacgattttgagtgcaaaattgttacaaaggtaatttttaaataaacattcatttatttgaaaatattttattttaaatttatcaaaactttattaatttaaaatacagatatattataaaagttttatttagccaattgatgacatttgcattgaactgaatggtctgaacaaattgaaatcacggcacgaattgttgtgccaaacattggcatcatggaaactcggcatggaacaagtggaattgggaaataaatgccttttaaaaatgaattaattatttaaagaacaactcgcagctgaacattttgaatgaaactgctcaaattttaaatgcccggcacaaatccgttgttgaaatgctcgcttcgaagtcgggtaaaattagagaaaaaaattgaatgtttggactttaaagtcataaaaattttttctgggtcgggaaatcacggattgtggaagtcctgcaaattcgagaatgggaatgtcggagtcggtgattaacttaattgcataattaagccgaccccgtcatgcttaaacggcttcagcgcgaaatccatgcaatggagctgcaggttgatatttggctgcgcgaaatttcagacgtgagcaatgagcgagaaaagttgcaaatggaatatgcggtcattaattaattataattagaataggatcgatgctcattagtctcattaaatgacgtttaattaaaatgcaaatctctcattctttaaaatataaaaaacaactaaataatcaaatgatcgagttaatgaaattcataattatataacttaaattatttaagcattaacgacaccgatttttaaagccgtttattgtaaaatttatgaatttttcagttcgaattttcccatcaaaatcagcagctccagcgcaatgttgcaaatgtcgagttggccaaaatggacgccgattttttgtgccgaaagcactgcaaaatgtggcacgaatttttggcggatgagcaagaacaaaaagagggaaacgaagagcaataaa

SEQ ID NO: 71989 - DNA, 130 bp, Heterodera glycines
atttgccagaaattgttatgctcgacttcccccgcgtgcgtcaaattgccgaaaatgtggttcatccgatcttcgaaaacggaaaacaatgttgtcaaagcctttataaatggaaattttttattgttga

SEQ ID NO: 71990 - DNA, 544 bp, Heterodera glycines
atgacaacagcaaaaatgagcagtagccaggcacaaaacagcagcggcggcagcagcggtcagcttgtgtcattagcaaatgagtcagcttttgtctgcaaaattaacattttccatctgtttaaagcactaaacaccgccagcaatgggatgccgaattacaattattaattaatatataaatgaaaaaacgaaagataacaaaattaatttggctaaaaaaaaaaaattaaattcatgctgttgtgagagaaacaaattttggaattgattcctatgatggatttaattagaattttattgaatgaatcaatttaatcagactcagaatttctttaataatataaaataatttaaaaaacttatattgtcagatgcattcaaattaaatgatttggttggcagattaaaaagtgtgtccagaattcaatctttgtctgcaaaatcaaggctggaatctgaacaaaatctgaacaattccgagaggcccccagggccatgaaatgtatttaactttattaacaacaacaataatttttcaaca

SEQ ID NO: 71991 - DNA, 506 bp, Heterodera glycines
atgagcagtagccaggcacaaaacagcagcggtcagcttgtgtcattagcaaatgagtcagcttttgtctgcaaaattaacattttccatctgtttaaagcactaaacaccgccagcaatgggatgccgaattacaattagtaattaatatacaaatgaaaaaacgaaagataacaaaattaatttggctaaaaaaaaaaatttaaattcatgctgttgtgagagaaacaaattttggaattgattcctatgatggatttaattagaattttattgaatgaatcaatttaatcatactcagaatttctttaataatataaaataattaaaaaaaaatatattgtcagatgcattcaaattaaatgatttggttggcagattaaaaagtgtgtccagaattcaatctttgtctgcaaaatctaggctggaatctgaacaattccgagaggcccccagggccatgaaatggatttaactttattaacaacaacaataatttttcaaca

SEQ ID NO: 71992 - DNA, 671 bp, Heterodera glycines
atggcggcggttcgtacgatcgatgcgacccaaaattggtgcaattggccaaaagttttcgatgggataagctgatttgcaggtacacaaaatgggtattttaatattcaaaatggcttgtggcgcttggccagacaattcagtgccgacggaactttggccaattccgtcccagccatttagagcatcatttaactatttttaattgtcaaacccactcaaacttgtaaattattcaaaatttcttaacatgctctattagctaattaagctcaaacacaatgtgaaaacagctgtattgtaaatattgtgctagactgaaccagaaaaagcatcaattgtagtatatattatttaaatttaattatttttaattgtattggcctaaataattagtttagaaaaaaaaactcacaaattttttataaatatttcgggttttcaaatttcaaatgacaacaatttgacaatttaattttgcacccattatcccctcctctcctctgccacaggataattgagatttcatttaaatttattaatttgccagaaattgttatgctcgacttcccctgcgtgcgtcaaattgccgaaaatgtggttcatccgatcttcgaaaacggaaaacaatgttgtcaaagcctttataaatggaaattttttattgttga

SEQ ID NO: 71993 - DNA, 713 bp, Heterodera glycines
atgaaaggatgcttattaatttcttcattatttgcatttttgattaccatcttaattagtaataataatgttggatcagaaaagaaaaaaatggaacaaaaaacatttgacgaaatatttggagaaaaatgggaagaaaaaagaaacgaagaacagaaaaaaagagaaataattggaaaattttatcaaataaaagagaaaattaagcaaaaaggaagaaaatattcagcaaaagaatggagtcaaattgaaagaaaaatagcaaaaaaattgggcacaaatcgccaatatatttatgaatggatcaaagaattgggattaaatcaaaagaattgctacaaatcaaaaactgaagaagaaaagattgaaattatcaataaattcattgaaatgcaaaatgaatttaagcaaaaaagaaaatattcaagaaaagaatggaacaaaaattatgaagaaatttgtaagaaaatcggggttagccttttcataattaaaaaatggatgaaacaatttggaattagccgaaaaataacggagaaagaaaaaatggagaaaatgaaaatttattggcacataaaaaaagaaaagccgaaaatgagtgacaaagaaattggaaaaatgttgaaaattcatataaataccattggcaattggaagaaacaatttgtaaacggactaatggaagattgaaaacggatgaaaaacaaaataaa

SEQ ID NO: 71994 - DNA, 648 bp, Heterodera glycines
atggatcaacggaagagttcgaaggaacgtagtaagaacaaattgaaatattatttactacacaaataatcaaaatcgtactatatataagggagttctatgattaaaattttttcttttgctcaaatcaaaaaatttttgctggtaggattttaagttggactatgcctgacattgttgccagcgacccctaacccctatctctaaccctctggcctgggtgctcctacaactttttgttgtcaaaagtgtacaattaagtaccaggcgaataatcaatttttatttcttttcattctaaaattaaatttgatggatttattatctcaaattcaaaaataataattatttcttacaaagtgaaaacaaaatttatatatattaattaatcaggatacatttattaaaatttggatttccttaaaatgataaaatagttaaatgtctcttttgcttataatcaaaactgaatgagataaaaaaaaattaaaaaattataatccaaaattatagtgtttaaatgttgccatttacacgaagagcaaaccgatgtagacttcgcttgaaaattaaatttgggtataattgttaacagattttgtccaaaaattgtccaaattttgtgattttgagccaatttttaataaa

SEQ ID NO: 71995 - DNA, 112 bp, Heterodera glycines
atgtgtcgatttcaatgcgatcaacaatgttgtcccagcaaacaaacatacacagcaaaggataagctgaaaacggaggagcagcaattctcacggaacaaaaatgtgaaat

SEQ ID NO: 71996 - DNA, 141 bp, Heterodera glycines; identical to SEQ ID NO: 66691

SEQ ID NO: 71997 - DNA, 572 bp, Heterodera glycines
ctccgttgatgcccaactgacgaacaaaacggagcagttcaatgaagtaagggacctcaaaagatggaaatactactcaaaacagtgttaaatggatggaggcgtactttgaaaggtgctcccttcaggtcgaaatgcacccaaagtttggggggcacaaaattcccttcggacgttagcatcggatagccgtcgtaatcctttgccttaattgcatttaatgatgacccagttaagcggtcacatcttaaaattccaatgttcaaccaacccgaacattccctgggcttttcgctgtgtctttttgtttctgctggacaccgttttggacaaggaacatcgaatgaggaaatgacaaatccgctttggctgtaaaagaaatgaaatatttcatgaaattccatccccaattttatggtacaaccgccaagtttccgttgctgcaaattggcgagttgcgattggcacacggattcactgttccgcaatgtttccaatttgatgctcacatctaattgtgaggcaattattggcagaaatatgtaaattattttgggtccgataaaacccct

SEQ ID NO: 71998 - DNA, 663 bp, Heterodera glycines
atgcgcacccgtccgatctggcaagttaagcaacgattgctgactagccaaaaggttcggtgccgtgatgaaacgaaccagcactgcttaccccgcggcacccggcacggtcccccgaaggaatggatttaattaaattctctccttcggggatttttttccattaggtcgtccgttagcgttcgattgctctagtcaatttttcaaaatttttgttgaaatatttgtcgtgctctgaagggcgtgggagggggggggggggcgaaggcccaccacgaggccgcgaagaggccgagtgagtaccttcggtgcaggaaaattattaaattttaaaattttttaattgctttttaaatatgccaaaaaatgtaggcttaacttttttagtgaaaattcgatcactcatattttttgctaattgagcagaagcgtaccaaactttgcagggatactccccggtaaaggactaacttacactgaaatgagcgccgagctagctggctcaaaaaaatttttcgaaaatctgagtctttcgtttttatttatttgcaaaattaattcataaatattttttcagaaagggttctgaaacgcaccaaattttatttacatgttagtttaggcactctgatgctttttctatcaataatggaggtgaataaa

SEQ ID NO: 71999 - DNA, 565 bp, Heterodera glycines
atgtgcgtcatttgtgaatatttaagaggtaccgatggcttagcaggattcatttcaagccaacaatcccttcccacgctcaatacccttaaggtaaaggggatgatgcttttcattttattttgtcttatttgtttttaattttaaagaaaatgccaccacgtgaaggacagagcaacaacgcggggaatgacgcccccggacacagacaaccaccgtttgctgaacaactggtcaatgatgctcaactgcgagacatcatgaacgtactccaacaacatggcgtcctggtaatttgctcattataatttacaagacatttccataacaatttcttcacaggttggcttgaacggcacgccgcaacaaattgtggaagcattgcgtcaattggcgcaaggacagctggatgatcgccgtcgtcaaaactgatgcttctgcggatgatgatgatgattattgtaaagcggaaaagactgctgattgggaagatgaaagaaaaatgaatttatttaaatttatttttttactaaattttccgattgattgaatttaaaaaaataaa

SEQ ID NO: 72000 - DNA, 421 bp, Heterodera glycines
atgtgttttggtatggtcgaatcccatgctaaaatactccaattgctaatagggtatgacatctgcattaattataattataaccaattattctttaatttttacaaactgaatatttctggggaaagaagggttatgatggaacttaaattatgtgccacatttttgttgtaattcaatgaagcagaatacttgaagctgagacaaaggaaatgatgaacactaaatgagtatgataattgttgacagattaacttagttatggtattgatggctaggaaatatggcaattaattctaaaatatctgaaaaagaatgcaactttttgggtagcgataaaccttttttaagtaagtaactaattattacagccgcaaggattttagaaatgtataaaaacaaggaaaataataaaagatga

SEQ ID NO: 72001 - DNA, 2513 bp, Heterodera glycines
atggaatacgtgcttaaactccgtggattgacactcaattatgatgtgatcaacaaccaaggctttagatataaaaacagcaagtcaaacgttatgctcaaacaggagagattgaaccaattaatgtaatatacccaaactttattagacccaatattcgtgatggtggatctgtaatatcaagctctatgcaaaaatgttatcagccttatattgggaagggtattgtaggagccgattataatgttctcaattttggacacactttgtaattgctcacccattataatgtctttttaccattcattgtaattgttcacacattgtaataccttcttcaccaatcattgtatctctctcacacatacacatatgtacccttttgtattttgttcaccatttattgtatctctcttccacacgcataaacatataccccatacacacgtacacaaacatgtaccccttttatttctctattttataccaaaaattgtgttattttgtcgttttattcacgtttttaataaaaatgcatacataattaagcaatggaagacacaatttgtaaattattaagcatttgggaacgtcatttttaggtagaaaaatgcattattaagcgaaagaagttacaatttgtaaataattaaggagttgaagatacattttgattatgtgcacgaacttgtcgtttttaggtagaaaaatgcataattaaggagtgaaaatgcatgcagaattaagcaatggaagttacaatttgtaaattattaagcatttgggaacgtcatttttaggtagaaaagtgcagaattaagagaaagaagttacaatttgtaaattattaaggaatagaagatacaattttaaaaagtgcacgaacttgtcatttttaggtagaaaagtgcataattaaggagtgaacatgcatgcagaattaagcaatggaagttacaatttgtaaattattaagcatttgggaacgtcatttttaggtagaaaagtgcagaattaagagaaagaagttacaatttgtaaattattaaggaatagaagatacaattttaaaatatgcacaagcatgtcgtttttaggtagaaaagtgcataattaaggagtgaacatgcatacagaattaagcaatggaagttacaatttgtaaattattaagcatttgggaacgtcgtttttaggtagaaatatgcagaattaagagaaagaagacacaatttgtaaattattaaggaatagaatatacaatttaacaaaaattaagaaaaataatgattaaatgaaggaattactcaaaaatctgtaaaaattacacatggggtatgtgtgtgtgcatgtgtatatgtgtaagtgtgcgtgtgtgtgtgtgtgtgtgtgtgtgtgtgtgtgtgtgtgtgtgtgtgtgtgtgtttgtgtgtgtgtgtgtgtgtatgcgtatgtatgcatgtgcgcgtgtgtgcgtgtctatgcgtgtgcgtatgtgtgtgtattgtatgttttttcgagcgtgaggataagtgtgtttgaaagttctgcataatatttattaacttatataaaactagttaattttaatcataaacacaaacaatgctccttgcctaattcaacgtaaaataattctaattataataaggaacagacgagaaagggtagataagggctaaatgtatgcgtgaagcaggtcttgtaataggaataaatgaagaaatcatatgaggatattgtagtgcaccatagaatcaatgacaattaataatgggtgtaagagatagagatagagaactcagaaatgtggttgaagagagtcaatattaaatagtgagaatttaatgtgagttagtaaggcaaacattaggtaatgtatagagaagagaatagtttgataaagaacaagaatacgaacacttggaagataacggttcgagaataaaacatagtgttggaagaaaagatattgaaaaatagctaacggaaacgattatttagacaatatgtaggtctgaaattaataaggaataacagtgaaagtaaacagatatagaagagtagagaaagtgtattacagagaaaaggaaaataatccaaataaacccgaaaccaaaatctctaaatattggattttgttaagaaagcagttggcgttagcctctttccatttgttccttttagaggaatcgatttacaggataagatgacgccgtgacctcacccccctctccttcacttatttggtttcctcagctctgcccttcctctccaacacatattcggtcattattgctccttaccatcgcaaactcagtttacccactccgttttccatcctatgcgttttgccaaatcaataggaaaggtatattttattctcatataaattttagaccacgaggataacaatttgcataaaaataaaaattcatagtcaaaagaatgaagttttcagtgtttggtgtcagagccttgagaggtattggttactggcgggccaagcttaa

SEQ ID NO: 72002 - DNA, 367 bp, Heterodera glycines
atggctgagcaatctgcatttcaatcgaaattaatgttactacggttgaagaaggttacccatttaccaattgatactgacataaaaggaaatggtgagaaggaagctgaatttgtaagagagtgcaaagagaaattagagatcttaacccaacaaagatagctgtgaaccaagaagagtaggattgttaaactatgcttgaacaatttgtgcgacatatttctttacgaaattacagcctttaacagactttacttcaataatgatgtacttgattttggagaatatttgggataatcgttcaatagacgtaatggccatcgaggattgaaaggtgtatcatgttttgattacctacgaaaataaa

SEQ ID NO: 72003 - DNA, 700 bp, Heterodera glycines
atgctaaacatatccgcttacttctattgcagttctctctgtttccaactattcatccacagaataatgatcaatttgccaagtgttcagttgaaaagttattgatctagaaatatcgcatacaggccgtatactagtcatacattcctttagtacatcaatggatactaaaagacgctgccttcccttaataatgccttagttcctttgagacatcaaataattccctcctaaacgataccagcgctgtcattaaaattttgaatgtcattacattttttctcattaattgcctctgtaaatacaaattttccagttgagaagatagttgtggtagaatttgtacctagacccttcattatatttgaaagatttatgtggttgtttttagtggatggggatattaaataaattgaggagaaaagttttactatttattgtcagtaacaccataaattgaatttaattttagatataatttacttaattttaatcaatactattgtatttattatttttattatattttaatacaactttaatttaattttttttattttatttttatttaacatttattttatttttaattttaatcttttttatttttattttactttttatttgaattaatttgaattttattttactttatttattattcagttaatttaaaggagttgttcagaacctctatcca

SEQ ID NO: 72004 - DNA, 461 bp, Heterodera glycines
ccaacgattaaaaattgcgtttctgttgtagacctcaaaataccccttgatattgaaaaaatttatttaatatctccatccacaaaatataatccacgtaaaattcatgctgtgattatgaaagtgtataatccaaatgctaccgccataattttctcaactggaaaattcgtatgtacaggagcagctaatgagaaagaatgtaagcaagctgcggagcaggtcaccgaaagaatacgacaatttgggtactacgaggcacgaattcacgaatttgtggtgaagaatttgattgcgacagcagacgttggttttcatatacgcttaggacctctgtccgactttctaggcgcaaaatattgttccttcactcctgaactattccccggtcttgtctatcggaataaaaaccccacagtctccatcatttgtttttcgaggggaaaattgaatataaccgg

SEQ ID NO: 72005 - DNA, 1351 bp, Heterodera glycines
atggttaatggcgctcagttggcttttggtacaacagactccacatttcctaaggggatatttatgacactttcggaggcattagttagaaatgcactcaaacgaatgattaatgaccctccgtaggcttaggcttcggcaaaaatgcactcaaaagaattattaaagaccctccgtagactttgggtactcaataggctttgggtctcagaactgaaatatcccgtgggcactgggagtgaaatggctaaacttaaaaaataactctggggctcaaatggcggcactgtaaaaataactctggggctcaaatggctgcgcagtaaaaataaatctggggctcaaatggttgcactgtaaaaataaatctggggctcaaatggcatacgcgagcgtttaaatggcaaacacgcgggcgctcaggtggcatgcgtcccttccctataaggcatgacagctgacgcctatcctctgcctccctttccttctctaataggatttgacctcgggttttatccttcagatgttttttcaattatttacctcttctgggattggatatatttattataggtgttttttaaaggtttaaatttggtactgaaatgtccctttccactgggactgaaatggcggggctgaaaattaagggccaaaatctgcatgggtaactattctgataatttaatttgccatttatgcacatttttatcgaaaatttattttaaaactgaagaaaaatcattgcatttcactttggaaattttatttatttatgagtcgtaatttgatcaattttttctccctttctgctgcttgttgttctcccttttcttccgtttgatatgagtcatttctctctctgtgtgtgatacacagcacatttattggtggaaaatgtggcttaaatcacacacccatttttgttctcgaggctcatcacaatctttgcccgatcagttgcttgctttttgactaatttaccaccaaaacattttctccttcattttttggggttttatatgtcaaaaatatgaataaattcaatagaattatttaaaaatatgtgataaaattcaggattttagctgataaatttatgaaacataaagaatcagcagaacgcctggacaattttgaactcgtcaaccccaacgagttcaggtccttttgtttcaggttggccaaattttccaatttcccggttttttttttaaattttcaaaattttagaggcgaaggttgctgtaatctcgtgatcagtgcaaaaggacgccatgatgggaccaggttggggccaacattttcgaatttggttgcccaattcatccgtaattcattggttttttag

SEQ ID NO: 72006 - DNA, 247 bp, Heterodera glycines
atgggcttgcctgggttaccttcagactactcttacactcaacaagcatcttttttgaacgatgcacgcttgcttatggatttttttggtgctgaacaatcaaagcaatggacgcctattcaattagttttgcaacaaatacgcaaacttaattctgaccaacgtgcagcatttgaccgaattattactgcattaaatggcaggggcgaacatcgttgcttttttattgagggagccggaggatgcg

SEQ ID NO: 72007 - DNA, 280 bp, Heterodera glycines
atgggtcttgtgctcagtgggaaacaatgcttttctcacggccaagtgtatgtggcgatgtcaagagtgacaagtatggaaggagtccgtatttgctctccacagacatgcaggggcgaaaacaattatatccataacgttgtgttccatgaattactcgatcaaagtttcaatgcgcctagccaacaattttttcatttagacacacatacagcgaccttacaagaaaaattatgtagtgatgaagaatctgatttgccatgttgaataaatattttaa

SEQ ID NO: 72008 - DNA, 911 bp, Heterodera glycines
atgagcacacaaatttgcgtaaaatttttttggaaaaacgcaaaaaattttcatgaagaaagagaagctgatcgtcaaaatttattgctcgaattgggaaaagtgacttttgatgctatacagaacatggactatgcaggggcgaaaagtcaactaaaaattgaagcaatacaaggccgactcattccgttgcgcgaaaactatgagaacgagaagaaaaaattggatttctattacacattacaaacaccgtaagatggactcttttcctattgtttataaactttaaaaaaacattttttaggactaaacaccatctgaaagcagcagctattcaaagcggtaataatcattgaagtagtattaattctttattttgtcagccgctgtaacgaccgcaggggcgaacctcagccttgaacagaaaaaagtggaaattgaagtcaatgctgaactgcaaaggaactctaacgaaaccacacgtttctgggctatccaacgaatgcctattcaacaattatgcaaggatttttttgaccgttggacagtgcgtggaaatgctgagcttatgcccttagcaaagcaaatgaacagatccaagcacaaaaacatagttgtttattttacgatttttttcatctcataattgttcaggaggaaattttgcctgaaactcaagcaggggcgtcctctgagaagagagtgcgctcggagtctccgaattctgctaaatcagtttcttcagacaaggaagttggcaaagacaatgacacaccgctgaccgaaatttagttattttggcattattccttttcattatggtttgtgttttttaaagtattagtttatttcctaatttctctttactttaaaaatatatattcattatttataattgttaattgataaaa

SEQ ID NO: 72009 - DNA, 1205 bp, Heterodera glycines
atggacgattatggcttatgggatgtgcagcttcaagcaggggcggaggaggatgctgaggcttttccttttattctttcatatataatttttatttttagtttgaacacgattatccgattccgcctgctcttatgttgcgaattgagcaggagctgcacaaccctggacccgcaaggggttgttaccattgcagttcctttgggcatcgtgctcgagagtgtcccagaagtggatcttggagacaagaccggcaagggcgattggtgcgttttggtggccgtccaaaatgctttgtctgtggaaacaattcgccgaatcatcaaagtcaagattgtcccttcaggcacccccactcatatgatggtaaacttacaggttttaaggttttttaaaaataacaagaatttgtttgagccatcagttcatgtaataattgttgggccagtttgcatggccagcagcaatttcgaagttcatgtcctcgctgcaaacagtcgctgcgctgctggaattgcggacatccaagtcaccgacttaaccaatgtaccgaaccgcgttaccaaccgcccaccaacaatacaactcgtccgcgcgaagagcgcggacgagattgaaggcaggggcgcgaagaaaaagcgactgcgttgacatttaatgtttttgattgttgaaatatgtttgatactttttccataactttttattaacttttacatacaaaagttaacttttatttattgctttgttaaaaattaaacattatgcatttacgattgctatagttacagtatgattattttatttagacaaaatctacataaagaaaagaagctgtaaaaaataaaggaagcaaaattttttatttaaagttcaaaattaaagatatttaatatttttcaaattatttggcgcggagcgccccctagagccagtgttaaatagcgaagctatttcaattttaaacaaataataaaatttgtcactttcagtgcccatagggcactggttatccggactaaaatgattattgacactgtttccttgactccgacaatttctcgatgattgtctaaacaattcttttctaaatcctagtctattgctcttaaggaaattttcaagcatatataaaacattttcgtatatttttgaagcatgttaaaaaaccgttgatatccgaaatattggactcaataagaaga

SEQ ID NO: 72010 - DNA, 409 bp, Heterodera glycines
atgcaggtatttcttttttatatctcatatttattcttcttattagtccaatatttcggatatcagcggttttttaacgcacttcaaaaagatgcgaaaagtttcgctgatattaaagcattcaattaatcgcattttcatagtcataaaaaacaattttttatataaagcgtcgtgggttttttggagttctcaatatggacattattaaaagtagggcatgtgcaataacatcataaactttaaaaattaataattttaatgaaaatacgaaaatgttttatatatgcttgaaaatttccttaagaccaatagactaggatttagaaaagaattgtttagacaatcatcgagaaattgtcggagtcaaggaaacagtgtcaataattattttagtcctgataataaa

SEQ ID NO: 72011 - DNA, 844 bp, Heterodera glycines
  unsure (1)..(844): unsure at all n locations
caacatttcaatcggactcaacccaacagcattctaatcactgggactcaacccaacaggatttcaatcactgggactcaacccaacagcattctaatcactgggactcaacccaccaacatttcaatcggactcaacccaccaacatttcaatcactgggactcaacccaacaggatttcaatcactgggactcaacccaccaacatttcaatcactgggactcaacccaacaggatttcaatcactgggactcaacccaccagaattccaatcactggcactcaacccaccagcatttcaatcactgggactcaacccaccaacatttcaatcactgggactcaacccaacaggatttcaatcactgggactcaacccaccaacatttcaatcactgggactcaattctcctgcatttcaatcactggcactcaacccaccaacatttcaatcactgggactcaacccaccagcattccaatcactggcactcaacccaccagcatttcaatcactgggactcaacccaccagcattccaatcactgggactcaacccaccaacatttcaatcggactcaacccaacagcatttcaatcactgggactcaacccaacaggatttcaatcactgggactcaacccaccagaattccaatcactggcactcaacccaccagcatttcaatcactgggactcaacccaccaacatttcaatcactgggactcaacccaacaggatttcaatcactgtgactcaacccaccaacatttcaatcactgtgactcaattctcctgcatntcaatcactggcactcaacccaccagcatntcaatcact

SEQ ID NO: 72012 - DNA, 328 bp, Heterodera glycines
atggaagaagtgattgccgtcttccaattccattgccacccgaatctccgcggttggcacggacagtacccaatggaatttccgtgccatggacgcttttccgatcagaaagaaggcatagtttcgctgcaaattgagaaattttcggaatttgcacaagagaaagcatggagtagccgattaagcgaaggaatttacataaaaggattgccatggaaaatttgtgcagaaataaggacgaaaaacaacagcactgaaaagtggctgggctttcatcttttgtgcaccgctccaaaaggtgggaataaaagtccaatttaaatataaa

SEQ ID NO: 72013 - DNA, 195 bp, Heterodera glycines
  unsure (1)..(195): unsure at all n locations
tatgttccgtggagacaaatcacattcacgggccggctgttcgacgttggtgaaggcagagcgaccacattgctattcttgctcaaatgcttaatttatatggctttggacattgtcatttgggttgcattgacatttctgagctacaaactgttggtttggactttcttcactccctttgaacgaggnntgtaa

SEQ ID NO: 72014 - DNA, 636 bp, Heterodera glycines
atgaccaacatgaagacaagtccatggacaacaacaacatgggcaccaatgacgaccaccaggcaaagatggactccaacaaccagcgcatcaacttggacgacaagacgaacccgaatccaatacgtcacgaaatcaagaagccaacaaacggatgcaacgacacctcccaacacaattaaatcggcaaaatcagcgaaaagagacttgggaacgaatcgtgacggcgcggacgttttctggtgttccgacagaggcagcacgatctgggagctcaagggccccgagaattcaccattctgtcgtcctccaccatcactcaccgcggaatggcacagtctcgcaattgaactctacgccaaaagcatcaggccagagcagattgattccgcgtggcattgctccgtcaaacgaactacggagaattattataccaatttgttgggcgacaagtttgtgaccatcgtaaaagaattcccaccggtcaacaagcgcatctgcaagcaaatggcactgcaccaggaatgcccatacgccaagtctgaaatgatcaaccacgagggacagctgtggtcaactaatgacgaactgaacgtcaatttcccaggacccatttccggactcttcaagggctaa

SEQ ID NO: 72015 - DNA, 2151 bp, Heterodera glycines
atgctttcgccagtccaccaagtccaaaactgtcaatactctgcggaattctgtcagttgccaaacaacacgactctgatatggaaatcaacgtgctctggagatgaatgcaaaatgtgcgactacgatcgagcggaaatcatcagcggaaaatttaccgcagcttatggagaaacagtagccacgtggatatccgacgatcaccagaaggccttgacattcgccaaaaaggctcccgaactcatcgcctgcgacggcgtacgcatcgtcctatctgaacagaactttgggattgccaaagatcaatacgacgacattgtcagtactatgaggagatggaaaagaggaattcggcccgagcaactcgcatcacaactttcggcttctcaagtagcgacaagcgtggctttgaatcagctctacataagagaatgccaacgaaacacgagagccgcgaacccaacgctacaagccaggaaactgttacggcaagcaaacatccaagctcgttggatcggcgagacgacaatggaagtgtttccatgtgtcaacatttcgctacaggacatctcatacaggccaatgaatgactgtcgcctctacattcccgtgactgcgcactttcccgaccgagctatcgcagctttcctggatccggaagttcgcatcatctcgctgacagcacaacaggcaagctgtaatagctaccggatcaatcatcttcaactgcgaagcaatcccaacatctggttacggatcgactctcgaaccggcacagcacgacgattgccaaaagattacgtgcacgaattgtacgaaacaacgatcaaccaaacaaacagcaacttggaacttcatccgttgatcttccacgcatggcaactcgacaatgagtctgacgcgacacgcttcccgcacatcaacgaattcatcaactcggagcagttcaaggacaagctggaacagcacattacagcaaggactgaagctttgggcgcgttgaagggcggaatagaaggattcaccatgcgctggctaaaaggcctgatcgacgaagcaatcacgtggtggattcgagtcgcctgcgtttattcaaccttcctcatgctgcgcgacattgttctcccatgcactctggcgtatttgctcaatcccatccgagtgactcttctcagcctcgttggagtacgcccgcacccgacattccgacccaccgtttctaaaccactcgggatcgaagagggaatgccgctgcgtgaactgccacgaacccccaaaccaccagcgcgcagggcagagcaccgatccatgtcaccaatcaaattggacatgattgccagaacggctcggtaccaacaaccacgaacacagagccatctcgaccccacagaagactcgccctttgggaggccgagacgaaaagaattctgacgggccccatcctttttcgcgccggaatgtcggaatttttattcctatcgccgatcaatgatcggcggaattaagagggaggaggcccttcaccaatcccccgcccgccgcgcaacatgttttcgccgtttcatccctctgtcccccttttccttcaaattgtcaattgtttttgtgtgttcctcccccgccctgcgcacaaattaatgaccaatttgtcaaaccgcaacttttctgcccccgtccccaatttggcgaatcgactccaaagaacgatgaacctcccaaatttcccgttttccgcccattttgttcattcgttcatttttgtcccccgtttttcattttgtgcccaaattttcggcccattttgttctgctcacatttgccactttttatctaattttattgttatttaagcggccaaaaatgcccccaatttcacaaccaaatttcatttggcaatttttgccgtttctctccccgcccctccatttgcctttaactgtgatggccccccaattgtgatcattctttaaccccccggttattgatttttgttctgtggccccagtgccctccatttcctgtcccatcccggtgcccaattccatttgtgataattccccggtgatggcatttctgtaatcaatttgtgataattcgttcaccatttcaaaattttggtttaattacccaagtttgaggtcatttcccgga

SEQ ID NO: 72016 - DNA, 883 bp, Heterodera glycines
atgttgctgacagcattgcgatcatctgaggatgcatcgcttcggcaacgcattttgataaagctcgcagcggacaaaaacggcatcacctacgattcaatggtggaagatctgatcaattttcagacgacaattgccgaggccaaattgattgagcagccatccgcatttaaaaatgtgagcgcattgaaaagggggaaggagagggaacaacaacaaatgccatcaaattcgcgttttgccaacaattcacaaaacgcttcaacggcacaacggaaatgctggcgttgtgcaggcgatcaccgggccgacgattgtcgtcacaaattggaaaaatgccccaagtgcaaatttcccggccacatcgcttcacgatgcgaaagcgttcagcaatggcgacgcaaatttgccaaaaagccaattcaacgaaagcaaatcgggagtctcagcgtcggtatggcaaccaaacaaatcaatgccacttcactgctgaaagtcggagttttcgtcaacaaaaagaaaacaaaatttgttgccgacagcggcacggaagtgaacataatcgacgaagacgcctatgacaaaattggccgtccaaaaattcaggaatgcgaagaaaaaggcaaactcttcgacggaacaaaggtcgcattcataggcaaaggagttgccacattccaatttggcgacattgccatcgaccaggagttttacgtcgcaaaaagagggtctttaaatttgctgagcatttcaacgatggacgcatttggcctgctggacgatttaaaaaggaaaatcagcaattccgcgattaatttgtgtgtaaacatcaattcaagtgcaacatttaaatccaaaaccaccaataccatttattagggaa

SEQ ID NO: 72017 - DNA, 379 bp, Heterodera glycines
atgatacagtccattctgcagctgtgcgaggcgccaattgactacgaattcatggacaaactgccggcagtgcaatacggatttccatgtaaggcaaaaacattggcacaccctcaggggtttgtttaattggacccagaaaattatcctcgttttggaaatgctttttcctgacatttcaatttcaggcggttatcggcgcgatttccacgcggaacgtgccaaaattccggaggcgttgttcgacctcaaacacgccacggacatcagcgagacggagcgcgccacactgatgagcgtgtcgcaggtggcgctcacttcctgcaacacttgcgatatcgacatcagaccggtcagcacttaccgaatgcatatttag

SEQ ID NO: 72018 - DNA, 280 bp, Heterodera glycines
atgaaacttttatgtgcaggatttattcattggatgtttttcatatgtgaaccctcaaaaattggcattatgtttttttaatttaaaataattttgtttaagttttgctatttcgaggatcgaacataaatacttggaattggatgtatttattaataaacaaaaatcaaattaaaattaaaatttaagggcgacgggtgtttccaatcttacaaattctttgaaagtcgaaggatggaaatacgtcaaatatttcagattgagtatctactttgtttga

SEQ ID NO: 72019 - DNA, 354 bp, Heterodera glycines
atgcgtaaagagacgggatacagctatgtcaagtgtcgaaaggcattggtggcatgtgggggcgagcaaaattatgagcaggcgctgcgatggattaaagaggcggccgtcaaagagggatgggacaaagcggcaaagtgagcgtctaactaatttaaaaacgtcaatctttttcgctactttgtagtacaaatttaaaattatctattttttagattgagcggtcgcaaagcatcacaaggcctaattgggttcgcttcgctttctgacaatgtttctgttctcgttgagctgaactgtgagaccgattttgtggcaagaagtgcagaattcaagaatttggtatttatttaa

SEQ ID NO: 72020 - DNA, 961 bp, Heterodera glycines
cattcaatccctgggactcaacactccagcattccaatcactgggactcaactctccagcattcaatcactgggactcaacccaccagcattccaatcgctgggactcaacccaccagcattccaatcactggcactcaattctcctgcatttcaatcactggggctcaaccctccagcattcaatcactgggactcaacccaccaacattccaatcaaagggactcaaccctccagcattcaatcactgggactcaacccaccaacattccaatcaaagggactcaaccctccagcattcaatcactgggactcaactctccagcattcaatcactgggactcaacccaccaacattccaatcaaagggactcaacccaccagcatttcaatcagtgggactcaacccaccaacattccaatcaacaggactcaaccctccagcattcaatcactgggactcaacccaccagcattccaatcactgggactcaacccaccagcattccaatcactggcactcaattctcctgcatttcaatcactggggctcaaccctccagcattcaatcactgggactcaacccaccagcattcaatcactgggactcaaccctccagcattccaatcactgggactcaacccacctttagcattttaatcactgggactcaacccaccagcattccaatcactggcactcaattctcctgcatttcaatcactggggctcaaccctccagcattcaatcactgggactcaacccaccagcattccaatcactgggactcaactctccagcattcaatcactgggactcaacccaccaacattccaatcaaagggactcaaccctccagcattcaatcactgggactcaactctccagcattcaatcactgggactcaacccaccaacattccaatcaaagggactcaacccaccagcatttcaatca

SEQ ID NO: 72021 - DNA, 194 bp, Heterodera glycines
atggctatctatttttttgagaaattttctatgcaacaaacgctctcgaacatgaaacgaagtgcggtgcgccgtggccattttatttttcaaataatttttaaatttaatagatattccagaaaaatggctatctattttttttcgaaattttctatgcaacaaacgctgtggccattttatttttcaaataa

SEQ ID NO: 72022 - DNA, 271 bp, Heterodera glycines
atggctatctatttttttgagaaattttctatgcaacaaacgctctcgaacatgaaacgaagtgcggtgcgccgtggccattttatttttcaaataatttttaaatttaatacatattccagaaaaatggcatctctttttttgagaaattttctatgcaacaaacgctctcgaacatgaaacgaagtgcggtgcgccgtggccattttatttttcaaataatttttaaatttaatagatattccagaaaaatggctatctatttttttga

SEQ ID NO: 72023 - DNA, 1896 bp, Heterodera glycines
atggctatgcattattttgagggaagaattaaagcaaatgggttgaaaaacaaagatatgaaaagccttctcataggtttctttgagttttttaattgtttcccattccgtactcatgtgatttctgaaagaggagaatgggaagagagaagacaccataaggaatttccggaagatagacaatctattttcattgaaaatccatacaataaaaggaatgtagcgagtagcgtgcgagaagatgggtttaaaaagatatgtgaggagtttgaaatgacagctaatgaattcggcttaccattagtcagggaagtcaatgtccttgaagaattaggaattgatctggaaaaggaatgggtagagaaaacgtcagtctcatctgatgagaaaagtgaaatgttagaaagggctaaccaaagtcgagagactgaagagctcagtgacgaaatggtcaaattgaaagtcatcttaaatgagcccgtgtctcaacacgagcaaggtaagagaattgaaaaccctgagtctaaacaccacaaacgcatattttggaaccaaagtctccacaattttttatagtttttattttgtccatgataagtacaacaattccaaatccaatgctttgtcatcatagggcacagaaaaattatgtgagaatagatagagacacaacccaatgcaaactaattgccaatttgtttgacgaacctcaacgggaattggaagttgacatttatcaacccaattccgaaccattcacatttaaggcacatcgatgtctaaaggtcaaacaaagtcaaaaattttggaccaatttactaaacgataagttcagtgacccggtcagtgtttctaccctcccaatgacaattgaagattgtcaagaaatgatcaattatgaaaagtgtgaattcggacctctcagtggtcatttaaattagcaatttcatacaaaccaagaattgcaaatagcctattcttggtggaaattcggaaaagacaaatccgaagaaataactgttatcatgcggtaataaccttaataggaaaaccgggatccgaaagtttgggctcacccacagaggaagtgagcaaatgtaagttttcaaaaggttcatgtcgactgggggataatgcgattctaatttggaacctcgattccacggagcatcaaagcgcgtgtctttacaataaagtaacaacagaaaatgggaaattcaccaagagaatgtggatatcaaaaaattcacagttcgctatatcattccaagagaatgctaagagtgtagaatcatgcggtcacacgcttaaattaagcgatcaaggttttgcagtcccctcgtggcaatttaggataattacgggtaagacaacccataggatcaaaagagagcaatggtggccaaaggaaaaaccattagaccagaacgagaaaagctcaacagcagctgcacaattgacagcgagagctatttaccaaaataaagaaacaaaggaattatttcaaaaaatggtgaatctaatttgtggtattttgcaaaatgccaatccaaagcaagatctgagtcacttaaacccaacgcaattaatgcgagaaaagacgggtactgaattggtaaaggcaaaatggatttccccaaatgtacttgaatggtggccgtgctcttaaatgttcattcgaaggactaattaaaagcattagcagaaaaacaacaagcattttcattttagctttagatgtaaaagcatagggatttcaacggaaggacaaaaaatccaaaagaaaccttaatatgacccgaaaattgaaaagtctaaatggagaaaacccaaactgtcgtaaaagtgacaggaaaagaaatttgatcaattttttgaaaatttggaaaagaaaga

SEQ ID NO: 72024 - DNA, 573 bp, Heterodera glycines
aagagcacggccaccattcaagtacatttggggaaatccattttgcctttaccaattcagtacccgtcttttctcgcattaattgcgttgggtttaagtgactcagatcttgctttggattggcattttgcaaaataccacaaattagattcaccattttttgaaataattcctttgtttctttattttggtaaatagctctcgctgtcaattgtgcagctgctgttgagcttttctcgttctggtctaatggtttttcctttggccaccattgctctcttttgatcctatgggttgtcttacccgtaattatcctaaattgccacgaggggactgcaaaaccttgatcgcttaatttaagcgtgtgaccgcatgattctacactcttagcattctcttggaatgatatagcgaactgtgaattttttgatatccacattctcttggtgaatttcccattttctgttgttactttattgtaaagacacgcgctttgatgctccgtggaatcgaggttccaaattagaatcgcattatcccccagtcgacatgaaccttttgaaaacttacatt

SEQ ID NO: 72025 - DNA, 286 bp, Heterodera glycines
atggcaactgttggcaaaagattggctcaacaggaaaaggcatcttatcgaagtatcggagtcaaaaagaaatcatattcagataaagcgatattccgtatcaatcaatcatgcctatcaaatgcaattttcattgaattttctcaatggccttagtgaatatacaacatattgatcatttcaaatcattagctgattttcgatataataataatccaaatttatattttattcagtgtgcccaattttccgtgagtccgcaaaataggtatagttttctcggcga

SEQ ID NO: 72026 - DNA, 539 bp, Heterodera glycines
atgcagatcttttatattcaactaattgagcacagggaaattgatccttatcgtattgtggtcttcgacttggagacaatgcaacaccatgcgttggacccgctccagccggagaaaagagaacatcagccaaacttcatcgctgctcgaattgcttgccccggctgtattgaaaacggcaattggagaagagggacagcaggctgtcaaatctgcggtccgcatcgcatggtcgctttctgccagcgccgttttgcggatactattgttgacaaacaaatagtgggcgaaaacccactggaggcatttgtggattggctcgtctacaaactgccaaagaaatacgaaacttatgcctattcacactttggtggtcgcttcgacatggtgctcgtcttccgcgagctgttcaggattggctttaatcccgagatgttgcgacgggtatacatttttaaaattttaacatatatttaaagtttcaggggaacaaaatgtatgaaatgaaaatacgcaaacaaaagcagcgcaatccaaat

SEQ ID NO: 72027 - DNA, 411 bp, Heterodera glycines
ggttcgatgaaactttttaaaatataagcctaaactttttggcctgtttaaaaaggaattaaaaatttttaaaatatttattcatctcccttttgatagaaaaagcatcagagagccttatttaacttttaattaacatttggtgcgtttcagagcactttctgaaaaaatacttatgaattaattttgcaaaaaataaataagtaatgaaaaagtcagaatttcgaaaaattttaaaaacaacaagcgttggcattttttcaggttaagttagtcctttacaatggagaaagcctgcaaaatttggagagattatatcgattttagtgcgctaggttcgatgaaacttttttaaaatataagcctaaactttttgggctgttttaaaaaggaattaaaaaatttttaaaa

SEQ ID NO: 72028 - DNA, 127 bp, Heterodera glycines
agcaattaaaaatttttagattttttattcatctccctttttgatagtgaaagcatcagagagccttatttaacttttaattaacatttggtgcgtttcagagcacgttctaaaaaatatttatgaa

SEQ ID NO: 72029 - DNA, 422 bp, Heterodera glycines
atgaacaatcgtctatctttaaaccccaatgattttccgaacacgatggagtttgtcttgttcaatgccgttcagcagggcaatgtcgacaaccctgatattgaacgactcctggagcgccttagaaatcgccaaccgcctccgtctccattcaagaacgaccgactcctgtgggatgtattcgatgacccggaaatagccaacgcaccacaaatgacaattaaagtaatatcggcgttttaaattataatttaattgtgaaatcagtaaaaatttcattttaaagggaaagttttcaaaatatttaacttttcacctatttttaaaatagtcctttcattttgttgttttaattaggcagagcggtatcagcatgggtactgtttccgtctgattattttaaaagttaaaaagtagtgtta

SEQ ID NO: 72030 - DNA, 554 bp, Heterodera glycines
aaacaaaaaaatcgattttttcaagtgtccgtttggggtactcaaacaattatggggagcaaaaatccaacgcagaattaaagtacaggctatagggaagctactcccgaaggattcggtctccccataaatctgggcgcatcggttcggggggactgccccgaaaacaaaaaaatcgattttttcaagtgtccgtttggggtactcaaacaattatggggagcaaaaatccaacgcagaattaaagtacaggctatagggaagctattcccgaaggattcggtctccccataaatctgggcgcatcggttcggggggactgccccgaaaacaaaaaaatcgattttttcaagtgtccgtttggggtactcaaacaattatggggagccgaaaatccaacgcagaattaaagtacgggctatagggaagctattcccgaaggattcggtctccccataaatctgggcgcatcggttcggggggactgccccgaaaacaaaaaaatcgattttttcaagtgtccatttggggtactcaaacaattatggggagca

SEQ ID NO: 72031 - DNA, 817 bp, Heterodera glycines
atgtaccgccccagtcaaactccccgcctgacactgtcatcggcgcgggtcgccgggccaccgggtggcccgacttaacaccaaaatggacaccctttcgggcgcactcccgttttaccgattaagtaaggaatcgatgaaagtagtggtatttcactggcgccttgcggctcccacttatgctacacctctcatgattcttcacaaagtcagactagagtcaagctcaacagggtcttctttccccgctaaatttgccaagcccgttcccttggctgtggtttcgctagatagtagatagggacagtgggaatctcgttgatccattcgtgcgcgtcggtagttagccgacgaggcatttggctaccttaagagagtcatagttactcccgccgtttacccgcgcttaatcaagtttccttggcttaacattcagagcactgggcagaaatcagacacggtcaacgtccacaaggaccatccgtctcctctgttttaattagacagtcggattccccgagttcgtgccagttctaaactggtcgttcagcgccaaccgaagtgcataccctgacgagcatacacgcagctgaagcgctccacaagcagctctcaccactagtccacgcaccatccccgaaagaacagcacgcagccacgggcaaaagccgcctgtttcacgcaacagcccggctgacccgacctttagagccaattcttttcccgaagttacgaatctaatttgccgacttcccttacctacattattctatcgactagaggctgttcaccttggagacctgctgcggatatcggt

SEQ ID NO: 72032 - DNA, 4914 bp, Heterodera glycines
atggcacttcagctcgacttttggaaagcgccgacaaatgtcggttcatttgtcgacgtgatggtggcgccggagtttgtcagctcgttgagcgaattgttggacaaacagcggattcaatacaacacaatcattgaggacgtacaaaggtgggacaaaaagggattgggttacagaaatagtgctgtcttgttactgtattcccaagggtggccaaatacataataatgccgaaatattgtatttatgactggttacagtattccaaaaatcttaaattatttactatattccagaaaatagaacacggtaatgacatagatttgaaaattcattaacagtaacttaccaaaaacaataaaaaaattttcatcgaggggaaaaacagctgattgagaaattcacgccattttttattgtcgctacgcggtttttaattactttttaattgcctaagggcaaattaatgggatggaagttttaataaatgaatgacgacaaaaattattattaatgcggttaattgatgataaatgataaactgccatcaattcaaagggaactctccgtgagctattttttatgtgccccagtgaagagtggctatttaggagagacaattatctaattaattagtcacggtcaattaaccaaaacctgttgaacggatggcataagcaaaaattgggatcaactgatgaatgggagaggaggattaaatgcgcaattgcagaaaatgaaaatttaaaaaaatttcgctggtttttcaaataaatgaaaagatgtgtgccgatatctctagaagtaaacaagattacagtatgactgtttacagtatgattgttcaacgggaaaaggcaaccggcggacggcaccatcaccacaagggcaacctcagcgagtcgttgctgctcagccagttcaagctgttcggcaaacggatgcgtgacgatgcgtcgccatcctttgtatcgaggaataaagccgtttacggattcggtgggtgcaatattagcgattcaaaagccctgccgtcaatgacgatataaaatagccccaatataatttgatagtgatcagtccacaccaaatgatcaatgtcaaaatatgtaaatgaccagctggtactgatttttccatgtcattgatcagatatagaagaataaaagaattaaatcgtcaactttgatcagaagacgatttgagaaaaaatactgatcagaaaatgtcgatattttgctggccatttaaagttatcatttttattttttgggaaaatttatgagaatatttaaaatttaattgcgtcaaaactgcaatagagcctctaatttgattttggacagccgtataattttgtgtgtcctcacaaaataggcgattaccattcgtacatcgaaatgctcacttggatggatgacattgagcgcttttatccgcaactggcaaaaaccttcacaattggcaccacatacgagggccggtccatccgcggcataaaggcaagccgagtcaaaagagcggcatgacaaagaaaatcgggaaaatattcgagaaattactcaacccggcacaacgggcatatgtaaaaaacagcaaattaggggaaaacaacattgggaaaattaaacaatttaagtcggggaaaagccgcgaaaatccgaagggtttgtcaaaacagaaaatttcggattaaaatttaaagcgaatttttttgaaaacattgagtgacatttttctatttctgagattgctgctgagaccaattatctcaccaagataagaagattagcctcaaattgaccagttgatagaccatggctctcctccctcctccatcccttttaaaaatgaaagcaaaattaatttaaaccaaattaacggcttttccctccgctcacagattgggagcccagtttcggacacaaacaagcgcattgtttggattgacggaggtaatgggagggagaggaggcgggatttttggaaaaacggtcattaattttaattaatttcaggaatgcatgccagagaggttggtcattgttgtcaatcgttggcattttttgtggctttttgggcgcattcaaaaaaataggcgacatctatgggaatagagcctccctgacattgaccaaaaattgaaaatttttgaattcttggaagatatttccaaataggaattttaaaaaaatgccgaatttatggattttcacaattttctttggaacaaatttcatattttggaaattaaaacttatttccaaaatccttaaaaaactgatcttctaaattgtttaaatggcattcgaccagttcttgggtgataaaagggatttagtaaattatgactttatcccgtgccagtcgcttaatcccccgcctttcagtgggcttcaattcacacggcactttggttcatcgatcaggtgattgattattaaatctcttgtgattatttgtgtacacttttgtagctgatctcactgtatggagtggacccgcaagtcacagcttacatggacacgttgaacttttacgttttgccgttggccaacccggacggatttgagtgagtgccaacattttcaaatgaaagaaacgattggattattgacaaacataacttgatcagtaattaaatttaaatgttggaacatcgattagggcaaagttgtgtgatcactgatcagcaatcatttccacttgattgactaattaattaattaattgtcacagatactcgcgctctgacgtcaacccgcagacgcgcttttggcgcaagaaccgaggccagcaagtgtgcaagaaggaccgctggagacgggaacgatgctgcggcggggtggacctcaataggaacttcgacttccactggggaggtacggaatggcatggcacggggggtgatggttgttaggactgctcgagactctcggtctccttagttgttgagtttttcaattttgccgtttgaggattttttgggaaactttggaaaaatgaaaagaaattagtgacaagtggtgcgctaggcgtggcctgagaaaattgaaattttaattgcccataccggtgatcctactgagtaaaaacaacggaacttgagaggattcttagaaattaaatccttttttatctggatcattgcctcagtatttcaaaaacaggctcactttgaccagtttttcactagaagaatatcgggaccaggattcgggagaatttgtcgggactaggctcgggattcgggtagaaaccctgtcatttttccaagaaagccttggcgggttcggcagcctttaatttttagtccattttcactcattatcccatttatttgcagagactggctccagttctgacatgtgctccgacatttaccaagggttcgttgtggcagaattttaatttaatttacaatttttttcaaatccctgaaatttcagtgcctacgccttcagtgagcccgagtcgcgcgcaattcgcgacaaaatgatgtcatcggaattgtacggcaaagttgacgcgttcctcacactgcacacatactcacagatgtggtgagttttttttcaatttttccccaaatttttggggtttttttttttatcaaaatattcttttaatggtttcataagtcatcatttaattaaaattatttaaaaaacagggtttaatttgctgcgatattttgtttttttaatttatttaatagaattgatcatttttagaatgtttaaaatgttaattaatttaaagatttaaaactgattttttaaatttttttattcaatttgttcattcatttgtctctttaaggatccatccctacaaccatgaacgcaaatcattcccaaatgacattgaagatttggtcagtgggagaaattttaaaaattctactaaaattaaaaaaacaaaaatgcataaaaatatattctttaaatttgaatgtcattaaatcccattaatcgattaattatattccaattttattttctttattgtataaatttacattttagcaagaagttggccgacgtggcgtccgtgcgcttgaacaattgtacggtactcgctaccgttttggtaccggcgccgacatactgtacccgtccgccggagggcaagtgctaatataataatgaatagagctgtcagggcgggataaagtgtcctagtttttgcaagaaaccacatcatatctctgtgatgtgaatttaaattatgcttacatcctctaattgcactgatttttcagttcggatgattgggcaaaatccaaagctggcgtcaaatacgtttatctgttggaactgaggccgggagaggaggaatgggtgaggagtggaccatggttgtactgatattttgaaattcgcatttttcattcggattttaatttttttttaaaccgagtaattttgcactaattatggggccaatttctcattagcgaaattgttgtctcaaacctattggctattattttcaacaaaaactaagtctcacacccaagaacccagaattactacaagtaattgaaataattcatgtatctcgacttacaatttaactcggttttgaatttaggacggttttctgttggaccggcgccagctgatcccgaccggccgcgagacgtgggagggcgtaaaggtcgccacacaaattaaaccaataaaaaatataaattaaattttgcaggtcgtaattgatgccgtgatgcaacgtgccaaggggttgcagccttggcgcagtacgacaacaacaacgaccacgacaacaacggtgacaacgacaccgattccgcagcgaccgccggcacccgtcgtcacccctccggcggcgccgccacgtgccgttctgcccgatttgccaccacaaaccgtgccaacaaatgcgagattg

SEQ ID NO: 72033 - DNA, 189 bp, Heterodera glycines
atggagaaggcctgcaaaatttggagagattatatcgattttagtgcgctaggttcgatgaaactttttaaaatataagcctaaactttttggcctgtttaaaaagcaattaaaaatttttagattttttattcatctccctttttgatagtgaaagcatctgagtgcctaaaataacttgcaaataaa

SEQ ID NO: 72034 - DNA, 155 bp, Heterodera glycines
taagcctaaactttttggcctgtttaaaaaggaattaaaaatttttaaaatttttattcatctcccttttgatagaaaaagcatcagagagccttatttaacttttaattaacatttggtgcgtttcagagcactttctaaaaaatacttatgaa

SEQ ID NO: 72035 - DNA, 155 bp, Heterodera glycines
taagcctaaactttttggcttatttaaaaagcaattaaaatttttaaaaattttattcatctccctttttgatagtgaaagcatcagagagccttatttaacttttaattaacatttggtgcgtttcagagcacgttctaaaaaatatttatgaa

SEQ ID NO: 72036 - DNA, 987 bp, Heterodera glycines
atgtcttttgaaaatattcgatatttaaatagcagtgtttcaatggcttctatgaatccaatgcgatatcaatttaagcataaccgtgggccatattgtttccgtatttttggacaaatcttagataaaataaaaatcgcacttaaccctgattctgatgagttaccatcaaatggccaattgtttatcattgacactggtgaagctatgaattttttgagaaaatcaaacccaaaaatagacgacgatttgcttaactctatttatagtttgatcaaatctgaaaatccttttgcacaagcatttataatgatgaaagatgaagaagaatatgaaaaagaaaaagctaaagaagaaggaagagaaccagcggaacttaaattattatttgggttgtcgccagatatggataaaaatagatataaattgcctagagcaaatgaagtagccgttgtttttgtgcctggagctgacggagaagtaccagaatcgaaaattgtagtcagagaaaaaggaaaagaattaagagttttgaatagtcttgacaaaaatgttacaccaatgtgctaccctttgttttttccgagagggacaacagggtggcatcccgaaatgaaacagaaaaatggaattaaaaatttgacgagattacagtatgcaagttattgtattgctgtgagaaacgaatttaatcctcttctttatggagcaaaattatttcagcaatggtgtgttgacgagtatgttaagatcgaaggtgatagaataagatggattagaaataaccaaaaaaagattttagcagattcttataaaaatgttgatagttttttacttaaaaaatcccaagaaacaggacttccaattgacgcaaaattattttaccagctactgttgttggatcaccacgttatattgaaaaacactttcaagatgcaatgtcaattgttcgaagatttggcaaacccgatttatttattacgatga

SEQ ID NO: 72037 - DNA, 448 bp, Heterodera glycines
tgcatggccgttcttagttcgtggagcgatttgtctggtttattccgataacgagcgagactctagcctactaaatagttggctcattgcttctgtgggcacaacttcttagagggattttcggtgttcagccgcacgaaattgagcaataacaggtctgtgatgcccttagatgtccggggctgcacgcgcgctacactggcaaaatcagcgtgcttgtccttccccgaaaggggttggtaaaccggtgaaaatttgccgtgattgggatcggacattgcaattattgtccgtgaacgaggaattccttgtaggggcgagtcatcaactcgctctgaatacgtccctgccctttgtacacaccgcccgtcgctgcccgggactgagccatttcgagaaattcgggggacggttagtgttcccggcttcggtcggtatgcagactgga

SEQ ID NO: 72038 - DNA, 759 bp, Heterodera glycines
  unsure (1)..(759): unsure at all n locations
atgatccagcagcaggttcacctacagctaccttgntacgacttttgcccggttcaagccactgcgattaaatcggttccagtctgcataccgaccgaagccgggaacactaaccgtcccccgaatttctcgaaatggctcagtcccgggcagcgacgggcggtgtgtacaaagggcagggacgtattcagagcgagttgatgactcgcccctacaaggaattcctcgttcacggacaataattgcaatgtccgatcccaatcacggcaaattttcaccggtttaccaacccctttcggggaaggacaagcacgctgattttgccagtgtagcgcgcgtgcagccccggacatctaagggcatcacagacctgttattgctcaatttcgtgcggctgaacaccgaaaatccctctaagaagttgtgcccacagaagcaatgagccaactatttagtaggctagagtctcgctcgttatcggaataaaccagacaaatcgctccacgaactaagaacggccatgcaccaccatccaccgaatcatgaaaaagctatcaatctgtcaatccttacggtgtccgggccgggtgagtttccccgtgttgagtcaaattaagccgcaggctccactcctggtggtgcccttccgtcaattcctttaagtttcagctttgcaaccatacttcccccggaaccggaagactttcgtttccgggaagctccccaccagggcgaataaatccgccggcggatcgctag

SEQ ID NO: 72039 - DNA, 168 bp, Heterodera glycines
atgttttcatcatccaaaagtgccgcagttttgcgaatgcgcggcgccaccggcgcaatggcacggcggtggaagggcggtgacgagcagaaaaatgtgccagtgccgagccccaaagaaatggcccagcggccggcggagtttgacgagctgacgcacacgggacag

SEQ ID NO: 72040 - DNA, 959 bp, Heterodera glycines
atgaaagtgctgcagaatatgggcgatgggcatatggtgagttttttaaaataattttaattaaattttaaataaaaataatatttttaaatttttagatgcgcacaaaaccgtccgattccgatgaaggaggtgccgggaagggcaacggtgtgatcgactcgccctttctgttttagtgatcggagattttttatacacatagaagaatttgttgatttctattatttttaacaattaatgctagaaatatttaatcaaattaatttttacaatattgtcagttaaacgggatttttgaatgcaatgttggaaaattttttttttagggaattaggctcctgccgttttacacagataagcaggcgccgctaggaaattttgtgaaaaatttggattaatttgtgcttaaaatttgtcaaattactaatgaactgagtaaaaagagttttcgggataaaaattataattatacgttgacaaattttggatctattaaaatatacgcagctaacatttatttaatgagctattgacaccgccaattatttatgtatttaaaaattttacatttcatttatctatttaatgttttccagcccagctctaagctctccgggaccaattatcaatcatttgtaaaattttcgagtgatttaaaaaaaaaaaaactttccgatcacataaattcatatatgggtgtgaaattaataccgtcaatattccatgtaaaaattcaaattagttaataattaatgcatttgttttttactcgcttccatccgccagccaatgccaacacattattcaacaagctttaatattggacggacatttcatgtaagtgagcgtggcgcctaaacgaagtaattagcacacaattaaaaaattgcaagtaattagcgctgtaattaattaattatcccccagggaattaggttcttacgcatttgaataaa

SEQ ID NO: 72041 - DNA, 570 bp, Heterodera glycines
atgaccgtcacatccaacaccgaattccgactcatcgaatgtgtgccaatcctcgaggaagttgctcgtgaatttggctgtattacgccactaccaaaccttgggtatgtttctttcgttttacaacactaactccagcatacagtagccatcgtgactatcgtgtaagcggatgtatgatgattcgcacgctgacatcgttgaatcgactctacattttcgatgctgaagactgtattgaggttaatggaaaacatgtttcatattttattgctattttaggtgaagggtttcttaaggcaagaggacggcacgagccaaaaagtggtcaacgaatattatgaaaaatatgatggactaaacggatttactgaatttcttcggaattgggcttttaactttttctgtttacatgcctttgatgatgatgacgacacatctgatgaacactaatttcgttaatatttattgtatgctcttggttacaaatcgataaacaaacgcatcagggttatttgaacgatttaaaatttgcataacattttcgaaacccaatccgacggacataaa

SEQ ID NO: 72042 - DNA, 512 bp, Heterodera glycines
atggccaccagcgccggaagtgcttggctgttgcagttgctgctgctgatccgatgcggcggatacgtcctggctgatcttcttgccgctcaacacaatgctttggggatgctaaaaaatgtttttttttcttcaacaaattggcgccgagaatgggagaattttacggcacgccattgtggagaggaacgtggaaattaaaaaaaaatgccaattttggctatagtatcatctggtaataaaatgcaataaattttcagacattctccgctagtgcccgcaatcttttgtttgtgcacagcgtcaaaaagtgataaaaaaatgaaaattcttttcagagccattgagaggaatggagacatttttaaaaaatggcatttttggcgctatagaatcatctcggaaccgctcagttcggccccggcacgttatctagaaaaacataaaaacatttcccgatgggggggggcccgacctgagaccttgtttttttttgctatttaaccaataaa

SEQ ID NO: 72043 - DNA, 317 bp, Heterodera glycines; identical to SEQ ID NO: 71782

SEQ ID NO: 72044 - DNA, 636 bp, Heterodera glycines
atggcgtcacaagacacaccgcccggcgacgagaacgttgcggatgcgcagcccttcgacgacacgctgactgtgtacggcggcgacgagaacgttgcgcaggcgcagcccgtcgacaacacgctgactgtgtacggcggcaacgagaacgttgcgcaggcgcagcccgtcgacaacacgctgactgtgtacggcggcgacgagaacgttgcgcaggcgcagcccgtcgacaacacgctgactgtgtacggcggcgacgagaacgttgtgcaggcgcagcccgtcgacaacacgctgactgtgtacggcggcaacgagaacgttgcgcaggtgcagctcggcaccactggtaaggaagcaggggcggggttcggacaaaaaagccattatggatattggcaaaagcttttgagttttattttacaaattaaaggtttctccctttttaaaggcgtggccgtggcggaaacgaccaaagaaaaggcgaacgaaaagaaggacaagaaagcggacgaaaagaaggacaagaaagcggacaaaacgaaggacaagaaagtggacgaaaagaaggacaagaaagcggacgaaaagaaggagaaaccggaaaaggtttccaaaaaaaatgttgagaaatag

SEQ ID NO: 72045 - DNA, 1143 bp, Heterodera glycines
atggccgaaaaaatgagcaagggctcatataatgcatgtgacgcggaaactgtttttggacgtgaaaatgtatgtgataggacgcgcttaaaaccgacaagaaccgcctttatttcttccatattcaatgccgaccgtgatggcatgagattgaattttgaggatttgaagccctacaaccaggaaaaaaccgtggaggaagtgttggaccgtttggacgtggaagtgtgcccgcaaatggtctacaggatgggcaggagtagtgacgaaaagaggaaggggccgcgcttggtgaaggtggtcctgccggcgtccaccttccaacgcttcgcgctgatgcagtgggggcgtcgtcggacggagctgaagaagagggctggttgggagcgtcttctggtcaggtcatccctgacgaaggaggagctggaaattgaacgtgaacagcgccaaaagaagtggatggaatttggacagaagaaaacggatgaaaacatcacgacgcgacgcggaggcaatgaaaaaaacttttgaggtcacctccttttttaaattgtttatattttaatgcacgaagtttggcgaacaaattggacaagttaaggtttttgttattagaaaataggtttaaaatcattgctgtatctgagagttggttgagtaacaaaatagaaaacccccaaattttggaaaatctccactattctataataagatcagatcgacttaacaaaaaaggtggcggtgttgctttcataatatcgaatttaattccttttgaaattatcaaaactgcaaaaaacaaaaattccgatattctttgtgttgacctattctcacctcttaaccacacaaaaacacgttttattttgatttatagacccacttcacatgaaaaacaagaagatgtcgaaaaattggtcgaacaactctctggtttaatctcggcttccgaaaaatgcattttgttgggtgatttcaattttcctcttttaaaagcaaaagactttagcatccaaaatttcgaaaaaagatacaatcaccttgaatcatttttcatttcctttttagagggatttaaactaagattaatggtaaactctcctacacggggcaataatctattagatttattatttacaaaca

SEQ ID NO: 72046 - DNA, 664 bp, Heterodera glycines
atgcgcacccgtccgatctggcaagttaagcaacgattgctgactagccaaaaggttcggtgccgtgatgaaacgaaccagcactgcttaccccgcggcacccggcacggtcccccgaaggaatggatttaattaaattctctccttcggggatttttttccattaggtcgtccgttagcgttcgattgctctagtcaatttttcaaaatttttgttgaaatatttgtcgtgctctgaagggcgtgggagggggggggggcgaaggcccaccacgaggccgcgaagaggccgagtgagtaccttcggtgcaggaaaattattaaattttaaaattttttaattgctttttaaatatgccaaaaaatgtaggcttaacttttttagtgaaaattcgatcactcatattttttgctaattgagcagaagcgtaccaaactttgcagggatactccccggtaaaggactaacttacactgaaatgagcgccgagctagctggctcaaaaaaatttttcgaaaatctgagtctttcgtttttatttattttttgcaaaattaattcttaaatattttttcagaaagggttctgaaacgcaccaaattttatttacatgttagtttaggcactctgatgctttttctatcaaaaagggagatgaataaa

SEQ ID NO: 72047 - DNA, 346 bp, Heterodera glycines
atggttgaaagcgggacagacactcctttgctccaattgtgcaattctattgaaaaatgtaaatttttatttatttatttttgttattatagtatcctttcttggttttcccaggtttgcaacatcttcgagctctcaaaaaccatgtgattgtcgctcataatttgctatccgagaagatggcacttgcaacgcggacagaagaaccgagccaaattgactttgaaagtgttaaaaatgtgttggaaaaggctggcgttcaaattgctgacgaatacaagtaaaaaatgatcaacgatgtatttacaattaatataatttgaagatgttaatcaattaaaataaa

SEQ ID NO: 72048 - DNA, 47 bp, Heterodera glycines
atggcgattggcacagccctccgtctctacgcaagcgcttttgtgag

SEQ ID NO: 72049 - DNA, 304 bp, Heterodera glycines; identical to SEQ ID NO: 51570

SEQ ID NO: 72050 - DNA, 228 bp, Heterodera glycines
aaatttatcaaaaaaagagatagccatttttctgggataacctctaaatataaaaatcctctgtgaaataaaatggcgattgtgcacagccctccgtctctacgcaagcgcttttgtgaggtataaaatttctcaaaaaaagagatagacatttttctgggattgagtataaatttaaaaattccctcaaaaataaaaggtctattgcgcaccgccctccctatcatg

SEQ ID NO: 72051 - DNA, 976 bp, Heterodera glycines
atgccaaactcaccgtcctcctcttcggcatcgatgccgcaacatcagcagaacggaggtgagtgttaacgcgaagagagagtcggaaagccaatcatatgagttttaacattttcgagttttttttttgagtttccgccaatgtcggcacggaacttcgtttggatggtaccaacgccgtccaacagcagtcgtccgccggctcaaacagtgcccggttgagtccggacgggtcgttgcgaaacgctgcagccgccggatacgcagcagcagctgccacaatgaacggactcggcggcgcggtcccttccgcgtcgacgatgaacagcgcggcactgatgcactcactgggcgcggcacagcaaatgcattacggcatcgacccatagtgagtggggctgggactgttttggggtgtgcttcttcagcacttatatctctcctcgattcagctttggcatgtcccaagcggacttaagtgcgtacagtatgctaccgtcggctgcccaatacaatttcaatgtttgcctttttctgttgggaatgctaccgtaactttctgttaagcgttaccgttacccaccaaacattcaccaaacgacggcgactgcgtccgctttcccaactccgcccgtcagtggcgcagcaatgcctgtgccgggtgagaagggcaaagtgacaatgccaggaaatcggtgctttttcccaggctccggactgagtctacaggtgtccgtgctggccggacaacactcagccgcacatttgcacaatctgagcaccaacgaatggggcggcacttcgacggtggaccatccaagtcagtattggccccaatgaccgaacgaagggacaaatagcgaacggagaaagcgaaccgaccgatccatggacaaatcacaaatcaacagttgtttaccaaagattttcaaaaggtcatcgattcattcacaagcgtattgtgcttttcatatca

SEQ ID NO: 72052 - DNA, 142 bp, Heterodera glycines
agcgatctgtacgaattgaagttggcaatgagctgaagcagcgttgtgagaaggaaatcaagacaatttggctggaaattgttgaccaacagcgcattgatgagctgtccatggagagtcaattgtaagaaaaaatcagtta

SEQ ID NO: 72053 - DNA, 210 bp, Heterodera glycines
  unsure (1)..(210): unsure at all n locations
atgcgcctgtttccgttcaactatttggacacgtatcgtaccgtgacggagattatgcacgaattggagcagttccagcaacacaaccaaccaccgacaaaaattcatggccaacaaattgtgtacacggtgaacatcagctgcggcgagctgaacgagcagtccagcgaagtgataagtgcggccatcgagaatgngctgagttttcag

SEQ ID NO: 72054 - DNA, 403 bp, Heterodera glycines
atgcgcacccgtccgatctggcaagttaagcaacgattgctgactagccaaaaggttcggtgccgtgatgaaacgaaccagcactgcttaccccgcggcacccgaaaaaatgtaggcttaacttttttagtgaaaattcgatcactcatattttttgctaattgagcagaagcgtaccaaactttgcagggatactccccggtaaaggactaacttacactgaaatgagcgccgagctagctggctcaaaaaaattttcgaaaatctgagtctttcgtttttatttattttttgcaaaattaattcttaaatattttttcagaaagggttctgaaacgcaccaaattttatttacatgttagtttaggcactctgatgctttttctatcaaaaagggagatga

SEQ ID NO: 72055 - DNA, 1068 bp, Heterodera glycines; identical to SEQ ID NO: 44581
  unsure (1)..(1068): unsure at all n locations

SEQ ID NO: 72056 - DNA, 266 bp, Heterodera glycines
atgagtggaagaggaaggaacggaggaggaggaggcggatgtggaggagcacagcgaaccggcgctggagagaatggaagcggcggccaacttctcgatcaattggctcatgaagttcgtgtcgtggggcgcggagcaggagggcagcacgtccatggtcatcacgagaagagagtaggcgttgaacagtcggaacaacgacggagagaagacggaagcggacggattggaagcggaaaagaaaacggtggaggaagcgaagatgg

SEQ ID NO: 72057 - DNA, 1602 bp, Heterodera glycines
atgagctattacagtgatcagcagcaaaatcagaggatgagcagtggcggaaacgccgaaaatggggacaaatccgcggatgacggaggggcggcagagcgacagcggaggacattccgcgaagtgcgcaaaagcattgtgcaagcgacgcaacggcacggctccaaaaaggtcaccgacttggaaatgcaggtgggcaaggcaatccggcaaaaccgggcgatcagagtcgctaaccatggatgatttgcttgagatggttgcctgatcagacagtttctgtccgatcactcctgatcaattccccattgcgacagccaaaacatattcacacctgtgtttttgaattgtctgcgtgtcttcatcatggtgatgatgatgatgcggcgtgtttatctgtatttgattgatcggtcgatcaatcattcgcggacattgcgtctgcgccacacctctcccgtggggttgggcaaggacaacacagtccatggggacccaacccagccgaaatgtgagggcatattgcctgggtaataataataataagtggagaatatagacggataattaggagacttgttttgacaatgatcgatccaattcttaaaggaaatgaattgattcgttagttgattaaatcaattattctttaaaattgacccaaaagttcttcataaaatcgcttattgctgctatgtattagattgatcagaaattttagaaagatatgacaattttcaacttcgagaaacaagcggagaataattaattagaaaataagaaaatcattccccaatcagtgatttgttagtgctgctgctatttcaagcaaatccatcccgctgatctctgctctgatcagcaccatttcctaccgccgatcaaattcattttgcttatttctgatcactttcagctgctccgccacttgacctgcccgcagacggccgttctgcgcccgctgcgtcctttccaccacaaaaagcggcacttcctctcccggcccccgtcgccccaactgttcgacatcagcgaggagaacgacgagcagcaacagtaattgccggaggacagtccgatcgatcggtcgatcagtgatcagccgctgcttctgatcagtcagtctctccaatccccgcaaccaaccaccacgaggagcagcatcagcagttgttgtttgttgtctgttgctgttgactacatccttcttttgtctgaacaaagcgccttcgtgtaccttctcaagcgctactgagtgatgatttataccaacacctcatttgcttattattaacaagcctccctcattagttaatgatcattaattattttctacccgacgtctcccaaagtctctcccctcctcggcagctcacaattcaaatttatatttgccctttcttgtgtctctatttccttcacccggcgggtaattaatgctaataacaatttggataacactcactcattaggccgtccaaattgcgtttgtttcttctaatcacagacacttaattatgtaatcactagagagagattacttttgtgacgcctttttaacatttttctcaccatgttgcgctgctgttctattttggccta

SEQ ID NO: 72058 - DNA, 147 bp, Heterodera glycines
caagaatcgcccaaaaatgatcaaaacgaagcgatgtcgaagaagttagaggacatcaattctctgatgacgagactaacccttcacaaccgttctttagcccaattattcgcattgaaccaactgggtctcttttttagcattttc

SEQ ID NO: 72059 - DNA, 564 bp, Heterodera glycines
atggatgacggcaaagacatgttccactggaaggccgccatcaaaggaccgcccgagtcgccgtacgaaggaggcaccttccatttggacatcgttttccatcgcgactacccattcactccgccagttgtcaaattcgaaacgcccgtttaccatccgaacgtcaacaagcagggtggcatttgtctggacgtcctgaagacgacgcattgggcgccgtcgttgaccatttcgaaaggtgaaagcgacgcgacaaagagcagataaaacgccgacaaatatcgacaagacaaaatggcccaattcaaaacgaccgccaaaactgtattttttgtaaaaatgccgatattttgtcgtgtgaaaatgggatttttcaaattcggaaatgccgttttaattcattgtcccccctccatttcagtgctgctctccatctcttcgcttctctgcgacccgaatccgaacagtgcgctggagatggacatcgcgattatctaccgcaatgaccgcgagcagtacaaccgaaatgcccgtgaatggacgcagaagcacgcgatgaaatga

SEQ ID NO: 72060 - DNA, 100 bp, Heterodera glycines
aaaattccctcaaaaataaaaggtctattgcgcaccgccctcccctatcatgctcgagagcatttgtatgtgtataaaatttatcaaaaaaagagatagc

SEQ ID NO: 72061 - DNA, 304 bp, Heterodera glycines
aaaatcccctcaaaaataaaaggtctattgcgcacagccctccctatcatacgcaagagcatttgtaagtgtataaaatttatcaaaaaaagagatagccatttttctgggataacctataaatataaaaatcctctgtgaaataaaatggcgattgtgcacagccctccgtctcatacgcaagcgcttttgtgaggtataaaatttctcaaaaaaagagatagccatttttctgggatagactataaatataaaaatcccctcaaaaataaaaggtctattgcgcaccgccctccctatcatg

SEQ ID NO: 72062 - DNA, 189 bp, Heterodera glycines
ttacgtcgaccaacacgtcgtccaatttctccaccgcattcgccgccttttcgactccgtcccgacaaacctttacattgcgaccgccgctttggccgaaactgtctaccgcctgaagcacttcgtccgcagttgcgaggcgattcgccaacacattttgccgctgctccgtgccaatgtccgcgccct

SEQ ID NO: 72063 - DNA, 330 bp, Heterodera glycines; identical to SEQ ID NO: 69563

SEQ ID NO: 72064 - DNA, 560 bp, Heterodera glycines
cagtacagcaacaacaacaagttcaagcagtacagcaaccgagactccggacggtcagggacgaccgccgctacgaaatcgccgctatcgtttgttcgcgccgcgccgcagatggtcaaacgcgtgaattgaggatccattgccggtcattctcgtatcactatgatacatatgaagcagaagcgtcaatccaaagggtaaaatttttttttaatttgtgcataaaaataagcattaaaaaataataattcagcaagcgcctctaatccacgcggcgtggctccaggtccacgaccttgggaatacgccgccgcacaattttcaattttcgcgtcgtcgactttttgttaaataaattaattaaacattacttcgtaataattaattaattaatgaaagatgcgcaagcagcagcagaaggagaagaagcacaaaatttggcggaggcacgaggagaagaagcaatggaagaggacgaccaccaaaaaaatttgcaggggacaccagcagcagaagaagcagccctaatttttgatccgatgcagccgcaggctgcgtag

SEQ ID NO: 72065 - DNA, 434 bp, Heterodera glycines
atgtttgctgttttgctcatgcccattgaattgaccaacggattcactggggagcgattgtcactgatgaaactgaatggcaaatatttggtgatccgttgtccgatttcacgcgatgagaccaaatggaagaaatgggaacaggaggccattgaatgtgatttagataatcagttgaacacaattcatattggaatatgtgatgacgacatcggcgacgggtgagtaataattaataatgctctaagaatctcgactcgataatctcgggtttttttttggctcgatcacgagtatcactaataattattactaatttgaatgataacattttaatgggtattttcattttcgcttttagtcttctcgatgatggaactcccggcccaagtgatcagcagaacagaattgtggagaatgaccgatcaacgtga

SEQ ID NO: 72066 - DNA, 546 bp, Heterodera glycines
  unsure (1)..(546): unsure at all n locations
atgcctcncagtgacagttcagtacaaccagcagttgattcatcagcattgacagcagcaaatggcgcaccagcagcaatcagtgatcgaaacgtgaacaacgcaaattgcattgatcagagaagtgattgtccatttttggcaagtattggtaatacattcatttattatatttttaaaattaattgttaattatattttaggcaattgtgagtccgtgttctccacttctttcatgcttgtccattgtgcgcgaacgtgccgaaaatgtggtggcatcaacgacaatgcatcatcgtcatcagcccaacagtgtgatgatcagttgccaatgtgccgacgatgggcggcaaacggcctttgcgaactgttcatatttcaacaatatttgctcaacaattgcgcattgtcatgtggggggtgttaatttgtttgaacattttttgacataaaaaatgtcattttatttttttttgtaattatggcaattaaaagttttaaaatttctagtaaaatattattttgaaagcaatctttaaaaataaa

SEQ ID NO: 72067 - DNA, 521 bp, Heterodera glycines
atgaccgtcggtggagttggcggcggcttcccgcaactattcttgaatcgagattggtgcccaattgatggcttgaaaggcatagtcggatcgacggaagacgtctttgattcagtgctggtggaaggccatgaattgtccggcagagttggctttgattggaacagtggcggtgggggcggaggaggtggtggaggaggaggagacgccaccgaactcgccgctgttagcaccgactgtctttgctgcggagatgctaccgaactcgccgcggttggcaccggtggaaactgctggggaggcgccggtggactttgctgattatgggaaaattcaaatcggccatccacccaattgtaaaatacttctttttgctgttgaataaccgtcggtggagttggtggaggcggggtttcacgcgacttttcttgacttgggattggtgcccaattgatggactgtcctcccaaaaccaatccctgctgctcatcttaatgttgctaggggtaactttgtattaa

SEQ ID NO: 72068 - DNA, 255 bp, Heterodera glycines
atggccgatttgaatttttccataaatcagcaaagtccaccggcgcctccccagcagtttccaacggtgccaaccgcggtgaattcggcgaatgaaagcaaatacccaaacgaaaatattggaggcttttcacaaaacacaccgttttttgcacaaaatccaacattggctactcggcatcagccacccccaagaccaccgccagttaccaacaatgtcatgcattctatgaacgatttcggatcacaccaacag

SEQ ID NO: 72069 - DNA, 376 bp, Heterodera glycines
tccatcaattgggcaccaatcccaagtcaagaaaagtcgcgtgaaaccccgcctccaccaactccaccgacggttattcaacagcaaaaagaagtattttacaattgggtggatggccgatttgaattttcccataatcagcaaagtccaccggcgcctccccagcagtttccaccggtgccaaccgcggcgagttcggtagcatctccgcagcaaagacagtcggtgctaacagcggcgagttcggtggcgtctcctcctcctccaccacctcctccgcccccaccgccactgttccaatcaaagccaactctgccggacaattcatggccttccaccagcactgaatcaaagacgtcttccgtcgatccgacta

SEQ ID NO: 72070 - DNA, 381 bp, Heterodera glycines
gcatttaccaatgcttcatctcccgccaatttcattgtcgtcatttggtttccgtcgtattttgatcagtcgtcggttgagccatttgatctgaccaacgaattgacacgcgaacaattggcattgaaaaggactaacaataaccgccgttttctgctgatccgttctccaattgcgcgagatgtgaacaaatgggcagaatgggaggaggaagcgattggatggaaatttattgatcaatgtgatcagattgacattcaaataaatgatgagcacgaaatcggagacgggtcagcgaatgcttatttaaaagcttaaatttattgtgttttctatttttaggcttctcgccacaactcccggcccaagtgatcagcagaa

SEQ ID NO: 72071 - DNA, 117 bp, Heterodera glycines
aaattagtcaaaatacatttcagattcgtgattagcgacctttataaccccggataaaaaattatcatggttttttatcttaaaaaaattttgcaaaacaaaagggtcccccctttt

SEQ ID NO: 72072 - DNA, 320 bp, Heterodera glycines
atgacagacaatcgaaaagaagcggcggaggaagaaatggcaaaagtggaggcaaaaatggaaaaagcaatgtaaaattaaaatgccaattttaaattttgtttcccttttcagctttatctctggtgactgttggctagccgtgttcgatttgcttccggcttatcaacttggcctcagaatttcgatgatcagccaccgttttaacatctacgtggacgaacacttcaaaacccgcaaatggggattggattttcttcgaattggaagcaaaattgacgagaatggcaccaaggagatggaaattgtcaattacgatg

SEQ ID NO: 72073 - DNA, 1370 bp, Heterodera glycines
atggagaaaccggtaaaagtgagcaaagaaaataagaaaggagagggaaagtcaaaggaagtgaacaaggaggaaaatgagtacaacgaattctgcaagtcaacgactaaaaacattgacgagtcaatagtccatgtgcaattttttgctgaatttgagagctccttcaagtccattttttacgtgccggaaacgttgaccgcagacgaattccaaaatcaaaatttggcattttcatcagggacgatggaaaattcgagggaggagaagaaaattggcagcagcgagacggacaagaaaaatggcctaatgagaatttggcgatttgaaaattgcagtgtgaaagccgacggacgaatattagcggaccgtgcaaaatggctcaaaacgtggatcttcatcaaaattcccgataaaattcttttggacaaaacacattaaaatttttcgaggacaagaatgacaacattttttaaagccgtcacgtcactagctgaaaaccttgaaccccaccattcggatgccgaattcgccgttatttttacttaaagacgaggggaccgtctttcttagaggccggggatgtggtattagtgactctttgaccctttatttgattgtttgaatttgtttggcataatgtttgatttgaattgacccaaattgtttcgtttttcttcagttgtgtgggtggatttttggttatcgtcggtgataattttaggcgttttgttggtcgtcgatttatttgtgttttttattaatttgttgttgattgaattttatttattttggattgtcttttaattattggttgcataaatttattttgtttggtgttggatttttaaagcaggttttgccaaattcatagactattcgtgcaaaatttagaagtgtggcaaagaaacccccgacaaattgcttcttcttttccaacatttgtgccaagttttgttcaaagggggggggaaggcccacccgagccgcgaagaggccgagtgagtaccttcggtgcaggaaaattattaaattttaaaaattttttaattgctttttaaatatgccaaaaaatgtaggcttaacttttttagtgaaaattcgatcactcatattttttgctaattgagcagaagcgtaccaaactttgcagggatactccccggtaaaggactaacttacactgaaatgagcgccgagctagctggctcaaaaaaattttcgaaaatctgagtctttcattatttatttatttttttacagaaattaattcataagtatttttacagaaactgctctgaaacgcaccaaattttatttacatgctagtttaggcactctgatgctttttctatcaaaaagggagatga

SEQ ID NO: 72074 - DNA, 461 bp, Heterodera glycines
ggttcgatgaaactttttaaaatataagcctaaactttttggcctgtttaaaaaggaattaaaaatttttaaaatatttattcatctcccttttgatagaaaaagcatcagagagccttatttaacttttaattaacatttggtgcgtttcagagcactttctgaaaaaatacttatgaattaattttgcaaaaaataaataagtaatgaaaaagtcagaatttcgaaaaattttaaaaacaacaagcgttggcattttttcaggttaagttagtcctttacaatggagaaggcctgcaaaatttggagagattatatcgattttagtgcgctaggttcgatgaaactttttaaaatataagcctaaactttttggcctgtttaaaaaggaattaaaaatttttaaaattttattcatctcccttttgatagaaaagcatcagagagccttatttactttt

SEQ ID NO: 72075 - DNA, 147 bp, Heterodera glycines
aaaattttattcatctccctttttgatagaaaaagcatcagagtgcctaaactaacctgtaaataaagttttgtgtgtttcagagcacgttctgaaaaaatatttatgaattaattttgcaaaataataaataattaatgaaaaagt

SEQ ID NO: 72076 - DNA, 183 bp, Heterodera glycines
tgttaccgttccacctacttttgacagtttcgacattggcggtgagcaatttctgtgccagtctcgaaaggtggaggatgccggcttcaccgaagtgctcagttggttggccgtcccggaaagcaacacaaaggcgatggacgcactttccaagctttcaattggggacaaacttcggattaa

SEQ ID NO: 72077 - DNA, 567 bp, Heterodera glycines
ctcgtcttcggctccttcaccatgtccgcgttgtacgccgattcgaccaaataccttcacttgggaggtgtgagaaataaaatactaggaaattttgttgcggatgattcttttttgctcatgcatttttttcaaaaaacttggtgaaaatggtatccgtcagttttacaattcccaagaaatacgggcctgaatggggaaacagcaatttgaggttataaattcccctatttttacaggtatcctctcatctgcactgttttgcatgctgatcgtcctgtacgttttcttttccgtttcagaaaattacaaagaaaataaatgaaattttttggtacattcactaaaaggagatgtggaggggggaactcgacaagaaaatcaacgactttctttgggcggaatgaatcgtactttttccagaattgttccgcaaaattgagcaaaaaatgcttggagaaaccaaaaaatttggaattttgaattcggaaattataattctctattcttttttaggcttttcgccccgtacactccgttcgaacgctcgttcatgctctgggccgg

SEQ ID NO: 72078 - DNA, 359 bp, Heterodera glycines
atgacaattcatttttcatcgttctatacattttttgatcactctgtgctaagtttgaatcttttctgatcatttggtgatctgatcggagtgaaatttcatttttcggttaatgaatgtccaatcatttattttagtttgctaattaacagatttttccgataagtttatgtccaaataaccaacttattttaggtgttggagtgtcgaattttgcatttttccgatcagtctatgcccaatttgtcactttcgaacgaattctccacctcattatgcaacagggatgggccaaatcggaaaataaaatgagagaaatgcgaaatttgcgaaagtaaaaaatgcgaaatgaaaataaa

SEQ ID NO: 72079 - DNA, 337 bp, Heterodera glycines
atggtcattctgcttttcttggctgtcttcttcggattcctaccatttcttcacagcttagacaaagcatacgtcaccgaaccgtaaaattaaaaaatgtttatttaattttcaaatattttaaaattttagctttctcttaacgggtggaaaaattggaaaattttccgtgccatactttgcgtttgaccaatgcaagccgtaccacagcatcactcatgacctgaaggttgaatcccggaactttggtctgtattttatgatgaagcatcgaggtggacactgtgatgaggggtaaatttttgaagaaatcataataattacaaattaggcctaa

SEQ ID NO: 72080 - DNA, 951 bp, Heterodera glycines
atggcgtggcatcaaagtgtacacgaaactgacaaactcatcaaatccgctttcggcacgagaaatgatcctggagacttcattgacaaatcggaggtagaaattttgggtaattagggttaattaatagcatttttaaatttaagttactcctttgagccaatgactcgtcaactttcgcttaactttggcaccagagtttcaatgttcacttgggtcacaactcattttggtatttaaatttaaaaaatatatttaaatatatttttaaatttaggacaaccatttcatgacgaagaatttgatttggctgaacagtacgccaagcaaatgggctatggaccattcttggaacaacatgtcggactttggttgcttggcatggacatgttgccatggatggccgaagagtttgtgagtctgtacgtctaccgtaactgctcttgtacgatggacgcttgggtactgtacctttatttgaattttctataatttatatattaaaaaaagttcacccggccaaccgatgagaatgacccaattgagccgattgtgccatcggccggctcatcgcaatgcccgatgaagcaaatggacgaaacttttgaacttggccaattggacgcgcaacatttgcaggctgatcttgtgttcactgtgctgacggatgaaaaatggcaaaatttcacagtggaattattacaaggcgaaaaaggtgtgagctgacaaattaaattttgattaaatcaattatatttgtatttaatgaccgttgaatgggggaaggaggcaaaacaattagggtggctaatgaatggtattggaattaatcatttatataggaggtgtgaagacagtcaatgttggcctgattaaattttggttagatcaattaggcacaagtaactaaatcagtatttggattaatgactgtgtatgggtgggaatgga

SEQ ID NO: 72081 - DNA, 1008 bp, Heterodera glycines
atgggaaaagcagtaagaaaagcataaatatatttaaataaatttttattaaatttataatcaaaaataaaattaaaaatagtcgatttaaaaaaataattttaggtgatgtaattgatcagacggaattgaacatcgaaattgagaattttgagacaattgaaatcactgcttcttatgtaatatttaaatttgtttatttttttgaaattagctaattaattaagtactctggatggaataaaacatataaagtggaaagaacaaatacgacaattcagactacaaatagcaacgtatttgaattttttttgaacttcactgatgtgattatgtttaatggagaacacattttacaaaattacactgatgacataccattctgtcatattaaatatgttaaggtaataaatatttattattattattttttaaatttaattaatcaagtaaattagtctgccaattaattaattagattatttattttaattattttattttatttttattgttttacaaaattgaaaatgttgattttttttttttatattctagtatttatcaaattataaccagtaaattagttagcgttctaataatattaaatatttaactattgttattattatatttaatttattaattagtttaatttttttttttattattttgataattcattaggtgatttttcattctgttattatatatttgtaatcaattaatttaggtcactggtgatgccattttattagattcgccaaagctgaatgtgccaccaccaattgtaagtataaataattcttttttattttattttatttttttattttctaggtaaaaaagggagaacaaattattttggcagtgaaagaatttttaaatttcggcgacctaattgttattagtaattataagcaaaaggccaacgaaacaattgttgtcaaattgttgcacggcccaccggaatgcagcaaaaattgtaaagttttgtcatatatttaa

SEQ ID NO: 72082 - DNA, 260 bp, Heterodera glycines
gcaaaatatttcaacgatgagaaattaagaaaaatgaatcaatattttgaaacgattgaaaagaacccaaaaattagtgataaaataattgccaaaaaattggaaattggaagtgcaaatttgaaaagatggaaaaaagaaatttgcttcaatttggaaaaatgattttttaaggaatttctaattttggatatgtgtctctgtttgttattttaaaatttattttattttaaatgtttttgtttttttgtgtgattaaa

SEQ ID NO: 72083 - DNA, 834 bp, Heterodera glycines
atgatcgctaaaaatattcagatttgggacgtggcatcgcagaaacagttggaggcactcccctacaaagtgcgcgtggacggtgaaaattcaatgattttaaaggatttagggatgagaatttcgaaaacaaaatctactatttttgaaatccatgaaatttacccccaaatttggcgtttcctttttccccgatttcatgtccatttttttgacaggaatcccaggtgaacaacatttgcattacgcccgacggtgcccaactgctcgtcggcgcatggcaaaacattcgtttttacgatttgcaatgtccaaccgcgcaaggactacacacattttcgtaagaaacgcaaaaagggaacgcattgtcaatttatgataattttgaatcgtttttcgttttaaaattatcacattccttttaaaaatggtcaaaaagtcagacaaattttgaattttgtgcacaaatttgttttttaccgtttaattgtacactaattaaaagcaaaagaatgataaaatccaactcgtactgcgatttgcaatacaatttctgtttattacacaattcggggtatcaatacgaatttggaagtccgagtttagtttcgtcccaagaaatattgtacaatatttttctaattttttctgcagtgtccatgagaaaaatgtgacttcggtgggcttccaagtggacggtgcgtggatgtacacgggaggggaggattgcatggccaaagttggacacaaaatccgcaaaatttaaattcggcaatgttttttcagatttgggatatgcgcaacaatcagctgaattgccagaggatattccaa

SEQ ID NO: 72084 - DNA, 370 bp, Heterodera glycines
atgcacacgttttgcgctcgagctattcatcatcgggcttgtcaatccaaagcgaaacaacaaagatgctgttttgaacgaataaagggcataggttattttgaagaagtgtcaaagaacatgcagcaataagcctgcaaaatctaataagtggaaaatacatgagtatagaatttattttcagaaagtgtcaacagacttttggaaaaatatatttgcaatttatcaaaaattttgagaagtgagatagaaatgataaacttcacgattcaaaccaattttcggtgctctaattaaccgcgataaaaacatccgaatcaattaaatagcttctgagataataaggtttatcataaaatttcatttaaaa

SEQ ID NO: 72085 - DNA, 869 bp, Heterodera glycines
atgaaccgacggtaattaaattaaaagtcacaaattcgtcgtttatttgattcccatttcagttggatttgcaacgacgtttggatggacattttcccatcctttgaccgtcctcaactcggcctcaaattggcacttctttcgccacgtttcaatgcgttggtggacaaacatttcaatggaaaagcgaattgacaatttggagatcaatcggaattagcaaggacaaaggaccagaaccgaagctggacagtgtaacaaacccgaaactatctgtacgaatcgatgacaaatttgtggaatttccattgccggacgaccgtccgttgcccagcaaaatccgttttaagagccttgagatttagtaattaaaaatcaaagctttatggcaataaaagcattccttccattttcacagttacatcgatcactccgtcatcgcttttcttcgtttaaatcaccaaattttcgacaaaagaggcaccaatttacagttgttttggatttcttcaccacacaccacggatggccagcggatttgggatattttgacacgtgaaatttggcccattttttcgacaaacattcgctgtttgggcttttcccgtggtgatcatttggacaatttgcttcgtcaaatttcgccgacaattctcatcgatcttaaccaattggtttcaatccattcatttggtcggttgcccgctgcgattggtgacgattttgatgggccaaattcaacaatttctgctggccaagcattgtccaaatggttgcactctccgagaaaagatggccaacccaagcgattgcgttgcgaagattacaacgcacaagcgaacactgattggatcaacaatttcaaggag

SEQ ID NO: 72086 - DNA, 2391 bp, Heterodera glycines
atgcgccactattcattgtataaacgtgggacaattacccaagacagatggcggtggattaacaaaaaccaaaccacggttcttcaacaaaaggcgctgcaactactccgcgaggcggggatccctacaacagagacagagtacgacgcggaagtttatatacatcaagtgcaagggttgtggaacgtcaagtatcccggcgagtacaaaatatttatttttaatgactaccagatacgaccaatcaccaaatctgatgtcaccgactaccaattccccattcttctctaccacaacaacaatcactttgatggcatcaaaacgatctccaaatttttcaacaaaaagaactactgtctctcctgcgagtcgccgtactacaagaaaatcgcacattcatcaaactgctcttcactctgtcacgggtgccgtgaggtgggcgttgactatccctgcgagccacaacaaggatacatcaaaaaatgtgatcactgtaacaacaccttttacaacaacagctgttatgagcgccacctccacaaggatttgtgcaccaaatttcagcgctgcgaagattgtggggtaatttataacattatggttcatgggagtgttgggcataaatgtggggaacagttttgtaaactttgcaaacaattccatataaaagaagacgacgacgacgggatgaacccctgcacgaaatgcttcatccaacccctgaagcaacaacgaattaagccatacaggatcatcgtgtatgactttgaggcgacacaggacaaaaaagtggagaaccggttcgagcatgaagttaactttgcagcggctaccatcatctgcaccgactgcattatcaacggcgactggaacaaatcactgcaggggaaaaagtgccaaatttgcggtcctcaccgctcaatcaccttttcaccttttgactacatggagacaacagtcgaccaaaaagtcgtcactcagcaaccgctgtgcgaattcgtccagtggcttcttttcgaccacaacaaaaagtttccaacagtcgcgtttgcacactttggggggcgctacgacatgacgatgatcataaaggaggttttggcgcaaggaattcacaatccggacatcatcaaacaaggaaatcgcctctacgagctgaaaatcagggaaaacgagcatggccccctcaccatctttcacgacagctacaacctaatgcccatcaaactatctggtctcatcaaatcttttgggcttcatataaaagataagcagcactttccccacatgttcaacaaatcagctaactacttcaacgtcctaccacaccttcctccacgtgatgactactgtcccaaccaaaagaagaaggcggacctgcagaaattcgacgactggtacaacaacaacctgtgccaaaaattcaacttgaaagaaaaattgcccgaatattgctgcaacgatgtaaaaatcctcacccacgccctcgtcgaactacgccgggaattcaaacaacttacacaacggaacggaaaacacggtggaatcgacattttgtggcaagccatgaccatcgccagcgcctgcgtcaaaaattttgcactcaaccatttgaagcccaactcgctcgccatcgtcccggagaaaggctacacgccacaacagaaccaaagtgcacttgccatcaaatatcttgactggtactcccacgtcaacaacgttaacatccaaactgctcactcccggtacggcgaatatgtgtttaagcgtgaagggcaggtataccaagtggacggctacatcaaaggaacagacgggaggcgggacaaaataatcgaggtgaatggttgtctgtggcacggttgtgaggagtgttttgatgacttgggcgacgaaacgaggatgccgaacggaaagacgctgcgggagattagggagcgagaagagaagaaacatgaaatattgagcaggtacgtcgacttggaggttgtttgggagcacgagatcaacgagaagctgaagaaggacaagcagatgagggagtttttcgccaactggaaggaccactcaccaatcaaaatcagagacgcgttccacggcggacggactgggccaatgaagctactccacacagctaagccgggacaaaaaatcagctacaaggactttaccagcctctacccgtggaccaactttacgacaaactaccctcttggccacccaaaaatcgtcagtgtcccaccaaatgagcagacggtcaactggcgcaccccatccgacaatccctacaaaggccttctcaaagtgctgcttctacctccaaacaacaacgtcagcgtcacggttatgcccgtaaaatttgatcaacgcctcctcttcccccctctgtga

SEQ ID NO: 72087 - DNA, 1247 bp, Heterodera glycines
atggccctgaaaatccacgccaccggcttcccgtcaacgtgcggcagtgagaggcaaaaggacgaatacattgaggagtgttggcgaaattttggaattcatctggagaaggagaagatgaaaccggagccgggaaagcgctacatcgccaagctctgcctcaactcgctttggggacgattctccatgaggaatctactttccaaggcggtaatcaacaatgacccttgcgtcctccgccaatacactgacgacaagaaaattgacctaatggacattgagctgatggatgaggacaacgacgtattcatgctcacctacaaaccaaaggaggagtttgtcgacgaaaacaaatactccaatgtagtcatatcgctctacacaacatcaatggcgcggctctatctctatgaagtgttaaaaaaagtggccaacacgcccggatgcgaaattctctactacgacacggacagcatcatctacgttcacaccgagggtaacgacccactcccgacaggaaagggtcatctcggtgagctgactgacgaaaagccggaccacaacattttggagttcatcagcgctggctgcaaaaactacggactgaagctggaacgtaaggacaatggggaaattgagtacgacttgaagataagggggataacactggatgaacaaactgtgcaaactatccattatgacagtgtgaaagatcaaattatgcgttatgggtccgatgaccccgcggaccccattattgtaacatacccccattttattcgccctaatctaatccaaggcaaagtgtacactcaatctctaactaagcattatcaacctgtcttcacaaaaggcattattaataacgccttccaagtcctcgaattcggctaccgtaattcacgtttgtaaggattgtgcactctcacactctcttttattatcccgttttccactatttttttcaatgcactgcaggacggaatgacccctggttgatcctccccagcactccaggccctccatctgagatgaaggtggacgagctgctcattattgtaatgcgcagcctggtgcgtgagtgtttgggttggggaccgaagggcgaagccgattcacgggtgcagacactttttccatttagtaggttcggaatcataatttattttctgagaacgttcttccgtcaattgtatatatataatttatttcgttattatatttatcacttgtatgttgtgattgca

SEQ ID NO: 72088 - DNA, 1501 bp, Heterodera glycines
atgggtgtacatgtgcacagagggccacccacagatgaattgctgagctctctaaagaagccgctcttattgattctagatgaccttttaacaataattgatgagaaaagtctatccgaattattcattaaaaaggcccaccatttgaatattggagttatatttataacacaaaatttgttcgagagaaaggtgaaggtagcccgaattaattctcaatatattgttttaatgtcggcaccgaatgccgcgctacaaatacgtaatttgggtgtacagttgttccctaagaggctttccttcttcctaagtgcctatagagatgcaaccgcatcaccgtatgggtacttacttttggatttacaccctgcttcgagcccattactgagaatttgcacgaggatatttaaagaggatgacgagaaaactgtgtatataaataatcaaaatgactaactacataccacaaaacgtagttggaaacttggaattcctgaagaagttagcggcaacaaagtcttataaaaagagacaacaaatatttaaagaagcgaccagtgaacaaattgcattattagtggaaatttgctataatatattaaagggatacttcccactaacgaggcaacaaaaatttcgtcttgtgccttacgtaaatattgtgagaaaattaggaagagttagaactgagaaaggtgcaaagaaaattattcaacaaaacggaggcggtggtttccttaatttggctccattactattaccagtcattattgccgccttaaaatatggagaataaatttatactcgttccatctgacttgtataaaaatttattaaagcctgacactggggagattaatgttgaaaatgctaaaaataaattgaactcacttttgaagcagcgaaaattagattcgggtacaaaaaatttactttataatcaggaattgaggcgtttcttgaaactaaggaaggaaattgaagacaaacccgtaaaggttgagctcaccgacggctcattgatggtgtttaatccaaagcagcgcgaaaggaatatgaaaataattcctacacaaattgttaatgacgaaggattggatgaaacgggctccatgccaacgcttgaagacccttacactactgctgaagagagtgatgctgagttgacaacaacaacaacaccaaaggcgagaccactgttaaggcctttacgagttgggacaagtaaatttcgtcaaaaacaaaaatcttttatagttaggaaacaacaaaaaattatgtcgattataaatgatgaccctgagaaatttggtatcggtgctaaaggacacatacttagagctaatggaacggcatatttaaaaagtaatgttaatcaagcgctagagcgaatattgagacggtcacccgagaatgctccatcgccggttggtacaaaagtgttagagcaacgactgagaaacgacccgaggaccagcggaatattaaaacaaaactttag

SEQ ID NO: 72089 - DNA, 1124 bp, Heterodera glycines
atggataaaaagaagttactgaacaaattatataatgaccctaattcacctgcgtgttatgcagggcaggaaagactttatgaagaggcactaaaatatgactcttcgattacaaggaaagacgttgaacactttctcgagggagacagaacatatacattacataaacctagacgtgttaggtttaagaggtcacgaacagtgcctgctggattcatgactgatgttcaggttgacttggcagattttcaaaaattatcaagagaaaatagcggattcaattatatattgttgggtattgatgtgttgagtaagcgggtctttgctgcacccgtaaagtcaaagaatttcaaacatatgagagaagcgcttgacaacttaatcagtcaaatgccaatggttcctcatagaattttttcagatcggggaacggaattcgaaaatagagaaatacataaatatttcaaagatatgaacatacaaaagcacaaggctcacactagtacggttaaggctgcactagccgaacgctgtataaggacacttaaacaacgactataccgttattttagtcaaaaacatacaatcaaatgggttgacgtgttgccaaaactagtgaatgctttaaataactcaaaatcacgaatcaccggaatgaaaccggtcgacataaacccggataacgcgcaaaaaatttgggaaagagtatatggcgatgaacatgcacaaacaacatatagaaaaccaaggttcaaggagggtgaccatgtgcgactcgcaaagtataaatccagctttgaaaagtcttaccttcccaattattcggatgaaattttccaagtttacgatgttaaaagggggaatcctcatcggtatggaataaaggacgacaatgaagagccgtttgacacccgcttttatgctgaagacttgaccaaaaccagaaaggacgcagagacaacatacagaattgagaaagttttgaagactcgcacaaagaagagtgggcagaaagaacatttggtaaaattttacgggtacaaagaaccagagtggatcaaagacagagatattgagcgatagcaagtatttaagtgtatttattgtctatattttgtgattaa

SEQ ID NO: 72090 - DNA, 562 bp, Heterodera glycines
atgagcatcaaaaatgatcagaacagaataatttgtccaatttattatatctcaaaaagaaagacaactcatatttcaattaaaaatggtaatgctgctgttgttgaggcggacgatgtatttagactagggtaggtcgggaccgggaattttcaagttgaaaacctggatcttttggctgggaaaaccgggaatttcccggatcggtactcaattgtccgtgttttggtcccggtcccgaccaatctttttttcagcaatcagaaagatgtgtccctgcgattgtcaggggtgctgttcaagaatccggcatggcatcaatttctaacatattgtaaccccggacccgaattctaataggaagtttataaaaattttcgcatttcaaattttggatcaaatttgtacacggaacgaacttaaagtgcattaatgcttcatttaaactatttttagactaaacatgaaaaatgacacatttgaattaccacttttttttgttcgaattgacccggggtccggaattgatcgaatggatggatgccggattcccgatcggtga

SEQ ID NO: 72091 - DNA, 290 bp, Heterodera glycines
atgaaattaccgttaccggtttgtctagtaccggtaccgccggtaaaaatttgcactggtaagaatgggggtctgggtgagaaaagagtagggaatggtgaaggagaaattttttgagaaaaaaaaattaaattatttattttcatttaaagcatttgttcatatgcataagtggtcaagtggctaaaccttctgattttattatttctcgcttgggttcaattccccacttggatagaatatttctcacattttctttaccattattttaattaaaattttaattttaa

SEQ ID NO: 72092 - DNA, 2525 bp, Heterodera glycines
atggaagagaaagtggaagaggaacagaaagtggaagagaaagtggaagaggaacagaaagtggaagaggaacagaaaatggaagagaaagtggaagaggaacagaaagtggaagagaaagtggaagaggaacagaaagtggaagagaaagtggaagaggaacagaaagtggaagagaaagtggaagaggaacagaaagtggaagaggaacagaaaatggaagagaaagtggaagaggaacagaaagtggaagagaaagtggaagaggaacagaaagtggaagagaaagtggaagaggaacagaaagtggaagagaaagtggaagaggaacagaaagtggaagagaaagtggaagaggaacagaaagtggaagagaaagtggaagaggaacagaaaatggaagagaaagtggaagaggaacagaaagtggaagagaaagtggaagaggaagtcagagcagcaagagcgacaactcgaaaattatttattttagaattataacatttaacaaaaaatcttataaaaaatcacaagcatataaataaaaatatcgcatttaaattaaatttaaaacaatatcgtttttaaattaattatttgttcatttccaaattctcatattcctaaactatgaggatcgcttagcggccaatagatactttttgcacgccccaaattatatctcccactagagccagcgttgaaagcgcccccggcgctttcacagggcccgcagggccctggtttagaaaagagttaaatgataagtagggatggtaattatatggaaatccatatttttttcctggaatgtgggaggcctgaaacgcacgaaaaacatgtttttagcttggtttgaagcttctaggaaggatttctatatccatattttccatatttttccatatttcgcgatttatgtccatatttccatatttttccatattttggcattttggtccatattttatgtccatattttggcatttttcaaaaaaacctctattagaacggccccagcagctaaattagcctttttgagcccaaaacccgaaaaatttttcaaaaaaatcattttttcgccaaaatttctcgagaatattgaataaatttaaattttcttaaaaattaataaatttatgtcaaaaataagcaaaaaagcgaaaatttcgcttttgttgttgattttgcgctaaaaaaattaataaattttagcttttatgttttttttcatttaaaatgattgcacgtaattgccgaaaaaattcgagaccaatttccgaatgttgaccgactaattgcaaaacgaaagccgtctttgtcaaagcgccttaccgagtcaaaaaatttggaaatgtatttcatatgcaatttcaaccaacaaatttgaagaaattttgcacccaattttgaaaaatttatgtccatattttgacatttttgccatttatttccatattttgagatttttgccattttatgtccatattttgcgatttttagtccatattttatggccatatttcgcgattttatatccatatttttaccatccctaatgataagtagggctgggaatttaagtaaaatgacttttttttgctgactctaaatggccttaaaatgacttaaaaagtgttctaaactttgtttgaagcttcatcatgcattttttggcgctagttacaaagcgtggcgttttgaaaattttttcactttttttttgactaattttttttaatttaaaaagtcctgaaacccaagtacccgggggttttagaggtcgctgatcgtggatacgacaattatttgggcctattaagcaaatttggcgctagttataaagtgacagatttttaattttatcaaaaacaatatgggggaccctattgttttgcaaaatttttttgagataaaaaatcgtgaatatactttttattcgttttaattgtcttgttaatgcttaatattcatcataatgtataaataaatttaaaaaaaaattatgtcaaaaaaatgaaaaaaatttcaaaagaccccttctttaaactagcgccggtaaatgtatcggatttttgatgctttttaaatgtttaggtatttgaagctgatcatctgcgacaaagtagactaatgaaaatgaatttaaaaaataacaaataatgtcatagtttaaaatgatggactttcaggagttttacgaccaatgcagcctttctgtcaagcaacaaatttggattagaaacgaaagtcttttttcggaggccattgaacccgttctcgacgcatacatttacgagaaggagcgcttattactgtcagctgcgaatggcaccgataaacaaacaaatttctttaccagcgaaagttggaaggggcggagacagaaaaaacacatccaaggcaattgcagaggaagaatgggattgactttctcgacagcatgggattcacatttatctttccatttttcagaattggtttcaatggtcggacaacgcgacattctctacggcagaattacg

SEQ ID NO: 72093 - DNA, 213 bp, Heterodera glycines
atggtcaccgattccaaagaggacattgtgttctttgccagagtttgtgagaaggcacgacgctacgatgacatgaccgaggcaatgaagaaggtgtggtcgatgattgaaagcattgcatttgatttgttttcattttttattttcagatgatccaagcagacgccaatttgaacagagaggagcgcgagttgctcggcaccgcctacaaag

SEQ ID NO: 72094 - DNA, 78 bp, Heterodera glycines
gctctgtatttgtctcgccccactacagtttttacgccgtctttgcatactcttttttgcgtagttcaaaatctgaaa

SEQ ID NO: 72095 - DNA, 69 bp, Heterodera glycines; identical to SEQ ID NO: 67430

SEQ ID NO: 72096 - DNA, 573 bp, Heterodera glycines
atgactgtgttattaacggagttccgttccaaaaggtagacttcatctcatcaccttaccaatttattcatctagcatgatagtgattattcaaatccggacaaatttggtcctgaaacgcattttcacctcttttttaaaaggtttatgtcagcgcaaaagacggcacttgacccattggcattttgacttttggcattggtccccgaaattgcattggaatgcgttttgccaaattaaaattgacatttaaaaataaccactttgctttttagcttaataaacccaaccttaaaatcaaggtgtgatccatttaccaataattagtgctatttatcgccattttaaattatttatgcttctttaattcattatttttttgttttttgaaatttcagaacaattctcattgagagttttaaggcttcatgcccctatttttggatttctaaaatgcaaatttcccaggctacatcgcgtcgcaatgcgaaagcgttcaacagtggcgacgcaaatttcaccgaaagccaataaaatttgacatttaaaatagccgattggctttttagctta

SEQ ID NO: 72097 - DNA, 1292 bp, Heterodera glycines
atgttttatctgccttggtatttgtttaaaacgaaagtggttagaaccaaggacattctggtggcacaggtcaatggccatctgttgccataccgtaccattgaacaaatggtaggcaattggcactaccaattcaaagcattgatggaagaggaatggcacaatgccaatgccgaagagaatgccaatgccaacaatgacgaggaggacgcgcagttggaacagcagttgcccaacccatgtgaagaggcaaagctcagagtgaagaagtgatggctgctagatcaattacaatagtgaaaaatttcgacaaattttttaattttttatttaaattaaattttcgggctgccatcgaaaattttcaaaaacatggactgacttattaaagaaagattttgggagcaattttggctctaatggaattcctccccccccccctacctccctctccccctgtacccttcccctccgcgctcctccttcccccttgccctccccccttcgcttttcatcctccttctcaccttggcttcttcgcggaacattcccttcagctggcaaatggaggaggggcaaaacgtcaaaatgttcggaaatggcgcggacggaataacgaagctgaagggggacaaacattggaaaatggcggaagagcgaaagagtggaaagagggggggggggggggggggagacaacaacttggtccgatcagtgcttttttacatttcgatcccccgcattattccatgtgaagcgcaagtgggaaacattctcagccacgcggtaagggaatcggatggaatattcgttgatagcgcctgctgagacgtaatccatccgagcggaaatacctcaaaaatgtaaagattggaagttcatcaatgatgaaagaaaacgggaaaaaagccgactgaccaagggtacgctgcatttcctcgttggaaatgtacaaattgaaggaacagcggacgaacaccgggaacaaactgacaatgaggatgaccaatttggagatgagaaacggaagggagggggaggaggaggagaagtgtgacgacgaggcacagggacaggacgaggaagaagaagaggaagcggaagatgaagcggaagaagaagaggaagcggaagatgaagcggaagaagaagaggaagaagaagaggaagcggaagatgaagcggaagaagaagaggaagcggaagatgaagcggaagaagaagaggaagcggaagatgaagcggaagaggaagcggaagatgaagatggaggggagaaaggaatagccgca

SEQ ID NO: 72098 - DNA, 116 bp, Heterodera glycines
atggaaatcgacggcattttccctggcataatactcaccgccccctctccccttagatgtgccaagcgtcgcctacattttctctcgctctctgcaattgctccgccacacccttt

SEQ ID NO: 72099 - DNA, 750 bp, Heterodera glycines
atgcaactgataggccttaaggaagcagagtgtgggagagaatgggataaaggcctgagaggatctctgaagagtcccgtagctcagtcggtttgagcattctttggtatgggaagggcgtgggttcgagtcccactgggcgagtaaccttttattttctattcaataattgcccaaattgactggggatgtttttttttacaatttttcaacaactccatgtttataggttcgcactccgccgcagcagaggcagcgcaatgtgtggccaaaattttcaccaaaatctcacgcgccacaatatgtcatcagagcgcgtaattttaaattttaaaatttaaataaaaagcaattaaattatttttatattttaattttttcagagtcttctaccattaaattcaaacatcatcaacaacagtattcttcgtcttcctccgcttcatccgcttcatcatcttcgttgctctacaaacaacaacaacctctgctggagcagcaacagcaaaacgaagtgggttgtcagcagagaacggcacttttggtggtttgcagagttttggcacttttggtggctttccgatttcaatggcatttcgtccccgcatttatttatcaccactttttttttgttttattttgttgtccctcgtggagcttaagggcagaactgaaattaatttttgacattgaaaagcgacaatgttctttcattttgaagactgaattttcttcctttttttcattaaa

SEQ ID NO: 72100 - DNA, 893 bp, Heterodera glycines
atgattacactgactttttgtattcattcgcgccacggccgacttgcaaatcggccggagggtgcggatcaccgtaagcaaaaatcaaattattaatccaaaaaaatcatttcccattcagctatttgttctgcgacaccacgaccaatggcactgcgttttgctgtgccaaaattaaaaggggaggaaattgtgccaaatttcaaaagaacagtaaaagaaaagcgaatttttaattatttggaattataatgttaaggcgaagaaccgtgctacgattctttttgcattaatgggcaatgccatgaagccaattatggcaaaatggtgggaagaatttcaatataaatagcatattcaaatggaatatttagctaattgttaatttagcactttttaaatgttgtccattcttccgaccaatcgttgtccgatgagccaagcagttctttcattggcacctcaacattacctggatttgttgcggatggaaccgatgtaaaagataatttattgaatattaaaaaaaaaattaaaacataattaattattaaaaattactttttaaattgttattatatttctgtaattgcaatgcttgttcccgcttttaagcatcacataaacttcacaacatcaaaaccttcatcaccaacaccttttcttcgggcgatgaaactgatcaaacaacggcatcttttcaactttcttccaccacttcaggtcaacaaacattactgtatgacgaaacttcaactgtatcgaatacagtaggaaacaacactgtggagctgcttaccaacacttcgccaactgttatttttaaatttaaaaccaatgaattttgcgataaaattaaataagctttttcaaagaaggcataattcaattta

SEQ ID NO: 72101 - DNA, 398 bp, Heterodera glycines
tactgggagttagcatcatagcagtgcttttccttgtctttttgatgctctcgcaaaatctggttcgcttctgataagtttataaaaaaaagttaagcctaaaatttttcgcatatttaaaaagcaattaaaaatttttagattttttattcatctccctttttgatattgaaagcatctgagtgcctaaaataacttgtaattaaaatttgatgcgtttcagagcagtttctgaaaaaatatttatgaattaattttgctaaaaaaataaaatagtgaagctttaaaaattaataaaaaattttaaattcagaattactggtgttagcatcatagcagtgcttttccttgtctttttgatgctctcgcaaaatctggttcgcttctgatcagtttct

SEQ ID NO: 72102 - DNA, 304 bp, Heterodera glycines
aaaattccctcaaaaataaaaggtctattgcgcaccgccctccctatcatgctcgagagcatttgtatgtgtataaaatttatcaaaaaaagagatagccatttttctgggataacctctaaatataaaaatcctctgtgaaataaaatggcgattgcgcacagccctccgtctcatgcttaagagcatttgtgaggtataaaatttctcaaaaaaagagatagccatttttctgggatagagtataaatttaaaaattccctcaaaaataaaaggtctattgcgcaccgccctccctatcata

SEQ ID NO: 72103 - DNA, 114 bp, Heterodera glycines
aaaattccctcaaaaataaaaggtctattgcgcaccgccctccctatcatgctcaagagcatttgtatgtgtataaaatttatcaaaaaaagagatagccatttttctgggata

SEQ ID NO: 72104 - DNA, 793 bp, Heterodera glycines
atgccgacccggttgtcgaccttttggacaaaagacgcattttccgttcgcgactgttccgcgagtcgtgcgtcttctacgagggcaactacgtcaaggtgggcaatgatgtgaccaattatagccaattagcttttaattacttatttttcaaaattgttttttactagaaaaagcctctaaaattttttaaaaaacaaagctgttttttaatattaggttgggtattttttttaaactttaatattttcaattagtaaaattatgaatttgggattgtcggaatcccccttttaattgtcgttaaactgcttgtcattgtgcccccgtatttccaggacctttcccggttgggccgcgatttgcgtcgggtgattatcatcgacaattcgcccgccagttacgccttccaccctgacaattcggtgccgtttttgttgttgctgttggcactttgctttgtcattatataacatttcccctttcagatcccggtccgcacttggttcgacgaccccaacgacagggaactgctcgaacttttaccgttgctggaggaattggcacgagtggacgacatttacaaggtgaacatggaaaagggaaattcgaaaaaacaaaaatgtcaacaattcattttgggtaatgatggcacgatgctaatgcaatacagcttggacaagtgggaagatcacaacccgctaaaaaatatacacaattttattagtttgattttacctttagcggcaacatttttttatcgtagcggtttttctttcatatttttattaaa

SEQ ID NO: 72105 - DNA, 605 bp, Heterodera glycines
atgaaatccccttctcccggattcagcttagcttatttatttgtatttttagcgtttttagtatttattttttcttgttaataataaatgataataataataatgtttaatttccattttttcgtcaaaattgtgttatcaagtttttaaattaagcattctatttatataactctttttattttgcatattttgatttctatttaattatttttgattttaaagtttaaattagaaattacttatttttattattattcttaagtttctcgtcctagcgttattttttcggacggtttttgtttgattggaaaaattcgaaactgaaaatttttaattttgtaattgaattttcgtcggaaatttattcgtaaataatttaaatagatttatttttaatatttcttcaatttaatatgaattttataaaaatgattaatcattcatatatttttaaatttgctatggtaataaccgaatatatgaaatacatatttagttacatttcaggattgtattttgatttaatttttcagatagaaatagctgaaggaatatgtttaaatgagaaaggcctaacatttttgcagattaaagatgattga

SEQ ID NO: 72106 - DNA, 340 bp, Heterodera glycines
atgaagaatgtgaaaggactcgcaaggttaaattatcgcacagtgtcaatgctcaaatttaaatttgatgccattgacgtggacatttcttttgtttcgataccggacaagaaaaaattgccgaatattttaagcgaagaatttgtgcaaaaatatttggacaaatttaattcggaagaaaatggcaaatttgagaagcaaaatcggagtttatccagtaactttattacaaaatcaaaaggaaattaataattttattttaagattaccgaaaaattatatttgcaattttaatttgattttgaaccgaaaattttgggttttcatataaaattaagaa

SEQ ID NO: 72107 - DNA, 566 bp, Heterodera glycines
atggaacgaatgaaggattggagcaaagcggaagggcatgagccaatttcggcgtttgtcgaatggattttgaaggcatgggacaacaagtaccaaacatttatttgggtgagttagcgatcgtttcaacatcatttgttgcataaaaatatatataaatattttctaggcccacaacgcttcgagatttgatggccactttgtgttaaaatacctcggcgagaccaaacgacgacctgaagtcatcatgaatgggctcaaaatttttgagtttcgtctacaacattctcgacgccactcaaaacttacatggcgagactcatgtctactgatgccaattcgtctggaagaaatgccgaaaaccttcagtcttagctgtgccgataaaccattcttcccctacgctttcaaccgaaggtttgtatgtccaaatgagggtaatttaaatgattatatttctcagagaaaactacaacgtgcatcttcaaaatttgccggacaaggaggattactgccctgggtcaatgaagcgggacaaatacgaaaaattcataaaatggtgttag

SEQ ID NO: 72108 - DNA, 287 bp, Heterodera glycines
attttctaagaaaaaataggagttttgggggcgcgacggtgccgataggcgccgccggggaaaaaaattggaaattttgatcatttataaacagtttttcactgaaaattagccaatttataggtaaaattttgaaaaattttatgggaatttaatccaattcttaggggtgtaaaagtcgcatttcgcgccaaaaagcgaaatgtgaaaagcgaaatgcgaaacgccaaaaaatgcgaataatgcgaaaggcgaaatgcgaaaagcgaaacctaggcccatccctg

SEQ ID NO: 72109 - DNA, 494 bp, Heterodera glycines
ataaaaacttagaaaatacactgtaatggaaggactacggtaggtttccatcctccaacaaattacgctgcaaattgcagagattgtcctcataccgtatccatttaaaaaacacacagtatcactgacttatactttctgctttcccaatttcgctttaaggaattcagtgtttagcagccattccctacatttttcttcccattcattagtggtgcggtgggaatgccattttttgcttttgcgtcgcctttgtcaccgccaacggcgccgcctctttttggcaatccgtcgctctttgctttcccaccatttttactcttctcaaccgctgtcaacagttctttttgtgcctgaattttcattaaattcaatgcataattattattttttattcatctaaaaaaatgaagtgatcggatgaaggaagtcccggaactgagagggaattttcctgggacatttttacaatagcccaagatagggactgtatc

SEQ ID NO: 72110 - DNA, 365 bp, Heterodera glycines
atgtgtcttaatgtcaatgggaagaagaaggacaaaggaaaaaagcaccatggtactgaacaagcggaagatgatgtggaagaggaagaggaagaaaatggagaagggaaagggagaggtaaaggaaaatgttaatcaattaactaattaattaaccaattaacgaattaataggattaattattaaaaatgggaaaaggttttttaagctattcaacagattacgtattatacaaaacattatgattatttttgggaaagcattaatataataatgaattctatgaataattgtgtaattatttaatttttaactttatttaaagaacaaaatacatttcataaaatatattttaattaataaa

SEQ ID NO: 72111 - DNA, 491 bp, Heterodera glycines
atgccgtttgttcaaaagacgacccaaaaaacagaagctgataaatcggaattgccaccacgagtgatcgccgaactttacgcatgcctgaatttgacatgtcttttgcattattttggggggtatgctgggcaataaaagcacggtcagacagacaaaaaattcatttaaactgtgcaaatttgggccattaggaagcgcgagactgagacctcccgggaccgatcccgtttaggtatttctaaaattttgagtctcgagaatcacttgtctgtcaagaaaccaaacatgtatgtcggttaaaatgcattgatttaaggcgaatcgtcggcaccagatcagtgtctcatcagccagaatacgaactcaaataaccgccaaaaacggaaaagaaatcaacgatattttggcaaagcattgcgaatggaataccgcatgctcagtgaccaacaaaggcttcaatttgtaaattcaatttaattttgaataaa

SEQ ID NO: 72112 - DNA, 661 bp, Heterodera glycines
atgatttcaccccacctcagccatatacccccacactactcgcacgttaacaaaatctccaacccgactcctcctcctcctcctcttcgtcaactgcgtcagcagcggttggtggcggcagttcagcggaagacagaggcgacagcggctaagggccgttggctctacgaattggacgccaaaaaatatgccaagaatgctttgcgtcagcagcgcatcaacctgaaaaatgggcctttgtactgcgccggctgtcatgcactgggcaaccacgtcatatcggactgtccaatggacaaaggtgtttttgttttgcttgataaaaaaatatgctaagcaacttttttaggaagatatgccgccgcctcagaagacgcagcgcaccaggctgaggattgtgtgcttttttgccgctgtcaatgctgcaagctgcggggacacaaacccaaggactgtgagacccttatggcctggcgtaagtttccatccatttgtatttacatctatatatatacatataattgtactattcaggggaacacttggcaatggcgtcagccggcaaaaagcacacattccttctcggacacaagcggttcagctcaagaacctacatggaggagcatgccgtttccgctgcgtcagcatgggaaggtcatgg

SEQ ID NO: 72113 - DNA, 432 bp, Heterodera glycines
atggtaccgaaaaatattggcagtgagacccaccttggcaatgaaacgacccctgcaattaaacgtctggcaatgaaacggcgggcaatgaaacggctgacaatgaaagggcggcagcgaaacggcggcaatgaatcttcacctaccggaaaatgggaagaaaaacggaatgatcaaaatcaaaataaagaagaaacgagagaaataataatccgaaaattcaacaaaataaaagagaaaatcaagaaaaaaggaaaaaaatattccacaaaaagaatggaataaaattgaattgaaaatcggaaaaaaattgggcccaaatcgcaaatatatttataaatggatcaaagaattaggcttatacaaatgccacaacaaatcaaaaacggatgaacaaaaaattgaaattgtgcaaaaatttatggcaataaa

SEQ ID NO: 72114 - DNA, 1300 bp, Heterodera glycines
  unsure (1)..(1300): unsure at all n locations
atgcgctcacactttggtggcacacggaaccaacaaatcggcagatggtgagaaaattgagttctaataattttatgccggaaattttagttcatgccctcgggcgattttctctaaatttattttaattttttagaatccactataatggagtgtcatctgatcaattaagctataaaaactaaaaaataataattaaatagaagaaatttacgcgaagcaatcggtaaatttactgacgactactaatttctttaattggaaatttcaaattttcgtcaccaataaagtgcatttttttttctgattcacgtttattggtcaaattttattttttcaaacatacataaatcaagaaaatttgttaaattttctaaaatttaatttattaataaatagcacttcaaaaatgcttccaatttaaggatcaatccaaagacaatttgcgggcaagcagcaccacagtttcagcaagtccttatgcggccgagggatttcgcttgctttggtgaaaattttagtttctaatttttaaaattaaattcaaaaaaattgttgaggtcgtcgtttcggcacgcgcagaaatgtcggcacaattcaacggatgcaaatggtgcggaatggcaagctgaattcacatgtgaaacaaaaaggtgagaacataataatatttttattttcatctaatttaaataaaattatttatgggttttttttaaatttaattagtttaatattattttttgaataaatgttatcaatttcttaataaaattattctaaaactttcttttaaaaataaataattgatttattatttttcaaaattattattcatttattttattttttgagcatcactaattaaaaaaaatattgtaatttcgacaaattaattcgcatttttttaaacaccaatatcgaaaatctcgactttgaattgttttgaatttttttgtaggcacaaaacgccaacggcatcgtcgccttatgagaagcagccggagaacacggaggaatgcatcccggcaccgctcgcctgcaattcatacgcggactgtgccgacaatgaagccgatttgcaccccaggcgacagctggcacacgggtgccaacgtaagcttattcatattccaataaattcaattatggcaaaatgaaacaaaatgccaaaaatttctgtcataagtaatttttttttcaaatttncccaaatttatcagcaatttatgtattgtattcatttttatattcgtattctatttaatacaggtaattttatttgggaaagtctaataaa

SEQ ID NO: 72115 - DNA, 558 bp, Heterodera glycines
taattaaatccattccttcgggggaccgtgccgggtgccgcggggtaagcagtgctggttcgtttcatcacggcaccgaaccttttggctagtcagcaatcgttgcttaacttgccagatcggacgggtgcgcatgattccactgttccaagcaccccaccaaaagcaaaacgatataaccaaaatataaggaaaaattttttaaaaaattttttctccatcttcctttttgatactaaagcatcagagtgctaaaattaagttgtaaataaaatttggtgcgctttagagcactttctgaaaaaaatatttatgaaacaaaaaaatctattttttcaagtgtcagtttggggtactcaaacatttatggggagcaaaaatccaacgcagaattaaagtacagactatagggaagctattcccgaaggattcgaggctccccataaatctggggggcatcggatcggggggactgcccctaaaacgaaaataaatcttattttttactgaggtcgtttgaggtgactcaaacaatgtatggggagctaaaatccgacg

SEQ ID NO: 72116 - DNA, 1016 bp, Heterodera glycines
atgcccaacactttcaatttgtacgtaaatattcaaatgtttaatggattggacagtaagtaatttatattatttttattatatgccaaaaaatgtttgaaatgtgaaaatgactgaaaactaaacgaactgagaaaaaaaaccggacgaagtgcagagacggaatttgctgaattgtattggacattggcgagatcaatggcgaatgattattaacatatagcaaagtttgtttatgaaaagcgaatgtcagtagaaaaggaagtgatcggtcgaactcgaaaaataaaaaataataaattcgttggcacttttccaaatataaaaagactgtccgatcgatcacttcccccacagttaaagaaaggttaatgattcggggaacagtgctttttgaaacacacaatcagacgaggagtagcggagtggttacggagaaattggcatccgccaaactgtcggcatttgggccgggcgaagcggaggaagacggacaccagaaagactgggcattgccaacacagcctttgctaaggggaaaaatcaaaagtgaaagaaaaaggcattgtgattttggacacggacttaaatgggtttttgagtccatccgaagagagttggaaatacgcgtaacggtgcgcatttagtcgttcattagtggtgacggcggcgagaatctgaagaaaaagggaattaattaaacggaaattgaaaattaagaggacgaccgatacttggtaaaattggatgcaaagcaaagcggtgacgaagaaaaagtaattgacggagaaaaagcccaaaacggtgacaaaaggcatgcagaaaagaacatttgtggcggagatttggccacagaaatcgcgccaatctttggggaaacattcgaaaaagaaaatgtgaaaaacatttacagaaaagacatccggagaacacgagaaggcaggagaagtcgagaacaatcagataaacgatgaaagcccctaaaatggagagaaattggcatttgtaagcgccaa

SEQ ID NO: 72117 - DNA, 573 bp, Heterodera glycines
atgcctgatttagtgcacagtggtgccgaagtaatatcaattcagtcaacttccgaagactgtgaaagacaatcaaatggttctgtatgtagagtcagtggaacaaccgaattaacaatattacccgctggacaaaaagtttcattagcattaaaagatgataaaggaaaaataatgggttcattagaattaattttacaatttttacgattacactgtaaccaacaaactttaaaatggttacgatcatataaaataaatgttatttcaaaaagacgctgtccaacaatgggctcatgtacaaaaagtaaatgtaaaaacattaaaatggatgaaaaaattccagaaatggaagattatgaaaattttccaggaaccaatttctgtaaaaaaggagacgcaatttggggtcataaatgcgcactcccatcatcggaatgtttcttttatagaacttacgcagaaccaacatcaaacacaatttgggaattaattagatgtaccggatgggattatgaattaaaaatgaggttaacattaacaatcggaaacgatacaaaatctaaaatttga

SEQ ID NO: 72118 - DNA, 898 bp, Heterodera glycines
atggagatgcaacattttcttctcaatgcattggtctatgagcatgattcaacagtccggcagcaatcagctcaaatggcatttaagattgccacggattgcgttgattttaaatcaaagctgatcactttattcaacgaaatggcaccaaaagtgaaatatggaattgtgcatttgtaccgtttatttttatgtttaaaaattgatcagcgtgaattggatttacaatttattggaaatggtaatttttttttgaatatttaaatggcaattttttcgtttttgaatgtttctgtttgcaattctactaaataggtcattcttctataacattatttggggattgccgtttaatacttaattactgaagcaattatttttaataattattttagatgatggactgaaaattttgtttacccgcaccaaacttgaacaaggggaattgtcaatattatacaaaagtgaacttgttgattttctctcctactgtgttgaagttaatgagaaattgcttcaatttggtggcagtgattgcgaggcacaatgtgtgacagtttcgggtgcttgcttatattttaaaaatcaaattttcattattttttaaaataaaatttttgatttttgtaaacttttactacatatcaattataaattttactttttcagaattgcatttgctttttgagaacttttcttcttccactgaagatggtgaaaatgatgacgaatttctgttctggagcgacacacaaaagaagcaattgtccatttattcaaacggaattattgtaaacacttggcatttctaaaatttattagttgtataaacttgctcccggggtcattggtcacgaatctgaccccatttcgaccagtttcgaatcctaaatccgaa

SEQ ID NO: 72119 - DNA, 895 bp, Heterodera glycines
atgtggccgaacattgacccgacggaatggcaaacgatgctttggcatttcgaccaaaatttggcgaacgcagcgatggatgcggaggaaggccaaaaagaggcgaatgaggggggaattgaggacggaaaaggggagggggaggaggaggaggagcaaaatgaggaccaagaaatcaaattgctgagagaattgggggagaaagagggccaaggccgggcacaatttggggaccgggaaagacacgccgaactcggcaagaagttcagtctgttgaagaagtcgactaccaacgacggagcagcccatgggatggtcaacttttgtgttatctatcgaccatttctcgtgttcggctcacaatcagtggacattcttttgttcatcagggtaattaattaattattaattgagcaattaatttttgattgttggcactttttcactctccagggccttttggaaggtcatttcaatgcaaaaacaatggacgactatttggagaatggcaagtagagaccggcgcaggacaggatcctgcgcaggattttgcaggatcccagtccgcaatcctgcatattttgggaaaatacaggatttgcaggattaatcctgccggatcctgtcctgtaaaaaattttgaattctaatcctgcaacaggacccgcaaattagatttttatgcaggattcagcaggatcctgcattgattttttgaaaatttttggtagccgcagaaaaaaatagtaatctacaaaaatggggaccgcgaccgggggaaggccaattccaattaaaaaattcacaacttttggcttggtgaccacataatttttgaaaattttatctattttattaacatattttgcgccaaacaaaaaacatatgcaataaa

SEQ ID NO: 72120 - DNA, 373 bp, Heterodera glycines
atggttaattcatattatttttatgctcgcctttcttaattttaaaataaatgaaattatttaattatttataatataaattaattctttatttaaatttctgattatttctttcatttttttgcgctttgtttttttaggaaattgtcgagggccatcgttggcttgaagaacagcgggaaatgatcacagccgaacgcaaagcatttcaagtgaaaaaagaaaacaattagaaaattaaattttatttatttttaggaagaacaatcgctgattttggattggattgagcacaaaaagacggaaattgaggcgaacaaagtgaaaaataaataaacatttttattaaattttgaaaacaaaaaaatattta

SEQ ID NO: 72121 - DNA, 347 bp, Heterodera glycines
atgaaacgcaccaaattttatttacatgttagtttaggcactctgatgctttttctatcaataatggaggtgaatacaattttaattgctttttaactttgggaaaaagtttaggcttaactttttagtgaaagtttgatcactcatatttttttagtctaatctactcaaaacggttcagaattcaataaaaataacattcacggtgcgaaaaatggggtttgacaagtttattggggaaaaaaagactttacaaaataatacccctgggagaagggagtgggaaacatgatttcaaaattttcaattttttctagtctaatatactcaaaccggttcagaattca

SEQ ID NO: 72122 - DNA, 410 bp, Heterodera glycines
atggagaaggcctgcaaaatttggagagattatatcgattttagtgcgctaggttcgatgaaactttttaaaatataagcctaaactttttggcctgtttaaaaaggaattaaaaatttttaaaaattttattcatctcccttttgatagaaaaagcatcagatagccttatttaacttttaattaacatttggtgcgtttcagagcattttctgaaaaaatatttatgaattaattttgctaaaaaaataaaatagtgaagctttaaaaattaaaaaaattttaaattcagaattactggagttagcatcatagcagtgcttttccttgtctttttgatgctctcgcaaaatctggttcgcttctgatcagtttataaaaaaaaagttaagcctaaaatttttcgcata

SEQ ID NO: 72123 - DNA, 235 bp, Heterodera glycines
  unsure (1)..(235): unsure at all n locations
atggcattttgccaaaattgctttgttgcgtgtgctaaagcagcaaatgccatgcaaacgaccattgtgatgancgcattttcgcattggatttacagcggaagaccaccattaaatggggctattgaaattgttcatttttggattgaactgttcagcaaaagaacggcaacaaatgacatcagacgaatgtgccgatggcccgaaatcgataagaatcttttccggcgaatcg

SEQ ID NO: 72124 - DNA, 459 bp, Heterodera glycines
atgaatgttttttggttagtaggcgagatgtcgagtaggcgaaatgaaggtttttggcttagtaagctcaatgaatgttttcgggatagtaggcgaaatgaatgttttttgcttggtaggcgaaacgaatttttttggcttagtaggcgaaatgtcaataggcgaaatgtcggtaggcgagatgtcgagtaggcgaaatgtccgtacaccaataaaaaatcgtgaaacttttaaaaggatttctcggattcattgatcattttgaccttatggtgaacatttttgaaacattattttttgaatttgatttagtggttgttttttttcagtttgtttatttggtttttgtgttccttgcgtgaaataattatgccgatgcttaggcttaatgtttaattgttattagatctttgtttttttgtctaatttttctgatttagccaaaattgaagtgaataa

SEQ ID NO: 72125 - DNA, 2165 bp, Heterodera glycines
  unsure (1)..(2165): unsure at all n locations
atgtggagtggacaagagcacgggacaacccttacaaattgtnctctgctcaaggtgtgggtgatccctccgcggaagtgcgatgtgccagtgctgcccgtcaaagtcaacgaacggctgtgcttcccgttgtgcatgcagtgttgtcttgactacccaaaaggaggcgttgattttgactaccattgtgaacacgacgaccaacaacgcggctgggtaacaacatgcacatcaattgaattggatgctgcgcttaatgagggctaccgtgtgaccaaagtgttccgggtgctaaggtacaagcatggcgacgacaagctattccgcccatacatcgctgaattcatgtcgcaggaaattgaagcctccgggtaagagttggagcagcagttcatcacgaaactcggaatttcaattgacaaggacaacatgaaagttaacaagggaaagcggtcgttggcaaagctgtgtctcaacaacctatgggggcgcttctcacttcgaaactttggccttgcccagacgctaatcaccgacgaccactctgtgttaacggaatacttggataaccgtacagttgacgtcacttccgttgatgagctggacgacgaacaccttttgatcagctatgtacagaagaaggaatgggtggagaagcacgattgcgccaatattggtgagattttttcattaatttttgcataatttttgaaattttttcagtcatctaactctggacaacatcaaagtcacgccttctgctgttgaaagcgatgcagaaggtgatgagaacgcctggatgctgactgctgtacactgacaccgactcgttgattttcgtccatccgatcggcatgaatccactggagacaggaccacatttggggcaattcatcgatgaataccccaagcatgaaattgtggagtattgtagtggcggagcgaagcaggttaatttacccttttaataattcataatttattcatttcagtatggactcaaactccgggtaatgggcaggacgaatttgtactgaagctgaggggcatcacactgaactacgacgtgatgcagaaccagtccctctgctacgacacattcaaagaagaagtgttgcggtacgcccaaaccggagaatatgagccaatcaatgtgatgtaccccaactttttgagacccgacattaggagtggcggacacgtcacttcaggccccttccaaaaatgttacgttcaccattcattgtatctctcacacacgcataccctatacacacacacacacaccccatacccacgtaccagggctggccgtgatcacggatcacggaaatcacggggtttttggggtgccgtgatcttggatcacgggtcacggattttttcaaattttccgtgattttgatccgtgattggcattttatatagggaatttttattgagacgaaaataggaaagtggtgtgaagaattttttgagaaaaataaataaattcttttctgcttacaaattcgaaagtaaacatatatatgtagtctggtggttaagccttctgtctttcgttgtctgtcccttgggttcaattccccattgggataggacaatttatatattttgttttgataattttaattgaaatttaattaacaagaaatttcataacattgaaaattatttttctttattttttaaaacgtccatataccaataaattaaccaatgattggacatattttggacaaaatctgtcaacaaattcactcaaaatttcaaaatttttcccggcggcgcctgtcggcaccaccggcagacggacccccattttaccgtatttttgaaattttgaccccaaaatggcagaaaaattaccatttttggcatataaactgctaaaaaccctatttcttctctccgtcgcttaaatttaaaacgacaggcctaatcaaaattttcagaaaattttcccaaccctctaagaattttttctaaaattttcctgactttcagtatcttttggggtgttcagatcgtcatgaaggactgagcatgttggtccaaaagatttttttcagcatcaaaagttagcttacaaattagaggaaatttttttctctacataaatagatttttggttaaatttaagaaaaatttgaaaaattttctta

SEQ ID NO: 72126 - DNA, 89 bp, Heterodera glycines
gtcccgatcccggtcccggtttttggaaaaacagaaatcccggtcccggttttgccagtcccggtcccggcgggactaaataagcactg

SEQ ID NO: 72127 - DNA, 819 bp, Heterodera glycines
aaacaaaaaaatcgattttttcaagtgtccgtttggggtactcaaacaattatggggagcaaaaatccaacgcagaattaaagtacaggctatagggaagctattcccgaaggattcggtctccccataaatctgggcgcatcggttcggggggactgccccgaaaacaaaaaaatcgattttttcaagtgtccgtttggggtactcaaacatttatggggagcaaaaatccaacgcagaattaaagtacagactatagggaagctattcccgaaggattcggtctccccataaatctgggcgcatcggttcggggggactgccccgaaaacaaaaaaatcgattttttcaagtgtccgtttggggtactcaaacatttatggggagcaaaaatccaacgcagaattaaagtacagactatagggaagctattccggaaggattcggttccccataaatctgggcgcatcggttcagggggactgccccgacaacccaaaaaaaaattttttggataaaaattatttaaatgaactgactagataatatttaaaataggttatttctcttcctttcagtatccctgcaaagtttggtgcgcttctgatcagtttctgaaaaaaaagttaagcctaaactttttggcctgtttaaaaaggaattaaaaatttttaaaaattttattcatctccctttttgatagaaaaagcatcagagtgcctaaactaacatgtaaataaaatttggtgcgtttcagaaccctttctgaaaaaatatttaagaattaattttgcaaaaaataaataaaaacgaaagact

SEQ ID NO: 72128 - DNA, 190 bp, Heterodera glycines
cttttaattattcagtacaatgcttttaagccccgccgtgaggcgggacagttccaaaattttgtaccacattttactgtggaaagtccaagtaccttattggacaactacgtgtcaatgagcacagtcgcctttggccagttgtgcactatttcgtttcaaaattgaatcattttttttgtcttttgaa

SEQ ID NO: 72129 - DNA, 683 bp, Heterodera glycines
atggaaacagaaaatgatgccacggcatcgccaaatcggccattgtccgccgccagtgtggccacgtcgaccgcgctgcgcgatggcggcgaagcggacaacagtgacgcacaacagcaccagcaggcgacgcgcgagctggacgaagcggtcactttggcagcgggccgaggcgcccgcatcaccgacttggacaggtgaacagtttggcggtgcggcagttgccgccggtttctgattttactgtttttagggtaatttgggtttggaggctttgaccaatttttcaattgcaaaattggtttaacatggcattaaaaccgagttctaggccctagacacccttaaatcagtccaaatttttgatttgccaacttccaattcacaggcctctcaaaagcgcccacattttccaatggtttcatcaaataaaggatttctaggcccctcgaattgcccacgaattttttcattatcaatggctcgtttttatggttttgtttttatattttagatacctaacaaattttgattcaaaaaaatttgccattttttttagacaaattgaaactttaatgcgctgtgaatgcctaaccgagcaggaagtgaaagtgttgtgtgccaaagcgcgtgaaattcttctccaggaaggcaatgtgcagcgaattgatgcgccagtgacg

SEQ ID NO: 72130 - DNA, 2631 bp, Heterodera glycines; identical to SEQ ID NO: 9630

SEQ ID NO: 72131 - DNA, 1079 bp, Heterodera glycines
gcagtgcagcgtcaaccgattgttgcgctggtcactcattttgttggcctatgacttcaaaattgaatacgttaaaacgacggattttggacaggcagacgcactctcccgactcattgcaaaaggcggagaagaggaaaacgaacgcgtcattgctttggtcaccgccgaaccaattttggaagaaagtctccattcagcttcgaaaaatttgccgatcaaattcgaggatttggtcatcgccagcaaaaatgacgcaaatattcaaaatgtcatcaaattcatccgccaaggctggccaaccgaaaagcaaattgagaaggaatcggaaatcattaaacttttccatcggcgcaaaagtgatctgaccattttgaaaggctgcctcatgtatggcgaaagagtggtcattccgaggatttttcaggccaaaattctccgattatttcacaaaggccaccccggaatgaagagaatgaagcagctcgcccgccaatacatattctggccgaaattggacaaagaaattgaggattatgtccaaaactgtgagccgtgccaattggctgcaaaggcaccgatcaaaaccgatctccattcatggccaaaaccaactggcccgtggcaacgaattcacatcgactttgctgggccattcttcggcaaaacatttttaattgtcgttgattcattttccaaataccctgaggtatttgagatggcaaattcatcagcaacttccacaatcgaaaaattgcgctatttattcacacgccatggaattccagaaacaattgtttctgacaatggcacgcaattttcaagctcagaattcgccaaatttgttgcagccaacggcatcacacatttattttcggctccatataatccaatgtcaaatggacaagtggagagatttgtcgacacatttaagagagcattcagaaaattaaaaggggaggggaagccaaacaaggagatcatcgacatttttctgatcagctatcggacgaccccaaacgacacacttcccaatttgaagggtcccgctgaactgctgctcggtcgaaggccaagga

SEQ ID NO: 72132 - DNA, 1019 bp, Heterodera glycines; identical to SEQ ID NO: 44683
  unsure (1)..(1019): unsure at all n locations

SEQ ID NO: 72133 - DNA, 455 bp, Heterodera glycines
atgcgcaaattccgctcgccccattctctgctcgtcggcatcgccgtcggcgtttttcttggactttgcatcagcttattagacaataaaagcaaaatttacatcgcttttactgaagaagacacacaaaaaggtaaaagcaatgaattatttattttaaagaaataaatgtatgtatttagtgacaatttattcgaatttgccctcccatttaatgcgaatgggcaataaaaatgcgcaaacattgcattcactgaacatttggctacgttgcattgttttgttggcatcagatgaacaaaattggccagaaaagaatttgatggccattagagacacgtgggcgaagaaatgcaacgaaagtgggcaaaaaatgaaaaaataaatcattaccccaatcatttacagtgaaaaggatgctgtccagacctaccaactactgcgcgacacgatag

SEQ ID NO: 72134 - DNA, 304 bp, Heterodera glycines
aaaattccctcaaaaataaaaggtctattgcgcaccgccctccctatcatgctcgagagcatttgtatgtgtataaaatttatcaaaaaaagagatatccatttttctgggataacctctaaatataaaaatcctctgtgaaataatatggcgattgtgcacagccctccgtctcatacgcaagcgcttttgtgaggtataaaatttctcaaaaaaagagatagccatttttctgggatagagtataaatttaaaaattccctcaaaaataaaaggtctattgcgcaccgccctccctatcatg

SEQ ID NO: 72135 - DNA, 56 bp, Heterodera glycines; identical to SEQ ID NO: 52733

SEQ ID NO: 72136 - DNA, 327 bp, Heterodera glycines
atgtgtgcaaatataagttatctctgggaccaggaacgcataattgttgaaatagaaaaattggtggcgttacatggaacaaatcaccgggaaagtcgcgaagtggatttcgattgaaattgtaataattaataaaaatcacaaattaattttcgttttatttgttaaatttgaattgttcaggaaaatgtgtggccatttgaaatggagagacaggcaaaggctgcacttggaattgtggaaatcacggacccttacgcatacaacaaaacagcgaacacaatcaacagcgcagtttctgaacgcggacctgaaaagtatttataa

SEQ ID NO: 72137 - DNA, 244 bp, Heterodera glycines
cgctgacccacaaaatgtccagcacacgaaatgtccaaacgaatttgagttttttgttattcagatgggcctaaggttagacaagggttaatataaagggtatattcgtattcagcgaccccgaaaaccctaaaaatcctaaattagactcattttgtttttataaattttgaaaaattttggacatttcgtgggtttttactcttttggacatttcgtggcttggacactttgtgggggtgcc

SEQ ID NO: 72138 - DNA, 786 bp, Heterodera glycines
atggccaatgatcttcttaatgccaatcaagcgtttgatcagttgcgaagtcaattggcgacggcaccggcaaatgatttgaacccaaaaattaatcatgcaaaaaatggtcttaatgatgatgaagaagatgaacgcttcagtctcattgaagaccaagaatttccaccacgggatggttttgatttggaccaattaagcgctgttgatcggggtttaatcaacattgcctctaaactattcaaatttctgccaagaattgctggcaaaattgggcagcttttttccaaaaatgttcattacatcgtcaactcggcgtccaatcttgtgattttcaaattgaatgaggaacaacaaaaaaagtacaatttgccggaacgattagaagtgccattgacaccgggcaagttttttattgcattattggcgaaatgttcaaaaataaatcaaaaaaagaaaattgaaaaaatagaaaaatatttttcaatgtttcaaaaaaaaaggaaatttgattctcttaagaattttgtgtttttaattattcaaaattatgacctaatttgaataaatcattcattttattagaaatgcaacaacaaattgaaaatggtcaaccattacaacctccgttagaagcgcaacaacaaggacaacaacaagtgcagcaacgttccttgcttccatctactgcggattatgaggaacatgatgatgatctgatgcgaaacaatgctgaacgttttttgtttctttttcagcaccgctgtggcaaaaattgcagaatga

SEQ ID NO: 72139 - DNA, 927 bp, Heterodera glycines
atgatcaaaacattctcaaaagtgttcagagttataaaaagaatgaaactgatcagcaaaagagagaaagaaaaagtgataaaaattgaactaaatgaacgaaatgagaactcacaatcagcagttgatcaaatgggtgaagaaatggaaaatgacccaaatgatcaacaaaaaacagaaatcattcaaaaatttgatgcaattaaagaaaagttgagggaaaagggaaaatttgaatggaaaaatcaaagcaaaattgagagaaaaattgcaaaattattaggaacaaatcggcaattaatacaaaaatggaaaaatgaattaaatctaaataaaaacaaaataaaaaaggaattttatgagatgaaaaagagtgaattcattgaacgatttgatgaatttaaagaattatatggccaaggcaaacagaaagaatttgcgaaggaattgggcatttgtgaaaggacatttcgaatatggaaaaaagaattggcacaaaaataccataaaagtcaaagtaagaattattttagtgaaattaaattgtactttttctttaagaacatcataccaataatgataaattgaaaaagatgaagcattatttgcaaataaaagaagcaaatccaaaaattagtgacgaattaattgccaacaaattggggattggatggacaactctgaaaagatggaaaaaggaatgctctcatccatttgatcaatgatttttagttggtcatgattgttgatgacttttatagtttgaaaatttacaaaaatatttagtcgaaactctaaaaagtcattttttattcttttaaaatgcaactaaattttttcctaattttacataaaaagatttttttcgaaagttggttcttatgagcaacagattgtgaaaccaaattaaacaaaactatttataaa

SEQ ID NO: 72140 - DNA, 1177 bp, Heterodera glycines
atgacaacatggacacgcgagagactagaggaagaacgccgactccactctgtcgtggtcgtgaacctgccggaaagtgaagaaactgtgccctctgctcgtgtcaactccgattttgtgaatgctcaatcaatgctcgacacttgtgagatcgaatgccggccatgtcaggtttaccgaatgggaaagaagtccgaccgcccccgtctcatgaaaatcgaattccccaccaaaaaacacgcccaaaattttctgcggaacaagacaaaactcaaaaatcacaataaatttaacaatgtcttggtccgcccatctctatccaaacagcaactcgctgaacgttcccgacttattggcatttgcaaaaatgaccatatgagtaatcccaattcgaattctctcatttgtgccggccatgttatgtttgcctctgacattccccgttacaaatccaaccccgactcttaaatgtatttgtcatgtgcataatgttgatgactcttaatgtgtaattggtgaccactgtaacacgaaatctcttaaaacgcaagctcttttacaaactaatagaaaatatgaaccccccataaaaaatccaattaccttaaacaaaaaacaaaatcttttatactcaacattgatcaatacgcaatccctaaataataagctagaagaattttctgctatcatagctctaaaagattttgaattggtttttgtaactgaaacttgggcaaaagaaaaaatacctttccaaccatatatcactaacaattacaaaatatatgaagctagcagaagcggtaaaaatggtggtggagtaatgatcttgataaaaactaacctaaattctttttctgttttatcctgttctaaattcaattgcgaaatccaaattatccagataaatggagcaaaaagattaagaatagctctactttacagaccaccaaacacttctgctagtctcactaaaaagattctgaacctcattggtaattatttagaagaaaattttatcattatgggagattttaacctaaatgcaaaagatataacctggaccagtggaacaccttttgctaaatcggaaaagggaaacattttttgtgaattttttaatgtatggcttattccttatgacgaacggaccaactcgaggcagtgcttggcttga

SEQ ID NO: 72141 - DNA, 438 bp, Heterodera glycines
aaaatggtgtaagtaaaaatcgtaattacgctcaaaaagctcctcaaacaattttagcgcttccaattccttctacaatcgcctttatacatcccattatgagcgctaaaattatcagagtgccgaaaatcgcatgtcatctaagcctagcaaaaaatggtgtaagtaaaaatcgtaattacgctcaaaaagctcctcaaacaattttagcgcttccaattccttctacaatcgcctttatacatcccattatgagcgctaaaattatcagagtgccgaaaatcgcatgtgatctaagcctagaaaaaatggtctaagtaaaaatcgtaattacgctcaaaaagcttctcaaacaattttagcgcttccaattccttctacaatcgcctttatacatcccattatgagcgctaaaattatcagagtgccgaaaatcgc

SEQ ID NO: 72142 - DNA, 504 bp, Heterodera glycines
atgcgcacccgtccgatctggcaagttaagcaacgattgctgactagccaaaaggttcggtgccgtgatgaaacgaaccagcactgcttaccccgcggcacccggcacggtcccccgaaggaatggatttaattaaattctctccttcggggatttttttccattaggtcttaaattttaaaattttttaattgctttttaaatatgccaaaaaatgtaggcttaatttttttagtgaaattcgatcactcatattttttgctaatgagcagaagcgtaccaaactttgcagggatactccccggtaaaggactaacttacactgaaatgagcgccgagctagctggctcaaaaaaatttttcgaaaatctgagtctttcgtttttatttatttgcaaaattaattcataaatattttttcagaaagggttctgaaacgcaccaaattttatttacatgttagtttaggcactctgatgctttttctatcaataatggaggtga

SEQ ID NO: 72143 - DNA, 506 bp, Heterodera glycines
atgaaaaacttccaaagtgttgacctttctctgtttgcgcgtccaaataaggcaaaggcacgcgagccttcgctttgcgctcctcctcactcaaattcaagccgaggtcaaacggaagtgtggacaaaactgttggacggtccctcagttggatattgttcatactctgatgagcaatatgaggggggtggcattgctgtgtttgaggttgttggagctatagtccaacgttaatctgcggccgaaagtcagcagtcagtcaaacagcgggttatgagcatttccggcaagaaaagttgacagatgctattttggacaaggtaaaggtgacaaaagcggattcatttcgtttttggctcaaaaaatggttagggtcagcttcgttttgaaaagggaaaatggacgccagtccggttttgggtatttatacttaaaagaagtcttttgaattttatcaaaaacaaaagggggaaccatggtgttgtgcaaaatttttttgtaataaa

SEQ ID NO: 72144 - DNA, 263 bp, Heterodera glycines
accgggattcccgactcttgattcctggaaatactccccctgtggttataaaaatattgtatattttcaatacagcaaatgcgacgcaaaggaatgattcggaagcgaatgatcggcgacgaagaaacggaggaggcgcaagggacgacgagtggcacaaacgcagcaacagaaggcattcggagcaaaaagagggcaaccaaaggcacactgttgtgattgatgatgatggacggatgaaccaattatttgcacaattttaa

SEQ ID NO: 72145 - DNA, 548 bp, Heterodera glycines
cagcatttcaatcactgggactcaattctgcatttcaatcactggcactcaacccaccagcatttcaatcactgggactcaacccaccagcattccaatcactgggactcaacccaccagcatttcaatcactggcactcaacccaccagcatttcaatcactgggactcaattctgcatttcaatcactggcactcaacccaccagcatttcaatcactggcactcaacccaccagcatttcaatcactgggactcgattctgcatttcaatcactggcactcaacccaccagcatttcaatcactgggactcaacccaccagcattccaatcactgggactcaattctcctgcatttcaatcactggtactcaattctcctgtatttcaatcactgggactcaacccaccaacattccaatcaacgggactcaaccctctagcatttcaatcactgggactcaatccaccagaatttcaatcactgggactcaacccaccagcatttcaatcactgggactcaacccaccaacatttcaatcactg

SEQ ID NO: 72146 - DNA, 651 bp, Heterodera glycines
atgccatcatcccccaaacattcttctttgccttcatcacccaaacatcattcttctgaggatgaaacggaagtgaagcaatcaccacctcatcatcattcatcttccgactcggaaaaagaagaacgtttgtggggcctggggaataattattaaataaattgttgaattttttatggcgtcccttttttaatttaacataaaatggaaaaaacgccattttgagcatttaaaagtgtttaattaaaaattaattttaattattgtttcaaaattccagaaaaacttcatgcctgattcataggcaccagaaccagttggatttgaacagatgaatttgagaagtatcatctgctgacgacaaatagggaaacttttttcaaatattaccattttacgaatttccacctttttaacacacactttctatcttttatatcatagattaatgatatggaaatttttattctatcctttaaaaattgtgtcgtcttgaattgttatgattaataactattttaaagaaaagatttgcacttaacccaagtacagcaaaaggtgggactaaaatttttcaatatttttgaagattttttgtttgtaattatttgaggccgcgtgggaatcaaacgattccaagaaattaataaa

SEQ ID NO: 72147 - DNA, 464 bp, Heterodera glycines
atgtttttatgtaattttttttaaatgattcattaggtttttgcttttccttttatgttgataaattgtaggttttttgcctatttattacgccctttttttttatctattttgtctaatgagcgaataatcgtaagaagaccctaattatattgaaaatttaattatttcgtcataaaaatatttaaagtatttttataaagattaaaaataaatcagaattaataaataacaaaaaaaaatcctaactctacttatttaaatatttaaattgataaaaaaaaactttctataaaaaaacctcgcaacaaactttcttcattatcagcgtcatcggaagaagatgaagaagaatgtttgggtgatgatggtttcactgctggtgatgatgaggagggatgttgcggtgattgtgctcgtccatggacttcaaatttttttattaaatataaaaagtagaaaaa

SEQ ID NO: 72148 - DNA, 1871 bp, Heterodera glycines
atgcgcacttttctgttcatagctgtagtcgggttggtgttggctgtcatcatggagagtggtaatcaaatatttaaaaaaaaagattttaatttgtcataaatttatttatattattttagtaaatgcgactgggaataattcgccgacaaagggtgatgacgataaattattatttactataattaatgtaaatttaataagcaaatcctagaggaacatttttgaaaatctaaattcttaggtgttagtgggagagtggtaattttttatttaaaataaaatttatttttcgttattttataaatgcaggtagtccgaaaaagccgacaaaacaaacgggctcagggaaattattattagaaatgcaatttttgaaaatcgttgggtcagaaaaatgggattttttttgaaaatgttcatataaatccaacaatcttggtatcatttgaaagctcttaacatgctctaaagtgatgttctttggttctttgatgcggaagagcaaaagatcaacccacggtgggactcgaacccacgaccccagctttccgtgctgtgctctaaccaactgagctacgcaggcatccgctccattgctctcttctctctcctatcttaggaggagaatcactctcttaatctccttcactgccgtcttggcacaaggggagagagtgaccgcatttatcacactattatccttacaaaaaacaaaaaattttattttcttgcaatttcttagaaaaagtttctaaaaagttatagtggaaaaacatgctggcgcacaaccgtacgcgcccaactgagctagaccgccccggggccatggcagtgatggctcagcaaaactgaatttagcggtgccccaaatgcctactataatcctgaccaattaaaataaatttttaaggatgttaaatgaattttcaaaaaaaaaaaaaattggttatacggaagcttatttttcacgattttaggacaaactccgcctggcagtccgaaaggtgggcacggcagcaacaaatcgccaacgacgccgcacagtgccggttcgccacacggcacgcagcatggtaaccaacagaaccatgctaccggtaacacatttattcagcaatcacaaaatttttatctaaaattaacatgaaaattagaaaattttataaatatatttaattattttatataacatatatatttatcagaatggcataacattttactcaaataaaagtgaaatttctgtttttttttgtttcgctccaaatgtgtccaggaccaaaatggcggtgcataaatggcaccgaatcattaaaataaaatgtttaacggtgttaattgaattttcaaaaaacaataaaaattggttgttagttagtaagcatatttttcacgattttaggacaaacgccgcctggcagtccgaaaggtgggcacggcaacaacaaatcgccaacgacgccgcacagtgccggttcgccacacggcacgcagcatggtaaccaacagaaaaatgctaccggtaacacatttattcagcaatcacaaaatttttatctaaaattaacatgaaaattagaaaattttataaatatatttaattattttatataacatatatatttattagagtgccacgggaccgggaatttttgccaaaaccgggaccgggacttgccggaacctgagaagccgggaccgggacctcgattttttttcgggaccgggaccgggaccgcaagaaaaaccgggaaccgggaccaaccgggaaattttaaaaattcaaaaaaattttaaaaattaaaaaaaaaattcaaattttaatttatatcaagtgaaaataatacaaaattatttggttttttata

SEQ ID NO: 72149 - DNA, 59 bp, Heterodera glycines
aaaaaaccaaataattttgtattattttcacttgatataaattaaaatttgaatttttt

SEQ ID NO: 72150 - DNA, 162 bp, Heterodera glycines
acgcttgtactcgtagagaaacatttgtgagatgtaccaacgttcgctggcaagtatgtaattcgatagacagcaattgtacctttcgacacttttacaacttctatgaagttccccaacgtcgtacaaatttgcattgaaaaaaaggaggaaaaaagaaaa

SEQ ID NO: 72151 - DNA, 780 bp, Heterodera glycines
atgcacacgttttgcgctcgagctatttatcatcgggcttgtcaatccaaagcgaaacaacaaagatgctgttttgaacgaataaagggcataggttattttgaagaagtgtcaaagaacatgcagcaataagcctgcaaaatctaataagtggaaaatacatgagtatagaatttattttcagaaagtgtccacagacttttggaaaaatatatttgcaatttatcaacaattttgagaagtgagttagaaatgataaacttcacgattcaaaccaattttcgttgctctaattaaccgggataaaaacattcgaatcaattaaatagcttctgagataataaggtttatcataaaatttcaattaaaaataaaccctcaattattggtatgaacgatactttccaaacatgcacgcgttttgcgctcgagctatttatcatcgggcttgtcaatccaaagcgaaacaacaaagatgctgttttgaacgaataaagggcataggttattttgaagaagtgtcaaagaacatgcagcaataagcctgcaaaatctaataagtggaaaatacatgagtatagaatttattttcagaaagtgtccacagacttttggaaaaatatatttgcaatttatcaacaattttgagaagtgagttagaaatgataaacttcacgattcaaaccaattttcgttgctctaattaaccgggataaaaacattcgaatcaattaaatagcttctgagataataaggtttatcataaaatttcaattaaaa

SEQ ID NO: 72152 - DNA, 1008 bp, Heterodera glycines
atgagaaataaaaacgatggaagcgctcctttcagaaatacacaaaataggtattcaattgagtttgcgttcgctaaaagactatgtcggcagaataaaaaaggtctcaacttatactaatttcctgataagtacgtctttacataattttcaaggtttttcagcttgatgagactagtcaccgttcagtatcagaccaatcggagcaaactatgccaaatacccaaaagttgtccatttttttttcttaaattattttaaaattaagtccgttaattcaaccccgctatgtaaagtgcttttcaaaaaaagataatgaaattgtttatctaatcggagaggaaaatgtgtggcgcaaatttatgtcgacaaatttcgtggaaccaatatataccttgtatgtactggttgcaaagaaatccaacgtttaaaaaaatcaaggttaataacatttttaggttataattttttcaatcattcagaacccctataatagcacgtgctattatacgagacgacaaacttttttttacaaaagctgaacaccataatgattgcatggctcatagtttagaatttctagaatctgaacaaatagagttatctcagcgacggaaaatattagaatgcacagaaatatggcaaaatgttgatccaaaatccctatgggccgaggttagatcaaatattaaagtccaaaaaaatacctaaaatcagggtcgcggaattgcgatgaagaaggacgttgagctaggaaaagacatagaaaatgatacatcttactcgctgaattacccaacttggcaaaatatacgtcgcacttacttgcgtagaaaagacagagcaattgcgcatggtcagacagtaaaagaggatccatttgacatcccagaaaaattacaattaactcggtttggaagtctaaaactcatgcttggaaaaagcattgcttctaacgatttgtacgattactttaaccagggcttcccatgtaaaattataccttag

SEQ ID NO: 72153 - DNA, 576 bp, Heterodera glycines
gtacaggctatagggaagctattcccgaaggattcggtctccccataaatctgggcgcatcggttcggggggactgccccgaaaacaaaaataaatcgattttttcaagtgtccgtttggggtactcaaacaattatggggagcaaaaatccaacgcagaattaaagtacaggctatagtgaagctattccggaaggattcggtctccccataaatctgggcgcatcggttcagggggactgccccgaaaacccaaaaaaaaattttttggataaaaattatttaaatgaactgactagataatatttaaaataggttatttctcttcctttcagtatccctgcaaagtttggtgcgcttctgatcagtttctgaaaaaaaagttaagcctaaactttttggcctgtttaaaaaggaattaaaaatttttaaaaattttattcatctccctttttgatagaaaaagcatcagagtgcctaaactaacatgtaaataaaatttggtgcgtttcagaaccctttctgaaaaaatatttaagaattaattttgcaaaaaataaataaaaacgaaagact

SEQ ID NO: 72154 - DNA, 304 bp, Heterodera glycines; identical to SEQ ID NO: 53844

SEQ ID NO: 72155 - DNA, 979 bp, Heterodera glycines
acgaagaagacgaggaggatgacgagatggaaaacggtggcggtgcgggcagccaggcggcctcttcattgtaccaccatcgcgcgcgcgagaacagcagcacttccatggaccggttgcagcgtgagcggaccgcgtccggcggtggaagcggacggcgtggcggcgttggcagcagtgccgcggaacggtcgacacaggcggcttcagcggttgcagcggcgtcagccgctggcgacgatgacgacgaggaagaggaggcgatgggcaccaacaacgaggaggaacaggagcaacagcatgacattggggcggttgaggatgaacatgacgaggaggacgaggacgccaggcaagggggggggggaaggggcgactggggtggtagggaggaggaagagcaagcagttcatttgttttgcaaatcgttgttttcctcccgaaaatttggtatttctgaaatttttgggggaaatccggaaacttataaaaataaaaaaagatttaacttggttgaaatcatgaaatttcacattatctggaaaggggaacctagaaatttgggcgaatttttatacattaaattccaaggaaaaaatagacaaaaaaaggagtttggaaacatggcattatcacacccgtctccattgaaagaataagtaaaaatgcttaagtcttggggcggactcgaacttccactcttttttttcaaaacccaccgagccaaatagaattttgttttgaactcgcgcaattttttttttttctttatgacaatttttaattattttttcgacaattttgcagtgaacatgaaatggaggaggatgaagaggatgagccctattttgacgtccacgatgatgaggatgacgacgacgatgatgatgatgatgaggacgatgacgacgatgacgcgtcatcggtaaaaattttccaaccctcggaaaaaaattttcatatttatgtttttttctaa

SEQ ID NO: 72156 - DNA, 1109 bp, Heterodera glycines
atggtttccccgtgggcgggcactgaacgtgacgaaatcggcggtgcacaaccatccgcaacaggaacaggcggtgcacttggcagcaccagcacatcgaccacaacgaacgcaattgatgctcaacaacaatttccgggcggaggagtgagtttttattgggaatgttttttagattggcatttttgaaataaaaatttaaaaaaaaacaaagaaaaaattcgccatcagtcgggcagattcggacctaatccatgacaaaaaaaattattagtttactttcaagaaaaataggcaatttttttttttgtaaattcaaattgtaagcaattttcttaacaaattgcattaaaatttacaaaaaaaaaaataataatctttttttttgcaattttttatggcaaataactggtcattttttggcgaaaacgctacaagcttctgcttttcctcgactttcctcctccaattttttttattttttggctacggcccgtgtcccgacatttgcgcctttttccaaaattgagttcaaaattatgtttttttgattcctgatcgcataaacagctttaaataagcgattgaaagtgattgttttattggtcctaatgaaccaaaaagatcgtgttttcttaattttatgctgttaggttatcagggcttgaaaaaattcaactttgagtccgatttggacataggcgcaaatgtcggggctccctacggccttgatcggttataatattgccctaaaactttgcaccaaaataaataaatctataattttccatcccaaaaaattcagcaacaccgtccgatcagtcgtcatcctggcacagggcccggcgcaggcgtcgcaggaggcaccggggcgacaaacagttcaattgcggctgcagcgattgcggccgcgactggcgcggatacagctgcggcccagcagcgacgcttccgcaagaaaggggacgcgggcggcggtggtggcggcggacgcaaaccgccgggtgccagcggttcggcagacagtgacgtggcggaacacggcgcggcccgtgccgacttctttgcctacttcatgtcgttgatgcgcagctattccgcagaaagtg

SEQ ID NO: 72157 - DNA, 290 bp, Heterodera glycines
atgactcagcggacgccggtgaagccgaagactgtcaacccgttgttccagagcaaattcaacttcttcgtcaaacagcccgaggggcaggaactgaaaatccgagtgaggacgaaatttggcaaaatccacgaaaaataatggaataaatttgcaggcggtggacgaagggacgaaacgcgacattggcgaattgtccattccgttggctgccgttatgagagagccgatgatggagatgagccagcagagcttttacctgacgcatggcgtccattccagccccaatt

SEQ ID NO: 72158 - DNA, 902 bp, Heterodera glycines
  unsure (1)..(902): unsure at all n locations
aggtggaacagcatgaggacgatgcaaacgcaacgaccgtttcaagcagnacagaagaaacagctggtactgcaaagctcttagagcaggaggacgatgcaaacgcaactactgcttcaagcagtacagacgaaacagcagtgactgcaaaggtggaactgcaggaagatgatgcaaacgcaacgacagcatcaagcagtacagaagaaacagctgttactgcaaaggtggaacagcaagaggacgatgcaaacgaaacgacgggatcaagcagtacagaagaaacagcagtgactgcaaagattgaacagcaggaggacgatgtaaatgcaacgacggcatcaagcagtacagaagaaacagcagtgactgtaaaggtggaacagcaagaggacgatgcaaacacaacgacggcatcaagcagtacagaagaaacagcagtagctgtaaaggtggaacagcaggaggacgatgcaaacacaacgacggcatcaagcagtacagaagaaacagcagtgactgtaaagttggaacagcaggaagatgatgcaaacgcaactacggcttcaagcagtacagaagaaacagcagtgacagcaaagatggaagaacaggaagatgatgcaaatgcaacgacggcttcaagcagtacagaagaaacagcagtgactgtaaagttggaacagcaggaagatgatgcaaacgcaactacggcttcaagcagtacagatgaaacagcagttactgcaaaggtggaagagcagaaagatgatgcaaatgcaacgaaggcttcaagcagtacacaagaaacagcagtgactgcaaagatggaagaacaggaagatgatgcaaatgcaacgacggcttcaagcagtacagaagaaacagcagttactgcaaag

SEQ ID NO: 72159 - DNA, 77 bp, Heterodera glycines
atgcacgggacttttattcaatcggagcaaaacgaggaatgcaaatggggacgatctcggcgaatcatgactcatca

SEQ ID NO: 72160 - DNA, 2946 bp, Heterodera glycines
atgccggtcaaaagcggaagatcagaatcctttgaccaggcggaaatcgacacaaactgcacaatcgaatgcagtggaggaaaatcgaaattccgtgtgaaaggacatttgatatatgtcccaatccagcaacaaattgaaatgggcgttcggatttccgacacgttgaaaagtccaaaaggcattggatggcctgatctgaatttcgattggattgacattatcagattcatggctggattcccgaacataatcgtcataatattggcgggaatcctcgcaggtgccgtgatcatattgataatacgttgtaatccagcattcatcgtatggagaagaatagcaagatggattatgctgattctgatgatacaaatgatggaagagagccgggaatacggggaaaacgaatttcttaaagtaccccccggtgggatgggcgtggcccatcgaacattctcgaacattaaatacgtggcggagtctgattggttagaggtgcctttaaaagggcatggaaagaccgatcctcactcattctattctattctaatattctctccgaaaatgaattccaacatctcctccgattcaaatttgctttacattctgtcgcgacacgtcaaaatgcaaccacatttgcttgcccgtgccattcgcggaattcctggaacgaggacccaaattgaagagaagctggaaagtatccaggaaagtggagcgaaattggtcaccacgcatttgaaaccggagaatgcaaacatgattctcttcggcacgaccattacggcacacggtgccgatgaattgggtgccttcaatggacgaggcccgactgtcatccaatactttcggactcggcacaaccggaatttgatgttcccggaggctccatgtctgtgtgagaaaggagggcgaaaccatgtgagctactacccattggaactgatcgaagtacgagaaacgttcgatcgcgatcccccgtttgactttggaacccgaatgccatgggatgacaatccagaaactgtcaacacgggaccccaagagggagaaaaatccccgaaacggttatccataagcagcaaggggagttccattactgtggaatatcatggcactccacagtcgggggcgggtaatccaatggaagggatctcaccggataaccactcggtgattatccaagaaattgactctaatagtccgacgggaaatccggtggaaatgcgcggagatccaccgagatcggaggaacgatcaattgtgatgaatgttccggcgaattcgaagattgaattgatcgggccgcttaaatgcaaaataattttgcttgtgttgtccgcatttattatgattcactcggtcggcgcaaaagaattgccatcggcgctgattcatttgccttcccgcggtccttcttcattgaaaatgcgagaagcgccgatgaatcagatctttctgcacggcttcggcggagatgtgcacccgggaagcgaagaagaggcggtgaatcatgggccgatgagcgctgttgatggagatgcttccttccgaatgaagggaacgaacatgagtcatccgtttttgtgcgcctatggcatgaatcagggacacaaaattgtgtcctctgccctctggcggcagctatataaggaggagggaaatgggcaaaaagtcacttacatttccttattcctgccccttatatcaacggaactcctaccgaacatggatattgaaaagttattggatgaaagcgaagaattcgttcagcagcaacagcaacaccatcaacaacagcaacaacaacaacaacagcagcagcagaaacaacaagtcgtccgtttcgtaaaaattgatgaagaaagtgacaacgaagcgcttcgaatcgacatttcggagagtgagtcggaggaggaggacgacgacgatgaggaagaagcggcggcagcactcgaagcagcggtagccagtgccgcaccatcgccggttgtccaagaggccaaaaagcctcgaattcagggacctatggaggcaccgaagaccaaacgagtggcggcagctgagggaccattcgtgaagcgagcgcgcatagaaggcccgctgaatgcgcagaaatcgcgttgcaacaaatgtggattgcttggccatttgtctggcgacgaggctcgctgcccaaagaccaatgccctggtcaaagcggagatggatcgaaagaaggcggcagcatttgccaaacgcgcggaagcaactatggaatgctcggcacctccgatcattcaactgccagtcaaaggtggtggacaggcacgtgcggccagagctggaggcgttgctgcatcaatggtcgccggtggacgcgcatcagctgagggcgcatttcgcgcatcgaaggaaagagcgcgccaagaattgatggccgcaatggaaaaacccaaggcggcagccatcagtttggcggaaaagaaggcggcagcccgaccgggtctccaagtgccaatggagacaaatgccgtgctgaatggactcagcgaaatcggggcacgaatcgaccgcgagcgagacaatcatttgagcatggctgaggaattgcaacaacgtggaaaacgcgccgtggcagcactcgacgaagtcatcgctcagggggcgcaaatcggacaaatgtacgtggagtggacgcgcaaattgggcgaagtgctgaaggccaacgaacaggaaagagccgaccgcgacgcgctggaacatcgccaggcggcagcattcatgcagtcgttgcgcctcaaaatctcggttctgcgtcgtgaactttcgtctccgcccggagtgtcgccgctggcgactgaacgcgtggaaattgggggacagcccggaggatcgctcggaggacagcccggaggaccgctcggaggaccgtttggaggaccgcccggaggaaagaaatga

SEQ ID NO: 72161 - DNA, 502 bp, Heterodera glycines
caagttttttacaaccacttattgccaatttaatttcttgcagatttaaagccatccattgcctgccggttctcggcacagcaaagcactaatacggtgtttgactcacttcaaaaaataattcattacccaaaagttttttacaaccacttattgccaatataatttcttgcagatttaaagctatccattgcctgccggtctcggcacagcaaagcactaatagggtgtttgactcacttcaaaaaataattccatacccaaaagttttttacaaccacatattgccaatctaatttcttgcagattgaaagccattcattgcctgccggttctcggcacagcaaagcactaatagggtgtttgactcacttcaaaaaataattcattacccaaaagttttttacaaccacatattgccaatctaatttcttgcagattgaaagccatccattgcctgccggttctcggcacagcaaagcactaatagggtgtttgactc

SEQ ID NO: 72162 - DNA, 2784 bp, Heterodera glycines
atgacttcatgcaaagacgctggagaagtcttaaagaagtatcgagaagggaaagcattgtttgctgaagcacaaatgaacctgagggaattaatttgcaactcaatgaaagcgatggagcaaattcccgaagaggaccggcttaataaaccagggactaaagtactgggcatcccttgggacattcaaaaggacgaattgagcattggattcccaccgacgaatgaagccgggaagatttcaaaacgcattgttttgaaaacattagcaagcatatttgacccattgggaatggtcgcaccttgccttctccaagcaaaattgttcctacaacgattgtgggacagaacccttggatgggacgaaatcttaccagctgatgaaacagcagaatggtttgctgtcatcagagaatggaagaccgaaccattcaaatttccgagacgatccgtgctgcaagatgaaatggtccaactccatgcatttgtggacgcgagcaaggacgcttatgcagcggcacttttcataaggtctcagaaaggagaagaaaccaatgtacagttactctatgcaaagagtagactcaagccccggaaagctgaagtaacaattccaagaatggaactcttggcaatgctaattggggcgaggatgctgaaatttgcggaaaatcagctgagaatcccaataaatgaaaaatttatttggggagattcaaaacccgtcttgagctggattgagtcaaaagattcccagcccagatttgtggagaatcggttgagagaaatccggaggatatcagaaaatgccagatttctgcatatcagaacgcacgaaaatccagcggatgtagcatcaagaggatgcactccagaagagctgagatcccatcatctttggtggaatggaccaacatggctccgagaaccaatgaaaagttggccgatcgacttcgaggtcaccccaaagggagccatgaaggatggacaagaaagttcagaattggacaatgtagttgcagtatcagcaacaacgagtgaagacaatccatggattgacccttgtcgatttagcagttggactaaactacgccgcactgtggtttggtttctccgtgcaataaacaagatgaggaagactcgaatattcgagatttcagagggtgttcctatgagcagtgaagattaccagtacgccgagatcttacttgtaaaaatggcacaaaaatgttggccaatgtggaaaaagcaaccacaagaacttgtaaagacatcgaggaaaaatggtcttgtccgactgtcaacacggctcgcaatgagcaatgcatcagaagatatggttaatcccattatccttcctgagaattgtccaataacccgactaattgcacagtcggtacatgagtcccttgcccattctggagttgaatccactttgacagaatttatgggaaaatattggacacccagagcgagactgaccataaagaaggtcattcgagcatgcggtcgttgtcgcaggatccaatgcccggcatataaattgccgacgatgcctcctcttcctgaggaccgcgtgaggcggacggcaccatttgaaagcattgggatcgattatcttggaccaacgaataccaaaattaatggtgagcttcagaaggcatggattgctttgttcacttgcctaagtacgagggctatttatttggaaccagtgcttgacttaagcgctgaggcattccttcaagtgttccgtcgattcactagtaggagaggaactccaaaaagaatcatcactgacaatggcacacaatttgtactggcagctaaagtagcggcagcattagaagctgggaagacacccacatgtccgctcgaagagcacctggccaacgaaggaatcaaatggcgatttaatccatcactaagaccttggagtaatggatttcttgaacgccaagtcgctggagtaaaagcggccttcaaaagagtccttgggcgtcgaattttgccctatgaccaattgagaacgtttgtcgcagaagttgaagcgacaataaatcaaagaccgatcacctacgttgatgaaggaccaaatgctgtccagccattgagaccggtcgatttcataatgccaaaggccatattgagtttggatgtccggaggaaccaacaatcgtcggacacggagttcgaaaatgaacctaaaaatctccagaagcaattgcagatgcgctgggaaggtactctagccacattggatgaattttggaccagatggaaaaaagagtacctgttaatgcttcggaacagattacaatgggagcataaaggaccaagaagttgcctggcggaccaaccaaaaatcggagaggtagtaattatcgaagaagaaaaaactccgaggaactgctggccgttgggcagaattgttgaactccaaggatcggacaatattgtgcgaagtgccaaactcaaaataccaaaggcaaatggcgagcgaatttcatggcgtgaaatttcgcgtccgataaaccgtctgtataggctcgaagtaccaaaagttgacgagtctgaagaccaagaagaagaagaagttccgaacggaaaaataggacttcaagagccaatcccaaaaaaggatgggaagcaggcggaaagagcgagaaatgtccaacaaggacagatcagaaaccacggaatgatgaccaggtccatgacgaaagcagcttccatcttgggattaatgttcatgctggtgatttggacaacatttgttttgtag

SEQ ID NO: 72163 - DNA, 1065 bp, Heterodera glycines
atggagatgtcgttgataccagggattaccttcaaatggaaggaggtgaaactgacaccagttgcggtatcacaagcaccagttcctatcttagggcataagttcctgtcagatggaacatctttctcaatggtggaccaagttaatacaaatcttctctgccaagatagagaaatagcaagcaatttttccggctgtactttgtcgaaagaagcgtgcccgaaatgttgggtcgatgaagaggcccagagagttgattgccaatgccgcgactcaatccttgagaaggaattcaacaacccggaaaaaaggctaccgttaagtctgcgcaatttgaatatccgatacaaagatggcgaaattttctcggaaacccactacacaccaatacaagtgatggtgcaattcgagggtctccgtcttggcatcgaggaagacttcaccaagtgttgggcacaaacaaaaacacttaaaggttgttataagtgtcagtcgggagcccaattgaagcttagatgttggacggaatacggttcagcattggcagatgtctactgtgttgatggaacacgtttcacggtaccatgccggtcaaaagcggaagatcagaacgtgatattatcctttgaccaggcggaaatcgacacaaactgcacaatcgaatgcagtggaggaaaatcgaaattccgtatgaaaggacatttgatatatgtcccaatccagcaacaaattgaaatgggcgttcggatttccgacacgttgaaaagcccaaaaggcattggatggcctgatctgaatttcgattggattgacattatcagattcatggctggatttccgaacataatcgtcataatattggcgggaatcctcgcagttgccgtgatcatattgataatacgttgtaatccagcattcatcgtatggagaaaaatagcaagatggattatgctgattctgatgatacaaatgatggaagagagccgggaatacggggaaaacgaatttcttaaagtaccccccgggtgggatgggcgtgggccatcgaacattctcgaacattaa

SEQ ID NO: 72164 - DNA, 655 bp, Heterodera glycines
atggcaaaaattcttggcgaaatgcaaaacgccaaaatttttgtgcgcccatcggaccccaaaattttactttcagttttattgcttttgaccaatcgaaatgagcaatttacggaagaaacgcaaatttcggtgaaagaaaattattgcagcttggcaaattttgtgaaaaatttattggaaaaggccaatgtagtggaatatttgcaaaaaaatgatgaaaatattgagcatttttttattcggtattcgactgaattgtgcacagtggaacggtgagagatttgaaaaaaataatacaaaatttaaaaaacttgctttatttttcattatctatttaatttaaaaaataaaagttaatatttaaaataaaatttcaaaaacttgagatcttccgacccgaacatttgacgaaaatatagtcggaagacaaatttaatatttggtttttacaacatggaaattcattcttttggtttttgtatattttttttttgaaaaagcgacgaaaatgagaaaaaattcattttcccttaattaatgtttgttttttagaataatgcatgaattcagcaacaatacgatagatgcgaatttttttgaacatatagaattcaatttgaaccttaccaatggtattgtgtgctgtcgttga

SEQ ID NO: 72165 - DNA, 492 bp, Heterodera glycines
atggccggcaaactgatcgtcaccgtgttgcccagctcgggcgagcgctatctgtgagctattaattaatcatccatttaaaagataaatgacagatttcatgaaaattttattgatatttttgattttttcattttactgtacatttttacagtattccaaagattgttttttgtatgattgcctgaattagctgcccttaaggttccacattttcctaaattttccagtacttccgccctttactcggacattcgcgcagaaatggaggccatgtcgcatgttgaaacgctggaggacaatttgaagcgtcttcttaaagtggaggatgccaacagcaaacagtgatgaatttagcggaaatttttttaccggaattaaaatttaaaaaattaaaatttggctgtttgttttttttttgcctaaagctctgcccttctataaaattttgaaagaccatgtcaatgtttgttttttggcattttaaataaa

SEQ ID NO: 72166 - DNA, 2594 bp, Heterodera glycines
ctgcgacaatctgtcagctaacaaaacacttccgccgtgctcaaaacagcaaccaatcattcacttttcttcttatttttgtgtttacaaatcgataagaaatctagaaaattgatgtgatcgaagcaaagactgaaatggaaattatctgatcaattaaatcagaagaataagaaatgccctgccaagggagggaaaggttgcgaaagtcaccgaaattggcgaattgtttcaatttcaatttccatatttgacagaatttatctgctttaccatcagttcattcaatgccatttctttatttgctttatcagtccattcgaatctccgacaaaagaatggcaccgaagcaaaagagcggcgcaaagtgcgccatttggcgacgaatttggcgggaggggggagacgatttatgatttccaatgagtgagtgattcggcatttcatccttactgtccaatcagtgcccggttaaaattcagacaaaattttcttttttcatcgttattttttgttttttaattttctaagaagaacacttttgtgataagcttatcttttgagtgcattttatcaattcgaccccccgaaaaaagggaatttgggggaaagcccaaacaaaaaacaaaacgaatggaggacatttgtgataagaagaggagaaaaggaagaacaaatggaaggaccgacaaaacaaaacccatccaaagctgactttattaatggaaattgaaaatgattaaagaaataacttttgtttaatatttatatttttggtccccgttttaaaatgatttccccacgccccttacctcccaaatgtccaagtctcgaatttgagttttttattattcagatgggcctaaggttaggcaaggggtaatataaagggtatattcgtattcagcgaccccgaaaaccctaaaaatcctaaattagactcattttgtttttataaatttgaaaaattttggacatttcgtgggtttttactcttttggacatttcgtggcttggacactttgtgggggtgccggaaaatgatttaagaatctcccaacaaaaaatttaaaattataattggtatttattgggtttacgggagacttttaacatacattttcagatgcctataaatgtgtttttgaaattaatgaaaataagttttaaggggtttttaggatcgctgatcacgaatccggcatccatttttgccaatttcgaacccctgacccgaactcgaacaaaaataaaattagaaaatttgtatggatgatatcctcattggcattttgcccatgaggataaccttggtataagaagcataaaattcgaaataccaattataattataataataaaatcagtactattttttcatcaaaatttttttaaattaaattgtttttgttaaagcgtacacttttgcgtgctttcaatgccgagttggtgctcaccgatccggcacttggcgtcaaaggctctgtggagcgtgccgaacaattagctgccgccattcctaactcattcattccaatgcaggcaaagcgaaagacattttttaaataaatttaaattaaaaatttgaaaattaaaataggcgctaataatctttcaattccctaattaataatagtcagtcaaagcattaattaatttgttgatttttttcgttttccttttcatcttaattaggtttcgatactgattaaaatgtattattttcagttcgccaacgaagcaaaccccgaaatccattatcgcacaactgggcccgaaatttggcgtcaaactcatggcaaggtggaagaattctggcatttttgaaatttttgatgctttttcatttatttatctactcaaatcggctttgaataaatgtttcattttttatttaataaaaataattaaatttgttttttcaggttgacgcatgcgtttttggcataggcaccggcggaacggtgaaaaaaaaaattactaattttctttaagttaattagttaagatcactgggtcaggccgttttctgcgtgagaagaacccagcaataaaagtgaaaatttgagaatgaactaaaatttcttttaatatggcaatgaacaaaaatttttataatttaattggataaatgttgttgttttttaaagttttatgcggttgaaccggtggaaagtccggttctcagtggaggcaagccaaatcctcacaaaattcaaggtgaatttcagcggaaacaaaaaccaaaatggttcataaattataaattttattaaatcaaaataattttttttttaagtattttaataataatatcttttttatttaattttaaggaatcggtgctggcattgtgccgcccattttggacacaaaaatgtacgaggaagtcgttttggtgcactcggacgaggccattgctatggccaaacgattggcacgcgaagagggccttttgagcggtaatacttaaaactttttgaaaattaattatttttgtaaaatacatatatataaaaatgaatttattttatttaaaacataattcagagtacgtcattaaatatgtgaccaactttagttatctgcattat

SEQ ID NO: 72167 - DNA, 218 bp, Heterodera glycines
ggcacccccacaaagtgtccaagccacgaaatgtccaaaagagtaaaaacccacgaaatgtccaaaatttttcaaatttataaaaacaaaatgagtctaatttaggatttttagggttttcggggtcgctgaatacgaatataccctttatattaccccttgcctaaccttaggcccatctgaataataaaaaactcaaattcgagacttggacattt

SEQ ID NO: 72168 - DNA, 96 bp, Heterodera glycines
ggaatagtgggaccccgtccagacaagcagcggcaccaggaaaacagaacaaaaatacgccggaagcaagaaccaatgggcaatctccgaaaaagg

SEQ ID NO: 72169 - DNA, 659 bp, Heterodera glycines
atgcgcacccgtccgatctggcaagttaagcaacgattgctgactagccaaaaggttcggtgccgtgatgaaacgaaccagcactgcttaccccgcggcacccggcacggtcccccgaaggaatggatttaattaaattctctccttcggggatttttttccattaggtcgtccgttagcgttcgattgctctagtcaatttttcaaaatttttgttgaaatatttgtcgtgctctgaagggcgtgggagggggggggggcgaaggcccaccacgaggccgcgaagaggccgagtgagtaccttcggtgcaggaaaattattaaattttaaaaattttttaattgctttttaaatatgccaaaaaatgtaggcttaacttttttagtgaaaattcgatcactcatattttttgctaattgagcagaagcgtaccaaactttgcagggatactccccggtaaaggactaacttacactgaaatgagcgccgagctagctggctcaaaaaaattttcgaaaatctgagtctttcgtttttatttattttttgcaaaattaattcttaaatattttttcagaaagggttctgaaacgcaccaaattttatttacatgttagtttaggcactctgatgctttttctatcaaaaagggagatga

SEQ ID NO: 72170 - DNA, 231 bp, Heterodera glycines
tgaaaaaaatatttatgaaacaaaaaaatcgattttttcaagtgtccgtttggggtactcaaacatttatggggagcaaaaatccacgcagaataaagtacaggctatagggaagctattcccgaaggatcggtctccccataaatctgggcgcatcggttcggggggactgccccgaaaacaaaaaaaatcgattttttcaagtgtccgtttggggtactcaaacattta

SEQ ID NO: 72171 - DNA, 474 bp, Heterodera glycines
agccacgatgcttatgaactatcatactcgggcgataagatactcgaaggcgttgtgggaaaattggctacagggcatggcgtgagcatactggtcagcgatttccgtggaagcgatggtactggcttcacgcttaaaaaacgacctcgcctggatgccatcaatgatttagtggatagattaactgttgcggataaagggaaagatacaggaatactggccttgagtctaacgggtgatgattccgttcaaatcagaaaaattttaaacagtattatcaataattatctgcaacagaatgtcgagaggaaatccgaagaagcgggtaaaagcctggaatttcttaaggcacagctaccgcaggttcgacaaaacctcgatttagcagaaaacaaactgaaccaatttcgtcagcagaacgactctgtagatttatctctagaagccaagtctgtattggatacgatggtggcg

SEQ ID NO: 72172 - DNA, 57 bp, Heterodera glycines
tgtgcgtttgtggtactctcacaattatggggagcaaaaatccaatgcagaattaca

SEQ ID NO: 72173 - DNA, 2913 bp, Heterodera glycines
atgccattgggcgtcagcagcagcagcgactccgtggtcacttcagtctccgatgaaactgtcgccgctgcttctccgtcggcatcctttgtggacaaacttggcaaacggtggacctttttggccaaattggccgtcttcggcggcgccgccggcggcggatcctccgcatcaccgccaccaaacttcaacaccagtggtggcagcagaagcacacgaagtatgtcagcagcggccgcctcggcaccccccgcggcattggcacaaacatcgccgccgtcgtttgcaccacccagagcggcagtgccaattccgctggaacaacagttggagcagttgtgtgccgagcggcacctgtcgcgtagtcgtctttcctccagcgcaacgcgtatttggctccattgcgcgcagcagcgtcagccggacgtggcgtgcccataccgcgtagttgttcacatgccggagggcaccgtgtaccatcgcctgcagcacaaccacccagtgccttacagtaagcacactgaaagctaaaccaatagcatgagggaggggctattcgtgatttaactctcgaaacattccgacactcttgaacaaaccgcttacccaactggacggtaaatttgaatatgcacattcataggcccggaaaattttggcgtgatatgtgacctatgcatgatctactgatcagtcggctggggtcaggattagagaccagaacagggcctagggtttctcagaccctccctgatcatgtttaaaactatttaatgttggaatccggtccaggtcaaatttctcgaatcccgatcaagaaattttcaaaatttcggtccctagtcaggatggtctaatgaaactgaaacatttctgagggtccgagatttctcttctgatcatttgggatcgttgatcccctttaatttctgctcatttttgaatttccaatcactaaaagcgtcgacattcagatttatcgccagaaagagatcataaccaaaatgggcacaatgccaacgaaaacaacaacacaaacgcaaatcgatgctcatccgccgtttcaaaaagcttttcatcaccgccttcgccgatcagcagacgacggcccgagacgcgttcaatcgccaaaaaattggctaaaaatgtccggtccattggcactgccgcccgccgacggcacatgcgtcggcaggcatttgtcaaagcgcgtgccgcaatgttcgaaacgggagcacagcggcaaaatgaggagggggcaaaccgccattatggggaggaggaggaggtggacggcatcgacgaagaaataacatcattatcatccacaggtcgttttgctaatgagttcttggggaggggagataattaattaatgatcggcgcattaattaattgactgtcatcggatcgaaaaaatgatcaaattgaataactcaaatatttacgggctgatctgcccaaattattttgtttatcacttatcaactttttttgagtgatatgtcagcaattttttatggttcaatcaaatatttttgatcattttctaatctgatcacttcttcatctatcattcaaaaccaatctgattggtttttgactgattgatcgcttttcattctgcacaattttttatttgttttttttctctccagacactgatcaatccgcctatgactccgatcactccgctgcatatcgaccacgaaccaagcggaccgcctttggcaacaattttgaagttcggatcaagcgcagtgcttttgtcaaggcacgcgcctcaatttcgagcggagttcaagcggaccaacagccggagctgaagattgtgaccaagacagacgaaggggtaagttgatcgattcagctgatcagactttcagctgatcagcacagtttaaataaagccattcctatcagttttgggggtatttcaaatttacagagtccgtccgtttacaaatttgccagcaaaaattggcactttttgacggacagcatttggaacaaaaagtcgctgaccgacttttgcaaggagaacatgctccgagttgcgggcggcatcatcaccaacacttaccgtaatcgcctgctttgtgtgcgggtgagtggcgcaaaattgcttattttttaaaatagtttcttaataaattaattttttatattttaatccggcttcgttaagcacggaaaatgcaatttcgatttttataatgcctatttgtggccgtaattcagggttttcggaaaatttcttagcataaagtaaataaaaatccaaaaatatacctaccaccttagaattgccaaatttaattgtcctacgaaaatcttccaaatatgtatttaaacaatttcgtttacaattgaaatataactaaaattttatattttatgggctttgctcccaaaaaagagttaataaaaagttgcttattcaatgccttttttacaattttctgctttttatttttgccatttttatgcctaaaaatgtttaaatataatattttttataaattaaaaataataacgataaaaaatatttttaaattcactacaccgaagtttcaatttttaattttcacagagcggctgccccttccgcgcactttggctgaaccgccagggattggtgtacggtttgcgcaagcacaaccattcgatgaccccaaaaagtgcaaaaaataaaaataaaattattttaaataattaatatttattttttattttcagttcctcctgttgtaaaagaagagctcattgatggagaattcaaattggcagatttggagaaggaaatccaggcattggccaaacgtctttcattgcttttccgtattgaaaagtcagttaaaatttggcatttgaattaattaagaaatcggttaactaattatattaattaaa

SEQ ID NO: 72174 - DNA, 836 bp, Heterodera glycines
atggcacgggtgcgattcagtgatttgtgccataaaagttccgaggacgaaaaatttgaaatggaagagaatggaggaaaagagagggaagaagaggaggaggaagagaggacaatgttggaggaggacatggaagaggaagaggaaagaatggaggaggaggaggacaatgccaaggagcaaattcggccgaattcgacggcacgacaacggactccaaagggggctgtgcgcggcaaaaaagtgaattttccatttaaatcactatttaaaaaagcggtgcaaaatattttaaaatttaaaagaaacacagtatgaatatatttttttaatttaatggcattttcccggggctcacagtttgagaaatttaaaaaattgaagtaaatttttgcaaattttgtcctggatatggcattcatgccatttttcaaaataaaattttggtccggttctactttaagcatggaaaattattgctgctgctcgaaaccggcgggttcttctctaaaaaaaacaaaaaattgaaattcaaaatgcccaactagcattttaatgagatctctaaaacaaaaaaacttgaaagaaaatttcagcgaaatggccattttcggtattggcttccgttgggaaaaatcagtggcgccattgacgaggtgtgccgcgaggtgtgccaattgcattacgtgcacaagagtggcattgcaaaaaacggcaaattctacttcagatgctcaaatgtgaagtgcaattacaagtgggttttgggaagacctcaaattgagagagagagagagagttatctgatcaatttttgttgccaaaacaatcggtga

SEQ ID NO: 72175 - DNA, 304 bp, Heterodera glycines; identical to SEQ ID NO: 51570

SEQ ID NO: 72176 - DNA, 304 bp, Heterodera glycines
aaaattccctcagaaataaaaggtctattgcgcaccgccctccctatcatgctcgagagcatttgtatgtgtataaaatctatcaaaaaaagagatagccatttttctgggataacctctaaatataaaaatcctctgtgaaataaaatggcgattgtgcacagccctccgtctcatacgcaagcgcttttgtgaggtataaaatttctcaaaaaaagagatagccatttttctgggatagagtataaatttaaaaattccctcaaaaataaaaggtctattgcgcaccgccctccctatcatg

SEQ ID NO: 72177 - DNA, 414 bp, Heterodera glycines
atgtggagtgttggtgtgctggcgttcattttgctgtccggtctgtccccgtttggtggtgaaaatggcgacgaaccgttggagaatgtgaagaaatgcgcctggaacatgatcgatgtgtgaatactgttcctgggggggggggggggggtgacagagatttttcaaaaaaaaaaaatttgtaaaaaaatttagtttttttaaattttgagaggagggcggggagggggaagcggggacgtacaaaccgcgccgcagaaattaaaaaaaaaaattcaaacaaatttttcaagaaaaaacagaaattttttttataagaaaacataaagaaaaaaatttttgaaaattttcagcgattttttttttgaaatttgatgataaattaataagttttttcgaaaaatttttaataaa

SEQ ID NO: 72178 - DNA, 580 bp, Heterodera glycines
atggcattcccgcgccggcgcattttcgtcttccaacttggctacttcgagttcgaacagatcgctgatcagaagcccgacctggtggactacgggccgtggatggccgacatggacattcaggtgagccaaattgcacattttctaacagttttaaagtgggacaaatccagaaaatttttaagcgcattttactagggggtttgggcaaaacattttttaaatttttttttgaaaccccttcacaaccgaaatttttgttggaaataatatttttgatcaaatttttctatttcacattactgctacgcactcaaacagtgtttgttatcaccaaaatttcccaaaaaattttgcaaaatttttcctcacatccaccaaattaccaaatttttttttgtgtgaaatctattaaaaaatatgcccaagaatttcagaggcagtacccctctcgaaaaccaagccggaattctgggaccgtcccaactttttacgcttttcctctatcctttcgaaaaaaatatttaccaaaaattttcagacaaaaaagtcctcaatttttggattggaatttttttaa

SEQ ID NO: 72179 - DNA, 58 bp, Heterodera glycines; identical to SEQ ID NO: 51629

SEQ ID NO: 72180 - DNA, 1522 bp, Heterodera glycines
atgtcggacattcaaaaagcgattcaggcactggaacgagaatacgccgaacagaaagagctgttcgaaaaatggaagggttcgctttgcttttggcactttgctttttgggtttgcattggacgcagtctctcctcccgtcctttccccttacgtccatttgtatttgtcattcgtttctttaattagtccttggagattcacacatttcctttacttacatattctgtgctttagaagaaaatgcatccgaagctgatactgaaccatacaatgcatatgtagagcagttccgaggatgggagaaggatgtgatggacaatttgaaggaactgcgggcatccatcgcccgacagcccgtggcgccggagcccgagttgcccatggtcgacctggacactcagctgaacaagtgctgcacttcctgcatcgattttacattgtttttattttcaaatagcttgttggaccgtgtcgatactccgcaattcatcatggcttttatgagtatgagccaacaggacccaacgtttttggcaaaggcatttgaggtcattcatttgcgacaaataaatttttatttgggttctgtttggattagaccctgggacaatgtcaaggattttgttttcacaatattttattaggttgtgatggaagagtgtcgtaccaccggcttctccaatccgattttgccccaaagtgccaccattccatctcttcggcctgtccaccgtctgcccactccgctccaccaacaaccgcccggcgtcccttccgcttcgtcgtcagcgcggcatcaatcggcgagaagtcctggctctttgtacctgccgcctccgctgcagcccaaagcgtatgtgcaaggctcatccctgctggggccatctcggccaacttccaccgtttcttacacgcaaattacgccgtacgccgccatccccgaaagtgagtttatagtgagtgggtattccaatcattttccttttcttaggttgggttgtcgacgcaccgatacgaaaacagccgaagccgagttcaccggcccgggaatatcgcaccccagtgaatttaccgttcaaagacttcagtcaatcatgatgaaaggtatttttattttttcattgccttgacaaaaaatgtttgtttattgtgtctattatgtgttaattatttcaatcagaatttgcatcttttctgcttacttatccatttagtcacatttgattaatgaccatttttaaccgatcagcccaatgttcgacttccatcaattcatgggtttgggcggtggtgctgtcgccacttattcagtgcaattgcgtgccttttctgcgccatttttccagcgacacgatgaacgaagaatcaacgaactcaattacggcggaaaggtgggggatggaaccacctttttttgcggtgcgctttttccaaataccttttaatgaacggggggggggggacggtagtatttacaaccggtttttttcagtacttatgtactttacagatcatcaaa

SEQ ID NO: 72181 - DNA, 342 bp, Heterodera glycines
gagccgcggcaatgatggctattcgcattctgttggaccacgacgtgttggaggaggacatcgttttgctttctttgctgatggccgagcgcggagttcattcgttggcttacgcttttcctcgagtccaattgttgacgatttccgtggacaaacagatcaacgagcattaccgaacagtgcttggagtggacgattttggtgtggtttttcgcatttcaatttgagcctctttctatgccagatgagaattgtgttgggcctgattgtgaggtggttcagttggttgcttcggacgacgacccggacgaagacggcgatgacgactcgtcctcttcctga

SEQ ID NO: 72182 - DNA, 1124 bp, Heterodera glycines
atgtcgaacagttcttttgtgtttttgcctagtaatgtgagtgattaccctgacaatcagccgaataaattccgtgttcggcttccaaaacctttacattttaacggctcgtgggtgtgcggactgcacagtatcagttacccctactcatggtcaaccattggcacattggatgagcaatggattgacattcacttcaccgaccgcagagcgaccgatgaggacagacagcgagtgatcagagtgccggtgcctaaggcatcgcatagtcgggttgagcagttgagagaatttttgtctgtcactttgaggaatcatagcggtgcaaaactacaacctctccctcgtgaggtggaagagaatcggaatcgtacaacaacaaagcctctcggctcgccaccgcctttgaaaagacagaaaagagatacggtgtttgacgcgaatagaaaacagattgcccctcctccattgcataatgatggcgagaagaaattattgcccctccaccaccgcatcatgaaaatgatgacgatgaagaaattattgaggagtcaccacctcatcatgaagaagatgatgaagggccgattgaggagtctccgccgcattacgatgaagagcaaaatgatacagtaacagctcctgtcacaccaaaagtgccggtaccagcacctgtcacaagccctgcgaaaccaacaacagtaaaaacaccagctactccatctgtaacaacaccagcgcctcccacaactgcaaagctgccagtaaccgtcccttctccaaccacaaaaccaataacaccgacccctcctcctacaacaaccacacctacttcaaccacaaagttaacaaccggccctccacctaccacaaccacacctactccaaccacaaagtcaacaaccagccctccacctaccacaaccgtccctccagcaatcacaaagccatcaaccggccctccacctaccacaaccgtccctccaccaatcacaaagccatcaaccggccctccatcaacagaaaagccaataacaacggtgcctgcaccgccaaagacaacaacaacaagtacgccagcaatacgtgcagttcctagcccatctgttaagccgacgattccg

SEQ ID NO: 72183 - DNA, 223 bp, Heterodera glycines
  unsure (1)..(223): unsure at all n locations
tgatttgtaaaatttccaattttctctatgtccccttcggctttgttcgtttgttttggcactcggcagaaaggaggacgcaaaatgccgtgcacaaattgtatggcggaatacacacgacgcagaaaagaagtgggagaactttngtatgatccaaatgngaaaaaatgccacccnaatcagatcggntgtgcccgtcgtcgtttcggcttttgcgagcgat

SEQ ID NO: 72184 - DNA, 787 bp, Heterodera glycines
  unsure (1)..(787): unsure at all n locations
caaacggaagagttacatgaaagacnagatggaacgcaacggcaccacccagtgcccaacagtttgtgctgcagaatccgaacgcgtgccgctgcacgccgtccaaattccggcatgtactacattctgttcagtgcctcctccagcttctacgttccatatgtgatagtcatttttgtgtacgtccgcatttataaggccgcaatgaatgccaccaaatcgacatatggtggaatggttcaggtgggtaaagggggaatatttctggaaaaaaattacctgacttttaaggtcgctgaaaatgcaaacaaaaagaaggcggaaaaaacggcaaccaacggactgaacgacaaaaattcgccctgctcaagattgaaactgccaagattgttcatttctcggactgctcaattgcgcgaaaaacaccatttggaaatgtgtgccgttttcgcttgattcgccaataacatgtgcaattttaaggcaccgtttcagcatggacccgccgcgcactgtgccaataagcatcaattgtaactcatctccaagtgtctatgcgcaaatcaatgggagctgtggcaatttggatgttgccaacatcaaattgtcagccgattttgcgcgcagacgcagtgaagaccaatgtttgttggaggacaggtgaagcacttttaagccgatcgatcagtgagtgctttctaatcaattgcattttttgaaggtccgaggcgagccaaaatttgacaagtgaacggcccagcgaaatgatctacgaatcgcaggacag

SEQ ID NO: 72185 - DNA, 151 bp, Heterodera glycines
atggcgctcctgggtggatcccttcaacacttccgggaccactggaccaaggagtgtccaagtccgtcggtgaagggccaaggagagcccgagggaccggtcttccgagggaggcggaatgtgatgccagaaggaacggagaaaggagaaa

SEQ ID NO: 72186 - DNA, 304 bp, Heterodera glycines; identical to SEQ ID NO: 51570

SEQ ID NO: 72187 - DNA, 449 bp, Heterodera glycines
atgcatttgtctgctgtcctccaacgctcattttccgcccctttcattggtacgaaattagattttccaaaattcggatgattcattttttgcaaaattttattcatccatattatggtgtttcttaaattccgggtcatttaatttctattgttttttacaaaatattaaaaaaattatgctcataaaaaatacaaaaatgtgattcaggtcacctcattttccgtgacttaatttgcacttccaatgaagtgataacgaacgttcaacagcaatattgctttggtatattcatttttgggacaactgtctgtataagccgttataccgactaaaccagggttgccataaaggttcaggcgctactgataggcacagccagaaaaaaattggaatttttgtacaatttaataacagattttgcaccaataatgctataagttaataaa

SEQ ID NO: 72188 - DNA, 1459 bp, Heterodera glycines; identical to SEQ ID NO: 9646
  unsure (1)..(1459): unsure at all n locations

SEQ ID NO: 72189 - DNA, 339 bp, Heterodera glycines
atggcgcagaaaggagcaaaagcggaaaaggaagaggaaaagcaggaggacataaagcaggaggagaacactccgacggaggagggcgaggagagggagggggagcaattcgagggtcacccgatgacattggcacgcgaacttcgcattcggacgaggtccggtaatagtgaagctggtgcctccccccccctatttttatttatatttttaatattctaaaaacatggttcttagggttttcggggtcactgatcatgaatataacatccgttaaatgtagtcaaaaacaattggaacatcaaaaaatggtaattttgtacagatacgaatataaaa

SEQ ID NO: 72190 - DNA, 907 bp, Heterodera glycines
tctgtgtttgatcttgatttttttagtattgacaattcggaatggatgcgaaatggagaccttccaccaacgagattcaattgccaacaggaggccgttcgcgcacttgtccttcttaaattgagaaataaccctgaaaatgctgtcgggcttctttcgttggcggagtattaactttaaagaattttaaaaatttaatttccctttcatttagtatcaaaagaaattcgtcattattttttcaatttgttttttagtcgtattgatgtgctcaattcacttactaccgaagatcgcaagttgatggtccgtcttcacagtcttgaaattcttgtaatttttttctttttttcatttccacttctttttcctaattagggcgtttcgaaagttttcgatggaatcagaaccgcatacttggcactcaaacacaggaagaatcgcaaccatcgtcagcgtattgtcgtattcgtgggcagtccattagacccgttgcttgaagaaaaggaaacggtaaacgttttaaaaaataaaatattgtatttaagaaagtgttttaagtttataaaattcgctaaaaagctaaaaaaggaaaaagtgagtgtcgattttgtcttgtttggggaggccaccgccgagaataacaaaatcattgccgattttgtcgaccttcttaacggggctgaagagggaaattcgcatttgttggtcgtgatggttggagacaccaaactgtatgatgttttgctccgttcgcccatttttgcgggttcgggggctgcattaggcgcaggcggagaatttggcatcaacgaggaggacgacccggaattggccatggcattgcgcatttcattggaggagcagcgtctccgtcaacaacagcagcaaggcggcgaaggaacgg

SEQ ID NO: 72191 - DNA, 630 bp, Heterodera glycines
atggaagaggaagagaaaaaagaaagagcaatggaaaaggaaaaggaagagcaaatggaagaggaaaaggaagaggaaaaggaagagcaaatggaaaaggaagaggaagagaaaaaggaagaggaaagaaagagcaaatggaagaggaaaaggaagagcaaatggaagaggaaaaggaagagcaaatggaagaggaaaaggaagaggaaagaaagagcaaatggaaggggaataggggagtaaagagaggagggatggagcggatgagaaagggggtgaaatgatgggtgatgagaggtgttggttgacaaactgacgacgcgacgtttggacggcggcggaaggggaaaagggggggggggggaaacgtaaccgacgaagggatggggtgggtttgtgttgtgatacaattcaacggagcaaatgtggccgtaaaatagagaaaggaacgaatggaaaggatagtgggaaatggatgaataatcattgcctcaaagggaagcgaactgcgcgaaaatgggcaaaattgcgggggaaaggggggtataccaatcattcatcgattactgtcgagagcagtgaaagtgaaaagaatttgggcattgaaatttgaggggagggaaaaataaa

SEQ ID NO: 72192 - DNA, 1070 bp, Heterodera glycines
atggtcgagagtctcggtctcggggttctcgctctcgggttccggattttggtctcgggcctcggggttttcagtctcgggtcttggggttttcattctcaaactcgaggatgaagcttaatttcggggtcaagtctcggtttcgagagtgtcgggaaattttcggtctcgaactcactaatcagcacccaccaccacccgactaaaaagcgaccgaccgatgctcgagagtcttgagagagggtttggggtttgcgtgtgtgttgttgtgttgcccccccccgcccctcggtggggcgggaggagggggcgggaaggccaagatacctctccccccgtcggcgctctcaaattttcccatttcttcgttttcgtcccatccttccgtctcccatcattttggtcccctaacagaccatcatcatcatatatatcaccaccatcagcagagtcatcagtcatcattccatccgcgattatacgaaatttctcacttctattcgaattctgaattgtacatccatttggtttgaagccgacctcgaattcatagacccaaaaaaaaccttaaaattttacggatttcccaaaatggcttaattgttgatccatcatcctatattacctatctataaaataccaatttttcaatttatttacacttttttttcagctttcatggcctcatctttcatatatcgcggaagacacaaaggcaaaaataaattaattaaaatttttcatttattttgccaaaaattttcagggcaatattgttggctatgttttggacaaaatggaagaagaaatggaagacgacgagccccatggacacatcacttcgttggctgtcaagcgtacctttcgttgactcgtcttggcccaaaaatttatgaaccaaacggcacggtcgatggtagaagtgtaagtgtgcgaattcaagcattagtgtaattattcacctaattcaatggaagtgcagaagaattaaaattccaataagaattaaattttaaaaaaatattaaaattttactgtaaaatctaaataatttaaatagccgtttttca

SEQ ID NO: 72193 - DNA, 416 bp, Heterodera glycines
gatatgtccatcgcccgtagggttttgttggtcgctgaccttcactccatttcgacaggccgacatgaacctgcccaagtgactgctgacaatgggggggggggggtcaattggtcattcccattggtgcgctgtttcagttgcggttgaactgctttcgcacattggccacactgctcgcttgtggggtaagcattggccgttgagtcaaccaatccctgaatgttcaatttgtcggtcgattcggagaagactttgctggtccaacagagtcgtttgcccgaacacaccgaactgatgtggattttgggttcaactacgactgtggttggtctgtcgatgctcaccagtcaaatgaggaaatgttaagacgagtttgacctcgatgtcgcaaaaggagggcaaatccagagggt

SEQ ID NO: 72194 - DNA, 564 bp, Heterodera glycines
  unsure (1)..(564): unsure at all n locations
gaacacgngnntntcngcggntcagnaaacggncgccttccatacgcnaanngagccngaggccccagcccanaacggnaaaacnnaaacgaagncaaggacannacaacccccgccaagaaacccaagaaagaggnggacaaggncggangggccaccancgcacaaaacgccgcagcgcaggaanccaacanggcaaagcagggcaaaaaagcgacagaaaagcacccacggacacaaagcgaaggcaagcggcagcaaaaancgggcaaaaacgggcgncncnnngnanacncaaaaccgagaagcgccancgggacgngcnaccaccnnaagcacttccatcctgtatactcaattttcagggattttcctgcaaaatttgctcttcccaaattgccttcggccaaatgcgtcgctccgtctgtttgccctgcggtcactgcctctgttccgattgtctgctcactctctcctcgaaagacttgtccaacgacacttcttcggtcgaatgccccttttgtcgcatcaaatgcccctcaaatcgaattgtgttccctttga

SEQ ID NO: 72195 - DNA, 627 bp, Heterodera glycines
atgtttcggattgaattagaacaaaataaatattatattcggaatctacgcctcaaaaaacccatagaaagtaaccaaacaccactactacataagaatgaaaaaacaaattactttatttaataaaaatttggcaaaatggttaaataattcaaatttgtatgttttttgtcttttctctcacgaaagaattccattcttagggttctatatttaacccgaccccgagtcggggttaagggttggggttgtcgcggctgggagcgtcggtgtcggggttatccccggaaaatgttcaaaaaagtcggggcggggccggagtcgcaaccctaggctaaatataaaattttcaacacatttccatttgagtagagagtcatcgaccaaaatgtgatcgcttgtctcaaccgttttggccagcttgtcgccaaatgtccgattatatttttccatcaatacgtgcagtgatcgcatgttgcacttatgatgtgcaacttttacctcaagcactagaaaaatatgaatgtcacggatctgaatgtcaatgatgcgctcgtttagagacaaattacttctgctgccattatggacagcattggcccattcgaaatgacagaaggcagacga

SEQ ID NO: 72196 - DNA, 1406 bp, Heterodera glycines
atgatgttttctgacttgaatcaaccatccgacgaattcacgaaaagcgaggccgagttcaagctggtcgcctgcaccaaacaccgggccgatttcatcgccgtttgtttctcctgcgacgaattgttgtgcaaggactgtgtggacagcggggaacactacgcgcacaaatggtcatttctgaacagcgaagtggacattctctgccgacagacactgcaggagttgggccaacaggcggagcaaaaggtctgctgcttcccgccattttctgacatttttcaatattttccgtttccttacgcctgccgcctaaggggtttttgagtttttcaacatttttttttgtgccaatcactcaaaaaaaaagatgttcagccaattggcatttgcgcaaggcaggcgccgggccttgcccaaaccggaaaaagctctgaaattgggattggccggcccgactcggggcgtcaaaaaagtccgtttatatgggctgccaggccctcgccatttgatgacatgttcagaatgtcaaacaatttttttgttgttataaaaggctgataaaaaagaaatcagtccattttatttcgtcgcgcaacccaatttccgaattatcttaaagtttaactaattcgaattcattcaccggaaatcgaccttaaaacgttttgtccctttcagaccccccactccaaaattttttttctttttattgtaaaattgtgaatctcagggtaaagcgacgctcgatgcacgggagtccattccggaccggaaagagttgctgcatttgtcgtccaacaaatgtcgcgagaaaattgaggaggcattcgtgtattatgtgcacgtgttgagcgaggtgaagaaccaactgttggccgaattggagaagaaccgggacgagaaggaggagtacttggacagtctgtacaagaagatcgacatgcaaacgtcgaagttgcaggacgcactcaggttcacaaacatggatggcattaggaataaaaatggaattttttgggggttcggtaggaccgataacggcattttctatggctctactgccgtttaaaatgtttactagactattcactgcaaaaacgggcagtttaaaaagcgtttttaaaggcaaaaaagggcaatctatttttattcactgattttattgctccgacataatactaaaacgctcgaattaatttctaaaaatgttcgaattttgatttttgcattttttaaattactaacagcattcattggattcatttttttagatacacaaactgtttgctggagaagggcactgtgacggagctgtgcctgaacaagaacaaagtgcgtcagcagttgaagctgttgattcattcgatgccggacgcaaacgcggaagtcgacttggactttga

SEQ ID NO: 72197 - DNA, 1239 bp, Heterodera glycines
agtcgctttggcgccgactctttcccgggcttccgaactccgactggcggtggtctgacttcgccagacgcgatggtgatgggtggccaacaattctgtgacccgacaaatccaatgtttccggacaccaacaattatttgtccggttcacaatccaaactatgggcaggggtcagtttttgggggttttatgcatttaaattaaaaaaaaaatttgggaaacacaaatttctgttccttcgactcattcattaccaattcagcagttcaattcgccctccatgttctcacaatttgactccacgcccgcccaccagcggccccgtgagctaatggagtcgcgcttcaccatgggagagttcggcgcgggcggttacggcaacagcagctgcgacctgtcggccggcatgcgctcgcgttcgtcgctgtgcaacacgccgtccatggaccaatttgtgaccgcgtcgagcatcgcttcgcaacaggtggtgttaaaaaggcgaaaccatgagttaaagtgtacaatttgaccaggacttccttgcacttggcaatggggccggtggtagtggaggtggtcgtgctcatcaacagtttggtagcggctcgcccgcaaacgatgtgcgtttttagagggggggggggtgaattttgaaaattttgcattaattttaacattttatttatttataaaccatttgctccatcttctaacatctgccacctctttaaaatcaagaattttttttatggaatattgcaagaattgtaaaaatattttgagcaaaataagcaaaacaaaagtttttccgactgcttcgatataggcacaatgcgaattttgttttttgattttcaataataaattattttgtcctacgtatacactataaaacttatttatatctaattttctttgtgccatttttggcatttttcatatggcattcattcatcactttcagatgactctctgcaaacatttcaatgccgacaaaaacaacggggcggacactttcaacacgccgcagggcatttgcttgggcttggattccgaaattgccatcgccgataccaacaaccaccgctgtattgtggtcaacttcaacgatggtttgtactgggcgtagacacaaaaacaaaaatataatcttcacattttctccatttaaaggcacttttgtgcgcagtatcggaagttccggaactgaagaagggtccgtttactacccgaaaaag

SEQ ID NO: 72198 - DNA, 669 bp, Heterodera glycines
atgccgcaacaacaacagcaactgtaccatcagcagcagcaacatcatgttttgtcgttgccatcttcagcgacagcgggtggccgagctgttcagcaacatcatcaccgacgttctgccgcttctcctgcggtggtctatcaacaaccgcaacagcagcagcagcatcagcaacactaccaccacaatcagcagcgatcaacagcagcaaatatgatgatgagcagtggtccggctaacatgaacatttcagtccgtgaattcttgagcaacaacaacgcggccagcagagggggagaccgttgatgatctgattttttttgattgaatttctctctttcttttttttttgcttgtttctcctttttgctcttcttcaggctttgatatgagacgcgcgcattgattgattattgatcatttaatcattatcatcttattatttgtgttcccactttgatcgtttgaaaatgtccgttttgttattttacctatttatttttcattaacggcaccgactgaagacacaaattttttcagtggcaattttcaactcactttattgccctttgctcacaacacacacacacattttattttacaaacatacagacggacattcatttcataaccaatggcatggcattggttagtttctgattggactca

SEQ ID NO: 72199 - DNA, 273 bp, Heterodera glycines
atggcactgattgagcagagaaacgagcggaaaaaggccatccgaacggagaaagtgttggaggaagctgaaaaagtgaggggggatttaaatttaaaaattagaaattcgtatttataaatcaattaagaattgacggaaatttttttatgttgaaaaatctcgaaatatgtaagaaaaatttacaaaaacccccaaagatgtgccaaaataagtgaataaaaatctttataatattatgattttttagacaaaaaattcttagaaaataaa

SEQ ID NO: 72200 - DNA, 72 bp, Heterodera glycines
atgtgttccaaaaatgattcatcagtgcgcatcgacttgaagcgatgtccatgcattcactcattggctcag

SEQ ID NO: 72201 - DNA, 886 bp, Heterodera glycines
  unsure (1)..(886): unsure at all n locations
atgtaccgccccagtcaaactccccgccntgacactgtcatcggcgcgggtcgccgggccaccgggtggcccgacttaaacaccaaaatggacaccctttcgggcgcactcccgttttaccgattaagtaaggaatcgatgaaagtagtggtatttcactggcgccttgcggctcccacttatgctacacctctcatgattcttcacaaagtcagactagagtcaagctcaacagggtcttctttccccgctaaatttgccaagcccgttcccttggctgtggtttcgctagatagtagatagggacagtgggaatctcgttgatccattcgtgcgcgtcggtagttagccgacgaggcatttggctaccttaagagagtcatagttactcccgccgtttacccgcgcttaatcaagtttccttggcttaacattcagagcactgggcagaaatcagacacggtcaacgtccacaaggaccatccgtctcctctgttttaattagacagtcggattccccgagttcgtgccagttctaaactggtcgttcagcgccaaccgaagtgcataccctgacgagcatacacgcagctgaagcgctccacaagcagctctcaccactagtccacgcaccatccccgaaagaacagcacacagccacgggcaaaagccgcctgtttcacgcaacagcccggctgacccgacctttagagccaattcttttcccgaagttacgaatctaatttgccgacttcccttacctacattattctatcgactagaggctgttcaccttggagacctgctgcggatatcggtacgatcaggcaggagattcaaatagcatccgtcgcattttcaagggccgtgtggagcgcacgagaca

SEQ ID NO: 72202 - DNA, 525 bp, Heterodera glycines
atggctgatttaaagaaaatgaaaagagatacagaggcagagaaaacgtgagtaaatagagcaaagttaggactataaaaaattataagaaaaaaattttattacttcaaaaatgaattattggagggccgagtctaaaaatggtctccaaaaacggcatttttcaagaccatcaaataacaaaatgttttaaaagtggttttcgaaattccgaatttaattaaactaagtaaattgaccacgctgagtccgaatatggctttagatttggtctctgggttctcaacaaacctgtacagctccaacttcatgcatggagttggagcagtacaagctcagggttaaaagataggtcagatttaaggccatattcggattctactggtctaatttgtacagaaaaccttcttttttgttatatcaggttacttttttgaccataaaaaattcgagaaaaattagcgggccaattttcaatttttgcatggtcgggaaaaaatactaaaaaagggagaagcaaataaa

SEQ ID NO: 72203 - DNA, 771 bp, Heterodera glycines
  unsure (1)..(771): unsure at all n locations
atggatataaggagagaatttgatgagaaaatttttgagaataaaaatggaagttggggatattgtaattttatttattttgtggtgagtgataattaaatttttgattaattgataagaaattatgaagaattaagtaattgatggaagtaagaaaaggattttataatnaaaatgaggataaagtgagattggaggttgatttgattgtatataatagtaaatatggtgaaataaaagagattcagtaatttgtataataatatctngnttttttgaaaatggtattggaaaanttgttaaaatattataataatggatggggacaagtaaaataaagcaacgaacaacggaaaatttctaaaaaatttttcctattttatagtttcaattttttttttcaattaccactaaacacgaaattctcttgaataaaaattccaggtcccggttttgcctataattcccgcgtctcgtacaactgtaattgcgtgaaatctatcataaatagggatcggattcttagttttttaactattttttctgcggctttaactcgacgagaaatgcacgaaaaacacattctttttcgaaaatttttcgtttttagtgccactattcatcactaggaatcactattttggagcttcgccactaaaaaaactatttcggaagttagccactaaaataattttttgccactattttggcgtttcgtcattatttttgccactattttggcattttttggaaaatttcccaaaaaatgca

SEQ ID NO: 72204 - DNA, 406 bp, Heterodera glycines
caaaatttgcctacagcgtttcaccgagccttacaccactgtttgcggccatactttttggttggtgtgaaaattggatttttgaaaaaaaagcgaaaggtttgagccgtaaatttaggcaaaaaatggtggcacccctttttcgaaaaaaatcaaaaaattttcccatgtaaaatctttttattcagctcggatattttctgacacccatttcttgaaatcggactcgaacataagccgagaaaccgggctttttctatttccaaattttcgatctacacaaggcattaaaatatgaaaaaatatctgagtatcataccaatactgcgcagtaatgggactttgttcgagtcccgtttcaaacgccgaattgggtcgaaatgaaagggctccattttttaggcaa

SEQ ID NO: 72205 - DNA, 383 bp, Heterodera glycines; identical to SEQ ID NO: 51114

SEQ ID NO: 72206 - DNA, 914 bp, Heterodera glycines
  unsure (1)..(914): unsure at all n locations
atgtgcctcacntacgctgcgaaaggagcggaagctatgaacatcgttgctaatcatttcatcttccttctgacggcacgacaccttgactacgagatagccgtacacttcaaaaacgtcaagaagatcgatgggtcaatggctgagacgattttgacccgctttgagattgttgaccagagcaacaaggcgaaggaacggccttcaatctgcgaagaatctttcgtcatcgacatcacggcgatcgagagcggaaagcagaggaagaagctggctggcaaagggaggagacccgacttcaacatcccgtacagcatctgcgatgggacaactttcgagctgacaaacaatgacaacttttgtctcttccgggcgtttgagtttctacgtgtgaaacatgagctacgggatcgacatcagcgatttactgaatacaaacgaaacagtcagtggcagctgaatgatattacgactttgtgccaaacctgtgaaattaatatgagactgccattctactcgattgaggaatacggagagagaattcaggtattttcaggaaaaaaacaccaattttaacataaaataataataatataataattaaggcttattatgaccggcttcacccggacacatttcgtctgttctgttttgggacatctggaaaaatgaagcctttgtggaaagcggacgtgaacaactaccaaaaagagctatgcgtgctctttacagaaggagaagatggcggcgccggtcactacgaccctataaaatcaattggaaaagtctttggaacgaggaactactgttttggagtaatattaaaaacaaaggaaaaaatgataataaaaattttttagtgtgaaatgccatacagccaccaaaaccagcacaattctaaatgcaaatggtag

SEQ ID NO: 72207 - DNA, 1719 bp, Heterodera glycines
atgtcgtccgatgacgaaatgcctcctgtcctcgacgggccatacacgcccgtgcgagatggcgatgagccctttgaggaggctccgccccttgtggaagtaattaaccaattgcctaatcaacgggtgaaaattatttgaaataaaataatattattaatcaatgatttagattttggaggatgttaaaggaaaaaatgaacacgggatcaaggagcgattaaacttggaagaatttaatggcgagcatttcaaatgcctagatgccgcacaagcggagagtggaagatttaaaggttgattaattttcttcgagcaattaaacaatttacatttattttttgttttcatttaagcctaccgttttcttggacgatttatgctggactacatttggaatgccgactaccccgaagctgttttgaagagcctctttttgatgtgcctgtcatacgctttgaagggagcttcggctatgaacatcacggcaaaccatctgattttcctcttaacatcacggcatcttgactacgaaatagcagtgcacttcaagaatttcaagaaaattgacgacaaaatggctgaaacagttttaacacgctttgaaattgttgatcaaagcaacaaggccaaagagcggccatcacttcttgaggaatcgtttgttattgacatcacggccatcgacagtggaggaaagagacagaagatggcggggaaaggtggacgtcgccgtgacttcaatgttccgtacgaccttctggagggtgcaacatacggattggagaacaacgatgcgtattgcttgttccgcgccttcgaattccttcgcatgaagcatgtgatgccacatccgagattttctgaatataaacgtgatgaaggacaacaacttaacaacgtgacttctttattccgagagtgcgacatccaaatggggttgcagttttattccattgaggaatatggaaaccaaattcaggtaatttaaaataaataaatttaagattaaaattacatttaaggaatactacaacgaaatgcaccctgggatgttccgtctcttctgctttgacacatttggcaagatgaaacccgtttggaagtccgccatgagtgattaccggtatgagctctgtgttctttacaaggagggagatgatggagctgttggacactatgacgcaatcaaatcaattggaaaaattttcggctcaaagaattactgtttcggggtatataaaaataaataaataattatccttttgtttaagtgcaaagttccatacttccaacaaaaccgacataattcaagctgtaaatggaagtgtcacaactgccagcgtgtgggcaatagatttcgagaaaattgcaaaaactttgatgacaatttctttgagtcatgcttgggatgccataaagtaaacttttaaaatttgtattgctacattatttttttagactttccaaagcaaggagtgctacgaccatcacaagaaaattacgccgtgcaaagtgaaaaagggaaaagagacaaaaacaatcgagaggtgcatctgcaacacctcaaaacgttgcaatgcatgtggtgtgggctacatgacatttcgcctactcgacatttcgcctactaagctaaaaacattcattttgcctactaacccaaaatcggtcatttcgcctactgtcatttcgcctactattcatttcgcctactga

SEQ ID NO: 72208 - DNA, 480 bp, Heterodera glycines
atgtcgcgcacccctgcaataggtttaggcttgcagaaaaaagtcgcgcaccccccctcaataggtttgggttttcaaaaaaagtcgcgcaataggttttggtttcagtactgaaaaagttggcgctcagttggcccgcgctcacccggcggcgctcagttggccgtgcacccctcccataggtatgggctgctaccgtacccgggggaatcttcgcccctaactactaaaaagtatttagaaatttgaaactttaattaattcttagagcattcacggtttttgatgattcaatttaaaaataaaatggaattttgttttgtgcctttttggaccaaaaatttaaaaacattaagcggattacaaggaaaaaatcgtcttgcttttttagatgttgatttaactaaaaaaaaataataacggaattgttaatttgcagtgaatttcctttcgaaaaaggcaataattttgaagaattag

SEQ ID NO: 72209 - DNA, 1099 bp, Heterodera glycines; identical to SEQ ID NO: 44783
  unsure (1)..(1099): unsure at all n locations

SEQ ID NO: 72210 - DNA, 244 bp, Heterodera glycines
acaggcattaattccattgcttcaaatgtggtacgagagattgcccatgattatcgcggccgttagtatccccgcattttgtaccagcgactattacccactgcattggtatgggacgaatggctgcaaacatcatcgagttctgaaaggacatgagcagtcggctctccttatccgtgacagagagttgaccggctacgaatacaatttgatgggcatcgactcaattccggaggaggattaa

SEQ ID NO: 72211 - DNA, 282 bp, Heterodera glycines
atgatcatcccatttaaccggttttaccaaagaacagcaggccaagcaaaaaactgtcctttaaggacacattacttctcaataaaatttactgcccgggttagttgaatacacagaacaataaaaaaaattttgcccattgtttacttttgtacgtcacagacgcctgcaaacaactacccaacaaatgccaaaacggcggatatcaaaaccccaaaagatgttcaagatgcctttgccccggatggttataggggaacatactgtccattctttctatag

SEQ ID NO: 72212 - DNA, 47 bp, Heterodera glycines
atggggcatttgcaggcggagtgcgctgagatgctcggagtagctgc

SEQ ID NO: 72213 - DNA, 49 bp, Heterodera glycines; identical to SEQ ID NO: 51181

SEQ ID NO: 72214 - DNA, 624 bp, Heterodera glycines
  unsure (1)..(624): unsure at all n locations
atgggacctgcccggtcgggcaccgcaattcacattgacccgctgggcacatccgcgtggaacgcactgattgtgggacaaaaaaggtggtgaaaatagttgaaaatttatatttttataaaatttttgggcatcatagcttatgaaaattccaccaacatttgtcaaatttaattttgccttcgttgaagtcccaaatcaagtgttgccactcgaaactcggcatttttctcgtccaaaatcccgcgccgaatttttttgtccttttcaatccaaattaaattctccaaaattttcttgcattattactgaattaaccccagtttttgcagatggtgtctcatccatccaagcacgcccaaacagttggtcaaaacgctgaaggaggagcgcaattttcattcagatgaggcgatcacatggtaaccaatttatgtcccattttttttttcaaaatattgtttcgacgctgctataaaaatctttttttgttcaggttccataccgttttccggcgtgttatctctccgcattggcccaccgaccgttacccggtcattcacgcgattcaaaagnncgggcgaaggttgaaaattcatttttttaatgcaaaaaaaaattaaa

SEQ ID NO: 72215 - DNA, 945 bp, Heterodera glycines
atgctaattacgtttgtgagaaatgatcataaaatgcaaattagtgaatattcaaagcagaaatatggggcatatcttggcattgtgtattttataagaaagaattggcaatgtgacaaaattagcgaggaacttgaagaatataaacggacagaatatcaaaaaaatcgcagatatttggacattttgtacgaatatttaagtagagaatatgctggatttccaacagtgaagccaatatttgtcattaaaaatcgaattgaaattgaagcaccaataatttatgcgatttattgtttggtccgaatttcgcaattttgttttaaatcaaaatggggtaatttttatgaatataaattaaataaattctttaataatgattatgaaccaaaaatgctgaatgaggagagattaaattatgcatttaaattggaaaatgaaccaaaaatgccaattaatgaaataattttgcaattggcaattgacacagcgaatgaatgtcaaacaaatgaacgtttagatggaataattagacaaaattttgacgaatttctgagaaaaatgtttaaaaaagcggagggaagggtaaaaaattacgatgatcggttgagagtcgcaaaaataaataatgacaaacacaaaataattgtgggttcgaaattcgatgataaatggacatgggtgagatttaacatttaattagaattagtaaattaaaaatttagaaagttaattagaattaataaattcaaaatttagaaatttaattagaattaataaattcaaaatttagaaatttaattagaattaataaattaaaaatttagaaatttaattagaattagtaaattaaaaatttagaaagttaattagaattagtaaattaaaaatttagaaatttaattagaattactaggaggaaatttagaaagttaattagaatta

SEQ ID NO: 72216 - DNA, 862 bp, Heterodera glycines
  unsure (1)..(862): unsure at all n locations
atggnaaggtgtttgaattaaatgtagaaatgtttgtttttattatngttattaatttaattaagttcatttctaaattatcagtccgacactgttcgtgccgagtttttgcatgcgcttgccctcagacatgagcaagaccgggacgatgccaacaaatacatcaaacggaatccaacaccacgaaatgttagcatgaattttatacataaaaaacactggcaattttacattaaaaatctggcataatttaatattttagcaaaaagagccggcgaaaacagaaaattacggctttccctatgattttcattcaattttgcattatgctgctgtgaaaacaagcgggtcagttattttaaaggtataaatgaaaagaaaataatttggcaatgaatcagctattacgacatgattacgctgaaccgtttttaccaacgcacaatgtttcactcaacatatgaactttcgtttaaagacgccgccattatcaacaaaatttattgcgacggtaaatcgaattaattcattataaaatagagtgaattaatttaagaaaattgcaaaaacgttgaaaacaaatgccaaaagggaggatatcccaacccaaagaattgcaaccaatgcctgtgcccggtgggatacggtggagaaaaatgcgaaatggtcgaaaatggtaaaaaaaaaattaaaatgataaaaattattaatatttcagatggaaattgccaaactgacagggcaaatggaattgaagcagattggcaaatcgaacgttgaagccaaaagtgagctgcacaaaaaggatgagtcatgtggatgccattggcaaataaggcaacatttatatgaaatataaaaa

SEQ ID NO: 72217 - DNA, 933 bp, Heterodera glycines
atgtccctacagcagcagcgccaacgactgcccatcgcaaagtgtcgcaaccatttgctatacctttgcgaacacttccaaacggtggtcgtcgtcggtgagccaatccaagcggaaaagtcgaaatgagacttcttttccgggatttctccgttgcgcacctctacttttaagaatgtctaaaacacgcaaaagttgtttggcgagcaattacaagtcatcaaagcagcaatttaagccaatggatgtattatatttcttgggaactaaccaaatggcgtttatttgtttgtccgatgccaaataacttagaattgaaaagtgaaaaccgttagcaattcggtttttattccgtagttctttaaacccacaaatcctttcaatttcaggtgaaaccggatcaggcaaaagcacgcaattgccacaagtaattgaagaaataacaaacaaacagaaacatggcctattctctgatcacttttgagtggtcgtctactgtttttttcagtatttgactgagtttggttgggccgaaaatgggcgcagaatttgcatcactcagccgcgacgggtggccgccatttcgctggcgagtcgcgtggcggacgaaatgatgtgtcggctgggagacgctgtgggctattcggtccgatttgacgagtgcatttcggcacgcactcacattaaggtgtgtttggcatgccatggcaatttttgaacgggtccgattgtttgttcccaatctgtccatgccatttcttgcctcttcttcagttcgtcaccgatggaattctgttgcgtgagctgatgagcgacccgttgctgcaggcgtactccgtggtcatcgtcgacgaggcgcacgaacggtcggtgaacacggacctgatcatcggcttcctgcgcaaaatcgtcgccattcgcgacgacctccgc

SEQ ID NO: 72218 - DNA, 1364 bp, Heterodera glycines
ttccaaccgatgtgttaacagagaaagaattgctcgccatttatcagttccatgcccttccaaattgtatttgcatttccaatggattttttccaatgcaatttccgactaatggacgaatttctgatcggaaagaaggcacacttttgctggacattgaaaatgtgtccgaatttgctcgagaggcggttgggaacagtcggcacagcgaaaaagtgtacataaatgcatttccatggaaaatcttggcacagataaaaacgaaaaatggaagcactgacaatgagaaatggttcggatttttcttttcgttcgatactacgaaaaaaggtgctaattaactgttaattaatgctaattaacagctacaattaatcaccacttagattcgcattggcgctgctgcgttcgctccgcaacatttcgaattatttcacatagaaaaaaagcggagaattccaatggcacattttgtgaccgtgtttttgacaacaaatcgacaggctggggatttgaaaatttcatttcttttgcagtgagtgccaatttaattatgttcccttaattgtccaattatgacaaattaaggaattgttggacccgaggaacggcttttacagcgaagaagattacaaagtaacattggcaattgatgtcattcttaaagatgaaaaaatggaaaaattcattttgaatcaaagcgaagcgaaagggaaacttttcatggacattgaaaaagtgtcggaatttgcacgagaaattaaagggagtgaacggaaaagcaaaattgtgcacattaaaggatttccatggaaattatggacaaaaatagaaaagaaaaatgaaagcgctgacaataaagagttgggcatttatcttttgtacgatggtccaaacgaaggtgcaaattagttgctaattaatgttaattgtgtaattaattgccattaagacaaaaattggagttgcaaatgttcgacaacttttctaattgtctctcaaaagagcgatgtgccggatttcagaagagaattaagcgaagaaagaacttttaacagcaaatcgaacaattggggatttccgaattttatttcatttacggtgagtgccaattcagttatattcccttaattgctcaattatggcaaattaaggaattaatggacccgaacaaaggcttttacgacaaaagcgaggacaaagtgacattggccattgatgtcactgtgaaagaagcaaaaacagcggaaaaatcataaatatccaatatgatctgctgatctctacatttaattatcaccctattgacctatttttttatactttttctttttttactgctttttacaaaactgatttatgga

SEQ ID NO: 72219 - DNA, 640 bp, Heterodera glycines
atgagaattttattgcaattaattgcattggccatgagaaaatttctgtccaaaatttttgccaatttgttgaaactcgtattcgacttcagttggaatttgacattaacaacagagggacgacaacgaattggcacatttatccggcactgttcgaagaaacatgcaaaatcgctcaaaaattggaggaaattccaactaaaaaccggtagacaatacaaaaaaatttatagaaattatcgaaaatattttacgttttattttaatttcgcaaattttttttttttgcaattttttaatttctccaattttttcagctccgatttccaccattgcaaagtatggctgattggcactgatcagcagttagtgaatgccaatgaaaaacgactgattaatggcaaattgctcaatttcgattgggccataaaaagagatttccttaaatttaacggcaaattgtctaacaaatccggcggcaatgacaataatgaccaattccaacagatgggactcaacttgaagtccgtttttgtaccaaatatggcacatttgttgaaaagcaattagcagaaaaatagctaattgattgattgttcaaatgtttttttttgtttaatataaaagtttcttcaataaa

SEQ ID NO: 72220 - DNA, 722 bp, Heterodera glycines
atggaaacggaaaaatcggaaaatgcaatcatttgggttgacatcatggcaattgccaacgaaatagaagacaaattaaaagtcattgagcaaattggaaaattgaactttgtaaattatgattttatggagggaaaattattggaaaatttaaaagaaaaatggcaaaaaataaaagaaaatgaaaattatgaaaaattaaaacgaaaaatgttcaaatttttaaatgaaattttaattcattccgaaatgagaggacactttattcagaattgtgaagaaaattcagaagaaaatgaaaatcaaaaattattgggcagaattcatcaaaaaaatttggcaaatgccataaaaaaggacgaatttaaacaaaaatggcacggaatggccactggagataaggaagaaaaattaattcatttattcaaaaataatatttttattatctcgaaattggaaaaacatgcaattaatgcgcaaaaaatgatggcacagattgaaattggtgcgataaattggaaatatttaaataaaataagaaataacaatttaaataaattaaattatttttagaccaaaatttattaaaccaaataatggcaaatggtttaacaaatgaattcgcctgttgtttaagcccctccttccccaaaatttcgcagcaattaattcgggacgaattcgacgaacaaaactctcaaatagtagctaactggccttaa

SEQ ID NO: 72221 - DNA, 450 bp, Heterodera glycines
atgcgatggatcgggcgaactgtgcactcctcggcggatgcattcggcggaggcgtcgccaaaaggtgggaaaaagacaaacctcgggaaagggccatttctttaattatttactcatgaaaaattcattttaagcgcctttggagaggccaaaagatcattcgcctttttgggccatgtccgagcgttggcttattccctccttggcttcccaaacacactgactgcggatgacatgaacgaactgagccaaatgatcaaacatttgaggctgagacgaaattccgatgggagcgaaggagaggacagagacgaggaagagaagtgagagagagcatgaaaatggggtgggggaaagaagggagagaaagggagggagagagagaggggggggggagagacagacagcgaaagagaaaggaatttattagcttttaataggctaccgta

SEQ ID NO: 72222 - DNA, 181 bp, Heterodera glycines
atggataggcaccgccagttggacaggtcttgcaccttctctggagccccggtcaagggaaacttgaacaagcgggccaacccaagctcacggtctatacgctacacctcgcaaccccagaggagctgcgattcagcgctggactcttcccagttcactcgccgttactacgggaatcctc

SEQ ID NO: 72223 - DNA, 1147 bp, Heterodera glycines
  unsure (1)..(1147): unsure at all n locations
taagagaatttataaaaaatggctaaatacccttggaattaagactaaaccgaaccaatcatatccagtaacatatcttgaaaaatcacgtcagtttggacccttctgtacaaggccagagcccgtggtcacggatttgttattagtatttgaaattggcaaaacttttccattctttgggcagctggacaacaatgacaaagtacagtaaaataaaaaataatttttatgataccgtatttcttgaaatatagcccccgggggcttgatcttgggggctttgtttcaggggggctgtattcagggggtatctaattctggaagggggtctctatttctaaaatttttaaaagtgagtctttatttcatggggtgtctgatttagaggggggctttgtataggaaatgccgtatttatcgatttaatttttatataatcattagggttataatttgtatgattttgcatatttttctgcacagctatgaagaaaggggctcaaaaatagcatttctgcgttaaaattttttgatttggtgaaggtttttagtgcatataaaagcatnattttgggggtttttgagaataagtgcatatttggccattttaaactttgaaaaccaaaatgttttacaattgtctaaaaaactctccttaacctatgttttggagtttttaaagtcaatctgaatttttacacaattttggtatttttttgaaggtcaaaagccattttttggcagtttttaaggcatattttattgcatatttgggcatttttcgggttttttagggcatttttgggggatttttagtgcatattttatgcgcatatttggaattttttagtgcatacaacttataaccctaataatcattcactttgaaaagattgccttgtgcattcagtgtgagtgaattattattattaaacttaatattatttaatttaatatttttggaatttcagtgcatgccattcaaatgggtgacaaaatgatgcgttattccgtgcagccatttgcccgtttaaaactgatcaatgaagaatttgtttttgctcgggcgatcatttactcacacatgggtcaaaatgaccctccattttttaaatgttttattattttaagtgtcgccaaggcttag

SEQ ID NO: 72224 - DNA, 498 bp, Heterodera glycines
atgtgccggctgcgctggtggcccaacttcctctctattcctgcattgcaattgtggtgagttgagtgattttgatcagtggcaatttgaatgacatcattaatcattcttcccctctttcttttccttagactcatcatggccacttgaactctggccattactgctcgtttgtgcgtgacggcttcactgacaattgggttttctgcaacgacgacaaaactctcgtaagaaaacaatttcgaatcaattaatgccggcttttcatccattctttttaggccactgaaagctgcaatgtggacacgcgaaatgcatacattgtgttctaccaacgcgcaaattcagtcgctgccaaatgagatgaaatgagaggataaacattgttgtatatatgtgtataattgttgttgtatatgtatgtatgtgtatattatcgtatgtgtatattcatttgtatgtatgttcattagtattaatgatgtgttgatgaataaa

SEQ ID NO: 72225 - DNA, 393 bp, Heterodera glycines
atggatgaaaagccggcattaattgattcgaaattgttttcttacgagagttttgtcgtcgttgcagaaaacccaattgtcagtgaagccgtcacgcacaaacgagcagtaatggccagagttcaagtggccatgatgagtctaaggaaaagaaagaggggaagaatgattaatgatgtcattcaaattgccactgatcaaaatcactcaactcaccacaattgcaatgcaggaatagagaggaagttgggccaccagcgcagccggcacatcgggcgaaaagtatttgctcaggctgaagttgtccaacgggaacgaaacgggcacgtgctgtttgatgtatcggcgctcaaatggttcatagatgaagcgcttgaagcaaatgatctgtga

SEQ ID NO: 72226 - DNA, 532 bp, Heterodera glycines
atgttcaacgacgcaacgacaagaaacgccgattcctccgaaaacgaagaagaaaatgatgacgaggatgaagacgatttcgacgaggacgacgatgatgaaccatccgacgaggagacgctgcgcgacattccgctcgacaaaattgacatttggtgcttcatgcggttgttcaaggacaaggacgaagatggacagggcgaccgcctgatttgtatcagcctggcccaggtggggagttcaagcagtaccaggaggacaaccctaaccccatttgacattttgccgctttttttagcgcttcactgatgaatcgcattgcattatgggagcgtcggacgctggtcaactgcccatggatgtgccgctgatctccatcaaccattgtctcgcggatttcatcaaaccggaagacattgaaggctcacgctgtgcacagtgcagcaacgcaacgccaccgccgtctgcgccaccaacgcttgtcaagcagctgatgttcacgcgattgcccgacattttggtgattaattaa

SEQ ID NO: 72227 - DNA, 1229 bp, Heterodera glycines
atgagcacaccatcaaaagcagacgacaaaaagaaggaagtgggcggaattctgaacatcggcaacacatgctgcatgggcgctgcactccaagcattggccaacgtgacggcactcagcaattttctgatgaaaaagtgggtgccaataatgccaatgtccaatgccatcaatttatgttttcacccctctttcagcgaaaaccgactgtccaacatcaaactcgtcatggaatatgtgcaaatgatcaaaagcattttggtgttgcgacaaccggcggcgccattcgaactgaaggtgtggtgaacagtgtgccgtggtgatggtggtgttgcgtttcatgactcgcagttttttcaggaagtcatctccagccttaccaaattgttcgctgattcgttccaacatgacagccaggagttcatccaattctttgtggacgcgctgcacgagttgatgaagggcattctgcgcggtgttacgcaaggcgtcagctgtgacatgtacagaaatgacggcgcgggactgcttctgctggtgctgctcaacgtgacgaccaaatttggcgcaatgcaatcgacgtaatgccaaattttgtgatttttttgtaccgtttaatttggcattttcagcattggagaaacgaagtgctcgcaccaaagaaaggcagcgtggtaagaaagaggagaacactcaattctgaaggcattaaacaatggcattttttcagattttcgacttgttcgccggacagtccgtctccgagctcagatgcccagtgtgttcatattcgtccaagacgttcgagctgttcacaatgctgtcgttgcaaatcccaattccggagaacaccgcaattacattcaacggcatgcaaaaaacaaacaaacattggcattttcaaataaattttctccccttttttcagtcatctctcgagaaggagaccccatcaaatgttcgtcccatgaaatacgccttccactcgccatgaaactgagcaaagtgaagaagatcatctgcagacgagcttacatcagcgtcagcaaggccatgttcatcacgctcaacaagaacaacaaagactacaatgtacagccatcaccaacccaattcaattttcggcacaaatttttgttgagattttgtccgtttttttgagtccattttgaaagcggaaaatttaaatgacaatttatgaaaaaagcgcggacccaaattcaattaaa

SEQ ID NO: 72228 - DNA, 415 bp, Heterodera glycines
atggttaagatgcaattggtccctgatggcacttttcgcaaagtccgtaacaacattgaccgattgtttgacaaaaatttgaccgatttaatccgtggcattcggaacaacaaggaaaatgaggtgatgattgattgactgaatgcaaaagccatttgtacatttacaatttgggcacttttgctgggcctctgaaaaaaaaaattcaagggctcaaccaattacaaatccttacaaaaaagcccccctttggaattttctctcgtgggcctccaacaacagccaaagtgccataatttatttacccaaaatgttctaggcccgttatattgcggcatgcattgacgagatcaaagtggagctacgccaggactccatttttgtgaaggcaaatgccatcgaaaagttggcatat

SEQ ID NO: 72229 - DNA, 702 bp, Heterodera glycines
atttggtgcgctttagagcactttctgtaaaaaatatttatgaaacaaaaaaatcgattttttcaagtgtccgtttggggtactcaaacatttatggggagcaaaaatccaacgcagaattaaagtacaggctatagggaagctattcccgaaggattcggtctccccataaatctgggcgcatcggttcggggggactgccccgaaaacaaaaaaatcgattttttcaagtgtccgtttggggtactcaaacaattatggggagcaaaaatccaacgcagaattaaagtacaggctatagggaagctattcccgaaggattcggtctccccataaatctgggcgcatcggttcggggggactgccccgaaaacaaaaaaatcgattttttcaagtgtccgtttggggtactcaaacaattatggggagcaaaaatccaacgcagaattaaagtacaggctatagggaagctattccggaaggattcggtctccccataaatctgggcgcatcggctcggggggactgccccgaaaacaaaaaaatcgattttttcaagtgtccgtttggggtactcaaacaattatggggagcaaaaatccaacgcagaattaaagtacaggctatagggaagctattccggaaggattcggtctccccataaatctgggcgcatcggctcggagggactgccccgaaaac

SEQ ID NO: 72230 - DNA, 673 bp, Heterodera glycines
aaaaatatttatgaaacaaaaaaatcgattttttcaagtgtccgtttggggtactcaaacatttatggggagcaaaaatccaacgcagaattaaagtacaggctatagggaagctattcccgaaggattcggtctccccataaatctgggcgcatcggttcgtggggactgccccgaaaacaaaaaaatcgattttttcaagtgtccgtttggggtactcaaacaattatggggagcaaaaatccaacgcagaattaaagtacaggctatagggaagctattccggaaggattcggtctccccataaatctgggcgcatcggttcggggggactgccccgaaaacaaaaaaatcgattttttcaagtgtccgtttggggtactcaaacaattatggggagcaaaaatccaacgcagaattaaagtacaggctatagggaagctattccggaaggattcggtctccccataaatctgggcgcatcggctcggggggactgccccgaaaacaaaaaaatcgattttttcaagtgtccgtttggggtactcaaacaattatggggagcaaaaatccaacgcagaattaaagtacaggctatagtgaagctattccggaaggattcggtctccccataaatctgggcgcatcggttcggggggactgccccgaaaac

SEQ ID NO: 72231 - DNA, 387 bp, Heterodera glycines
atgccaaaacaaaacgaaatcgttttaaaatattcctttctggacttgacttggtttcttgatatcgaagctgttttctacgctatttctaaaacggttataccaaacctcagatttttgaatccggttttcagaaaaaatgccttgtggtgaaaacaatatttcacatttcactccataactttgtgagttcggcacggatcgagaccgggataagaccattggaaagagcagctcgagctctacaagaaggtatggaaagaaaaaatagtcatttctgggactttttcagaaatcagaattaattctccaatgaggcccaaattttaggcccccagccacagccccttgcggggggggttttaagtcttggatttgtcaaataaa

SEQ ID NO: 72232 - DNA, 1077 bp, Heterodera glycines
gtagagaaaattttatcgaaaatttattttaatttaaaatctccggcaagttttgctggaattcaaaaaattttaaatgaggccaaaaagattgacccgaaaattacgaccgatgacgttaataaattcctagaaaagcagaaaacatacacgattcacaagcccatcaggaaaagattcccgagactaaagacgataccaagtggcttccataccgattggcagtgcgatttgtgcatatttgaccagttgaaaaagcataacgacggttataaatatttattggtctgcatcgacgtgctgagtcgaatgatcttcagtgcaccggccaagtcaaagaagagtgaggacatgatcgaggcttttgatcgggtgttcgaaaagtctaaaattatcccgatgaaaatatatagtgacagtgggcttgaattccaagcaggaaaaatgaaaaaatattttgaggaaaaattcatcatcaaaaatgtaatgtatagtcctgatctgcacgccggagtcgttgaaagggcaaatcggacaataaaggagcgcttgtacagatattttacaaagaaagacactcttcgatgggtcgacgtaatagacaaaataataacaaacattaacaacagtgtgaatagaacactgggagccaaaccgtcttcaattaattttgaaaatgcccgtgcgctctgggaaaaattatataaggagaaggaatttaaaatttcgaaaaagaaaaaatttaaaatcggtgatatcgttcgtattaccaaggaaaagggaaaattctcaaaggggtacctcccaaactttaccgaagaattgtttaaaatcgttgttgccaattcgacgacacccgattcatacaggatcgaagatttggaaggaaatttaataaaaggcatattttataaccaggaattagtgaaaacagatggatgatttttacattgtactaccttcgaacacaccagggcaggagaacactacgtcaaaattcacagttcgactccccgagactttggaattgggcacaaattggtcagtagctctctcatcaattatttacccctactc

SEQ ID NO: 72233 - DNA, 399 bp, Heterodera glycines
atggatgatttttacattgtactaccttcgaacacaccagggcaggagaacactacgtcaaaattcacagttcgactccccgagactttggaattgggcacaaattggtcagtagctctctcatcaattatttacccctactcattcaccgcactcggtataaacggtcaagagtttattaaagtatgggaaaacgacatcagtgtccctactcaagtttatttaccggacatgaattttaaaaccgccgggggcctgggaaataaaattaatgaggcattcacacatcattacaaaatcaaaaaacaacgtggaaagagagaagccaaggctgaagataccaagattcaaaaattgatgtcgcaaagagggccgcagaacgcgccgggagagacgtag

SEQ ID NO: 72234 - DNA, 780 bp, Heterodera glycines
atggttgagatgggaaccgaaattcaaacatcccgaaatgaacttaaatcttttcaagaagaagtagataaagccaaaaacataacattggagcatgtggaaaagaatgacatgaaagaagcaaagaaatcagccgacgtcgcaaagggaatcgccagacaggcaaagaccaaatatacatcaactctcgaggaatataatgataaatcggaaaagggttttagcgggatggtggttaggcttaacgaggcgctcggtgagcattttaaacgtaaggaaattgaaaataaacaagtttcagaagctgaaaaagggccgcaaaaaagagagagattagccaatgaggatgttcaatttaactacgacagtattgatcaaaaatttattgtctatctttcctctgccgtcacccatatagatttgtcaaaacacctcgcatatgttctggggtttaagaatacaaggctatttcacgcggaagaggcgacttatatgccggatttgacgggaggtgtaaggcagctatacatttatgcaccaaatttaatcgaaaacacaattatcggcaaccagatggccccactcttaagaatagttaacgtcgtcgatgacccgggatcaattagtgaagttatatatagcaccgagtattttcatcgtctacagtcgaaacgaatttcagaaattacaattgaaattcacacaccgtttggtgaattcgttaaatttcactggggaagttgtattcttacattacattttaagaaaagtatattttaa

SEQ ID NO: 72235 - DNA, 2044 bp, Heterodera glycines
atgaatgatagtattttaggattaatcggggagggcgttgagacttttaacgggattccggacatgaataagattaaagaacaggaaaaacccattttactgatacttgacgatttaatgcttaatatgcagaatactttcctcgatctactctttaccaggggctcccataattggaacgtaagcgtaatttttgtaacccagagtctctatggtagggacatcaaaacggcaagagcgaacgcccattatctggttttaatgcgtaacccttcggacaattacaagtgaggacactggggtcacaactgttcccaaaaagactgaattatttcatggatgcatatcatgatgcgaccaataatcaagctgaagggggacaaagaaatgcaggaatttttcgacgacagggggaacgagaaagggccgatcgatccgaggatggcgtatgcgggaggaagaacagggcctctgagattgtttgcgcagtccgacgagaagaagaagatctcggtgtttgatatcgtcagtttgtatccgtcggtgaattatgggacagcgtaccagattggagtcccggagattgtggtaccaaaaggggattagatcaatgtggagtggacaaagcctgatgatttgcagtacagagggttgtataaagtgagggtgataccgccgagggcgttgtgagttcctgtcctgcagttgaagtgtgatgagagattactatttccgctgtgctggaggtgcgcgtcgatgtttaagaaggagactacaagatgtggccacaaatgcccccatgatgacgcacagcggagatatgtggcaacgtatacaagtttggaattggtaaaaaacacccattaaacgtatttaaaaatttatgtttaggcaaaagcatttgaatgtggttacagggtggacagattttgccgggcatggcattacgaagcgacggatgatgatttattcaagggatatgtgcggctattcttgaagttgaaggaggagtcaagcggatttccgaaaggagttgagagcgatgaacagaagaggcaatgggctgaggaatacaaggaaaagtacggaattgcgattgaactgagcagggtgcagaagaatccggggttgcggtatatcagcaagcttatgctgaatagtttatgggtatgaaatacgaattcttagatctgataaaatgttaatttttaggggaaattttcgatgagaaattcattgagcaagaatgcggtgattgacagagagtctgccttttacgagttggcgtgtgatcataaggtggagttgtgtgacattgtggagtactcgggtgacgcgatgcgggtgatctacagggacaaggaggagtttgttactgagcacaagtcaagcaatattgtggtcagcttatggtaagtttttttttgaaaaaaagcgagaaaatataattttaacaggacgacgagcatggcgcggttgaaattgctggagtttatgatggaggcggaaaggaatggcggggagattttgtacacggacacggatagtatattcgtgtttcatgacagaggagtggagccaataacgacggggaaataccttggagagatgagtgaggagtatggaggttacgaaattgaagaattttgttgtggtggggcgaagcagtatggtttaaagatcaggagcaaggagacgggagaggtcgattacgtgatgaagattaggggtgtgacgtttgatgtggacaaccggaaggcgttgcattacgatgcgtttaaggagatggtgctgaattatggaaagggggaagtagaccccgcattctttgtttacaaaaatgattttgggtatgttttttgaaaatttttttaaacaatctcatattattttagtccaacgcgggagtcgaaggtcgtgacgagggagaggcacaagatgtacaagccggtctgtcagaaggggattattgatgaagaattgaatgtgatgccatttggattttgttaattttgtattttatttttgttttttgttaaataaa

SEQ ID NO: 72236 - DNA, 2955 bp, Heterodera glycines
atgtcttttaaacgcgtgaactctgtccaacccactgccgtgccaatggccaaaaaatgggacttccgctcaatcgggtaagtttaataaacaataacatataaatagctaatccgttttagaaataatttcccgatggagccctttaaacttattgaccaccaaactacaaaatgcgaaaaatttggtttcacgaaaaacataacggaatttgtgatcaacccggatgtggagcgccccgatgaaacactgcgagaagcgatcgatatcatgataaagaattccatatcgaagacggaggagacaatggggcgcaaagtgaaaatgtttggtgtggcattgactggggctggacttggacacccaatttggctgccgtaccgacccttcccccaaaacaacgcggatgttgtcatggaggaaatcaataaattggggcagagcggaggagaagaaggggaggaggacaaaagaacaattctgctttcggaatcaataaagatgaaggtcacctgtgtagcgctgccagctggagagggaccgcgaaatgtgcataaattcgattttggtttcaaggaacagcagcgaattaagtaggcttgagtgatcttagattaaattaaatgaataaaaacaaaaaaaaaacaaaaaaaacgaaaaaattaaggatagagaacaatgacaaattttgcttgttttatgcgctgctggcggcgaagaattatctgatgatggatcgtttcgcttttcaacgttttataaagaatatttcgaggcagagggaggcagcgtttgaacttttgctaaattcgggagtgcagaggaatgaaagtggctatggacttgagcatttggtgatggttcaggctcattgggttagttttggagaaatgatgagaaaaataaaagtaattttaggacgatttgaatccgggaaagtacaggattgtggcatttgagaaatctgcggatccgaggaaatcgattcgcgtgctgtggaagggaccgatggcccgggagaaggtggtgccgatatttttggagggaaatcattgggacggattgaagaattatgtgagctttttcaaccgagggaggaagttttgcattgattgcgaatgtttttattcaacggaaagcaaacatacgtacgagtgtagggcccggtgttattactgcaaccgagttgggggcgtgccgtgtgtgaaggatgttggagtgaagattgagtgtccacattgccaccgctttttctacaaccggcaatgctacgattaccatcagggacaccaaacttgcatgttgtggaggcgatgtgtgatatgcagtaagacctatctgcataacccacagaagctgcatgaatgtggggagatgttttgccggctgtgcaatgtttgtcatgatgtggagaggggatgttacatcagaccgatcaaggagagagaggacaaggacatttacagaattgttatttgggtacgaagagaaaaaattttttagttttcatttattattcaggattcggagacttcacaggacacaatttacaaggaggatcaaatggagcatgtcatcaactacatttcggttcgagtgacatgtacggagtgctgcgacgacaaggagaggacaaattgcaacatttgtggggaggagagggaaaaggattggagcgaggctgaggggcatgaaccgaccaaggactttgtggagtggattttgacggcatttgtgaaatacgacacctacatttttgctcacaatgctgggcggtttgacggtaatttgatgattatcctgattttgaaaccctccattttagggcattttgtgtttaattatctgtgtcggaccggcaggactccgataccgctaattaatgggatgaagatctatgagttaaagtgaagaattcgaagaagcattctttattgatatggagggattcatgtttgctgatgcccgtcaaacttgaatcgttaaagtcgacgttcaatttgcagtgtgaggataagcccttcttcccctactattacaacagaagggagaattatggagttcgtttgccgcatttaccaccgatggaggattattcgccaggatcaatgaggaaggaaaaatttgaaaagtttgagaaatggtaaggtgaaaatgtgaaatattgatcacccataattttaggtataatgagaatatggaaacgtcgttttacttgcccgaggagttgaagaattattgcaggaatgatacggaaatattgttgggtgcggtcgttgagttcaggaggatattgataaatgagataacgaaaggatttgacccgttgccgaggagctgtacgaatgctggcatcgccatgaatatcttcaaagcgatgtttttgttggaggaacaactgtcgattgtgccggaacgggggtatgagcggaacgatcgcgcgagtgtggtggcaataaaatatttggaatggcggagcaagagggatgccgtagagataaggcatgcgggcaacggcggggagatgaaaatggggaagtacaagctcgacgggttcatttcacagatggacgggagagacaaatgtatcgaagtgatgggctgttacatccacggttgtttgagctgttatgacccgtcggcggatttggttggaggaagaactgcgcaggagctgaacgatgagacgcaagaaaggttggcggaattgcggcaaattctggatgttgaagaaatttgggtgagtaatgaagaatattttaaaaaactggccaattattttagggatgtcaaattgagaaagagctgaagggggacaaagaaatgcaggaatttttcgacgacagggggaacgagaaagggccgatcgatccgaggatggcgtatgcgggaggaagaacagggcctctgagattgtttgcgcagtccgacgagaagaagaagatctcggtgtag

SEQ ID NO: 72237 - DNA, 302 bp, Heterodera glycines
atgaacgcaccaccgtacgaaggcgacagcgattatgggccgacgccaaaaagacatcggccgatgccattctttgaggaggaaaactttccgatcggtggaagcgacgacttaagacaacacacacagagatttgatcagtcatttgatcagagtccgtacgagcaacaagaaggtgccgaattaacgagaaaaatatacggtggagttaacgaaggaagcagcatccataagcttagcttattttaattatcaagccaactcttgcaattggtggcattcgaagctcgacgtaaaataaa

SEQ ID NO: 72238 - DNA, 327 bp, Heterodera glycines
atgacgggttcacatgagcaaagtgacaaaatgggagggaattctgcgaacgatgtcgaggaaggagagttgccagaggagggcgaaatcatggacgaagaagaacagcaacacaaggggaaagtcattacgatgaaaactgaagcggaagagagtgaccgagccatgccaacgccgcaacagcagaacactccatcgaacagcaaaacggaaagtggcagcaaagactctcgaggagatgccggagggtcttcgtggcgcagatgtagggacaaaccgaacagcaaggaacaaatgataaatcaaaacatccgtttccagcgttaa

SEQ ID NO: 72239 - DNA, 1084 bp, Heterodera glycines
atgcttcgcgaagcggacaaaatcgcatgccgcgaatttgtcactgccgacgatgtggccaagggcaactacaaactgaaccttgccttcgttgccaatctgttcaacaaattccccgcccttcccgagccgggcgctgatgaaattcgtatgaaaaaaatgagtaaaaatgtgcgaatggctttttaattcagcacaaattaccgaagtgacggaagagacgcgcgaagagaaaacttatcggaattggatgaacagtttgggagtggacccttttgtcaaccacatttactcggatctgcagaatggcctcgtgatttttcaagtgattttaacttttaattcaaagcattatcggtcagagtatattttacgttctgtccaaaatgtgtcagttgtacgaatgcattcgtcctggaattgtccagtggaagcgggtggtgaagcagttccgcaagttacaaagcatgatggaccaaatacaaaactgtaactacgcggtcgaattgggcaaacagttgcgcttttccctggtcggcattcagggcaaggacatttacgacgcgaaccccacactcactttgggtcgacactctttgtattctttttacaaaaagttatcttttagcactcgtctggcagcttatgcgggcgtacactttgactattttggcacaatgcacacaaagcggcgaaagtttggccacagaaaaagaaattattgtttgggtcaacaaaaaattggaagagtcaggcaaggtttgtcgggctgcaactaattgacatctatttgaagtggggtttattttagacaagccgactgaagagtttccaggatcagacaattgcggatggaagagttctgatcgatttgatcgatgctatcaaaccgggaacgatcaactacgacttggttaagaacgatgtgtcagccgaggtttggagaattaacctttatgagccagtttgtaattatatacaaatttagagcaatttggaaaatgcaaaatacgccatcacttcgggacgaaaaattggagcgaaaatttacgcattaccggaggacatcgttgaggtggattga

SEQ ID NO: 72240 - DNA, 73 bp, Heterodera glycines
atggctcttcgtattgtcaatgttttgctgttcgccgtcacttattttgcttggttttgtgcatttatcgcag

SEQ ID NO: 72241 - DNA, 878 bp, Heterodera glycines
atggccaaagtgaatgaaaatgtgacagatcaatttgagttacttgtgccaataattgaaactattcacaacgattgggacggggactggcgagcggacgaagttttttttttttttggctatttccatctaaaaatgttaaaaccaattaagatcgaaattcgggtcgctttccgacacaaaacaaattcgaattcttcgccgtcattttcgcttaatttcaccgcattttcttatgcattgttttttgatgtaaaattggagaaaagaacattagttgaggtgattgtgaaaaatattatgccacaaattctatctttcagctcaaagggacgccaatttttggaaaaattcaatcgaaaaatccattcaacgaaatacagtaagaaaaaggaatgtttctttaatttaaattacttttatccattcaaatttttagtgtaatcggctcaatggattttgttcagcgtaattttttgccagcctttggaaatttaacttttgctcaatggtccgcacaattttctgcggatggatttccttcaaaatcctcaccagaggaaattgactggcaaatgcgcaaatggtcgatggaacagaattttagcattgttttgggcaggtgaaaacacttaaattataaaacaaaaatatgaaaaaatagaaaaattgaacgcgttcggatgacaactcatcagagacttggcggtggcattctttgccaattcgtttttcatattcgaataagcgaacagaccctacagtacaggtttacttggaatttggtacttgattacataattttcatacagaaccaatgcttgggagatggtcaaatgggcgtgggtacagtacttggctctgtttgtcgttgtacg

SEQ ID NO: 72242 - DNA, 2182 bp, Heterodera glycines
atgttggatcggtacgagttcgtcaacgacctttgtgatttgctgcccgaattcgcaaatttctccatggaacagccacaaactttccgcgcgttgctcattctgatctcccaattcctcgacgttgtcacccaaaaccttttcattgctcgtaaagttgcccacattttgtgtgctcggctgaatcagtataaaaaggaccacgagcgcatcagagagtcgggaatttagagcgtttttgactccgttctcaacccttttcagtaccacgctcaaagaatctgcaaacgaatgtttcgaggacttggtcaattgtcaccatcacagatcgactgtcctcacaatctttggcattcttcatgcgattgtcatcgactgtccttcggcattggtttggactccatttgagtcgaacgaactggccgaggggcttcagtcaaagtttaagccggacagaaatggaaattccaaatccatggagagagaaagcgtacaaaatagcgttgcctgggtaagttatgcggggtaatagtccagtttagctcttcccctatttttcaaaaaataaaaagttttgtaaaatgcctttcctggccgcattttgtgattgctgttttgtgtatttgaatctgaatcattaacttgtaccgttatgtctgaatgttaaatttgccttttgcttttccttagctttgtaagtcgcctttggacaatcttccatgcgaattgagcgtgaccactcagcatttggcggcacacgccaaggccgaactcgaccaacttctgagcatccgaagtgaagagattaaacagcggagtatggccatcgaacagcggtggctgcacatcagtccgacgaacacgcggtccggactcggtgagccatggattattgcattaaacggaggacatttatttcatttaattgacttttctcttttttaatgtgccttaagattcggtcgtcgagaattgtctggacgttctctcctttatggacaccgtcgacctcggggcagtcgatgcgctattagtcctttacaataacatttttagcgaagaggtaaggtattcgggtctctgctattcatccaacttttaacttaaaaatggtcgtgctttatccttgtttatacaaagcaaaccatgataaacagcaaattaatgggtgattttcagaatgactgtttggatattaccattcgcgtcctcatcaattgggctgttaccagtgagcgtgaaggcactcaccgcggacttatcgtcgctcatttgctcaaaatgcacgtcaactttgctcaaaatgataacaaaaagcctccgtttggccatggcttttcgtctctgcaggaacttttggtggactgtttgaacagagagtgggcaaatccgaatggaaaggcaattgcaaattcggcggttagggcggcagaatttgccaatttgatgctgctcttctacgaattgcaacgtttcggtaccaatttgcattattttaaatttgttgctactaaatttgctttttaggtcttttcagccacgacaaatacgtcaaaggttatacagttcatcaggaccgtcttcgcattttatttacattatttatttagcactgatgcgcgacgggactctcgacagtcgtggccttttccttcgtctgaatttgcgttcgatgtccgttgccgcccctaatgtcggtaaatcggcgcctcattccgtcgacgaacgcacaaatcgacgtcaaaacgtaccgaatgcatcgcaaaatgcacaattagcagccgtacaaagtcaacccgagccgaacataaaacaggcgagaaaactgataaagaaccaatggacgatggctaatttaagttgttattggtttaggagcctcaaatgattatttcattcattccgatgtccaaaccaaccacgacgcactcatcactcaccagcactaccgttgaacatcagtttaacggcactttaccaccaccaagtcaacatgtaccaaattctcaaacaccaaaaccagtggaagaatttgcaaaacttgctcctcaatttgaaactgatagtcatccctttttggaggaaccgtccgcattgaggtagagattagttgtcctctatgacgggctttttggaaactttgggtttgatcgttttagcaattaacttaacagaaaaatta

SEQ ID NO: 72243 - DNA, 1297 bp, Heterodera glycines
atgggcaaatgccaagtgaaaagtgggaacccacaggtcggtgagtgacagtgcgctgacatcgtccgcaaattgttggcggtattcgatgttggtgcccactgaaccggcaccactcggagggaaaagcgcttcaaactcttcactttggccgagaagttggacaacgtcgtcagggccggccccacgcacgttcaatttggagacgagcaaaaggtgacgggcgtggtagacgaacatcgccacggccctgccccaccccgaaccctcgccgccttccttccttcggacggtcaattcagtttcaacgagacggtaaaaatcgtttattattgagcacgcttccggggaatacaaaaaataaaagaaatgttcagccaaatgcgacgcaaggacaaaagcatactaaacaaagggaagggggaattaatgacgaataataattgacaaattaaaaatcataaaaataggtaaatgatacttgagcagaaatagaggcagaaaagagatcggtgttcaattggtttcggagaatgaaacgcaaatggacgagaaggggcaacaactcatgcgcaagagagacgatgttgttgaaggaccggcaaatctaaagaaaataaaagtaacacacacataggaaaggaccaactgattagtactgtaaaagtgagtggtaaatgccaaaaacaacagaaatcgacatagttaggcctcaaatttggtcgtttgccgatgtgcgtccccgccttcatttaccgtgatcattgtgcacaacatgtccaagcactcgtgcgttggcaccgaaacattggcagttggtgccccgcctttgatgctctcttgtgccaattcctccgcttgtttgacaaactcttcgattgagtccaaaaaactttctgcgcaccatccgcagatgaccaattggtcgtagtacgtctgtgcattgaaccgtcccatcagttcgttgagttgttcggaagaacatcgccttttgtagcgaacttccgaatggacgacggagttcggttggagagaaatggtcaattcgaaagtcattttcttctgaagtataatttatagataatccccccccccatttaaaaacccaaattttgcagatttctctagcaattttcctcagttcctgccgtgcactatcacgatgttcggaaatgccgtagagaacaatggcgcgttggttgcacacgtccctattggcttcaatctgttcaacgggcaaatggacgataaaacgttcatgaaaactgaaaaaacgaagaaaattatagagtggtaa

SEQ ID NO: 72244 - DNA, 70 bp, Heterodera glycines
cggtaggggtcaactccgtctggccaactccgtctcagcaatgttcaaaaagctataacttttttctttg

SEQ ID NO: 72245 - DNA, 621 bp, Heterodera glycines
atggtaaatcaaaatcctaataaaaatttcgttgaatttcttcgcctcttatttgtgcaaaattttcgaaaaagtaattttctatttaaaattaaaaaattcagaagcaaattcaagaattttttttatttttaaatgcattttttaccacatgaattatgattaaatttttgcgtttcgaattcattttgaaattaagaaaaataaaaattgataatcatttgatcatttttagcgcactttaagcaccgccgttaggcagcgcagttccaaaatttattccatgccacagatattatgggcaggacacgccaagtacctcaaacttgggtaattaaaccaaagaaagaagtgcagtggggaagaatgacgcccaaaatgaaggaaatattcgatgctgtgcgaactctttgtgacccctctctgactctgccaatgcagcagtttacaatttttaccactatttttctctcactcatcgtctgctcgtctctcctttattataagctattttccaaagccaacgcccttcttctgttagtcatttctcattggtgttgacgatccaacattcagtgtacaaatttgttaaacctctcaacattttaaatcaaaatccta

SEQ ID NO: 72246 - DNA, 80 bp, Heterodera glycines; identical to SEQ ID NO: 51817

SEQ ID NO: 72247 - DNA, 80 bp, Heterodera glycines; identical to SEQ ID NO: 51817

SEQ ID NO: 72248 - DNA, 371 bp, Heterodera glycines
atgcacgcgttttgcgctcgagctatttatcatcgggcttgtcaatccaaagcgaaacaacaaagatgctgttttgaacgaataaagggcataggttattttgaagaagtgtcaaagaacatgcagcaaataagcctgcaaaatctaataagtggaaaatacatgagtatagaatttattttcagaaagtgtcaacagacttttggaaaaatatatttgcaatttatcaacaattttgagaagtgagttagaaatgataaacttcacgattcaaaccaattttcggtgctctaattaaccgcgataaaaacatccgaatcaattaaatagcttctgagataataaggtttatcataaaatttcatttaaaa

SEQ ID NO: 72249 - DNA, 403 bp, Heterodera glycines
caaaagttttttacaaccacatattgccaatctaatttcttgcagattgaaagccatccattgcctgccggttctcggcacagcaaagcactaatagggtgtttgactcacttcaaaaaataattcattacccaaaagttttttacaaccacttattgccaatctaatttcttgcagatttaaacctatccattgcctgccggttctcggcacagcaaagcactaatacggtgtttgactcacttcaaaaaataattcattacccaaaagttttttacaaccacatattgccaatctaatttcttgcagattgaaagccatccattgcataccggttctcggcacagcaaagcaccaataggaaaaagactcacttcaaaaaataattcattacccaaaagtt

SEQ ID NO: 72250 - DNA, 1160 bp, Heterodera glycines
atgctgtacctagtcaatgtagccacccaattcttcgtgctcaacaccttcataggtcgaaacaacagaatgtggggtttcgaagtactcgaaaatctttttaacggagagaagtggcaggtgaattaattgagtgttttgtcggttaaaaatttagttctttatttagcaacaaaaaattaattatattaaatagctgtattactataaatgtttggcttaccatgctggtttatatctaattcttcaattttgaagggattagttaaaaatgggaaaacttttaatgtttagtttttttataatattgaatgttttttaataaaaattacagtaattttcattaaataatttaaaaaataaaataaaaatcctatttgcttatttccttccaccctttttgtgtgcttttaggactcgccgatttttccacgacagacgatgtgtgacgtgaaaattcatcgcttgtcgggcacaacacgctacactgtccaatgtcatctccgcattaacgagtatttcgagacaatctacctgttcatttggtgattttaaaatttattttacgggttttaaatatcgacttatcatgaataagatatttattttgacaacttacgtcaaatctgaccaaagattagtcaaatttagaagaattttttcatttttaatagttttgcagtttgcccatgatttttaaaataagattcctcttacttatttattttttaaaatattaattataaaaacgtgtcaaaacaattgttcaatatgcttaatacaaactcatttttttggagcagggagagtaaccatatgaagtgccaaaaaatcctgttccttttctccaggtatggccttggcctgatcgtagtgcttactgcagtaaattttgcctactatgtttttgttctgctgctgcttccgtcgacgcaggagagctcggtccgcgacatgttgatgcaggacaagcatcttgaaattttctacaacaacaaacaccatgaacacccacttttcagccgcttttcccagcacgcactgcgcaaggacggagtgagtatgtggcatggtggtgttgtacagtttggatgcatgtgtattaaattttttgcacggcgatgagaaaaaagctattaatgattctgtttccctaaaaa

SEQ ID NO: 72251 - DNA, 235 bp, Heterodera glycines
atgatcctacaactttgttttctcaacgaaagaaaacacggaaaaccgatagtgatgcgcgagttgtgtctaattaatttaatttttgaaaatttcacaaaaaattcttttataaatatttttctttagtttgatgaagcatatgaaagtgaatgtggaccgaaattgaaaaaggcgtttttaatttacggcttttgtttttgattttgattatcatttttatttctaatttaca

SEQ ID NO: 72252 - DNA, 388 bp, Heterodera glycines
atggccaaatatgtcggtgttcggggtcggggcggggttaaaaccctaaattaaataataacaattcaaagtaatgttacagcgcggaattttgtacgaggacccggattacggtccgaatcaaatccaattgcacttcaccaacaacattgaagtgccaatccaatggttgcgccctcaacaaatagttgatcacccgcaatttataaaccaaatgccggagccacgtgatgtcaaccagggcagtctgggagactgttggatgttggcagctgcatcaatcctggcgcagcatgggcacctgttttacagggttgttccgcccgaccaaggattcgcgatgggatatgccggtaaaaatttcgttttaaataaaaataaaaattag

SEQ ID NO: 72253 - DNA, 174 bp, Heterodera glycines
atggatgacattgtgtccattgactcagtgcagccgattgatcagctcagcttttggtgtttgactttgtccgccatgctcaaattggtcgccgtgggcgtcactttgttcactttgccgttcaacgaatggattttgctgcagggagcccaatttggcggagtgaaaataatc

SEQ ID NO: 72254 - DNA, 694 bp, Heterodera glycines
  unsure (1)..(694): unsure at all n locations
atgcctgcaaaattaggagagatatatttacttgggtgngnnaggnnnganganannngggaaaanatcttgctaaaaagggaagnnannnnngaaggannnggnnnnnnnanaaannngggngnannggnnnggggggattgtttngaaaanaaaaaaanngatnntttnaagggnnagnngggggtactcaaacaattatggggagcaaaaatccaacgcagaattaaagtattaaaaatttttagattttttattcatctccctttttgatattgaaagcatctgagtgcctaaaataacttgtaaataaaatttgatgcgtttcagagcagtttctgaaaaaatatttatgaattaattttgctaaaaaaataaaatagtgaagctttaaaaattaataaaaaattttaaattcagaattactggagttagcatcatagcagtgcttttccttgtctttttgatgctctcgcaaaatctggttcgcttctgataagtttataaaaaaaagttaagcctaaaatttttcgcatatttaaaaagcaattaaaaatttttagattttttattcatctccctttttgatattgaaagcatctgagtgcctaaaataacttgtaattaaaatttgatgcgtttcagagcagtttctgaaaaaatatttatgaattaattttgctaaaaaaataaa

SEQ ID NO: 72255 - DNA, 973 bp, Heterodera glycines
aagtgtccgtttggggtactcaaacatttatggggagcaaaaatccaacgcagaattaaagtacaggctatagggaagatactccggaaggattcggtctccccataaatctgggcgcatcgggtcggggggactgccccgaaaacaaaaaaatcgattttttcaagtgtccgtttggggtactcaaacaattatggggagcaaaaatccaacgcagaattaaagtacaggctatagggaagctattcccgaaggattcggtctccccataaatctgggcgcatcggttcggggggactgccccgaaaacaaaaataaatcgattttttcaagtgtccgtttggggtactcaaacaattatggggagcaaaaatccaacgcagaattaaagtacaggctatagggaagctattccggaaggattcggtctccccataaatctgggcgcatcggttcagggggactgccccgaaaacccaaaaaaaaatttttttgaataaaaattatttaaatgaactgactagataatatttaaaataggttatttctcttcctttcagtatccctgcaaagtttgctgcgcttctgatcagtttctgaaaaaaagttaagcctaacatcggttcagggggactgccccgaaaacccaaaaaaaaattttttattgaataaattatttaaatgaactgactagataatatttaaaataggttatttctcttcctttcagtatccctgcaaagtttggtgcgcttctgataagtttctgaaaaaaaagttaagcctaaactttttggcctgtttaaaaaggaattaaaaatttttaaaaattttattcatctccctttttgatagaaaaagcatcagagtgcctaaactagcatgtaaataaaatttggtgcgtttcagagcagtttctgtaaaaatacttatgaattaattttgtaaaaaaataaataaataatgaaagact

SEQ ID NO: 72256 - DNA, 731 bp, Heterodera glycines
atgttcgtcctcccttccgtgctgcttcttctgctggctccctttgctttttgtcaaaatgcgctgctcccaatgcttttccaagctccgccccaaccgcaagagcaattgccgcagaaaacgccgcgagggcacacgccgcacgaaaagatgaaaatgtgttgtgccaagttggatcaggcggacgccgactgcaaaaaccgtttctgcgattggaatgcgctcagttcgaacacagtgaactaattaattagttgattaattaattgggaagggaacaaaaaagggatagacagcagcaattagtctcaattagtagggagttcggtaggaatttttcctgtataaattattacagccccattggttccgtcattaaaaagggcatttttggaatggcacttccgcttaattgccggccaccatccattaaagattctgattttcctctccacgtgcgtcgcgcgtggtccaaccgttggccaaatgtgggactgcgcgtcaagtcgcgccgatcaccgcgaatgctgcagaatcaaaggtcggagaagtgggggaggggggcggcagagaggggaccaatggcactttttgaggaattcaaccgggctgtatgtcctactgcgagacgacaaacggagtgccaactgactacttccgctatttgttttgcctgaacgatttcaacaaaattcgcgattggtcagtggcaattctaattcataaataaa

SEQ ID NO: 72257 - DNA, 913 bp, Heterodera glycines
atgcctttctcctcctcctctttctcctcctcctcctccctcctttgcttcttcctcttcctttttgtcctcccccacttttcctttgtctcttccgccgatgccaatgccaaactcaagaagtgttgtttaacactgaccagcgaaaaggacgacaaagactgtgtggcccgattttgtgattttgatgcgatttcgcaggcgaatgtaagcggagaaagcaatgaattcgtttcgccaattaaattcgaaatgaatttaaggtgttgaacttcatgtcaaagtgcaaagacaaaggcgatacggtaattccaacaaaagtatacgatagcaatgacatgaattattagccttcattcattattactgatcaaacattgctcaaatgattgtgtaatggagttaattcccgtgtttttctcactcaatcgctcaccactttatgactacggttaaccctgtgatacagtatcccctctaggtcggccacatgtgggactgcgcgtcgagccgatttgaccacacgcactgctgcagggtttgcctcagtgattttgcttgtttacaatgttgaaccaaattcacagggcaaaggcgtgtccgacaagtgcatggagtactgtagtgcccaggacggagtgccagaaaattacgtggactatgtgtacgcatttccgactaattacccctctaattgacacgcaaattaattgaccacccaattttcagggcttgtgtggattattttgaccatatccgcgattgtttcaaggcacatttggagaataagaaagaggaaaaatgaatggagcgaaacgccgccgagggaaagtgcccaaaaaaacggacagtgccattttattatttgccaattttaaatgaccctttttaatttatttgccatttgaataaa

SEQ ID NO: 72258 - DNA, 479 bp, Heterodera glycines
atgggaaacgttgagaaaattggacggccagcagaagcggtggattacttttgtgtacaacgcggaggagtaccaattcgccgatcagtgcgtccaaaattaaattccgatcgaatgattccccaatttcttcctaagaatgcttccaatccctcgtccactgatgccaaaccgtccggtgaccttttgcacgaacattcgttgccttcacccagagaaacaactcgtggaggaggaagtgaaattagtgttgtgccgagaggacaggtcgagaccaatttggacggccaacttccaaatgccattgagtgaagcggagattgtttagggtggcaaattcaacaagtggtagaattggcatacattttaccatttaccatttatatgaaaggaagccaaaatattcccagacttttttaaattgtcatatttttattttattaatgaatttcatatacatatttgaatgatttagttga

SEQ ID NO: 72259 - DNA, 59 bp, Heterodera glycines
atgagaaaaagagatagctatttttggtcaagaatttttttgtttgcgtttcaaatatc

SEQ ID NO: 72260 - DNA, 390 bp, Heterodera glycines
atggtccgtatttccgttgatgttgtcaatgatgcgtaccaggtgggcatcttgttaactattttttgcgaaaatggcgcagaactgaaaatggcaatttaaattttcagtttataaatccgtgtaagcagcgtgaaatttcccttcggaatctgcaaattcctaccattgaaaatctcggagttatcagggtaagacagaaatgctgttgttatatataaagtttaattaataggatcaatttgatgtcattgatttgactgacaataatattcgaaaattggacaatttgccgagattgaaacgtttggggggtgatacgtttaaggatggtgagtgagtgagtgaagtactttaagtgcataatatagtaggaatccaagcaataaa

SEQ ID NO: 72261 - DNA, 390 bp, Heterodera glycines
atgccatttgagttccttcgtcccgacgaaaacccaaagtttgtcgccaactccgaatgggaaatggtgccgccaattccggcaaattgtcccattaacgtttcggatgagaaaggaaaattggtggtgaaaagtgccgagcaaatggaatatgaacgcgacgatcaaagacagagcggcggtcagccggcggtcaaagtcagcggcaaattattgcgcgtggcatttcgagtgaaccaaatgccaaaaaacattaccattcaattggaggacaaacagaaaaagcccattctcacactgttcatcggcgcaaaacatattatactcaactcggagcaggtcaatggtgcacgacggcacggcacgagaagggatgggaagggataagca

SEQ ID NO: 72262 - DNA, 261 bp, Heterodera glycines
atgcaaatgaatcgtcaagcaaattcctcagtgttgtgtgattgtgaaactaatccgcctcctgctgttccgatttattcaccaccaccgccgcctccgatgtttttgccgtcaccgccggcgactgaaggagcactcgcgccgccaccgccggcgactgaaggggcactcgcgccgccaccgccgggtggattggtgatcactggttatcccactgctaatccggatggctattttggaaataatgcccacgaagacaag

SEQ ID NO: 72263 - DNA, 398 bp, Heterodera glycines
atgaacagcaacgccaatggtggtggtggtggttaattttttaattagtttgatcaatttcaagaaaattttattcgcttttctaataatttgtggcaaaactcaatttaaaaaaaaatatttgtacggcatttttaacattttttattttaagatgggcccaccttaaaacggacaatgagtgcgcttggagttgcggctttgacacttggagcagtaccaagtgttgaagctggacgaccacttggaacaataatggtataaatcatggtcgaaaatatttcattttaaaaaggcaattacaattagttgtgtactgtagattaaggaaccgtatcctgtttcttaagattactgtagagtcagaaacagtactggttccagtattttacaataaa

SEQ ID NO: 72264 - DNA, 1441 bp, Heterodera glycines
atgtgttgggtcattgacattgcactgagtcttcaggttggcccaactttttggctttattttcaattattgttgcctttgtcaaaggacgagtcaatgcccatccacgaattgtacacgcaaatcagaaatcgcataaccgtggcttcgggaatggaggatttggaccggaatggacaggagtttgagccactttttcgtaaaatgtgtgcctcccgcactgaccaggcccgtttcccccatggtcaaatcacgaaaaccataatattcgttagttgttcagctcctggtcgcgcatgtgaaggcgtttgcgccttgcacctccaatttggacccgtacctgcgcaaaacgattcgcgagcagcgcggcggtgaaccgatcattgacctttccgagtcgcaggaggacgacgacgtagcacagcagcaggatccatttggaccactgaaggagaccatcggcccagaggcggaatttgtgtttcaggacccgatggtgtgggcatcggtgcggaaagctttggccaaaatgtccgtcgctgaatttgtggcactcatacgacacttggggattgttaaggtcggcacattagcaaacgtttcgcttaaatatcacgggaattcccttttaatgcaaattgtttaaccaattaaggaaagggaggcgcagctcatcaatgctttttatgagaacaatttgaatgggctcgtccttcacatttgcgacctcaacgaactgaagcaaatactgaaagtgattgatttatccgtcttttgatttctaaatatgccaatttgttttgttcattcgttgtccattttgaggtgccattgggcgattggactctcgtcaaattgttgattgaatctctccgcaaatggaaacccttctccacacagtccctttgctctccgcccgacaccaacagcaactcggtcgccgaccccgtcgttgttgtccaacctcaacaacaaaaacaccttgtacaacaccatgacaatggtgaatttggtcaacagaatgaacaacgcatggcactgttgcggcgcattgaagaggagggaaatgggcagacgatgatgaacaatggcgagacggaggaggagaagcggagaaagtcgacaaaaagtggcgaaaaggaagagaaagagcgaagagaaacggaggagcgcgaggaggagatgaacagcgtggcatctgtggcgggctcttctgagcagcgatcgcttctgaggtcgtccacatccccaccgaaggactgagcagtgatcacagacgaacggaaaacgaaacgaaatgatcatcaatcacaccactttttcattctttctagtcatacaacatatcagggattgtcgcaatctatgcttcatttaaattaaatctcaagcgcatttttgcatttcattaaaaaattggtaaatttgtgtaaaaaataaa

SEQ ID NO: 72265 - DNA, 1765 bp, Heterodera glycines
atggggccggctgtagctggcaataatgaaccaatcagcgaaaatgtcaaaattttctactcgaatgatgaatcggattctgtggctgtcccgtcaaatgtctacgagtatttccagtccattgaaaatggccggtttcctttcttcaacaacacccacgtgcacgtctccgccatgcggaacctcaatggcgaaacattacttataaccgcatcacgacttggacatgccgaaattgtggcgcgactggttgcggacattgacgtggaggagacggacaacgacgggtggacggcactgctcaatgcagcccaccatgggcacgcggccgtcgcacgcgcactgctcacagcgggggcatcggtggacaacccggacctggtgatgatccaactaatatacctattttcagggtgggttatttaaaattttattgggtatgaagacaaattcaattggacaattcattctttgtttagatgggatggacctctttaatgtgggcatgttataaaaacagaccgcaagtggtcgatgtgctgctagagttcaatgcgcatataaatatgtttgtaatatccattttaaaattcctataactaatttaaattcaattctttttttagagtcggcgaagaagacgggctgacgccgctaatcattgcttcgggtcagcaaattactattcatttacataaagttttaaattattatttcgagtttttttcgatattgcgtgttctgtttaggccgtggctttactgaagtggcccggcttttgttggcttccggcgcgcaagtgaacaccagcgacaaattcggaagcactgcgctgatttgggccgctcggaagggatttcgtcaaattgtggaacaactgttgaattcgggcgctgaattagacgcagtgggaatgtatggtgagaaacctttacgacaaatgaaagggacgggagcaaaggaatttagtgattttagtaggtttatttgatccctttgccaggttcaactgctctgatgcttgccacgaggggaaaccatgcccatgttgtggagatgttgctgtcaagggacccaaatgtgaacgttgttgactacaatggactttccgcgcttggaattgcttcaagggaaggtgagtgaaaattgttggcactaacaatgagttgtcaactgcgccatgctacttttatatctccgtttccaaattcatcggtgttttgctaattgtaaaatgccatttgcattgtcaggttataccgaaattgcttcaatgctgctccaatccggtgcctatgtgaacacggttgaccgttttggcaattccattctggcgagtgccgtccgctcgggaaaccttcgtttggtggggatgcgccgaaggtgttaaggctgtttcagatgtgaccaattcaaggtgcgtatgttgttggaaaaacatgccgatgtgaacgcgaaagactcggaggggcgcactccgctgcatttggccattgacaaggcatattcaggtcagaaacgaggcaacaaacccatcccaacctccaaagaaaaaagcaaacaaattttgcccaaaaaatttcaagccttaattactaatgagggtcggagaaggaaacgtcgaaacgccagaacaacaattggttacacaatttagaataaaccgttttcagatgttctcctcgctttgctcgacaaaaaaccaaatttggagttgaaaaaccgggacggtgaaacggcactgatcagagcagtgggtttttaa

SEQ ID NO: 72266 - DNA, 710 bp, Heterodera glycines
atggaggaggaggaaggaagagaggaagaagaatgggagggaagagaaagaagaggaaagaggaagaagagtgggagcagagaggagaggaagaagagtaggaagaaaggaaggtgggaggaggaagagcggaagaagaatggggtgggaagagaaagaagaggaaagcggaagaagagtgggaggaggaagagcggaagaagaatggggtggaaagagaaagaagaggaaagtggaagaagagtgggaggaggaagagcggaagaagaatggggtgggaagagaaagaagaggaaagcggaagaagagtgggaggaggaagagcggaagaagaatggggtgggaagagaaagaagaggaaagcggaagaagagtgggaggaggaagaacggaagaagaatgggagggaagagaaagaagaggaaagcggaagaagagtgggaggaggaagagcggaagaagaatggggtgggaagagaaagaagaggaaagcggaagaagagtgggaggaggaagagcggaagaagaatggggtgggaagagaaagaagaggaaagcggaagaagagtgggaggaggaagagcggaagaagaatggggtgggaagagaaagaagaggaaagtggaagaagagtgggaggaggaagaccggaagaagaatgggagggaagagaaagaagaggggaccccccgctgtgtgggcggcgtgcg

SEQ ID NO: 72267 - DNA, 779 bp, Heterodera glycines
atgttgaaagtttatttgatagacgacaagaataaattcttagcattcgtcgtttttcaaggtctgtctgttctaaattttttaagtgcaattttctcattattttttttgattattttttttttttgcaacaaattaaataactcgccaaatttttcaccaattagcggcttgctttatgctgctgctgctcccacctataattaaattatgtaattaatttcgtttggtcaaaacatttctgcccaataaaaatgatggaaggcgagtggaaatggtacgaaagtgcgccaaggttacccgcgctctgctgttggcggtgtgtggcgccaattcaaaatttattttgtgtatccgtttaaccgtaaattttcgcttcattttcacccaaggtcatttttgatcggaaattaaacgatttttgaagagtttggcggcccaaaacctgtgtctatttaaatggtcattaatttgttgttaatacaaactacatcagcagtccatttattttttatgctcacattttgattattttgtcataaataaaattatttttatttttaaattttaaatgaaaaatataaattttctaaaaattatttttaataatatttacatttgaaacttgaaatttggcaggaataaacacaaatttctccaaaaagaatatatttttttaattcttagcaaattcattttattaaatttttaatcaaaaatttttaggtaaaaatgaaaatcgttgtatttttgatttttctcgcaaattcgctaattga

SEQ ID NO: 72268 - DNA, 1291 bp, Heterodera glycines
atgtcgcttagaaaaaggataatcggtgagacaatcattttttggtgagtaagatttgggtttggcagggaattgtttcagttttttttatgaagtgtgccataaatataattaattcaccagtacgagcaaactaactacagatcagtaactataaaaatcaggcaaaaaatactgatcagaagaatcaaaatcataaaaatatttaataaaaatttaaaatacaaagtacaaaatgtcaaatcacaaagatcagaagaatggaaattcataaaaatattaaaaaagaataatttccatagtttgtgcagtattatgaaattgcctaatgaccagtacgaaatacaaggcacagattgaaattttttgtgaatgattggtatttaagcccgaaaacacttcaagaaaattcacttcacaaagtgaaacaattcatcgtcaaactaagatatgaatttaaaaaatctattcattttctaatatttgactttttcaactataatgaatcaaaataattttttaatagaatcttcgttcgaatttttccaaaatttcatcaatgtatcattagcatcggatttacgatttctttttgcttttttgggcctcggaattccgattttcgaaatgactccggtattggttaccggcttttgaaaagtcaagtccaacacccgttacgaaaaccgggaaacgggggccttttcatcaattgccaaccattttcattgtctttttacctaaataatttgtataaattttatgatgaaacttctattattttttgggtgtttaaaaatatttaaatatatatttttttaatttatatgaaaagaaaaaaattaatttcgtttttgtattcatttctaacaacaacaaaaaaaaacaggaatttcatagaaatttttgtcggaattgatgaattttttaagattcgaaagacaaattgacagcaaacttcaatgctttattaaatgtagcaaatgaaataaagcagttgtttcaaaaagcaggagaaaattcaaattatatgacatttttcaattcattggataatgccaatattttttttggaaatattggggaaggtgccaataaaagtcatcacattcaaaaatggattgaagaaatacacaccgatttcaatactcttattattgaaaatgatctgttggaaatttggaatgatattaaagacaaattttcatttcaagaaaacgtgtgtaacaaattggccaagattcgcactgatataagcgacgatgataagggatttatcgttgttcattaa

SEQ ID NO: 72269 - DNA, 957 bp, Heterodera glycines
atgaaatattgtgtaaggcaaacttatacaaaaaagttgcccatgaaagcggcttctgtccttagctgttgccttagacaaaacagcaaaagagaacaaagacaacgattagtaattggtacttacgaattggcgacggatgaagcgccaattggcgataagaagagtggaagtgaaaggtgcataatccaaagtacaataaaaatttcttaaactcgggtttttgtggggttgatgaccttgagtgtctaaatttattgtcggcctttgttcgttatgttaggtgtggtggcatttgcattatcgacccaacggatttgttacccattgagcggtacattcgccttcccagtggcgtttttcggcttgtaaaagtgccaacaaatgcaattactcctcttcttacgagtgaagttaatggtaaccgttaacgtttatgtacagtatggtatacaatttaatgtgaaaaaaatatttagataattcagcagcagttgctacacttaccgatggacgacttgctctttttacgactgaccactttgattcggtgagtggaccactatttttttatgattttttattctagattgccgatgattcggctacatttctgcctttttccacgactttatccggtggaatgatgttagattgtgcagtgaattcggatgggcgactgctatgttctgacaatttgggcaatgtataaaattatttatttatctttaaacttttgatgcctgaatcctttctaaagatccaaaaaaatttgagaaattttcctatgaaaaaaaggtttttataaaatattgtaaatattatacatttattatttctgtctttttagctttttgtcctccgttttgctttggatggttttcatccacccgattttcaatggcgtgcccattcatctcaattcggtggaataacggtaaaatcagcaacaataaa

SEQ ID NO: 72270 - DNA, 390 bp, Heterodera glycines
atgaccatgttcaaggaactgaccaaccgacaattggtcgccattgttatgttggcaatttcgaatctgtgcagcactgtggtggtcagttgcataggaccaatttacccgggcgaagctaaacgaagagggtcacttttgaattcacatgcaaaaagctaacaattacggggcttcagaatgtcagaggctcaaatcgggttggtcttcggtttgttccaattggtgatgttcatttctgcacctcttcttggcaaatacgtaaacatttttttttgatttttttgccattttactaattgaaaacaaaattcagatgcatgtgattggctctaaatggatgtgtatcgctggccttcagatagccagtttggctgcaattgcatttgg

SEQ ID NO: 72271 - DNA, 742 bp, Heterodera glycines
atgacgaaaaaacatttgcctccggcgccgttcgaatacctttcgacgagtgaaagtgaaaatgaaatggaaaattgtggacaaacggaagcgtccaaattggcgcagaaattctccagcagaaaggatttgtcaccctcagaacgaatggcagccattctgaagcttatcagctcaaaatcggaagagttagaataacgggaaaaaagcaataagattatataggaaaagcaattgaaaggacggaattgtaaaaattgggcatttttggtggatgcaaattgggcacgaattatagcaaatcctttcttacaaatttagccaaattcaacaaacggttgtgccatttcttagtgttcccaattttctctacaattttcgattattttttgatggttgtgcctttaatatttacgttctgtccgtcgtcagtgggtcaaacaaacacttttcgttcttttcccccatctgtcccacaaattatgtatttttctacttttcccattgtgtgcctcatcttaatcattgttcatcatgtgttgccaatttatggtattaatcaaaatatgaattgaacataagtgaataaattgtttcagcatttgtttgatttacgttggtcgggtcggttttttattttagaaaaaacaagaaaatacctaaattcatgtcccgggattcgaaattggtacaaaaaatatcagatttatgttcagcgactccgaaaaccattagaaataaa

SEQ ID NO: 72272 - DNA, 49 bp, Heterodera glycines; identical to SEQ ID NO: 57477

SEQ ID NO: 72273 - DNA, 1156 bp, Heterodera glycines
cgacgcacactcgtgttggacggaaactcactgcaggcgcaagacttggtggactgcatgcatgacaaatgcaagctgcaggtcagaagcaggacaaaaaagaaataattaggcaattaaagtttcaaatggcaattaaaataggaaaataaaataaataaagataattattagaaacaaatgaatattaattaaataaattaaaggaactaaagaaaaaatggtttaatgaaaataggtaagtgtagaatttaattaattcaattttcttatttaattagttggctgagtcttcgcgccagcgtatccgtgaagcgcgtatatttctcgagaaagttgctgccgagcaccgaggtcagctgattaactcgttaatgtttaccaattacctttttccttttaaagttgtctatggcataaccaccggtttcggcacattttcaaacgttgtaattccgccagaagagttaaagtaaaagcggagaaagaatgaatgtatttttgttaaaagaaattcatttttattattatgtgttcaaaattcaaatgtaaatgaatgccatttatccgtctccccctaaggcaattgcaactgaatctgatccgatcccacgccactggccatggctcgccgttggagccggccaaagctcgaatgcttctcgcgttgcgcataaatgtgttggccaaagggtacagcggaatttcgctgggaaatgtggacaaattggtgaacgcatttaatggtaatgagagaaaacaattggaaaaatgtttaagcgactcttttttaattatctttttcagaattttcctcacacaaaaaaaaacctttttttaattgctttaattatttttttgaaatgcctctgtctgtctgtccatttgctcaattgcccccattagccttctgtgtgtcctatgtgcccgagcagggcaccgtcggctgcagcggcgatttgtgtccgttggcccatttggcgctgggtctgatcggcgagggccaaatgtggtcaccgcgtaccggctggaccgatgccagcgatgtgttggcagtgaacgggttggaaccgatggcactcggctacaaggagggattggcactgatcaacggcactcagttggtctccgccttgggggcattgggtaattataa

SEQ ID NO: 72274 - DNA, 505 bp, Heterodera glycines
caaaagttttttacaaccacttattgccaatctaatttcttgcagatttaaagctatccattgcctgccggttctcggcacagcaaagcactaatacggtgtttgactcacttcaaaaaataattcattacccaaaagttttttacaaccacatattgccaatctaatttcttgcagattgaaagccatccattgcctgccggttctcggcacagcaaagcactaatagggtgtttgactcacttcaaaaaataattcattacccaaaagttttttacaaccacttattgccaatctaatttcttgcagatttaaagctatccattgcctgccggttctcggcacagcaaagcactaatacggtgtttgactcacttcaaaaaataattcattacccaaaagttttttacaaccacatattgccaatctaatttcttgcagattgaaagccatccattgcctaccggttctcggcacagcaaagcactaatagggtgtttgactc

SEQ ID NO: 72275 - DNA, 896 bp, Heterodera glycines
atgagtacccgtcgttcaagtcgtcgttcatctgctgctaaggggtcacgtgagggcagcgtggcggggaagtcgaaaccttcggaaacggctattagcgactcaaagaagccgtcgaattcttcacccgagaaggctcaagaaacagtaagaaatgtaaatgtcaaaaaatttaattaaaatcgaagggaaaaatggaagaggaaaagaagctggaaccagtcaccgaaacagagccagaattatcaacagaggatgaggaaaaatcaatagtggacgaaaaaaagaccactccggaaaagaagcaagaagaagttgggcccgcggtggagcaaccgctggaaatttacggtaaactcattagatgaaagaataaaattacagaacttaagcatatcaaaaattaaagttattattaattttcagttgagcacacagtgaagactgaaaaacttcatggcattgttcaggagcagtcacaggcaaaggattcggccagttctgatgctcccattgagaatggtcaacaacaaaaaaatgaagcgactataaatgaagaagaaatagtcgatgaagatgccttcatcattacaaatgagtcggaccccgctgcaactcacaaaatccaagtctacactttgagtgacagcggaattcccaatgagcaaaaagcaacgcctagcggaagtaaagctttggtatccgcaaaaccaatgctgggtgaagaagggaaaggggatgaaataacggtggtcaaggatgaaggacaacagccgagcggaagcgtggtggatacggttggttcatcagagggaaatgcccacgtcacaaccaacgggcaaaacaaggagtcggcagaaacggtcgtagcaacggtcacacttgacgaagagtag

SEQ ID NO: 72276 - DNA, 1611 bp, Heterodera glycines
  unsure (1)..(1611): unsure at all n locations
atgggtaaaagaaatttaccacgcaagcttaattgcaaaaaggcgttgaaagagcgtgagaagaagcgggaggagaggaaagcgcagacggccaaggcgatacaagctcgcctggccaagaaaagtgagtttttccattcatttttaataaaatcctaattttccaaatttttagccgctccccagccgaacactgatgcagaaacgccacaaccatccgaagaagagccgtcgacatcagaggcaccggcgcgggacaacgacggacgaccaccatcaactccaacaccgatgacaccgcaggaaatggacgtgccgtcggtggagatggtggacaccgatgtgcaaatcccttcaacgcctgccgatgaagaccaacaagccgagcccgtgccgtcaacatccacggcacgctgtgacttcatggcgacaccatcgacttcaaagtgcgccggtgcctttggtcttgacgatggtgagtgcgaaattccatcaaaaattttgttttttaaattcatttcattattatttttaagtccacatgtttgacgagctgcgacggcgccacgtttggatcgaggaggaactgcagcgacagcgccggtcaaacgccgtcctccgaaaacagctcaaggcacagcgcgatcgttcgacgagcctcgagcgttcggcttcgtcatgtcgtcagcggaaggccctttcagacgtgaccaacaacccgcaggaggacaaaaggctgagcgcggcgaacgatctgctcatcacattggacgcaggcatctccttcaaagcccgtgaagcgttgaagcggtcgttcgccggccagggacatgacgtttgggcaccgacgtgggcagtgaagcgtctgaagagggagctggccgagggggcaaattttgagtgggtgggcgaggaacagactcgcgcacttgtctgcaccgacgtgcgtgcccttgttgagggtcgacttcaagcgttggcaaaaagtggtgagaggaaaataaataatttttcaaatttataacaaaggccgtctgcaactccatcaggaatttgtctcccaaatcgtgttggtgctgacgggtgacaagggggcgccgtcgtggcagcaacaacaaaattggtattactcatccacaacgttgatccaccaaactccccaaaaaatctctccactttcgccatgatcgccgacacgtagacagacagtcagtacagtgtactatttctccctttctccagtggctatgcggaagaaaagaaggaaatagtacactgtctgactgtctggttacactttagaaaaaattgaccacaaaccgggacccaaactganatgcgacgatgaagtttgggcaccgggaagtttgggcaccgggaagtttgggcaccagaaatttgggcaccgggaagtttgggcaccagaggggggatttcaaaaaaataaaacaaaataaataaataaaatgttatataaatcattaaaatttagtaaattttagcaacccttttttcttaaaatttatatgttcttgaaaatcaaaaaatttatgtatgggaacctggcaatcttattatttaatcaattcttacggttgtttaaacgtataa

SEQ ID NO: 72277 - DNA, 193 bp, Heterodera glycines
actccagtattctgaattaaaatttttattaattttaaagcttcactattttattttttagcaaaattaattcataaatattttttcacaaactgctctgaaacgcaccaaattttatttacaagttattttaggcactcagatgctttcactatcaaaaagggagatgaataaaaatctaaaaatttttaat

SEQ ID NO: 72278 - DNA, 882 bp, Heterodera glycines
  unsure (1)..(882): unsure at all n locations
aaggaaaaacgtaataccgtaatcaaagcattggtcgatgagaaacggaagcaccaaaagcaaaaagaagaattggaagaaatggaaaagaagaagaaggagaaagaggaggaggaggagaggaacaaaaagaagaagcagaaacagatggcagtaaatgagtgggtttttttcaatttttaattatcatttcgtaaattttttccgaatgcaattcaattttataatttttttttaaatgacgttatgtttttttaattaaaaaattttccctctctttaccagtgctttttcagttttttcacgaaaatttttacgaaattaggccccgtgcgaaatttgaaattgacccctctctaaattaaaaaatttttagcgataaatattttcattaatttgaatcattgaatcgtatgaaaggcccaaaaaattaaaatttatttaaatttttcgctattttaattggtttgtttaaatttttcagctgcgtgaaacatgttgctgaacttgacaaggaaatagcgaaaattcaaagtgaacttcagcgttcaagcaacaaaatggccaatttgcatacaggaaaaatgtcgacaccagcgaaaaaaggcaattaattaattattgtaattaactattaattaatggaaattattcattttgaagcgtctgcaacaaattctactccaactgttcttcaaaacactgttgcgcataaaacgggggaacataagctgaaaaaaattcccgtttggagggtgagaaaaaagagaattttctatttattttatttaggctaggatttaaatattttcaaataattctctaccgaatacttgttttaggcaacaaaaantgtgtcccaagtttacttccanaaataaa

SEQ ID NO: 72279 - DNA, 626 bp, Heterodera glycines
atgcgaaatttgcgtgttccaattttacttgtgctattgagcccagtgattattttcatattaaaatttttattgcatgaaaatatgccgacaaaaataacaattaaccctgttgcgggaaattttatgcaacgaaggattttgttttttgatagtgacgtaaacaccccaaagttgctgcttggaatgaacacccaagtaaaaatctgaatatttgagtcgaatcataacacatatttcttggcacaaaaaattataaaattaagccattgccaacaaaaagtcactttggcatatttaatgaggattgggacagaatttgtggaagtgatggccagcagcaatgtgtgagaaagtttgatggcaaattccagcgcaatgttgtgtgtttttgttataaaaaataattatgcattgttaaattataacttaaattaaattaattaaatatattttatattcacttttagtttattccgtcgcttaaattggccggctgtttaattgcaaaaaattcaaatgttttcttggagtcgttgttttgctacttaacaaacatgaacaaaattaacacgacaaatatcgattacgaacttttcaatttgtttgtttttaactatttataa

SEQ ID NO: 72280 - DNA, 277 bp, Heterodera glycines
atggtccaaaagattactggaaactcttttaagaaaaccagaaataaatcgctcaattggggtcacgcactaatgcgaccattttccaaagctgtaattcattggtcaggtcttttgtcattgaaacattgttcacaatctgaaggggaaacgacagagacagacacaacgccaaaagaacaaattcaaatcaaaatacctcttccattggcaattcagcataatacggtgactcaacataacaaaacatcattctaattctcggtctaaaattaaa

SEQ ID NO: 72281 - DNA, 74 bp, Heterodera glycines
gaattttctggcactgtttgcgccgattgcggtgcctcttgtccgagttgggcttcgctgaatcacggcgtgct

SEQ ID NO: 72282 - DNA, 437 bp, Heterodera glycines
aaaatggtgtaagtaaaaatcgtaattacgctcaaaaagcttctcaaacaattttagcgcttccaattccttctacaatcgcctttatacatcccattatgagcgctaaaattatcagagtgccgaaaatcgcatgtgatctaagcctagaaaaaatggtctaagtaaaaatcgtaattacgctcaaaaagcttctcaaacaattttagcgcttccaattccttctacaatcgcctttatacatcccattatgagcgctaaaattatcagagtgccgaaaatcgcatgtgatctaagcctagaaaaaatggtctaagtaaaaatcgtaattacgctcaaaaagcttctcaaacaattttagcgcttccaattccttctacaatcgcctttatacatcccattatgagcgctaaaattatcagagtgccgaaaatcgc

SEQ ID NO: 72283 - DNA, 692 bp, Heterodera glycines
atgctcattgtttctttattttttgttttctgtcaaattttgctgctgttgacagtaaaaggcgatggaaattacagtcgacaaagcgattacggtagtgccggtgtttccgacggttctccgccgcccatttcttcgggtacagatctgtacaataagcaaaaactgatccaaaataattgaattgtattaaataatctcgttacattaaaacttacaaaaaaaataaaaattttatttaggggctgaaaaaacggtagacgaatttctgtccaaattcgaagcgttgtccgcccgaactgattccgatgatgtcggcgttctcatggcacaactttcccaaaatatttcctccttttttgaattggctcttcccgtcggttctctcatcgcgggggcccttcaaattagcgacaaagtaattcataattatcattcaacggaatatacggtagttcggcgtaatgcatactgtaattgattagaaaagcaattaattaataattgtgccaaaaaatattttgctttgttagcccgaatctgaacaatacaaagcgatggagaaactgcacgataaatttgatgcaaaacttaaagaattggacacgaaaattgtgagatcttggcaaaagattgacgtgagcacgcgaatattcaacagttacgaagatgtaattagctaattatagtaa

SEQ ID NO: 72284 - DNA, 234 bp, Heterodera glycines
gttcaacctagcagcaaattaattaatccttttcattcacagtacatttatttttacactgcccgttactgtaagaatgaatacggattgtcgaaggaacaactttcaatgttggcacattttgtgccattgttgcgcaaagttcgattgcaattggacagcgattattccaaagaaaagttcgatgaaatggaaccgggtcgaaaattattaattaattataattaataaata

SEQ ID NO: 72285 - DNA, 549 bp, Heterodera glycines
atggtcacgcgatttgacgccgaaagggacgaaaagcgggcggaaaaagcgaacgagtggcttaaaaagtgccaagaaaacggaacgaagaacaaaacggccgaaaggacaatgagacaattcatcgagtaagctgaaaaacgaatggactaataaaaaaaactggttttggaatttaacttttttaaataatccgcgaatcattcggcacatttcagccaaaattataacattggcaaagtgtctgagctgctggacaactttgagaagcagcactttaacctcaccaacgatgctttgtaccgtaacatcgccattctgcgcgattacggtagcattgaccgatgtgggattacggtctcttcaaatgaccgtccatcggacaatcacacggcaaacgctgctgctatggtggactattacttcgcggggtccttttggcgcgcctgcgaaagttatgccatctatttttacacttgacaaattcggcaccttggcggaggacggaacgccaaaaatttcgattggattatgccatttaaaaaaata

SEQ ID NO: 72286 - DNA, 1351 bp, Heterodera glycines; identical to SEQ ID NO: 44873

SEQ ID NO: 72287 - DNA, 196 bp, Heterodera glycines
caccgacaacatttctcatgctgctggtgaacaacaacaacaacagcaacaacatgaccaaacagaaaacaaagtcaaatttcaagaacagaaaaaatcagaaaactatgcaatggcatgctttttcttcacgaggctttaccgaaaattggccggaatgttggaaacacccttttatggcaaaaaaccatcaaat

SEQ ID NO: 72288 - DNA, 96 bp, Heterodera glycines
ctaacctggaattgctggttgatggactacgtgttcacgtcaatgccgctcagccagcagccgtagccgggtgggactggtaccagtcgaccacct

SEQ ID NO: 72289 - DNA, 1062 bp, Heterodera glycines
atgaataaattgaaaattttttttgaaaaacttgacaaaaaatacttggaaaagttaaaagagttaaaagagtcattaagtggacatctgttggaaatattgaagaacatccacacggattacacaaaagccagccaaagagaagcaagcaaaaatggaggaattctgttgacaaattacagaaaagaaatgttacgatttggacaaattttatacgaaacaatgaaaaaaaatttggcaaaaaatatggaatatgatgaaaacaaacaattgttaacttttacgctatcatttgccaaacatttgcttgggcggctgtttgaatttgtcgaacggtttgtaaatttgagttttcttggcctaccgtgttccctcgattagaagccccccccccctcgaatataagccgcctaaattttttattttagaaatttcaaagagaatttcaaagtcagtgatgacatggattttgtgcaaacaattcgagcagttgcctcgaataacgaagaattagtggctgaaaagcggcaaaagtcaatttcggctggggtcaatgtgaaattgtccaagttgcttttctcattggcaatccgtttgtgccttctaattgatggacaagaatttcgagaaaaatatgtaccaaaatttgtgttcgcgctgaaaatgtgctcaacaaacactgggtaaaaaggaccaattcccattttaattgaactttacataaaaattccagtggcagggaaattttcaaatttaataatataaaaagccattacggactagggatgtgcgagagtctcggtactggactcgagaaatttcttgggtttttcgcttctcggtctcggatttgtagtctcggaaaccgagaaatttttacactgtttaaggatgaccatgacgggggggggggcgggtcaccggtcggggtcacttcgcctatgttttgttggattgaattgccatttacgactttaatttttgaatttccatggaaatttaaatgataggcattaaatatgcgcaaaaatcctcgaataggcacaaaaataggcaaataaa

SEQ ID NO: 72290 - DNA, 704 bp, Heterodera glycines
gttttcggggcagtccccctgaaccgatgcgcccagatttatggggagaccgaatccttccggaatagcttccctatagcctgtactttaattctgcgttggatttttgctccccataattgtttgagtaccccaaacggacacttgaaaaaatcgatttttttgttttcggggcagtccccccgaaccgatgcgcccagatttatggggagaccgaatccttccggaatagcttccctatagcctgtactttaattctgcgttggatttttgctccccataattgtttgagtaccccaaacggacacttgaaaaaatcgatttatttttgttttcggggcagtccccccgaaccgatgcgcccagatttatggggagaccgaatccttcgggaatagcttccctatagcctgtactttaattctgcgttggatttttgctccccataattgtttgagtaccccaaacggacacttgaaaaaatcgatttttttgttttcggggcagtccccccgaaccgatgcgcccagatttatggggagaccgaatccttcgggaatagcttccctatagtctgtactttaattctgcgttggatttttgctccccataattgtttgagtaccccaaacggacacttgaaaaaatcgatttttttatttcataaatattttttcagaaaatgctctgaaacgcaccaaatt

SEQ ID NO: 72291 - DNA, 1847 bp, Heterodera glycines
  unsure (1)..(1847): unsure at all n locations
gtactggaatggttgcgcaaaaatgcgctggttggcgccacgctggtctcggtgctgctgggcgcactgctcggcaccgttgtacggcaaaattagcaatcgctgattgatcaaaaattaggctttctgatcagttgggctagtccgtaaaacggaatccaaactctgctgatcagcccgaccattggtcggcattaaaaacattttgattcgatgaataccaaaattaccgatgcagattttttggcattttatcgtacaaaattgggaatgaacccagtaaaaatgtcgacaaagaatgtcgccgataaaatttaaactatatttcgaataccaagcatctacccgaattgattgaaatttccaaaaaaaaacgccgatgaaaattttgggtgcagcccggaaattcgaattttaaactggatattttttatgccgtttttaaggggtatggattttccggttcttagggtatgggatatatatgaggtttttatgctaaaattatttataatatatttttttttttgcagattcgttatgccaacccatccttacagaccattatgctgttgacatttccaggagaagtaagctgtggagagagagagagtgtcaaaaacaattaattaattaattaaaataattatttaattaattaaaagacgccaaaaaattttcattgtaaataaatgctcacaacattacaatgcttacagcttcttatgcacatgctgaaaatgatgatcatcccgttaattgtggtcagttattattattctcgaaattaaaatagtctcttaaattaaataattaactaattaattaaatgccccaatttgttaagtcctcgctgatctccgggttggctcagctggacgccaaacagtccggacgtgtgggaagtcttgcggtcgcttattacttggcaaccaccgcaattgcggtgatcaccggcattattttggtaattaacagtagggttaagccccgaccccgagccccccgactcgacccgagacgttttttggacctattccccgacccgacccccgacatgtcgctccccgaggtccccggctcccgacattttgccccccgagggctcggggcttaaccctaattaacagagtcgcatatgcaaaataaccagggaatgtctcggcatgccgatttccgattgccgtaattttttgagcgcattccacacatgtcattgataagattttccaccgctcttcaagaagcaagccctggtctgtgccattgttttgcatatgaatggcatatggcggcgttatttaaatttgtgtcaaaaaaccatcaaaatgagaattttttttgatataattttagtcaaaagcaatcaaatttttattcttgatagcattcgatagcgccttaagtgttttcaattatcatgctgcaaaattccaaaaaatttcgttaaataccaagaaagttatgactaaaaattttcagaaaattttgagtttctcagtgctcataacttttttggaacttaatgaatttttttgaaattttgcatgataatagaaaagcttagggctatcgaaaaatatcaagattttaaaatttggttcatttgggcgaagttatgaataattttttgtcaaaagtttaccatttgatcgttttttgagtaattttcatagcaccggatttccttcatctccatggtccatttgtcaaatccgttggaaaggatcaatgccatgattttaccgggatctttttttttaccgaaatctcgacaattcgaaattttaaatccaataatttccgtgttgaattcgcgnatttttaatccctgtcaagacacaaca

SEQ ID NO: 72292 - DNA, 247 bp, Heterodera glycines
atggccggccgggtccaccacgactgtcttgcgcgactgattgttagtgccattggtgtcgcaggcggcggcgaaaattgccacttacaaagggaggaaattaaatgttttttaaaacaattaaaatttaataatttggtaataatattattacagtgttggttttgcaacattcgtatggaaatccgattcaagtagaaacgatccaagaagtactgaacaaatgcacaaatcacaaatgaataaa

SEQ ID NO: 72293 - DNA, 80 bp, Heterodera glycines
atggcactaacaatcagtcgcgcaagacagtcgtggtggacccggccggccatgttggacacattgacccgcagtgcaat

SEQ ID NO: 72294 - DNA, 276 bp, Heterodera glycines
atgcgtctttgggccgcttcacttggcttttacgtttccattgtcatattttgtgaaattttgcgcggatttgcatacagattcgagctgcacacacagattggtggtgaacatcatcaacagtttacatctttgatttatgaggtgggtaagttgaaattaaaacttttttttaaagcctttgttaaattgagaattgaaaaagctcaagttttagccgcttcaaacacttctgatcaacttctttcattctctagatcgatttgtctcatttga

SEQ ID NO: 72295 - DNA, 49 bp, Heterodera glycines
attgaaagccatccattgcctgccggttctcggcacagcaaagaactaa

SEQ ID NO: 72296 - DNA, 1079 bp, Heterodera glycines
atggagcccttgtgcccaatacatattatcaatgcatcagaaggggaaccatttgagtatcagagtggcactaatgaaacagaggatacagacgatctagatgctcaaatcaaccaaacaaaacgggatgaactcctcgaagttcacaagaaaacaatgtataagagtaccaaattttgggaagtctttagggatgactatttattggcattaagggaaaaggaaaaggccaaaaatgtggatgaacaaaggtttccaaaaataggacaagtggtactaatcaatgatcaaaaaccgtgtcctcggaataaatggaaattaggtaaaatagaaagtataatcaataacagaactgccaaattaaaaatgcccgacggaaaaataatggaaagggcgacgattttattatacccactggaaatagagaccctcgagtctgaccctaatcccattaatgaaatttcagcgttaacaatggaagacacagttagtttggcaagcatggaggaagagtggtacgaaattttggtttctcaaaaccttcagaaagaattggaaaaagaatggagcggatttttggacatgcaatttaatacccgcccgtatcccgaatttggatgctaaagtttcaactcaaaggggatctctcaagatccaggttggagttggaaacattttgaatggttccggttatttaaacacattcggttggtctctcatggctatgcattatgttgagggaagaattaaattaaaggggattttagagcagaagcaaaatcagttcctcgaggctgaattaagtcaacttggtaaacccgttaaagatcaagtttctgtttttcggggagtgtccgaaacacaccccttttcggaccaatttactcaccatttcccaaaccaggagaagtcggacatcggaacaagtctcaacttggcggagcgaagcgagcaacgaatttgcgacaaggcggtcaacgagagcggcacaattggacgggacggcgcaattgaacgagtgaagaaaggaacgaaggaggatggcgcaaatggagagaaaggagacaacgacgaaattg

SEQ ID NO: 72297 - DNA, 3101 bp, Heterodera glycines
atgagcaaacagttggaggagtacggggagcaaaaatccacttcaattagcaccgcaaaacgattagccgaggtgggaaaagcaattaaaaatttttaattcgtgaaaaattttcaaatttttccagtttcttggcgctgacattgtgcgcagcaagggcagcttggcgtgcagttttgtgatctcccgtttcccgctgggcgactccgtctcggaacgcactgtcagttctttctggaacagccccgtcgttctccatccttaaaattttaattacaataatttacaaaaataaatataaatttctttaaaaaatattttttatatttaaacgaataaatatagaaaaatctttcgaattattttgaaaagaagaaaattcttaggaatttgtcaaataaacaaattttttgagttttaaaaaatttagggttttggcttaaatttaaaaaaatttcttaagtcttgctaaattttcaaaaattaattcaaacggagtggaattaagactcccgtttttgcaaaataagtaaaaaaaaatgtacaaacaataatgtgtcaatgaacatcaacatttcagcttccgttggccattttcgacgcggcgcccaaagagcgcgtcaaattcttgcgcaaatggaccaaagcgaattcgttgggcgaagagttcgggtcggacaaatgtctgaaggaggtgagcttttttggtgtcacctttgtggaattaaataaattaaaaaaacaaaaaataaataataaaaaagccaatttgattttccccgtttttttttgtagctgatcgactggcaatactacattgaacggttgggcagcaccatccaaaagattgtgaccatcccggccgcgttgcagggcatctcgaacccggtcggtcccgaccatttcgcccgatttttttccctcgggttcgaacccggtcgatcccgacgatttcaaccgattttttgccccggggacatttcgatttactttatttcattttcattcctttttcgcgcaggtgccccgtgtgctgcacccgcaatggctggagaacaagcggcgggaacgcattgaaatgcacacacagccccggatcacggacatgttcaaggtcatcagatcagaccaccccgactgtctgtctgacaaccatgggggctaacttacattgataggacataatcctgcggatttatgccgagatttatcagggacttccgtccgtcgacccacggaattgtcggtgcaacgggggtcgggaattcggaaaaatgaacgaatgcccaacaaaatattaatttaaaactccacccacagtctgccaacgcccctgcttccgtcgtcgtccgtccaatgccaacaacgccgggctctgctggccgaaagagtcggggcgcctccgtccatctgacgccgtggtcgttgaagaagaagcagcagcaccagcagcaatctccgctgacaccgacggcggcggcgacgacggcgagtcgacggaagcgaccgttgctggccacaagtgttgatggagatgaacaacaacagcagcaatgtcctgatggtgccagtggtaatggtggtacttaattattattttttttttgtacatgcttggcgccatagtcatttgggatttggttgcgggaattttgttgaacaaaactggcccgtgaaaatttagaaaagaaattaaccaaaaaaaaaacttggaaattattagaaaccaagatattctaaaagattttacgaaatttatgatttattgagtattcaaaagttttttagtttttcttgacatacaatttgacagaaaaaattttctaaaagggcttttttcctgaaaaattcttcaattcttgtctatgtgtattcagtttcatcaaaacgcatttgtgcatctgctgatgttgttgttgaactgctcgaggacgaggaggctgaaaatgcggagaaccgtcgaccaccgcctgcccaccagccgacagggcccatggatttggtcgcgttggacacactgttggagcagcagggtcacaaccaacagccggtaattaattattatacaattgattaattaatatccatctttcatgctaattgtaagtgtatacatactgtaatgaccgtattttagcaaaccgaacaagaaaggcgcgcggaagcagtgcaaaaaacggcaaaaatggacaagaaaaagagcgctgcacagctgaaaaggtgtgccaatcgaaaatgttccggaaaaatttcggaaaatttaaattttccagggaggcaaagcgtgcggctgttctgcaacatgccggccgtgcatttccccggcgctgttacgccgcaatgagtcagccgacgaaacggagttggcacagcgacggatttatgccatgggttggtcggaaaatgcatttttatgcctttttaaatttattttttcaacatttagctcgactatctgaaggccaaatggcttctgcagcgacaagcgcggaccaccgcgttcaatgaggcaaactttgttcaattttcaatttgggattttaaattcattttaatccaagattatcattttatatgataattttatatgtaattgactcgcgaaaactgttttctaactgttaaaaattttcatttatgctcggtctttttcggattcactaagaaatttaaaaaaagaagtaaaaattttcaacgatttttggaaaattttttgaaaaacagtatttcatcataaaattttgaaaaattctctagtttgaaatttaaacaaaaaaaaattccggggagagagaacgaacaaggaactgcttccgtctttttcagtccctcgggattttaaatccccatttaaaaaaaaactaaaaaatgtttaggcacttttggagcgggccatggaagcggcggatgatgcccaagcagcagctggaacagatgccgattccgacgctgttcgcatcggcacttccgctggtggtggtgccgtcgtccatctgtcgactgccaccgccgcggcactttcgttggcacgccgggagagcacttggcacattttgcaggtacacaacgcacatacacagtcaaaacactaccgtacctaa

SEQ ID NO: 72298 - DNA, 231 bp, Heterodera glycines
atgccaacgtgtgcagcacgtacagtcccatcagtgcaccagcgagaaggaagcggcacggcgcgtgcacgcgctgctgaacgcgttgaaatgggcgcccacggagccggtgctgctgtgcacgctgaccaaccgaccgacgcaggccgagctgttcaaggtgttcaccacagcgtttgggggagcatttttacgaggaaaaacggggacggaacaaaatctcgtcgttga

SEQ ID NO: 72299 - DNA, 205 bp, Heterodera glycines
atgcaacactttttcaacagtttcacatttttgaaggtgagtgagtgaaaatgcgattaaaaacatttttcctaattttcataattaaataaattaattctcaaattttaaatgattttttgtttgccatttaattcgataattatttttccaaaaattaaattttcagacgaaatttaaaaatgcaattataattattatttaa

SEQ ID NO: 72300 - DNA, 664 bp, Heterodera glycines
atgactcaacattttcattgtggtatgaacgatacggtcagtttgtggaaaaggatggtcaagccccttccgacgatatgaagatccggttagttttgggtaaacttccggcgactgaattcattcgtaatgagcaacaagtgctccccaaaaaaactgccgaattaagttttcaggaaataatcaccaatcttaaggctctgttttcagacacaaagtcagtgtttgttcgacgttttgtgtgtttccagcggacgtgttcaccaggacaggacattctcgactttggagcaacactgaatgccaaatgcgagcgtgccgacatgaatttgtcaaaggcggaaatcaaatgcctcatctttgtcacaggtttgggtgaaatgcatcgggacctccgccccgaatgccttcggcaaatggagaatgcgcggaagacgacaccaccacgtgacatcaaattggagctattgttggaggaatgccgttcaattcaatcattgcaacactcagctgcggccctcgcaaatcctggtcaagttcatgctattccgagtaagccaaagatttgagtgacagagccaaaaattggccatcaaaaccaattcaatttcaaaaattttcgggcaacaacaattatggaagaaataatggttttcaaaataaa

SEQ ID NO: 72301 - DNA, 565 bp, Heterodera glycines
atgggcggaccggtgggaatcgcggccggctcattggtggcagggattgcggcagccgtagggggcgcttttgcaggttttttggaatttcctcaattttattactatttaataaattcactatcaataataataataataatcgaatttgtgccggactgacaatttgaaaaaccctttttttcaggcctttacggagggcgtgtgctgcaacggaaagtgaagcaaagtacagcagtcgactcgcagcaatcagttgttgtcggcaacggcgcagcacagaatgccaacggtcgctaaaaatggacttgcgcaggatttgggtaaacaaacagaacggggaaaagattcgtcaagccgatgactctgtcgatgtttgtctgactcgcttttcactcatttcgccgggtttttcttattttggcttatttctatttcttacgacccttcaaaatgtataaatttatcagacataaaggacttatcataaattttctttaatactagtaaaaacaagtttaaaattgtttgctgttcacacctttcgaaagagagagatgaacca

SEQ ID NO: 72302 - DNA, 315 bp, Heterodera glycines
atgcgttgtccacgatgttctgggccacatccgattggatacccatgttttatacaacctctgaaagatgaaacttcgagcggaagaagaagtgagagaagaatgcgacaaccaaatcatcatattgataataataataatgatgatgctgataatagtgttaacgatagaggccatgatgatgatgatggtaatgaagtggaggaggaggagcaggaagatgatgatgacgcaaacgagtcaaaaaaggcagtcaggctttgtttttttgatgctgaaacgtcccaggatttaccacttcaacttcgcaccaag

SEQ ID NO: 72303 - DNA, 273 bp, Heterodera glycines
cgcctttctggaaacaatagttaatctgacagaacatgtcaagtctgcctggatgtcattgggtgaggattttgcctaggaagcgcttgcacatttgaaacgccttgtcatcccgcattgattcaacaaattaatgaactccgaataatgtgccaccaattattaaacaatttaaaaaattgacatggctttttgactgtaatggattattatttggtgaatcaaacaccacaaaaattaatactatcagaatatccaagaacaaaaaaaaaa

SEQ ID NO: 72304 - DNA, 666 bp, Heterodera glycines
atgaaacgaagcaacacgacaaaagacactcctcctcaaccaaaacgctcaatggcatctgcaccggactcgggcccaaacactgcggcactcgctgagcaagaacgccaacgcacattggtgctcattggcctcccggaaagcaatgctgttcgcccatcgcagcgtgttaaagaagacagggaagccgtgactaaaatcttggaccatcttgatgttgaggctgaaccaaccgccgtctttcgactcggccggttcaacccacagcgaacaacacctcgcccgctcaaggttgtcatgccaacacccacacatcaacacatggcacttggaggatggaagcgcgagcgtgctcaactccgttctcaacaaaacctggcccgcttgttcgtccgcccagcactgaccaaagaacaactcaaggaggaaaacgaagcgcgcgtccgaaaacgtcaacaaatcccagctcccatggcgccggcagcgcagctcccacagacaaatgttccgactcccgtcaatgaaaatgggtcagaacagaaggaggcggcaaatggatacatttccaaaccgcagaaccccgttgaagaagaaatcctcttagacaaagcaatcagccaaatgcaatccttccgaaaacaattccctcaattatttaataaatag

SEQ ID NO: 72305 - DNA, 425 bp, Heterodera glycines
  unsure (1)..(425): unsure at all n locations
atggttttaattaaggtgtggaatttgacaacggattaaataaaattaatgggttgagacagcggatcaacctgctaaaaaggaagacgagaagatggaaaccgctgaagatgaggtgcacaagattatgcagagaccgttactttattatatttaatttttcttaaatttagatcgatgctgaaattttgcaaatggtctacggaccaaattcgggagcggtcgctgttgctcgacaacgaaattcgcataatgcgcagtgaaattcagcgcattaatcacagtattcaaacactcaaagagaagacaaaggaaaacaacgaaaggatcaaagttagtttcattcgaaatattcgaataattgagttatcaatccagaaaaagggtgtaccttattatagctctgcgcttatnaatcgattaaa

SEQ ID NO: 72306 - DNA, 1207 bp, Heterodera glycines
atgatccatctgagtgtgttggaggtcggccgcgtgggcaacgacggcgttggcattgtgcaactgcacaacactttcgacttcggcgcgtcggacgcgcggcggacctgcgcttgttgtgccgttctgtgtgcttccgggtgcgggtgcggccgtttgctggcggaaggcaagtgccatggcatcggaagatgggctaatgctttaatccatcaaccccaattttaagagaccatcttcaactacgcaaagaatggcatcgctgcaaagtttgggagcggaggccgaggatttgggcggagatttggtcgcaaatggcgcaagaatggaagggacggacgcctcgaaacgattcgcgaagggacgtacggaagagacacggcaatcgaacagaacggagagagggcgggacacgggacggtgcagagaggcggcagaagacgaggagtgaccgtcagaagaaatgagatgcagcggcaggagcaatcgatcggccagagcgacttccgtcttaaagcgatcagtggacaatgcgacttccaatggcaaccgatcggatgggacgacgtctttcagcgagaaatcgccagaggcaactcttttgtgacgtcatttggaagaattgacgaagaacgtgcagaaaaaccgcagcagtcggtccgtggaaggggaggaggacgcggacgaagtgcaaacggcggacgggggagacgcggaaacggcgccgggcgcggatggtctcgcggagcatcgcgaaactttgaccaaggtggacggactgatcactaattagtgctaatccccccccctcccttcagaatggcagatcgatggtccaattgtggcaggcgtctcaagttccaagtcgggcagtggcactcacaatgcgcgttttgtccgtcgtgaattgcgcagggactccgtcggcaacagctaccgtaacgacagaagggacgagcccaaactcatctaccgtagccgtaaagaaaattcgaacgatcacttttttcactaatattcggcatgaaatgttatgtcaccttttaatattccgtcgttttgttcatattatttgtttctccttatctatttgttgttactcatcggcagtaatctttaccctttaatcattttttcttattgtttgtctctttttgttttatccgtttttttcacttatcaccactaatcaacaaaggagaggcga

SEQ ID NO: 72307 - DNA, 214 bp, Heterodera glycines
aaagagctgcctaggacttgagttataacgtgatgaacatttgaaactctcacaacttttttctgagatgtcaaattgcttagcattcacttagaaaaagattctccttttcaaaatctttttttagataccaaatttgttcatttttgttgggaatgaagcgtattatggctgatcaaaataaaaaatacaaaaaaggcatttaccagtgtaa

SEQ ID NO: 72308 - DNA, 599 bp, Heterodera glycines
gttctgtcattgctctgctgattttcggcataatttgcctttgttttggcattttctctctcatttttgtgcccaaattggtcaacaaagcgatcagagaagttggccaagggaattaaatttcaaaaaataagagttttattaatgcacagaatgtttttgttggtcggtttccaaacggaagtgataatttcgcaatggaacagtacagagacccgaaatacgacgtaaagtgagtgaaaaagtaaaggaaacaacggcagaagagaagtctaaccaccggcggcggtggtttgttcatctaccgtacccccttccccgccccaaacgaccgtacccacgcgccaaattaacacatttattattattcattaattaccatttgctccattaaatcaacagccactttaggatgcagatttgggtcttttctgtgcaaaaccctaacgaaattgtgaataaaggagaaaaagcgaatgtgacggagttgggtccgttcacttacgagtgagtgccgccgggcggtcgaatttaagtccaatttttgagtattcgaatcaaagaaacaatgtgaagtttggctccaatgactcgcgact

SEQ ID NO: 72309 - DNA, 1161 bp, Heterodera glycines
  unsure (1)..(1161): unsure at all n locations
caaatttaaaaattttcaagagtccccaattccccgagctattgtcgtggggtcgggggataaaaaatcggaggtagggggcttggggtcggggagcaaccctattataaacccccaaaataggtgctaaaaatggaaatgagataaaatattttaaaaatcaaaaatgtagtcaagtaaataaattttgaatatgaatttttgataaaattttccatttctcaggggtgtatttttcgtttttattgcatttttgttaataatttttttcaaaacagcagaaaatattttacaaaaaattcttcaaaatgaaaaagagcacaaaaaagcaataaatttattattattaacaggttatatcgctccaatttgattcgggttttttcggtcaaaaaccgaaaccgaaaaaaaccgaaccggtccgatctctattattaactatccgaagtctctgtttaatttcagatcgttgctgatcatttggtggaattaaagaaacatttgtcgccgatcgctgctcaaaagggcctttctaaactcagttttatgcccatctttgtcaaggccacttcgctggcattgaccaaattcccccgtcttaatgcgtcctttgacccgtcacacgagcaactcattttgaaagtaaatattatgggaaattgctaaaatattgccaaatccaatttaagcgtttccacaacatttcgctggccattgatacgcccgacggtctcgcggttccgaacatcaaaaactgtcaaaagaagaccatttgggaaattgcatccgatttcgagaagttgtgctcgcgggctcgggagggacgactttcgctggaagacctttccggcggaacatttgccctgtccaatgttggatcggtccgtctttcgccctctttctttctctgctccctcctcccctctttttctttactttgctgtactttcctcccctttttccccacagatcggtggtacttacatgagtcctttgttactgcccctcacagttggtcattggtgcaattgggtcaattcgtaagattccacgttttgacggaaatggaaatttggtggctacgcatgtggtgactttttcttggtcggcggcccaccgggtgagtgttggttgacanaattggacgaaaattcactttca

SEQ ID NO: 72310 - DNA, 156 bp, Heterodera glycines
atgttcatcgcgttcggccccaccatgggcaaaatttggttgccggtcggctgcgagctttgctccactcggacttgaaccgatccgagattgccgaatcgcaccggcactgcggcaaggtgcaggacgcgtacacgttgcgctgcgtgccccagg

SEQ ID NO: 72311 - DNA, 771 bp, Heterodera glycines
atgattagaagaggtacaccagagatcagaagaggtacaactgtgattggaagaggtacaacagtgattagaagaggtacaacaatgattagaagaggtacaacagtgattagtaaattcattaaattaaaatgaaaatattttttaacaaatttaatttaaaaaatacatgaaattctatcaattaaaaaaataattcatttaaacttataaaatttattcattaaaaaaaaattaatttaaatataattttttatttattaactcaaaaaatattttaaatgaataaaaattgaaaaacacgaaaaaaatggtagaaaaataatgtacaccgcccggcttcgaacttcgccccccccccccccctcaaaatgatgcctcagaatccccaatcacacagggattctgaggccttaacgatgtcaaaagtaaaatctgatcacgtattcgtgatcagcggcccaaataacccctaaaatcatatttttggaatattttggtgaaaaaatttttcaactcaaaaatcctatgctcacccctttggtccctaatcccaaaatcggttttatttttgtaacaattcgtaagaaagtgataaaaatgtaaaataaaatttatattataaagaaaaaaattgcggatttttgtagtattttaattttcaaaaatttcttttcagaagggggttatgaatttttttctgaaaaatcgaaagttttcagaaattctggaataacttgttttctttttaagatagaaatcccaaataaa

SEQ ID NO: 72312 - DNA, 464 bp, Heterodera glycines
atgattagaagaggtacaacagtgattagaagaggtacaacaatgattagaagaggtacaatagtgataaaaagaggtacaacagagattaagaaaggtaaaacagtgattagaagagatacaacagtgattagaagaggtacaacagagattaagaaaggtaaaacagtgattagaagagattcaacagtgattagaagaggtacaacagtgatagaagaggtataactgtgattagaagaggtacaatagtgattagaagaggtacaacagtgattagaagaggtacaacagagatcagaagaggtacaacagtgattagaagaggtacaccagagatcagaagaggtacaactgtgattggaagaggtacaacagtgattagaagaggtacaacaatgattagaagaggtacaatagtgataaaaagaggtacaacagtgatagaagaggtacaactgtga

SEQ ID NO: 72313 - DNA, 331 bp, Heterodera glycines
atgggaaggtaaaaatcactgaaaaatatcttttaattttgcctcatttttcagctttatcgactttggtttcgccgttaaacagcaaacaaaattggatgaagaaatttttgaccacaaaggcaattatgcatatgaaagcgatggcgagatttggattagcggagaaggcaaaggaataaatgccgaatattcctacggcgctggcgataccgtgggaattgccattaatttgtccactcggcagatcattttcacaaagaatgggcttcgtttgggttggtttgcaagtgtttttcactactcttctgatccatggaaaatgaaataa

SEQ ID NO: 72314 - DNA, 765 bp, Heterodera glycines
atgtttgctgaaaaattgtggtttttggaattccgagattccgatcccgaagtttctggtccggtcaatcgccaatcccgtgcaaccctacttcaaatatccagcgtatttaacgtaatttgaacattttattattaaatattagatttaattttattttcaaaagtattattgtcgttcccttgttgctgtaaaacatgttcccgtttcagcgcttcatcgtccaacttgtcaacattcgcctttaatatttacaaaaacaattccaatttgtatcgagaaaaaagatgcgccaattttgagctaatttttcagattaaattcatgttttttttaaaaaaagtgatttcacaccgacagaaattttctaaatttttgtgaatttcgatgattaagccaaagtgagaattattgtaaatctgattcgaaatagtgtggaatttttcatttggtaatgccatcgttccactttctgtggcgcctatcggccattacccgaaaattttcatttgccttcatcatagtgtcacttattttcctaattaaaagtgccgacggaattttcgctccgtgctcctcccataagccaaaaaaacaaaaaacaacaacaattgcttaaatttttattgaatattgagccggatgtttgtaaattattttgaaaaagcatttttatattttagcacctttgaaggttcatcaaagtttggcactttaccatcagcaccagtgcctacgccatttgtgcattcatagcaaagccaa

SEQ ID NO: 72315 - DNA, 208 bp, Heterodera glycines
  unsure (1)..(208): unsure at all n locations
ttgtttgaaatcaaagtgccgatcccaactttttggcatttcttatgcccggttttgttttcaaaaattccggtcccaaattactcattttttcncaataatttatgtatttttaaatcagacccatcattttttgacccaactgaaccctgcccacccgcgcagttcaaaccgtccgttgcaatcgtcgggaatcagcggatttttt

SEQ ID NO: 72316 - DNA, 538 bp, Heterodera glycines
atgcaaaacttgcaacgcgtgcgccgataccagcgcgagttggaggacgcggaaggacgcgctgaccaagcggagagcaggtgatgaacaatgaacacgtcacggggcattcactgattttggctgatcaattgatcagaatgtataattgggcttgattagaacatacattggaatttaatccatgatcactaatcggacggtcaatgattatttagcttgataaaaactttctttgaactgatctcaaagaactgatcagattttccattacctgattaaggcacaaatcgctattgtaattttgaccaggactatgatcgagatcttatcagagtccgatcattgaactgattacctttaatcaaagcaatcacagacaaatctaatcaatttcaagacttatctgatccccgggaaaaattattttatttgcttgcttttcagtctccacctgatccgtgccaagcaccgttcgtccgttgtgaccaacaagtccaactcgccgaaggtgtacgtgctggaggacgagcaatga

SEQ ID NO: 72317 - DNA, 893 bp, Heterodera glycines
ttccaacttgccgtaattgttgggaacaatgcatgttttgcgcacaatattttcagcaaattgccgaagagcgtaaaggcaatggtaattaattgatgtgatgtaataaaaatccaaattcgaaacccaaaacaacccaaaataacagaatttatttctatgaaaaaagaattcaaaaaattttaattttttataaaattacgaataaacatccaattactacatatcaagagtggcttcaatgggccaacatttgcttcatcaagtgccgaaactgtagcaaaaatgccaaaatttttgatgctgcccgggtcaggcacatctgattcatcacagctgactgaaaaaagcaatatgggcattccaggtggaaaatatccaaattaaaatttagtttttttccttttccattaaggtcctaaaaaattcgaatttcaatttttcttaattaaaaaaacttaaaattctaaattttttgttgcgtatttcttgtaaaaaaataattaggcgaatggctaatgaggattgacgaggagcaaattttcttatgtggtgccggctttcgaggaattggttcgactttggaagaagttattttcgctttcttccaatttaagaatgtgttgattcgtgtttgccaacccaatggcacttggattggttgcaaattcaattaatttaaatataaattctttttttaaagttcacgccagtgccattgtgctgatgggtctgcatgtaacgtggtgaccggcgaatgcccaaatgggaaatgcaatcctggtaaaaatggataaaaaattaaattgtaacagtagaaaatttttatattccaatcatattttgggtcaatcattgactaatttgtatgaatcataagcgtaactttaaat

SEQ ID NO: 72318 - DNA, 742 bp, Heterodera glycines
  unsure (1)..(742): unsure at all n locations
atgtccccccagttgttacatcctgccattctgtcccgnctggtgctgaccccggccattctgcacccgacagtgatgtcgcccactgtgctctccccgttcgtgctaacgccgcaaatttctctcccaaatttctgggcggtcttttcctctcccctnacgcactgtcccccgtttttaagtcgccccttttcgtttattcgatcgttttgtcgccgagttggctgagctgatcaaaaattgccttcataaatatttgttgttttccaaaaattttatacagaaatttaattttatttttcgtattattttattttttttcttcttaccatcttttttttgtacatatttttttcatacatatttattaaaaaatttaataaagaataaaattgcaagggaaatacccaaaaattttacaatgtaattttttgtattttacgagtgaatgttacaaaaataaccgtttctacaatattttacatgactcttaaatatcggctatgtttaattaataatttgcattttttctttttattatatttttattacttttcgttcgaattcgactcaaatgactgtggtttaaaaaaataatatttttgatttgtaatattttagtgaacagttcatttctcgttttccattttcggtataaaaatcatttcacgcatatccaccaaaatcggtaatttgtggatttacggaaaattttgcggtcgagatttccgagacttcgtta

SEQ ID NO: 72319 - DNA, 735 bp, Heterodera glycines
atgtcaaaaagtttcataaatattattattcaatttttatttctgctatgcttattttataattttgctaaatcttttggcgaaaaatccgcaccaaaccctcagcaaagtcctaatgtatatttgaatataatttcaaatttaatgggtataatcacgtgattccgttgtcaaaaatgtttttaactaaaatttcattttgggatgccaataattagggactgttaattaggtgtatttccaaatattatatttttcagtccatcataaacagttcctcagggaattatgaaagtaaagcacggattaatgcagaacacgatttgaaaaatttgccaccgtaaataggaaaaatttgaacacatcaaaaataacataaattttaaattcatacaatttttctgaaattttcctcttaattgccaaaatgtgcactaaaaaaacgtaaaatggcaaattatggatttattctacataatatgaattttttataaattataaaatatttaatgaaaaaaaactgccgtttttgcattttagttccaacaaattccatccgatgtcttgtcagttttgtcaaaagatgttgcggcacaactggaagcaatacaaaacaatggcacattgactgtgcacgaaaaggcggaacaaattgaccaaattatgactgagcagcccagcgaagtgttggacaaaattccggacccgcccaattttggcactcttccaatgaat

SEQ ID NO: 72320 - DNA, 321 bp, Heterodera glycines
attttcggtaggggtcaactccgtctggccttctccgtctcagcaatgttcaaaaagctataactttttctttgttggccaaacttcacaatcatggtatcattcgaaagccctagatgtttagaagatatttataagctatttctcagtgattgatcagctctcaaaaaagttgtcagttgaaaaccgcaaaaaaggcagaattttcgaagttttttatttctatctttttttatagttctaaattttctgtaatttttagtaggctaatagagcctgtgaagagctttcgaatgatatcaagattgtttgattcagtca

SEQ ID NO: 72321 - DNA, 205 bp, Heterodera glycines
atgcgttggaatatgaactgcttgattttatttaaaattgctcataatcacaacattttttggcaaaggtgcgcctcaaaaagcagttttgcaaataattttttatttaaatgaatagaggaattgcaaatttttggtttccagcccccttggtttctttgaaaaatcttttggatatttttctagtgattaagttaaaatttaa

SEQ ID NO: 72322 - DNA, 82 bp, Heterodera glycines
tattacttcaatcgggtaatagtaactagagttcgacctggacctggatccaggcctggatttttcctggatccaggtccag

SEQ ID NO: 72323 - DNA, 146 bp, Heterodera glycines
cgcagctccatggagccttacagtttgacgtttcaagtcggagcgccttccaacgaagaatacaaatttaaaattatcgcgattgatgcgcgcggggaggaactgtgcaccctcccccgcgtcaccggccgcctccttccgtagtt

SEQ ID NO: 72324 - DNA, 1016 bp, Heterodera glycines
atgaaatattttatgaacatttttatttgttttatccatttttacgaatgtcaaacgattgaagaggatatttttgaagaactttggaaacacataaacaaggttgaccacaaatttgaaagtgaaagtgtgctaccaaaagtcaaagaagagccaatcgaaattgccaaaaacggagtgccaacaatcaaaactgaaccctatgaattgccaatgaattatggaaaaactgtcgtaaaaaatgaaccttgtgaaaatgaaatgccaaaaactaaaaatgatcaacaaattcaaagagaaaagactcatttgacaaattatggaagaatcgtaaaagtaaaaaaggaaaaattcaatgctgaagagcccctgtataaagaagaggacaatagggatttaaaatgtgaaaatgaatgctatgaaaacagttcaacaggtaaaattaaatttaaataattaatcagatgtatttataaattaggatcagatacgaccgatgataattatgaaattgaggaaagtgctaatgatgattatgataacagcgaagatgatgctgatatcaataatgttcctaatgagggtaagtcgatttttcacatttagaaattatgattatgaaatttttctttaacagattcctcgttgacagatagtgaacaagaaaaaagagtgcatttaacaaaaaagagattaagagggattttcactaaaaaagatggcccaaaaaatggtaagaatggagcttggatttgagtgagaggatggaagaaatacattaatttttaagtaaaatcagttgagtattatatgaaattgaggtaaatttcctttttttatgaaaaatttgctcaatatttagcgattattcttaaaataatctacttttggaaaatatccttattttcggggttctttcgtctaaaaaaaaccttttagccaaattgttccgagcaatgagctccacggaagagaaagtgcgtttggctcaggcaaaagcaaccaaaagtacataa

SEQ ID NO: 72325 - DNA, 328 bp, Heterodera glycines
atgggaaagagtttttatgaggagaaaaagaaagaattcattgaacgatttgatgaatttaaagatttatatgcccatggcaaacagaaagaatttgtgaaggaattgggcatttctgaagtgacattttggaaatggaaaaaagaattggcaccaaaatacgataaaagtaaaagtaagaattattttagtgaaattaaattgtactttttctttaagaacgtcgtaccgatgaggacgaattgatgaagatgaagcgatattttgaaataaaagaagcaaacccgaagatgagtgacgaattaattccgaagaaatgggaatggaa

SEQ ID NO: 72326 - DNA, 331 bp, Heterodera glycines
atgtacctggatccagccctgtatttttcctggatccaggtacaggcacaggccatttttcggcaacctggattttcctgtacatttattttaaataaaatgcatattctttttttctttttacgattaaataccattaattttaaaacttagcggtcatttgccccgcctgcgggcggcaaaaacattgcattaaattacaaattacacgcattcactataaaagtgaaaatcaacggactggaaaaaaagccaatgttagcctattattcaccagtagaagcagtgtgtttcaaagtagagaagagctgattttattttaaaaaataaa

SEQ ID NO: 72327 - DNA, 1459 bp, Heterodera glycines
atgggaaatgacccaattgatcaaatgaacggtttgaatgatcaaaacattctcaaaagtgttcagagttataaaaagaatgaaactgatcagcaaaagagagaaactgttaaaaaatttgatgcaattaaagaaaagttcagagaaaaaggaaaatatcaaagaaaagaccaaagcaaaattgagacaaaaattgcaaaattattaggcacaaatagaaaattaatacaaaaatggaaaaatgaattaaatttaaataaaagtaaaattaaaaagcgcttctatgatgcgaaaaagcgcaaattcattgaacgaattgatgaatttatagaattaaatggtcaaggcaaacagaaagaatttatgaaggaattgggaatttgtgaatttacatttcagaaatggaaaaaagaattgttgccaaaatattataaaagtcaaagtaagaatatattttttatgaagttaaatgtaacttttatttaagaaaaccataacaatgaggacagattagaaaagctgaaaaaatattacgaaataaaagaaaaaaatccaaaaatgagcgatgtaataattgctaaagaattggaaatttcacgaaacacgcttataaattggaagaaacaattagctaccactaattgagcagtgatttttatttgattgaacatcatgacaatataaaaacatcattttattcaattattttaccatttcttttgtgtttgatctataatacttttttattttatgtctaaaattgtctctctcttctagtgggtggttgttctttgatcacaccttcttttttgcctttttggggagcatttatcaaaaatatgggaaaatagggtccggcggtgccgataggcgccactgggaaaatttttaaatttgggcgtgcttttttaagcgaatgctgaaaattttcaaaaatttaatgccaattttagtgcctatttcgcaatttttgggcatttttcaggatttccggaaaaatccttaacaaaaaagcattaaatcaacttatttactatcagaaatttgttaacaacaattttgtttttacccatttttctacctatttcagcatttacgtacctattacacagaaactttaaaaagaaaaaaaagaagagggaaaggatttagattaaagaaacaacaaatagatagggctggcaaaaatatgtacaaaaagtggtcaaaataagtacataaaatgtaaaaaaaaatcgggatccaaatggttaggtataaaaataagtacctaggtaataggtagaaaaactcccaaataggtaagaataggtattatgaaagtcatcgtattgaccccaatccaagtggaaaataatttttttcgtgcttatctgtgcctattcaatgcgcaaaaaaaattttttggaaaaacgtacagcaaaaaaaaccttttattatattttttaattggaataaa

SEQ ID NO: 72328 - DNA, 1436 bp, Heterodera glycines
atgcaacaacaaattgaaaatggtcaaccattacaacctccgttagaagcgcaacaacaaggacaacaacgttccttgcttccatctactgcggattatgaggaacatgatgatgatctgatgcgaaacaatgctgaacgttttttgtttcttttagcagcaccgctgtggcaaaaattgcagaatgaccgttaattgatggcaattacataatttgctgtgatgagaatgagagaaaataacaataaatgttgcaatcaaaatatttgtgttaattgataaatgaaaagtaagcttttgctttttagaaaaattgtcaaaattatcattgatatttcctaaaccaattaatggcacaattttttccgtgaaaaagcaaaattgacaaattttcaccggttagctacatataaaagtcataactaggctgggaatttataatggtcataaagtattgaccaaaaaacatgaaatatggaaagtaattgcaagaatatggacacaatttttcaaaattaagggtataatttctcaaaatttcttcagattcgctaaatataaagtaaacgcttcacaaaggctaaataggtatttaaaatcatttaataaaaaaataaaggcacaatttatttaacgaaaaaacaacctaattacaaaattttgtttatttttgaacagatttatcaatctttaagagaatttgaatttaaactatgtcaaagagaaaaatttactataaaatgaactttacaaaatatggacaaatatgaaagaaaatatgacataattcgcgaaataaagaaaatatggatatagaaactccatcctgaagcttcaaaccaagataaaaatatgtcttcgtccgtttcaagcctcaaacagtccaagatataatattttcagtagagttcaaaaaaccaaattttccaacttttttggctcgaactttttcgaaatgttttggaattttgcaggctaatagagcatctgaagggctttgcacaatttatttaacgaaaaaacaaacaccaaaaataattttgaaaattttacaggcaagtggattcaataaacaatttgaagcaatcaactttattttattaatttttattattttttgcgaaatttatttgttaaatctgagtaaaaaattgatttctctgttaggaattattcatgtattaattttaaaaatatttgttgaagtggaaataatattattgaaatgcgaatataacattaaatataatcatttacagcaataaatttgatttccacaaaaatgcttttatggcatttcatattttccataattttctttgtttataaaattgaatccgccaaaattcgaccaaactttgatgaaatatttggcgacggatgggacaaagatgggagtgatcaaacagtaaaatgaacaaaagaagcaaaataaa

SEQ ID NO: 72329 - DNA, 482 bp, Heterodera glycines
atgacgaggctgcggcactctggggaagaagccggctcgaagccgaaattggcaaagatggcggtgccgactgaagtggcgatggaagccgatggatgtgccaatggaagtggcgatggaattgccaatggatgtgccgatggaagtggcgatggatgtgccggtggtactggcgaaccgctgttgttcaccttaataatttttgttaaaaaatttccgactttttctaactccgttctttgaatgcttttttagctgctttaatgcattaaaattactttaaagggtttctgcactttatctgatgcttctaacatacagttttacattttatttgactttttcctactttttagatgttaatggttttgtttccactttttaagccaaatcaattgaggaaattccattcaattaaggaaattccagaaaataagtcaatcaaagagatcggtactgaaatcggagaccatatggactga

SEQ ID NO: 72330 - DNA, 1017 bp, Heterodera glycines
atgtttatgacacttaataagcactggtaagaatgggggtctggtgagaaaagagaaggaaattggtggagatggagaaatttttgagaaaaaaaaaattaaattatatatattttaattacagatagaatatttttcatattttctttaccatttttatgtaattgaaattctaattaataaaaatatatcaatttttttttgtacgttgcccttttgtacgagttgcctttttgtacgagtggcgggggtcagagtcgcgggggcggtggcgggggcacgataattccgcccccgcgggggcgggggtttgctttgaattagctccaaaaaactcataaaaaaattaatttttatgaatgatttctttggctccacattcctttattcgttgatcgcctcgatactatttattttgacataaattgcacagattttgactaaaaaaaggcaaaaatagttaataccaaaatactttctattttttttaccaatttattgctacaatttcggtaaatttttgtattttttaaatttcaatatttttttatctatagaaattgttgagagaatttgttcaaaagtgaaattaatgtggtttttttgagctaagatgttttttattaattaataaatagcaatatatgaaaaggcaaaaattagttaatacaataaaaatagggccaagcgcattggagaagctggacccaacgccatttgccattgggccgtgtccgggtgcgggatgtacgtcgcaaacatcgacgactccatcagcaacaacatcagcagttacgacgacgactgcacggccgaacgacgaccatcaatcgaaagccgcgccgaaatcgtcgatgctgttgaagttggggctggcactcgccgcggcccttttgtactcgatgctaagtcgcaggccatcacgcgactactggctgcagccgagtacaaaaatggtgcgttttaagtttaacaaaattggtattgctgaaaatttaaatttaaaagtcgattaaa

SEQ ID NO: 72331 - DNA, 748 bp, Heterodera glycines
atgcattttctctttttgagcgtcttttcactctttttggccaaggtttttttttattattatcaattaatttcttatgtttaatttttaaattaagcactgttcaaatgccattccgatcggtgctggtaaccaacgggatgtgcggcgatcaatggtcattgatcttcttaatgccaatcaagagtttgatcagttgcgaagtcaattggcgactgcatcggcaaatgatttgaacgctgaagacagggtttttggcgaccttttcaaaaaaattggaaacattgctggaaacattgggaactattttggtaagttttttattacattattagcgaaatgttcaaaaataaatcaaaaaagacaaatggaaaatcttttgcaacgtttcaaaaaatgaacttagatcgaaaaaaacctggaaatggtgaacctttacaacccccgcaagaaccaccacaaccaggacaaggacaatggcagccacaaccaggacagggacaaggacagggagaaggacaacaatatccaggacaaggactgcaacaaccaggacaaggacaatggcagccacaaccaggacaaggacaacaatatccaggacaaggactgcaacaaccaggacaaggacaatggcagcaacgttccttgctaccatctgctgcggattatgagtagcttttgcagaatgaccgttaattgatggcaattacataatttgctgtgatgagaatgagagaaaatgaca

SEQ ID NO: 72332 - DNA, 154 bp, Heterodera glycines
ccgatcaatccgcaccaacaatgaaaaatggacggacatgcgaaagaagggaaggaagagcacggacactcccatcgattgaattaccaaataaatttaaaatacaagcgaattgttgcattaagacaataaaagtgtaaagcgggagacaaaa

SEQ ID NO: 72333 - DNA, 665 bp, Heterodera glycines
cacaaaatgcccggcttcgtaccgccagtccaatcaaagtgcccaaaatgtgggaaatcggtttatgcagcggaaaaaatggttgctggcggatgtcagttcaaattaccggaataataatgcataaataattcgatcgaatcgcatttcctttacagatgactggcacaaattctgcttcaagtgcggtgagtttttaatgcccatctgtgtttctgttttattattttttaatttgggcttccgtctctcttcacattgcttttgttaggctccctttgtccgttttcatgaattgacttccagaattgtgtaacaaacttttggaatccaccaacgtagcgccccacgaggcggaattgtactgcacaaaatgccatgcgcgaaaatatgggccaaaaggcgtcggattttggggtgggcgcaggcgctctgacgatggattgtggcgcaaaatttgggaaccaaagagtcgaaatgacgttggtattacagtacgccacctcttctttgtttacccaaacgaactttccccgtgatttaacatgggaaaaacggtcagtgactactgtagtcactgactactactgtaacaaaacaaaacacaaacagtcgagccaaaggccccgccgcaacgctcgaaaactgctgcaacaacaacaaca

SEQ ID NO: 72334 - DNA, 312 bp, Heterodera glycines
atgtctcagtcgggtaccacgccagttagtgctgctactcggaccacgcctggtcaaatgttggacctctactacacctcactttgccagcctgccttccccagcataaccgagaaccctgtgagttcaatattcaacacagcttaattagtttaattacctccccctttctgtcaggttaatcctcttggaatgtatccttcacactatttgttggagcagtacaaccagcatctttctcagcagcaacaacagcagggaaataacggaggcacatccaatgcatctgcaaatgggggtggacggttttag

SEQ ID NO: 72335 - DNA, 867 bp, Heterodera glycines
atggacttttcattggtcccgttagctcataagcctgaactcatcgatcagtgcatcgatctccttaatgaggttaattccctttgtgatggaattctcattttggctttttttcggtcacaattgtaggaatggcctcgaagtcaaaaagcgcgaatagttgggctcaagagattgttgtgtacttcgccaccaatggcttatgtttttattgagaatggttccggtgaattggtgggacatctccgactcagtccgttgggcatgggaagcgccagagagtgttggattgaatcggtggtgatccgcaagggaataagaggacaaggaattggacgcaaaatgatggagatggtggagacggaagccaggttaaatcagataatggaaagatttgttcggatttacgcatcaccaatttcaaaaaaaaatgggacgcgtaaaacccaccgtgccaaattaaatgtttcattcacttcaggaagcacggtttcgacaaggtttgacagcagaatgacagtaaaaaccccaactccgatatccaaacgacagatttgttgttcgacaacggataaaatcgacttctaccgacgttgcggatacaaacagtccgaccgacccatccaaaattgtggttcaagcgctccacttctcgaacgattcggactcacatccctcctgagaaacatcgaacaaaatgacgaattatctatcaaacaaactggtacaacaactccgactgagtgccaagcaaaaaagcaaagtgacccagcaaaaaatgtacccattccaccagcaccgccattgtttttttcaggaccccataaaattacaaaaaagacatttgtatttaagcaattggaataa

SEQ ID NO: 72336 - DNA, 267 bp, Heterodera glycines
atgaaaattaagccacaatttgtaagccattcccaaacagaaatattaattatataattaaatttaaaaattatattattaaaaattaacagacgaaaaaagttgcatcagcacactgccgactgcttgcactgttcggtattcgagatccttgttcaacaagccgtaaaacagcttcaccaaagcgatgtggtcgactttctgaaaagggcgtatttaattaaagtggtcgtttttccgtgccaaatcttataaaaggcaaataaa

SEQ ID NO: 72337 - DNA, 281 bp, Heterodera glycines
aaagtcgaccacatcgctttggtgaagctgttttacggcttgttgaacaaggatctcgaataccgaacagtgcaagcagtcggcagtgtgctgatgcaacttttttcgtctgttaatttttaataatataatttttaaatttaattatataattaatatttctgtttgggaatggcttacaaattgtggcttaattttcattcgttttcagccggaaatcattgctggtccgcgaggatttggtcttggattggcggcctgttaatgaagctctacactga

SEQ ID NO: 72338 - DNA, 502 bp, Heterodera glycines
taattaaatccattccttcgggggaccgtgccgggtgccgcggggtaagcagtgctggttcgtttcatcacggcaccgaaccttttggctagtcagcaatcgttgcttaacttgccagatcggacgggtgcgcatgattccactgttccaagcaccccaccaaaagcaaaacgatataaccaaaatataaggaaaaattttttaaaaatttttttctccatcttcctttttgatactaaagcatcagagtgctaaaattaagttgtaaataaaatttggtgcgctttagagcactttctgaaaaaaatatttatgaaacaaaaaaatcgattttttcaagtgtccgtttggggtactcaaacatttatggggagcaaaaatccaacgcagaattaaagtacaggctatagggaagctattcccgaaggattcggtctccccataaatctgggcgcatcggttcggggggactgccccgaaaacaaaaaaatcgattttttca

SEQ ID NO: 72339 - DNA, 756 bp, Heterodera glycines
agatatggcttgggtcacaataaaataaaaaatggctagtatgtaaaaatttggcggtcacaaataaaataaaaaatggctaatatgtaaattggcgtccagaaatttttagactaatccgaagcaaagcacgaatgaattaaagaggcgaaagaattcacagtatcgtttctaatagggaaatattgacaggatattcggctaaaaacgggtttgatcatttttagcgcatttttaggtatacatttgagacaattgggcaggacaagaaaagaatgaagttgatgcctcatgaaactcggaattggttatgttttgtcgaaaatatccttacataatactcataaaaaatacaaataattcaacccacctattctatgaccacattctgaaaaaaatcccagaaatacgaggaaagatatgcttggtcacaataaaataaaaaatggctagtatgtaaaaatttgcggtcacaaataaaataaaaaatggctaatatgtaaattggcgtccagaaatttttagcctaatccgaagcaaagcacgaatgaattaaagaggcgaaagaattcacagtatcgtttctaatagggaaatattgacaggatattcggctaaaaacgggtttgatcatttttagcgcatttttaggtatacatttgagacaattgggcaggacaagaaaagaatgaagttgatgcctcatgaaactcggaattgattatgttttgtcgaaaatatccttacataatactc

SEQ ID NO: 72340 - DNA, 578 bp, Heterodera glycines
  unsure (1)..(578): unsure at all n locations
ttaaagtacnaggctatnagggaagctattcccgaaggattccttctccccataaatctgggcgcatcggttcggggggactgccccgaaaacaaaaaaatcaattttttcaagtgtccgtttggggtactcaaacaattatggggagcaaaaatccaacgcagaattaaagtacagactatagggaagctattcccgaaggattcggtctccccataaatctgggcgcatcggttcagggggactgccccgaaaacccaaaaaaaaattttttggataaaaattatttaaatgaactgactagataatatttaaaataggttatttctcttcctttcagtatccctgcaaagtttggtgcgcttctgatcagtttctgaaaaaaaagttaagcctaaactttttggcctgtttaaaaaggaattaaaaatttttaaaaattttattcatctccctttttgatagaaaaagcatcagagtgcctaaactaacatgtaaataaaatttggtgcgtttcagagcattttctggaaaaaatatttatgaattaattatgcaaaaaataaacaaataatgaa

SEQ ID NO: 72341 - DNA, 126 bp, Heterodera glycines
atggacaactgctgcattggcagagtcagagaggggtcacaaagagttcgcacagcatcgaatatttccttcattttaggcgtcattcttccccactgcacttctttcgtcggtttaattacccaa

SEQ ID NO: 72342 - DNA, 80 bp, Heterodera glycines; identical to SEQ ID NO: 51817

SEQ ID NO: 72343 - DNA, 128 bp, Heterodera glycines
ctgagggacaattgaaaatgatcttttgcaattggatcttttcattgttgagaagcaaacacaaaacgctgtttccatgttttgaatatctcacgccttctctattatttatgaaaataatgaatttc

SEQ ID NO: 72344 - DNA, 1099 bp, Heterodera glycines
atgggcagtgactctccagcagcgcgcaactacgcctatacatatgtaagtgcattaattgtttataaaatcccacaaattaatttatttttaatagattatcaaccaacgacttaagctacccaaaattgaggtaatccctttaccaccagctgatcaaatccacccagccgacctcaacgcaatgaatgtcctccgccaaaatctttacatcgaggtgaaaactgaattggggaaatgcagaatgctgtggaaagggatgagggtatgaaaaaacttaattaaaattgattaatccatatttttagctcaaaaatagactcataattaaaaaaacaatgttgggaacagagttacggcgtaagtcctttgaaaaattaaactaaaaatgatttttttctaaaatcagaaaaaatcatttaatttttagtgtaattggaaatattcgccgccctaagggatgataatttaagaaaattttatgttctggaatggaagcttgttcaattgcaaaatttttaaattttttcattaatgttcaatttcgaaaatgtgctttctttttgtcagtcaaaagtttaaaataaaattgatagaaaaattaatatttgaaaaatttgtcaaccaatttggcagatattcttaggtgctcatggggaagggaatctaaaaaacaatgtcgggagccgaagtcaaagcgtatgtccattgaaaaaaaataagttaaaaattaatcattttttcaaaaatcaaagatgttgaaaaaaaattttgtttagggaaatggaaacattcgacgccataaaggaggataatttaagaaaattttaaatttaggaatggaagctggttaattgcaaaatttttaaataataaaatgtttattacttaaaggtgactattgtgcctgatggggtacgcttgggttgcatttctatgaaataaaattttaatgaagattatgagtaagcattcgcttacttcatttattgaaacaaatttctcaagaaaaacggagaacagctcggatgcactgttcattgggttccgaagaaattggccaacgaacagttacttacaatggtcagagtaaaattcg

SEQ ID NO: 72345 - DNA, 890 bp, Heterodera glycines
gtgctttgcgttggttaattggcgtgggtgagtgtggtggttgggccgtttttgcgatattgtggctggaaaaaagaagcgatttcgctgtggggagcgcggccgtctgggtttaagtgcttgcttgcgcttgtgctcggcattgaacggtgatggctgctgctggggtgccacctttgtcgtggcctcagtttctccagcgattggcagctgtcgaaatgaataaaacatgcagctcgtctgtgtgttaaagaaatttggcgagttaattgacttgtgtaaatgttgcctaaggcacaaatgctgtggggaactcagcactggggatgctgaacctaaagttggtggtggtgttggtatacgagtgagtggcgtattgccatggttgacaagccctatgagttcgtggatcggaactccttgcctggggaccagtgtgcttgcattcgaaaaaacacgagacataagcgaccgaaggcctttggcctgaggaagtgtcctaaccgggaaatccggagtgctcgtgtgagtgcctgtgcactgccctcggagctgtgtccagcggcgagatggttcttcccaagtccgggaagctcggatgcctggccagcgctgtgtcattaccacttgctcggtcgccttcgccgcccatgcgcacgcttgcgctgaaacggagttgtttctgctgaaactatccgtctttacaagacggctgtaatagcggcgcttggcaacgctcgctagcagctatctggttgatcctgcctgaactgatgtgttcatttcaaagattaagccatgcatgtgtaagtttaacctgccagacagggaaactgcgtacggctcattacaccagctataatttacttgaccttgacttcttacttgga

SEQ ID NO: 72346 - DNA, 449 bp, Heterodera glycines
atgagagagtgggagaaaagagtgagtttgagagggagagaaaagacatgaaatagagaaaaaagataaatagagaaaaagagaaggagaagagggcagataaatgagactgtgagggtgaataagtttcaaaaaatagaatttaaaattactaagttggcagaatcattttggcattcatttccatttccaggaatttctgagtgccactagctcagtcaatttcatcatttgtttcacatcgttttgcattgccacgaggccgcgaagcggccgagtgagtaccttgggcgcagaaaaattattaaggaggagggttcattatttatttatttttttacaaaattaattcataagtatttttacagaaactgctctgaaacgcaccaaaatttatttacaagttgaataaggcactctgactcttatattatcaaaaagggagatga

SEQ ID NO: 72347 - DNA, 696 bp, Heterodera glycines
atggatccaatacaggcaagaccgtctaattatgacgacagtgagctgatttcgttgatccaattccatagcatcgacataattgtaaaaataattaaaataattaacttaaaaaaaaattaattaatttgtgaggttggcgccttctcttcaatgatttgtgtcataacactttttgtcttcattagttcaaagcaaatgttatgccataatgaggtaatatatttttttaattcattaaagcaacaaatttatttttttaaataatttatctttatttattctttaataaaaaataaaatttaagcatacaagatttcagcaaatttcttaaaaatgaatttaattcaattttttatttctttagtttattataattttgttttaattaaatttttgattaaatttcttctctgagcattttgattttgatttttttattattttaatacttcgaataattgcatatttttaccattttaaaattcttttttatatgttgaagaaataattcattcaaattttctttcagttgctaacattgctcgctgccgctgacctttgcaccagcctcggcatttttgtgctcggtctaatgcgcaaggcactttatgaacaggtcatggaaacaagtcggataccaattgaggtatggtgaacaaaaataaggaaaaagatgttactaatttgaaaata

SEQ ID NO: 72348 - DNA, 625 bp, Heterodera glycines
atggcaatgttgagcatcaacaacaacaacccgagtgatgagctgcagtccgcccgacaagtgagtggcgttaatggacttttccttcattgtcagaattatttttggcatttgtttttgtctttatccaaaatttttgccagccttttactcgcatgtgctcggcccgttcctcatttgcatccacaggttggaatcgctatttccagaaccgttccgcgcacggcactctgtcggccgagggcgccggtgcggcggaggcaattcaaagtttgaacgaacttggcaaagacgacgaggagcgggacgaattgggcaacaacaacggcaacagacagatgatggacggtggaggcggcggtggcttatcccaggaggaggacctcaacgaatttaagtcggtcgtttcgcatttaatttactttcaaaaccattcatttaatgtgctcttttcagtctttactattcaatggccgaggatggtgcccgtttggactacttccaattcgcctacgagggcgtgtccgagtcggacgagccggactcggtgacttgttcaaggcgtaattcccaagaaagcgaagaggaaaaaggttggaatggacgagttatggacacagtttaa

SEQ ID NO: 72349 - DNA, 831 bp, Heterodera glycines
atgcttaacgcattgcctttgccgtccaaccgagaacacgttgagaaagccgctgctgctgggcccggtcgttggagcccggtgccgaagagagcgcgcactgttgaggagaacatggcactgatcgaatctcgatggcaatatttggaggtatttaaaactgccgactaaaaaagggggcgggggtcaaccgaggataatgaattatgcgaggaaatctgaattttgaattcacaggaattacgattggaaagagaggaaacagccaaaaaggagggagaaaagggcgaagaagacggggacaatctcttccgattggacttaagcgaagtcgcggcaacagacgaaaatgggaacagcgaagaacaacaacgacagatggcggaagaacggatggacgacgaggagaacggcgtcagcggggacaatgacaaaaacgcaaataatactgacaacaataacaacaatgaggacggatttccgatggaatgcgtcgatggaatgggtaagggtcaggttataggcgtaaaatacaagaatttagaaaatatcgtaattttaaaacttatttgtgcgatacatattcttaaaccgaaggaggtgtatatcactcttttaatttgttattaagtgtctgtcttattccaattgaatattatttaatttttctctctctctctctttcttttcaggtgccggcgttctgctcgattctttgttcgaagcattgagtcgactcactgagcacacttttgccactaatttgcaactgatcggcgcgttcaacgaactgttcgcctactcccaaccgttgctgaccacctatttgtt

SEQ ID NO: 72350 - DNA, 57 bp, Heterodera glycines
tggcgtaagaagcgaatgcgtcggctaaagcgcaagcggagacaggcgaagaaatga

SEQ ID NO: 72351 - DNA, 731 bp, Heterodera glycines
atggctggcaaatgctttatgccaaacgaaagtgccaaaactggtggcatttcgttgcggttcagcgccgactgcagcgtgagccgtaagagatttttttagaatttacttttttatatttattctcggttgaaatatagatcgaacaaattatttcgtttaattttttaaaatttaattaaaaattgcgtaagaagatttaatttagttaattcatggaaaaatacaaaattttcactgagtttctggggttttatcagctaatctcgccagacttaaacgccaggcccgtagccaggggatggaattgggaaaataaacaaaaaattgaaattttttttcttggaacttcttctgttaataaatttgctaaaaagtgacatttttcacttgagctcttaaatttaaaaaattataacgaaaaattaggcctatattcaatttacaggcctggcattggcgaaaaaagtcgtctcggcgataaaaatgccaatttttttgtccccgctttttagcatgtctaatgcgtgccgttttacgcggctcgaccaactccccagcagcggatgaagcctgtctggtggaaaaagatggtgccaaaaagtgtgctttcaatgttggccaatcgttcgatgccgtggccgtgtcctgcaacgggtgcccgagtcagaaggtgctcaaatgcgcggaatatatggcacgatagaaaaaaggacgaacgacgaaataaa

SEQ ID NO: 72352 - DNA, 80 bp, Heterodera glycines; identical to SEQ ID NO: 51817

SEQ ID NO: 72353 - DNA, 49 bp, Heterodera glycines; identical to SEQ ID NO: 51181

SEQ ID NO: 72354 - DNA, 574 bp, Heterodera glycines
atggtaattatttgtacatatcctttttgaattaaaaatttaaaaaaatatattttagattataatctgtctagtaaagtttctgtgcaaatttggggaatatttttgttttgattggtttcatttcttttcatataaatttgattaaagtatttcttttctttttcctttaatcaaatgtttaaaataattattatttataatatcgactttttgagaattggtattttatgaaaaagggtttaattaatgacgaaatttaaaagtatttatcatttaagtcattttaatatggttgatttggtttgttttcattgcaaattaatttaataggtaaatacagttattttttcactttttaattaattttttatatataaattgattttactatttaaaaaattatttaagctcgctttttagcacttttagagaattggcattttgtcattaatatttgtttttttaaatttgttattgaattattttaagttttttattatgtataaattagcttaatttaattcattatttttatcattaattctaattgcattaattatttacttccata

SEQ ID NO: 72355 - DNA, 844 bp, Heterodera glycines
atgcaattggcatttaccataatctctactcggactgaattcaacgagaattcgaaattagaagtaacattggctaatgctgatagaattggcaaagctttgcttggcatttctgaaccaattgagcacaaatttttagaatatttaaaaatttcaaaaatatttttgttggccgattcattgggtgctgatgaaacggcattgatcgaagctgaatgcaaaaatttggaggtttggcattgatatgcaaatattaaaaatggcttagaaattttcagttttttttttgcaaagttaacaatttgtcttttacactgaaaataaaaaaaacacaaaatttcagaaactttctggaaggaggaggctcataaaaattcctttggtaaaaaagtgactaaaagaaaaatcaaacaaaattttcttgctttgggatcatttaaccataattgatcttttttaattttaaatgcaaaagagaacattaattaaaaaaaatgttttttatattaaaaattaatgaataaattttttgagaaataacattttttatgtttttgtttttgatgagggctgtttacattaaattaaatatgctttatttaaatttaagaaattcattaccaattttgtccctattcgtgcatcatcagctgaagaaaccaataaaattggcaaaaacaatttgaaattttatgtccattttttcaaagaaatgcagcagttgctggacagcattaagcacatcgtcaaaagtggattaaaagaattatggaagaaacttattgcgtttgtagaaaagtttgaggaaaaattggaaacatttgccaaatcaacgaaaaattga

SEQ ID NO: 72356 - DNA, 846 bp, Heterodera glycines
atgcaaaaacctattccttcaaatcgccccaactcttctgtctccaaaacccttgcctgcgggcttgaaaaaatggtgaatgcgagtggaaatgagccactcacggtgccggtgctggcggatcggagtgatccgctggggctcaagtcggttcaacccgacccggtgccaatggaaagtgccgaggctggcacaaaagaaatggaagtgatggaagtggatgaaatgagcggagaaaaagggaaaaagggagaaatgggtaaagaaaaggtgaaaagtggtggaattgaagaggaggaagaaagtgagggcagtgagggtgaactgctaggagacggtggatttggcaatttgcaactaaaccccagcctgagggcgggaaataaagcagttgaaaaggaagataaggggaaaccctatctggtcgcccaagtgagaagcgacggtgtgatcgcggcacggatgaaacttttctgggatttcccggaattggtctttgtcccttttagcctcttcgacaacgcccagccgatcgaaatcggcgatttgttccgcttacataagtgtgagtggacgaatagcggaacaggatgggaagagcgcggagattggctgtatgaagcaaccggacggctgaactaccaagccacggcaacggacgtgagccaattgcgccagcgcatccccactcaggccgtcggcattttggtcgatgtgcaaagagcccgtgaccgacacgtcaaagtggctatggtgtcagcacctgagctgagctgcgtgatgcgcgcctaccgtcgccacttcccggccgatttcacggataacgacatccgctaccgctccgtt

SEQ ID NO: 72357 - DNA, 1097 bp, Heterodera glycines
atgatttattttcgtgctcttcttgagcctggggtgcgatccttaccgtaccggcctcttcgagaggataacggcgtcgcagttggtttgcgtgccgttagacggctcgtccgagtgcccggaacgtggacgcgatacgtcggggatttttccaatcttcaattatcgttccattaagccaaaatatttttccacgattgaagttcaaaagaagaactgaatcctttggcaaaaactcaaccgattttgctcagtggtgttgatcaaattgacgagccatttttcgcgcataatcagcttgtgatttacggcttttggctgggtcgatgattttggcttgttcttcctttgggtggacaagagacaactgtgtgcggagtcttcgaccgaagaacaattgatctggcgaaagtccgttgagtaccgaattcggagttttcctgtaggagagaagcatcttttatgcccaaaatttaccatctttggcgcatttcttcagggcccttttgaacgtatcgacgacccgctcaactttgctattcgtttggaggatggagttgatgtagcaatctgtgtacagatatttgttatcaaaatgtctatctcggggctaggttaattggcgattaagcgggacagtacatcggcttatccgaagatttttttaaattaatttttttaggctttttaggtttattatagcttcataactaaaagtgctcagtttccatttatatcatctctcctttttaaatattttaattttcaaaaattgtattcggtttcttttgtaaatcttttatagagtagcgcggccgtgcgcggtggacgtgctggcgttgggacttgggcaatttgggaggccaaatggggaataatggggagaaactcatataactcccgaaggaagggccccatggggtgatcaagcctagggatcccatcccactctgatggtcacacttaatgggaaagtggctttattctcgggactgagcaactgaattgataatagcgtaaatggtgaacattaaatacatgtgaaagcgaaatatgaccgatcaatgattggtcggggaaaggggtggtacaataaa

SEQ ID NO: 72358 - DNA, 74 bp, Heterodera glycines
tccaagtggggaattgaacccaggcgaaaaattatgaaaggtagaaagttaaccactacaccacatgtgcatgt

SEQ ID NO: 72359 - DNA, 62 bp, Heterodera glycines
aaaaaaacccggctttttacaattggccaaaaatgggttgtaaaatgtgtgttttcacctta

SEQ ID NO: 72360 - DNA, 48 bp, Heterodera glycines
atgcaaaaatttaattattttaacgaaaagcgattcaatgtcgtaaaa

SEQ ID NO: 72361 - DNA, 475 bp, Heterodera glycines
atgcgagttcaaaaacagcaccaacaaatgcaacggccgaatctggacggacctccacgaccaattcattcgcctagcaactccgcacacatgtccagcagatgcgtcacgtgttgatgctcaaatggtcacgaccgcaatcaaaaggcgtgcaattgccaccttcgaaccaccttctgtcatcagagcagaagcgcttcaaaatgtcccgtctccgtcagcaattttggtgtcaaaacaagcagcaaaagatgtgaaaacaaaatatttttcatttaataaaaacaattccaatttagttgatcaaaagagctcgccgagaagtgaatgcgccccccgtcgttcctgcaaatcttgagcagcttattatcagcccggcgtatcagacgtacacaccgacggacggcattgatgaagagttcctgttaggagacagcggcgtatattatgaacgaggaaatgagaacccacagag

SEQ ID NO: 72362 - DNA, 505 bp, Heterodera glycines
caaaagttttttacaaccacttattgccaatctaatttcttgcagatttaaagctatccattgcctgccggttctcggcagagcaaagcactaatagggtgtttgactcacttcaaaaaataattccttacccaaaagttttttacaaccacttattgccaatctaatttcttgcagatttaaagccatccattgcctgccggttctcggcacagcaaagcactaatacggtgtttgacttacttcaaaaaataattcattacccaaaagttttttacaaccacttattgccaatctaatttcttgcagattgaaagccatccattgcctgccggttctcggcacagcaaagcactaatagggtgtttgactcacttcaaaaaataattcattacccaaaagttttttacaaccacttattgccaatctaatttcttgcagatttaaagccatccattgcctgccggttctcggcacagcaaagcactaatacggtgtttgactc

SEQ ID NO: 72363 - DNA, 213 bp, Heterodera glycines
gctaatagaggacactgggctatcaaatgataccaacaatgttcaattagttgagaaagaaaaacgttatagtccggggtccaaattcttgtaaaatataaattattaatgaaaaatatagaccaaaacttgaaatattcaggaagccaaacttgttcggaatgataaagttaggactttttaagcttggccgagatagagaggtcccccacg

SEQ ID NO: 72364 - DNA, 2662 bp, Heterodera glycines
atgtaccccgacatccgaccaaaagctaaaccagccccagcagaaatcaacgccatggccattcctcagccaacgcacaaaatttcggatttggaatcgctcacaaaggccctccaaactgatttttctgaagtttttggccccggattaggccattgcaccaaagcaaaggcccatttgatactcaaatccgatgctcacccaacattctgcaaagcacgccccgtcccacacggcgccctcaatgccgtcaacgaagagttggaccggcttttgcagattggagccatcaaaccgattgagttcagccattgggcagcaccgattttggccgtaatgaaaaagaatggaaagacccgagtttgcatcgacttttccaccggcctcaacaattcgctcgagttgaatagacaccctttgcctcggcctgaagacatttacactgccatcagcggctccgtctatttctccaatctcgacctccgagacgcgtatttgcagatggaattggatgaggaatccaaacacctttgtggaataaacacccaccgtggcctcttccaatgccagcgcctcccatttggcgtcaaatctgcgccgtctattttccaacatttgatggaccaaatcgtctcaggcattccaggtgcgtttgcctacctcgacgacggcataatcgcctccaaaacgcttgaagagcacattttttccctttacaaacttcaaacgaatccaggaatttggccttaaaatccaattagaaaaatgcaaattcctccagcccgaattgctatttctcggccatgtcatctctgcgaaaggaattcgccccgaccccggacgatcagaagcaattcgccaaatgccgccaccacatgacttgagcacacttcgctcattcctaggcgcattgaattattatggaaggtttattaagtccatgcgcgaaatccgcgaaccactggaccaacttctccgaaaagacgtgaaatgggaatggaccgacgaacagcaaaacgccttccaaaaggccaaagaaatcatgctgtcggatctactgctcacccatttcgacccgtctcttccaatcgtcgtagctgctgacgcatcaaaagacggaattggcgccacaatcagtcatatttttacggacaaatcggaaaaagtcattgaacacgcgtcatgcacactcaacgacgcacagaagaactatagccaaatcaaaaaggaagcattggccctcgtttttgcggtccagaaattccaccgaatgttatttggtaggaaattcacgcttctcacggaccacaagccattgctggctatatttggctccaaaaagggaataccgatttatgcagcaagtcgtcttcaacgatgggcactgatcatgtccaattacgaattcaacataaagtacatcaacacgtcatcctttggacaagccgatgtactgtcccgcataatcgccaattatccccggcccgaagaagacattttgatagcaaatatctgcacagagacagattgctacatcaaaacaatcctccaaactgcaactgatcaattgccgatcacgaaagcagaaatttcagaatggacaccaaaagacgatgttctccgaaaaatttctgatcacaccaaaaacggctggccacaaaagtgcaccgaccccgatctgtcaccgtactttcctaagcgaaaggaaattttggagatcgacggatgcttgctctacggaaagcgagtgatcgttccgaccaaacttcgtgaacgcatcatcaaggctctacacatggcacaccccggaattgtgcgcatgaaagccctcgcccgtcagcacgtgtactggccaggattggacttggaaatcgagcgtatggtcaggcaatgcgaagattgccagagcgcccaaaagagtccacccaaagcaccgctcgctccatggacgtcttgctcacgaccattccaacgcattcacattgatttcgccggtccctgttcagatggccactcctatttgattttgatcgactcattttcaaaatggccggaagtatacagaatggaccgaatttcgacaccagcaacgctccaagtcctccgatcaattgtctaccgactcggatttccagaagaaatcgtgtcagacaatggcactcaattccatgccgcagaatttgaggaattttgcagcgagtttggcatcaagcataccttcaccccgccgtatcacccgcaatccaatggccaagcggagagattcgttgatacgttcaaaagggccatgaagaaatgcgccaaagatggaaaattttgggcagaaaagatgcttctcgcctacaggacaaccccgaattcggcactcaacggactttcgcccgatcaattgttcttcggtcgaaggcttcgaactcagctgtctctcctccatccgaaggaagaacaagccgaagtcatcgacccagccaaaatccgcaaatcacaagctgattatgcgcgaaaaatggcccgtcaatttgatcaacaccacggatcaaaatcggttgagtttttgacaaaagatcccgttttgcttttgaatttcaaccgtggaaagagattttggcttaatggaacgatcatcaaaagattggaaaagtccccgacgtatcgcgtccac

SEQ ID NO: 72365 - DNA, 649 bp, Heterodera glycines
gtggaatttctggaccgcaaaaacgagggccaatgcttcctttttgatttggctatagttcttctgtgcgtcgttgagtgtgcatgacgcgtgttcaatgactttttccgatttgtccgtaaaaatatgactgattgtggcgccaattccgtcttttgatgcgtcagcagctacgacgattggaagagacgggtcgaaatgggtgagcagtagatccgacagcatgatttctttggccttttggaaggcgttttgctgttcgtcggtccattcccatttcacgtcttttcggagaagttggtccagtggttcgcggatttcgcgcatggacttaataaaccttccataataattcaatgcgcctaggaatgagcgaagtgtgctcaagtcatgtggtggcggcatttggcgaattgcttctgatcgtccggggtcggggcgaattcctttcgcagagatgacatggccgagaaatagcaattcgggctggaggaatttgcatttttctaattggattttaaggccaaattcctggattcgtttgaagtttgtaaagggaaaaaatgtgctcttcaagcgttttggaggcgattatgccgtcgtcgaggtaggcaaacgcacctggaatgcctgagacgatttggtccat

SEQ ID NO: 72366 - DNA, 963 bp, Heterodera glycines
atgacatgggacaatccgttgacaaccgctcaagcaaaaaagggcaattacggggagcgtacaaaaagcgccgactcaccggcacccaacaattggtcacccgactcgccaaagccatccaaacaaaagacggaagcgccgctcggtttgatcggatgacggacaagcagaaaggaatcggagaaaacgacggcacattcttcggctgacggcaccaacaaagagcagcgggaaaggcgtttgtcctggaggcgtttgataaatttgacaacaatgggcccaaaaacaaacaaatccagtggcactcagcgattcgggaatcgcaattcggaccaatgttttgagagaacgcggcgaatgggcactttgttgatgacgagtgtcctcttcataataccctggaaaaggaaggaaatcatttgattaacaaatgttaaaaaccaatgaaaatttgtttgtcttcttcggccctgtctttgccgatgagtacgccaacgaaaagcagcaaaatacccgaccgaaacattgctgcgtcaagaacaacaaaatgacgaagttcagcactgtctcgactctttcagttaattatgaattggtttataaatgccaatgcttccgctctcctcgccaaccttattgtgtttgctcaacgccaagtcggcaatgtcaacttcatgaagttgcatttttcgctcgaaaatggcataaaagcgcaaataacgggccaaaacggtgacgagatcggccggaccaaagttcccccgaacaaagagaatctttttgattctgaaagaaatgaggtaaagatggaatggcagaaaagacacgcactgctccttttcagatgccaaattgccgaagagaaaaagggacattcgtttgccaatgccaccgcccggcccaccaacatccaaaggacgcgtcgccattcttctgaatttgctcggcgatttaaactcacaa

SEQ ID NO: 72367 - DNA, 62 bp, Heterodera glycines
ggaagccgtacagggacgagagctgtttgctgaacatttaagtggcgcactccgtgcagttg

SEQ ID NO: 72368 - DNA, 302 bp, Heterodera glycines
aaaattccctcaaaaataaaaggtctattgcgcaccgccctccctatcatgctcgagagcatttgtatgtgtataaaatttatcaaaaaaagagatagccatttttctgggataacctctaaatataaaaatcctctgtgaaataaaatggcgattgtgcacagccctccgtctcatacgcaagcgcttttgtgaggtataaaatttctcaaaaaaaagagatagccatttttctgggatagagtataaatttaaaaaattccctcaaaaataaaagggctattgcgcacccgccctcccta

SEQ ID NO: 72369 - DNA, 101 bp, Heterodera glycines; identical to SEQ ID NO: 62755

SEQ ID NO: 72370 - DNA, 492 bp, Heterodera glycines
atgctttcgatgctgaccatcgtcgtctgtcctccctctctgtttctgctgctgcttcatctcttcccctcggtgcctctgctgttgcttcttctcttcccccattgtcctcctccaatttgtcgtcttcttctccgtcttctttggtttgcactgtgtgccgcaacaaacgctttcggtcgcgcaacgcctttgacaaccatttgcagtcgcgtcggcacaaagaggaagaacaactgcaacagcagcagaagacgacagcgacaattgaggctaatgagtgccaaacggaggggcgagaaaatggcggcatggaagcaaaattgccaaagattgtggcacaaaacattgatggtgaagaagaagcggttttgccaatcgaaagtgataatgatgacgatgaagaagcggagcagaaagaagacaacagttttgccaaaaaagaagtgggtaattgcatgcccatgggatgaaatcgaatgaataattaaa

SEQ ID NO: 72371 - DNA, 1017 bp, Heterodera glycines
atggccatcgactcgaaggatctgagcgcggaggaacgcttccaattctcaatgcgaaagttggagtttctggaggagttgggcaacgacgcgggcaggtacaaatttcaatttttattttttttaatatgtcaaacattcgatttttcttgggacatggggagtcgaccaaaatgtttgcaaagggatcgatccccccccccccccaaattttcgtccctgaaaatttctgttttaatactttatggaattgtgcggcttatttataagtaaaaatttcgctatcgctgggaaaaatttggattttccaaagatttgtttggaaattaaaaaaaaaatttttttttcattttcagctcgatttgcaatggcttgctttttataattctttatctttttcctaaagggtcaacaatcacattgagaaacacctggcgtttgaaaagtgcttcgaaatttctccgtcgatgaccattttccatggcaaaaagatgccactgcacaaagagtgagttggtggaggggggggggggcggcactttttccaaattttgggccgtaaactaacaattttgagttacaataattgtttgttcgttggtcggtggtgctttcttgaaagaatccgacatttcgaacttaaaaataatcgtgtattaattatttaaattgaaatttccaatttaaatcatttcttttttccagtgtcacccctcaacagttggtcccacaacaacagcagcatcatcagcggctcaacaacaacaacattctcatcaacagcaacaacataaagatggaacatgatgatgttttgaatgggatgaattcgataaaagtggaaaatgattatgttgggattggggggaccacttcgatcaaagtgcggaagcgaaggcattcggcaagtcgatgaggagagccatggatggatggattaacaacttcaccagcagatgaacgcgttggaattcaaaaaatgaatcactctgttatttcctcgtgtttcacaataaa

SEQ ID NO: 72372 - DNA, 319 bp, Heterodera glycines
atggcaaaaaccaattcaaaggaaatgcccggaaagtaagtcggtggtcaagaaaaaatggaaaattttcaagcgttttttccacaacatttgttttatgctgaactagttttttttaaacccaaaaatcgatgaaatttttttccattttttgggccctggttcaattttcccagactgcgaatgcaaattattatatatttttttgggtttatgtttggtaagtgaattaatttttaagtatttacaggaaactgaaatttttccaattttgagttttgtagccctccccacaattctcgcaattaaaaaagacaaa

SEQ ID NO: 72373 - DNA, 700 bp, Heterodera glycines
atgtccttccaacaaattttctccacctccgccgttcttttcggcttagtttttattacggtaattaaaaattaaaaaataaattaatttcattctttaaataatttcagtcgacgctttcggccccagcaccaaaaccgcaaaaccaacaacaacacccagcagaaaagcagccattcaatgcttatgtaagtgttgtaaaacaataaaaaaaggaaaactcaaattaattataatttaattgaaaaaactatttgtccccattttaagctaaatcccggctttgacaagcgatctttcgattccttcactggccccggcttcactgggctggacaagcgggccgctttcgacaccggcttcaccaattacgacaaacgcgcgttcgactcgttcactgggcctggcttcaccggacttgacaagcgatttgaaccgtttgatggtaaaaaggacaaccctttgattatatttgatttatgttttctttttttcaggctatggcttcaacggatttgagaagcgatcgttcgattctttcacggggcccggctttacgggaatggacagaaaatgaacataaaatggacggatggccaaattcaatcaaatcgttaaaatttgaaatttctatgtgaccccagctgttttctttgctgaattgcaccagttcgatattctcaatttatgcgccattaaa

SEQ ID NO: 72374 - DNA, 719 bp, Heterodera glycines
atggtagttttatctgtttatactgtatctatctatatgtgtctcagcttactgtacgtcaatttatctaacagttcgtctctcttctgctgtttttgttttcttttcagccgtagtaatagctgtaatgacatgaaaaagacagaattaagcaaaataagtttaagtatgagctttgaattgaaaatgaaaggagccaacggaaatttatttattttgaaaagcgtacgaaagcgcaaaagggcggcataatgaaagtgatttgagagcagacaaattgagagactttttatagtagcgccaagccagacaaatgccataccttccaaacacaccaaaatgacacaacatcaaaaaaatagactcttcagctattttaccataaacaatgtattaattaattaattattaataattcaaaacaccgcagccaaactcaaattatgaccggaagtgacacacataacaaattcagaaaacctaattttgcacaattgctttcaaatttaattaattagggaagaatttagtgattcataaatcattcaaaccattaaatttaattagtgtattttaattggggaatatgtctaaaccaaattaccacatcaaaacatcaattcatttttatgacggaaatgacgcaacaaattcttaagtaattatatttttattaagatattttaaattttagaaaagaataataattacaaagaaaa

SEQ ID NO: 72375 - DNA, 100 bp, Heterodera glycines
atgttccatttgcgtttcgttgtgcttcttctgctggtaattgtcggccttttcattggccccaattttgtttctgctgattgtgataaaaaggtggccg

SEQ ID NO: 72376 - DNA, 273 bp, Heterodera glycines
atggacaagtgtttgaaccgaaaagatgtgttaatgtgtcgagaattggctgacgaagcgaagggggcatttgaaattgttaagcagtataggttggatgccggtactgcgtaccgtaacgcctatactcagtctgacctcgggatcggggaattggccgaaaaggtaaaggaaacaatgaaagaatatttgtcccgaccggggctatcctcaagaccaacatttaatgatgagtttatatctgcttaagggtataaaagagaacggaaaaaa

SEQ ID NO: 72377 - DNA, 247 bp, Heterodera glycines
aatcgaacgctaacggacgacctaatggaaaaaaatccccgaaggagagaatttaattaaatccattccttcgggggaccgtgccgggtgccgcggggtaagcagtgctggttcgtttcatcacggcaccgaaccttttggctagtcagcaatcgttgcttaacttgccagatcggacgggtgcgcatgattccactgttccaagcgaagccaccaaaagcaaaacgatataaccaaatataaggaa

SEQ ID NO: 72378 - DNA, 127 bp, Heterodera glycines
atgttcctcgatgagcaacccatcgcacagtcaattcacaatgctttcacagattggcagcggttcgtttggcaaatgctttctgtgcaaaagggtggcggacggtgcccaaatggtgttgaagaaa

SEQ ID NO: 72379 - DNA, 470 bp, Heterodera glycines
atgccccccttcggtgcgttttcccacctcctcttcttcttcctcctcttcctgctgttcgtcgtgcccaccaccgttccgtccattctccgcctctttttgcgcttttttattttcaaattcgtcgttcgttttctgtgtcgtcctcggcttcttctttttcaatttttcattgttttcgttgtaagtgagcaatgaatcggctaacaattggaaaccgtcgccaccattaccttgaaaaatttgtaaatgcataatggaaaaggaaggaagggcagaaaaacctttttgtctgtcacacagcgtcatctctgtccgattattactgccgaccaccaattataaaatttattctaaaatcccaaaaaatcatatttatagagagtctgttaattgtttcaattttcaaactaaaaatatactataatgttaacttggttttgcaatttctaatgttttgagatattaaa

SEQ ID NO: 72380 - DNA, 1230 bp, Heterodera glycines
atgctgactctgaatgagttcgcccgttggaccggcctcactcttttcgagatggatttgcattcggccgctctgttcctcacttcccttcttttcgtgagtttttcggatgcttttcccatcactttccttaaatgccttcgaaggtgctcagtcggcactttctcttttccctcacaattttgcatctgttcgccccccttttcgtcgcttctgccctcaatttttactttcttgtgattatttttgtgcgcactgtcattgaggacggatcaccgaagcgggcgatcgcagggtttgcattttttgacaaaaagcaacagatggataaagcacgcgcctgccattcagaaatgcgttacattttttccgggtcacaatggttgcattatttgaagtgagtttttaatcagtatgtaccaggacgagggtactttgcaaggcaaattaaaatcaaaaaattattttaataacagatgattttatgccataaattgcaagatgaattcgagcggggcaatcagcagaaatccatcgaaacgacttattttatgattatgatgcccttatgggctctcctcattgctttgtcagtccatgcatgtcgactattttagcaagaaaatgagtaccaaatatttattcgttttacaatttatttcttattctatatatatatgtatatgcttattattttttgtataaattagtggtctgtccagtgatccgttggtcatttttgattgctctcttccgttacaacaaactgaacacgaactcgcgctccctttcctcgtcccactgctcctcctcctccgccgtttcgtgcttacaattagcaggcaattcgttgtcatttttactggggttttttgacggagtgcagcacgaagagatcaacattttgtacttgagcagttcccatcgttctcgattcctggtcaaaattcgcgtttcctaattgttccgagttggtccgtcttcaacctgatctgtttgcttcgtctgatcacttcctcctcgtgttccgacctttccgcgccgctctcgtcactgctctccgactcattgccaattctgaacgcggctggcagcggattttcatcttcttctgctgccgaggggggagaattggaggacgagggacgacttttcggttgggtgggcgaagcaaacggaggagagaattgggcggaccaatcgttgctgaatgatgcaaagggcacataa

SEQ ID NO: 72381 - DNA, 55 bp, Heterodera glycines
gcagcagctcaacgaattacgccgcccgctgctcaccctgccgagcccgtcgctg

SEQ ID NO: 72382 - DNA, 811 bp, Heterodera glycines
atgacgctgtgtgacagacaaaaaggtttttctgcccttccttccttttccattatgcatttacaaatttttcaaggtaatggtggcgacggtttccaattgttagccgattcattgctcacttacaacgaaaacaatgaaaaattgaaaaagaagaagccgaggacgacacagaaaacgaacgacgaatttgaaaataaaaaagcgcaaaaagaggcggagaatggacggaacggtggtgggcacgacgaacagcaggaagaggaggaagaagaagaggaggtgggaaaacgcaccgaaggggggcatttacaggggaggatggccaagtgtccgtggagttttggaaacaaattttgtagattgctagtgaatcttgggttcttaagaaaagtgctccagcaagaccaaatcagcagggggaaagcgccccaaaataacggaatattattttttattaaatgggcaaattttaaaaattaaatttaacagtcctcaaaattgcttattttttccagccgaacaaattgacatttttgttcttcagattcaacgtcttcgaagagtccaccgcattttcacttggggtcacaacattccccgtccaatcagtgacttcgcttccctcccattgcccgacaaatttcgtgcaaatttgcgtgatttcatccagccgacgcccgttcaaatgcagggaattccgatcggacttctccacagggaccatctgatcacagcacccaccggtctctgctcaaactttgcatttcaaatgctcaatttctattttataatggcttttaattcgatg

SEQ ID NO: 72383 - DNA, 690 bp, Heterodera glycines
tcacctattacctaaatgtcgcacgggaaaattcgaatttgcctgaaaagaaccttaaattcaacaacttttttaacaacgacagaacaaagccaaaacaaaatagcaaaaggagacagtgaagtgtttggagaaggaatggacaatgaacagcagaagaaaacgcatagagaaagaagcaaaagccagtaaagtgccgaatgtttggttatgtgccctttgcatcattcagcaacgattggtccgcccaattctctcctccgtttgcttcgcccacccaaccgaaaagtcgtccctcgtcctccaattctcccccctcggcagcagaagaagatgaaaatccgctgccagccgcgttcagaattggcaatgagtcggagagcagtgacgagagcggcgcggaaaggtcggaacacgaggaggaagtgatcagacgaagcaaacagatcaggttgaagacggaccaactcggaacaattaggaaacgcgaattttgaccaggaatcgagaacgatgggaactgctcaagtacaaaatgttgatctcttcgtgctgcactccgtcaaaaaaccccagtaaaaatgacaacgaattgcctgctaattgtaagcacgaaacggcggaggaggaggagcagtgggacgaggaaagggagcgcgagttcgtgttcagtttgttgtaacggaagag

SEQ ID NO: 72384 - DNA, 432 bp, Heterodera glycines
ctcagtcggcactttctcttttccctcacaattttgcatctgttcgccccccttttcgtcgcttctgccctcaatttttactttcttgtgattatttttgtgcgcactgtcattgaggacggatcaccgaagcgggcgatcgcagggtttgcattttttgacaaaaagcaacagatggataaagcacgcgcctgccattcagaaatgcgttacattttttccgggtcacaatggttgcattatttgaagtgagtttttaatcagtatgtaccaggacgagggtactttgcaaggcaaattaaaatcaaaaaattattttaacaacagatgattttatgacataaattgcaagatgaattcgagcggggcaatcagcagaaatccatcgaaacgacttattttatgattatgatgcccttatgggctctcctc

SEQ ID NO: 72385 - DNA, 2306 bp, Heterodera glycines; identical to SEQ ID NO: 9696

SEQ ID NO: 72386 - DNA, 149 bp, Heterodera glycines
atgccgtggcccagttccgatttacagatttcctggtcatcggaatatatcaattccacttataatgcccccggcgtgcaaagcccggttatcgactcgctgatcaaccaaattattgccgcgcagggaaataaagaaaaattactgcc

SEQ ID NO: 72387 - DNA, 468 bp, Heterodera glycines
atgcgcagcacagtttcgtcttcaatggcacttctgtttcttcttcggctgccggcctcgtccaaaatgaggagaacgagtgaagcacaaagtgtgtgtatttttgtgttatgtttcattgggttcgcttaattgggcaattttgtctgtttgttgtgccccatttctaattttattttcgctttggaattataaagctttgttcggcttttcatttcgaaaatttttagattttagcaaagactaaaacagaaaaatttcggtaatctttcagcttttctttttactatcccttgtcattttcatttatttgctatgcttttgcttaatgttattatacatatgttttgtaaaaattataatcaattagaaaattgaatctgaatttatcatttatgttaatggaaaatcatttcagacatgctctcttcaacatccacgacaagtttggtgaaacgagataattaa

SEQ ID NO: 72388 - DNA, 524 bp, Heterodera glycines
  unsure (1)..(524): unsure at all n locations
atgcctgatttagtgcacagtggtgccgaagtaatatcaattcagtcaacttccgaagactgtgaaagacaatcaaatggttctgtatgtagagtcagtggaacaaccgaattaacaatattacccgctggacaaaaagtttcattagcattaaaagatgataaaggaaaaataataggttcattagaattaattttacaatttttacgattacactgtaaccaacaaactttaaaatggttacggtcatataaaataaatgttatttcaaaaagacgctgtccaacaatgggctcatgcacaaaaagtaaatgtaaaaacattaaaatggatgaaaaaattccagaaatggaagattatgaaaattttccatgaaacaatttctgtaaaaaaggagacgcaatttggggtcataaatgcgcactcccatcatcggaatgtttcttttatagaacttacgcagaaccaacatcaaacacaatttgnggattaattagatggaccggatgggaatatgaattaaa

SEQ ID NO: 72389 - DNA, 388 bp, Heterodera glycines
atgtctgacaaccgaaacgaagcggaggagaaaatggcgaaagcaatgtaaaattaaaacgccatttttaaaatttcaattttaaattttgttttccttttttttcagcttcatttccgccgattgttggctttgtgtgtacgatctgcttccggcttcacaacttggccttggaattgcgatgatcagccaccgttttgacttctacgtggatgaacacttcaagactcgtcgctggaatctgggatccatgaaaatcaaaatgaagttcgaagcggatggcaccaaggaaatggatgttgtcaatgccaatttggaatcgtttggaattgcgcaaaagccgttgccaaagagagtcgtcggattcaaagccatttcactgaagtga

SEQ ID NO: 72390 - DNA, 238 bp, Heterodera glycines
gcaaaatgcgcagaatgccaatgaaaggactttgctgctgggtattgtgagtgcgtatactttggtacgtttcggaaaagggacccttcccgtaaaaaccaaattggtgttttttaaaaaaggaagatttctaaattcttgttcgaaattccgcgagttccatacataatactcccaatcttttccagctaagtgtcgttttgttggcttcacaaattcgcacatggctgagccgcta

SEQ ID NO: 72391 - DNA, 514 bp, Heterodera glycines
atgctctacatgtcacaatattccttgcatgattttaacattgattttgttcttttcttacaaaattttaagtaccatgtggagtttatgaaagttgaagaggaacgtgaggaattacgcctttggatggacccaatgcgcaacattgagtatcttattcgagacttcaagaataatttgcaagaaaactccgatgcgaaaagccaggcttacatgttgattgtgcgcaaaacacaaaacgaccttaatttcaacacaaatctgatcatgagccatccgttcaaagcattgtccgatcagcaacttttgattgagttaattcgcgaacacaaaaacagcggaattcggacggaaaacaaaacaatcacacaacaacagggacaggtggaaaggcgacaatttgaaaaggcacagtcccaaagaccaatacgacccctaaagattgtgtttcgatttgttataaatgctatgtgattctatttaacaatttattgtatataatttgtaaaataaa

SEQ ID NO: 72392 - DNA, 627 bp, Heterodera glycines
gatctcaccacttccgctgaaatgcaacctatcgccttggataacaacaacagcaacaataatatggtagcaagaatttttggtttgtttatttgtctaatattccattttgttttagaatccacaaatttcttcgtcagcatcttcatctcgtcgccgaaacaatgccaatgccggacgtggccgaggaagaggaggaggaaccagacgcagagcggtgagacgattgaatgaatgaagattaaaaaaaatcattttgtgaattattattattatttgtttcattttaaaataaagaatgctcgtcaacagacccaaagcgaacgaattcagtcgtcccaaccccaaacggtccaaatactttctccatcagtggttcaacatggccaaggtttaacacgtgaacaatgcgatagtatacttcccaatctggaagtgaacgaggcaatggtccgaaatgatgagcgatgtgttatttgccaaatcggatttgacttggggtcattgaatgctaccgaactcccatgtaaacatctttatcatttgtcatgcgctagagattggcttatgcaccaaaatcgttgtgccatttgtatgcgccgttttgtgcttgactctgatgcttaa

SEQ ID NO: 72393 - DNA, 477 bp, Heterodera glycines
atgtcaacaatcggagtagatgaaatattcaaactgtcgcaaaaagaccatcaggttttcttcctctgaatcaaaaaaatccttcaaaattttttagcctcccgaaaaaaggagcaaactcagcgatggatcaacacaaattgtgccgtcggttgcggcagcaaaaaatggaggcgacattttggaagcattagaaaagtcggaagacacttcagaactcaacgaaattgacgaagcgtcggtgaagcggatttgttttcaggttcagtgaaataatgacaaattgacagcgaaagtgattttagttggagagaaaacaggggaaaaatgcggaattgcgcataaaatacgcggaagagcctccgaaatttatggagtcggaaattgaattgaacaacgcaattcaggcaattacaagacaaaattgggctcttatatggtttgtcccccatgaattttttgaaaaaattataatta

SEQ ID NO: 72394 - DNA, 773 bp, Heterodera glycines
atgaacatcaccgagctgatcaacggactgtgcgtcaaaggggccggatgtgtcaactccatgaattttgtgttcttccttttcattttcatggcccaagtaattttcatttaattttttgatggaaaattgtatattataatttctataattttgaggtctgtattttttgggcaattttgctcaatgtgccagcgcgcttgcgctgcatcgagcgccttcgtccgcgtcgtccgcctgtttccaacaatgatgagggccacccgcgtacgcttcgctttcttgtccgtcgtgaggtgagtgggaacgctcccccccaccccatttttttcatttccttccttttggataatttttggcaattcagcgttcgtttgttcatcgattgccggccgggagtgccgggcgagaacgcccaattggaacggtgggggaggggtggggaggggatgactaacaaacaaataaataaaatcacaaattttcacaggcttcaacggaatttgtcggtggtagattgtccccaattgaggaggtggcaaattttaaaaatatcaatttgtaaattaaaatttttttatttctacaggcagacgaggccgttgagaattgagaactgaagagaagtgaagagaacaagagaagagaagaggagaagaaaatatgaaaagagaaaagaagcacaaaggaaaaatttttaaaagaaataatcagggtatcattataagtttgtccatttatttaaataatttggtgaaggttatttaaataaa

SEQ ID NO: 72395 - DNA, 1075 bp, Heterodera glycines
atcagattaatgaaaatgtggtcaaggaagcggtggattctattgaagagtacgaggataacagtgcgtatatagaagtggcaaagaaatgtaatgaaattgttcattgggaggatttggtgagatcatcctaccggggacacacgcagccctcgagcaccatccaggtcaaattggtggggtgggtggcgacaggttgaatgatgctcatgacagaaaaaggtgatcagttggactaaagcaattggaaaaattagaaaatgcatagaaaaagagcacagaacaaatatgaaaaatgatggcaaatgcccgtggctatagccgaataagcccaacccaccccttcccatactcacattccgatcacttccattgtccacaataaccgtcgtacattttctttgtccctaaaagttttcagtccccctcccccttgtcccgacccttctccacaaagcaaatcgctagatcaaaatctttggatgctcctttcgtccacattttgcgattccgttggaaacgatatgcatattaatattcgggggtggagagatagtacacaacttggagaggaagtgcgaagaagggaagagagaaaggcagagacaacgagaacactctgtccctttcttctcttcccttggccacccatcggctcgagtgcaaagggaaaaggatgagaagaaaagcaatgaagaataaaaaatttattttaaataaaaataaaaatttacagtataccaaaaaatgcgcgaaaaacaaacagccaatacccttgggttttttgcgcgaaaaagtgtgaaaaccagggaccgtcgcctccctccccttccccgaaaatgcgcgaaaaaacagccaatacccttgggtttttgcggtaaaaaagggcaacaaaccggggaccgtttaaggtgtgaaatttcacaccttaaacggcaacgggtaccggccactaactacttacggctcccaataattcgagtccgcagcaattgcttttcgcattgcattttccatactctgcacgacttgtgataaatccaagcggtctgacatatccacgaggctaaagaaa

SEQ ID NO: 72396 - DNA, 611 bp, Heterodera glycines
gtgaaaatcaaatacacagacgaagccaaacgaaagtgttgctgggttatgttagccatttgcatcatttgtgtaagcctccgtttctatttcataaaatcagaaaaaaattttcccctcccccagccgttcgtcacgttgtttatgctcacgtttatgtccatgattctgcttttatccacaaatctgaaaatactctcctttctttcctttcttcctcctgaagtgcttctgattgttgtgatcctcgcagggctttcaagtcagacagctagtgtcgtatcactaatgctttgcttccacaaatcgtattttggtaaaatttttgggcattaaatatgttcaaaaatccatctctcccctcattttacatacagactgcaaacacatggcgcttgaagtgttgtacaactgtgattcatgtggccatgatgtgcacaaaacttacgaatgcttcagtacggcacggatgaatttttgttttggtgcagaaaatacgcgtccaatcaatgaccatgttcagtcttttagtccacaactttttttcttacttggtctatgcttgttttgaaacgaaagcttaagtactcatgaatttattgcataataaa

SEQ ID NO: 72397 - DNA, 730 bp, Heterodera glycines
  unsure (1)..(730): unsure at all n locations
gttttgcatccgtggactactaaccaaccaacctcttttttaatgatttgtcttttgtccgactgtttgtcggagctggccgtgctgttcagctgctgcaactgttgctttagctcggcaccaacgacgcgtggtgttgttgggccgccgctgctgagcgcggcagacgcagtagaaaatgaacgtgtcaaccgctttttggccttgaaaattgccgagtctccgctgctcagcgcctcgttgtattcttggacaggacaacgcggcagttcagcctcagacgacgacgaagaagatggattcttgacaagggactttcagttattttgacaaatcaacggattgccaatcaccttgctgaacccacaggcacaggacaccggcacacacgaatcccaatagtcagaatcaaacggaatagtgacctaaaaagtaagggcgattggcattttaaataaaacaacacaaagaggtggggtttgttgacaattctgcgatgccaaacgaatgttttataaaaatgatggccaacatattggatttggaattttgtaatgctttttcgaatatctcgaccccaatttggacaaaagacaatatctngggaagtcgggattaaatgacaagcgctattccccatcccccattcgataccatctacaaacaataaatgtacctcattggacttngtcatgtccgctgtnggcacaaataaatgtgtatttgaccc

SEQ ID NO: 72398 - DNA, 242 bp, Heterodera glycines
atgccatcgaatggtgcgaacgaaccgaaaatgtgggcccgcgaaggaatcgacgcactgaacgggactgtacagttgcaaagcccgcccggttacggtagcttcccctttttggacggacggcgttttcaacgagaaaacggaagcaaaatttggtatttcgtatatgcggtggagccaatgacggacaaagcaaaggacggattgccaaagcaaagcttgacaaagtgtttgtcggaagg

SEQ ID NO: 72399 - DNA, 48 bp, Heterodera glycines; identical to SEQ ID NO: 65457

SEQ ID NO: 72400 - DNA, 304 bp, Heterodera glycines; identical to SEQ ID NO: 69803

SEQ ID NO: 72401 - DNA, 1050 bp, Heterodera glycines
atgaaagagtgtttcgccgacggcaccttcagcatcacaccgaagcctttccaacaagtgtacgcaattttggcacggtaagaaatttaataatttaacaattttgaacttattatttaagtcggaatcgctgggtcatgccagtgtgctactgcatgctgtccaacaaaacgcacactacatacgagcgtatgtttcgtatgctcgttgctgtatggccagacttcaacccgtacagcgtgtcgatggatttcgagacagcggcaatcactgcgctgaatgtagtcttcccattcactgaagtgcgcggatgtctgttccacctcgtccaaaattttcacaaaaaatttctgaatttgggctgaaacagttgaattcatgacaaaaaaaaaaaatcgaattttcgaaaattttagcgctatcaaaatgacccgacattcgcagaaatggcacgatgtgtcacgtcgctcgcgtttctcccaattggagacttgacccctggaatcattgctctggacatggctcttcccgacgaacttactcccgtccttgactggtaaattgacaatctcaaattgtttagtatttattgttctttaattatttattaggttcatcatgaactacacgggtcgtcttaagcatgatgtaagcagaacacgcccgcgatttgacccaaacatttggagtgtttacactcgaacactgcaaggcgatgaccggacgaataaccattcagaagccgcgaacagacgcctgcaatgcgcatttgcctgttcacatccatcgatttggcatttcatttaccttttgcgaaaggatcaaaagttatccgatgatgacttcgcgaagtgttcaactggacaagaaccaccgcaaaaggcaaagaaatatcgcgaagcagaccgccgaattctcacgatggttcaaaattatttaccacttaacaacgtagacaccaacattttcccaattcatcagccttttaatcatcactttattattgcttttttgatcggaatttctcgaaattatgaaatgagaccgtga

SEQ ID NO: 72402 - DNA, 788 bp, Heterodera glycines
atgatccccctgccggagtttgcggagcaccgacagaggttgccattgcctttgccatcccccgaagtgaggaagacccgtccaacttttaggaatcgatcatgcgctgggaagcagtcatttttggacctcaggacacaccatttgaagacggaactttcaaattgacactcgaatttactgaagaataccctaacaagccaccaaccgtcaaatttgtgtcgaaaatgttccatccaaatgtttacgccgatggaagtatttgtctggatattttacaggttaatcttgtctttaacggaattttttaaatttatttttttaagaaccaatggtcaccaacttatgatgtggctgcaattttgacctccatccaatcactgctggacgaacccaacccgaacagtcctgcaaactcattagcagcgcagctttatcaggagaatcgacgtgaatacgaaaaaagggttcaggcaattgtcgagcaggcaagtcttggcccaacttgggaatttagtcacgaagtttgaaaacatcctatatttagtcatggatgtctttttcggatggaaattcagaagaaaggaacgcggcgggtacatcaaatgtcgtggacacgggtagaggaacaaatccaacgaatgaaaatgcaccggtggagaacgaaagcagcagcgaaactcccaatgatggcagtaacatggacgagtgaaaatcacatattatatattgactgaaaggagcaaataccactgaccaatatgtccaaactatacaatttgattaaa

SEQ ID NO: 72403 - DNA, 1885 bp, Heterodera glycines
ccccccccccccttgtccatgtatgcctgggggctttatttttcaaccgcccgcctgaaaaggagggctttctttcaatgggacggcgggggggggggggctgtattatagaaatatatctattaaacattaaattatttcagttttctaccgcatctgtgattctttgtttttcgttgctcattggtggaatcatgggacttgtttttcgccaaaaagtgagaaaaaattttcgtaattctattttatgtaatatgttttattttaatgatttatactttgaaatcaaagcaacaaaattggaaaagaaatcggattcgaattaatttaaattggatatcgactgatcagatatcagtacacatcgattccaatgcaaaaattaaaaataaatggttgctttacaattaagttagtccaaacacctctgcacttgaagatgaacacatcgttgaaggagttgtacggcttgtccgacatgaccgcaattacattggcctgggacagtttgcagcgcgagttccgatgctgtggcgtcaacggcactgaagacttcaccatttggcgcacctccaaatggcacatgcaccaccgggagccaaagcccgcattcccccagtcatggtacatacacaccaccagcccaatgcttggccctcggatatttttttttttttggttggaggtctaaccaaaatttatgaaatgctaacgaaacagggagggagggtgcggaagaaatttatgaattgaatttattggaggggccttttttgggaaccacccactttggcgccagccatttcggcacgctataacatttttatttgtcatttaaattaaataagcttggtatattttaaagcgcttgatagtcccgattaatcaataaaattcaaaaaattagctctgaataaaaaagttctggccaaaaaactcaaaagattgatttttcggccatttgtttattgcttcttcccagacttttgagaagatttcatttgacccaaaaaattttatgtgctttaaagttgtgtgccggaacggttggctgagtgtgtggagcgcagcattaccatggacaaggagatgagcaatggcattcggccatcaatggagcaattagcagccgaagcagcgccaacctcggcagaagcggaagcatctgttgttggtggtggtgaacatgttgcgcaaaatcaacaacaattaccagccgattcatcatcatcatcgtcaacaattttcatgacaaatttcaccggatcagaggcggcggctttctatacaaacacttgttacatgccgttcagaacaggtgttgattttggaagtgatcatatataaaaatatttttgaacaatttgaactcttcattttggtcaatgctgagttgatgtcatatcatgacaattcgtacgaaataggacttttacaatcggcaaatcgtacaatattttctttataaaagctttaatttttgttaaaatatttcaaaaatttaatttcaactttttcttaaaaagccgtttttaattttatacgaaaaatacttttttaaaaatatatttaaaaaattgtacgaaattatcattgatccgctgggatagagcacactatttacaacttcgtttttcacataaaatgtgaaacatgcctgatttggaacaaattccatagccaaatagttaatttcaaaaatgccgaaataattgtttataattgatgttcagatttgctctcggtagttcatgttgcggcgtggctgtcaatttcttgcagtttctatctggtttgaaaattattaattcgtttattttaaatttttaattttcagttggtgccagccttctttgcaactttctttgctaaactggtcaaaaaa

SEQ ID NO: 72404 - DNA, 367 bp, Heterodera glycines
atgtaccatgactgggggaatgcgggctttggctcccggtggtgcatgtgccatttggaggtgcgccaaatggtgaagtcttcagtgccgttgacgccacagcatcggaactcgcgctgcaaactgtcccaggccaatgtaattgcggtcatgtcggacaagccgtacaactccttcaacgatgtgttcatcttcaagtgcagaggtgtttggactaacttaattgtaaagcaaccatttatttttaatttttgcattggaatcgatgtgtactgatatctgatcagtcgatatccaatttaaattaattcgaatccgatttcttttccaattttgttgctttgatttcaaagtataaatcattaaa

SEQ ID NO: 72405 - DNA, 139 bp, Heterodera glycines
atggacgtacagaaaaattttataaaactcatagaatattttatggtaataaatttttaaaaatacagtattttacattatttcaagaataaaaaaggtcatgagaatcatgagaatgatctgtagtgaaaaattgaaa

SEQ ID NO: 72406 - DNA, 243 bp, Heterodera glycines
atggtatttatgctatggattcttctgaactttgtgactgactttctgaacatggcggatattgttatgcagacgaggagaggtattaaatctcggcatttaaaaaacgcacttaaatataaatctttagaatattttgtggatggcattttgattagaaatgccaaattgacgcagaaacgttacatactcaggtaaaaaggcaaatatttgatttgcaagatttcaattttagattcatta

SEQ ID NO: 72407 - DNA, 228 bp, Heterodera glycines
aatttatcaaaaaaagagatagccatttttctgggataacctctaaatataaaaatcctctgtgaaataaaatggcgattgtgcacagccctccgtctcatacgcaagcgcttttgtgaggtataaaatttctcaaaaaaagagatagccatttttctgggatagagtataaatttaaaaattccctgaaaaataaaaggtctattgcgcaccgccctccctatcatg

SEQ ID NO: 72408 - DNA, 230 bp, Heterodera glycines
aaaattccctcaaaaataaaaggtctattgcgcaccgccctccctatcatgctcgagagcatttgtatgtgtataaaatttatcaaaaaaagagatagccatttttctgggataacctctaaatataaaaatcctctgtgaaataaaatggcgattgtgcacagccctccgtctcatacgcaagcgcttttgtgaggtataaaaattctcaaaaaagagatagccatttt

SEQ ID NO: 72409 - DNA, 214 bp, Heterodera glycines
agcgctaaaattatcagagtgccgaaaatcgcatgtgatctaagcctagaaaaaaatggtcaagtaaaaatcgtaattacgctcaaaaagcttctcaaacaattttaacgcttccaattccttctacaatcgcctttatacatcccattatgagcgctaaaattatcagagtgccgaaaatcgcatgtgatctaagcctagaaaaaaatggtct

SEQ ID NO: 72410 - DNA, 648 bp, Heterodera glycines
atgctggtgtggtaagtgtgaagaactgtgttcctccaggcaaaaaattctaagaaaatttataagcatttgaagggttctcagcagtttccctgcaaaattgtccgtttggggtactcaaacaattatggggagcaaaaatccaacgcagaattaaagtacagactatagggaagctattcccgaaggattcggtctccccataaatctgggcgcatcggttcggggggaccgccccgaaaacaaaaaaatcgattatttcaagtgtccgtttggggtactcaaacaattatggggagcaaaaatccaaggtaaaaataaagtagaggtatatcgaagctattcccgaaggattcggactccttataaatctgggcgcatcggttcagggggactgccccgaaaacccaaaaaaaaattttttggataaaaattatttaaatgaactgactagataatatttaaaataggttatttctcttcatttcagtatccctgcaaagtttggtgcgcttctgatcagtttctgaaaaaaaagttaagcctaaactttttggcctgtttaaaaaggaattaaaaatttttaaaaattttattcatctccctttttgatagaaaaagcatcagagtgcctaaactaacatgtaa

SEQ ID NO: 72411 - DNA, 815 bp, Heterodera glycines
atgtaccgccccagtcaaactccccgcctgacactgtcatcggcgcgggtcgccgggccaccgggtggcccgacttaacaccaaaatggacaccctttcgggcgcactcccgccccaccgattaagtaaggaatcgatgaaagtagtggtatttcactggcgccttgcggctcccacttatgctacacctctcatgattcttcacaaagtcagactagagtcaagctcaacagggtcttctttccccgctaaatttgccaagcccgttcccttggctgtggtttcgctagatagtagatagggacagtgggaatctcgttgatccattcgtgcgcgtcggtagttagccgacgaggcatttggctaccttaagagagtcatagttactcccgccgtttacccgcgcttaatcaagtttccttggcttaacattcagagcactgggcagaaatcagacacggtcaacgtccacaaggaccatccgtctcctctgttttaattagacagtcggattccccgagttcgtgccagttctaaactggtcgttcagcgccaaccgaagtgcataccctgacgagcatacacgcagctgaagcgctccacaagcagctctcaccactagtccacgcaccatccccgaaagaacagcacgcagccacgggcaaaagccgcctgtttcacgcaacagcccggctgacccgacctttagagccaattcttttcccgaagttacgaatctaatttgccgacttcccttacctacattattctatcgactagaggctgttcaccttggagacctgctgcggatatcg

SEQ ID NO: 72412 - DNA, 2174 bp, Heterodera glycines
atgctcgaagaagcaaataaaaacggcacgcaagtcacgctcaagcaaattgaagaggaattaaggaccattcagctggtgaaggacagcgcactcactttggcaaatcctcctgttgcaacccatgccattcacacccggccacaacagtggagggacccgaaaggcaaaacaccgcaacaacccaagagggccaacaatgcaaaggagcaacccgcgcgtccaccaaacaccaattatggcaaggcaagccgcggatcaccaacgcatccgtgcggctcatgtggagaatcggatcattggcgtacggattgccgattcaaggacgccacatgccataagtgccaaggacaagggcacattgcaaaggcatgccgacgcagctccaaccaagcgaaaaatcgcagagagcgatccgtccacactgtcgttgtcaaatcccactgcatgggaattggaaccgcagcaggccgctggtggcgactcacgttcatcatcaatggaattaagattttgatgaacatcgacactggtgctcaggccaccattctcacactcaaaacgtggaaaaagctgggttctccaaaattggacaaacccgacatcgaaacacggaactgcaatgaagtgccgttcaacatcgaaggaaaatttgtttgcgacgtttgccaacccaatcaagcacccaaaaagcttgtggcatacgtcagttccgaaatcaattacgatcttttcggactgccctggattgaggctttggaagtcatcccgcgtgaaatcatgcaccccgacatccacccaaaagctcaaccagccccagcagaaatcaacgccatggccattcctcagccaacccacaaaattttggatttggaatcgctcacaaaggcactccaggctgatttttcggatgtttttggccccggattaggccattgcactaaagccaaggcccatttgattctcaaacccgatgctcacccaatattctgcaaagcacgccccgtcccacacggcgccctcaatgccgtcaacgaagagttggaccggcttttgcagattggagccatcaaaccgattgagttcagccattgggcagcaccgattttggccgtaatgaaaaagaatggaaagacccgagtttgcatcgacttttccaccggcctcaacaattcgctcgagttgaatagacaccctttgccccggcctgaagacatttacacggccatcagcggctccgtctatttctccaatctcgacctccgagacgcgtatttgcagatggaattggatgaggaatccaaacacctttgtggaataaacacccaccgtggcctcttccaatgccagcgcctcccatttggcgtcaaatctgcgccgtctattttccaacatttgatggaccaaatcgtctcaggcatcccaggcgcgtttgcctacctcgacgacggcataatcgcctccaaaacgcttgaagagcacatttgtttcctttacaaactcttcaaacgaatccaggaatttggcctcaaaatccaattggaaaagtgcaaattcctccagcccgaattgctatttctcggccacgtcatctctgcgaaaggaattcgccccgaccccggacgatcagaagcaattcgccaaatgccgccaccacatgacttgagcacacttcgctcgttcctaggcgcattgaattattatggaaggtttataaagtccatgcgcgaaatccgcgaaccactggaccagcttctgcgaaaggacgtgaaatgggaatggaccgacgaacagcaaactgccttccaaaaggccaaagaaatcatgctgtcggaccttttgctcactcatttcgacccgtctcttccaatcgtcgtggctgcagacgcctcaaaagacggaattggcaccacaatcagccacatttttccggacaaatcagaaaaagtcattgagcacgcgtcctgcaccctcaacgacgcgcagaaaaactacagccaaatcgaaaaggaagcattggccctcgtttttgcggccccaaaaattccaccgaatgctatttggtcggaaatttactcttctcacggaccacaagccattgttggcgatttttggctccaaaaagggaataccgatttatgcggcgagtcgtcttcacgctgggcactgatcat

SEQ ID NO: 72413 - DNA, 2578 bp, Heterodera glycines
atgtccaatttcgaattcgacataaagtacatcaacacgtcatcctttggacaagccgatgtactgtcccgcttaatcgccaattatccccggccggaagaagacattttgataacaaatatctgcacagagacagattgctacatcaacaccatcctccaaactgcaactgatcaattgccgatcacgaaagcagaaatttcagaatggacgccaaaagacgaagtcctccgaaaaatttctgatcacaccaaaaacggctggcctcaaaagtgcaccgaccccgatatctcacattattttcctaagcgaaaggaaattttagagattgatggagttttgctctacggaaagcgagtgatcgttccgacccaacttcgtgaacgcatcatcaaggctctacacatggcacaccccggaattgtgcgcatgaaagccctcgcccgtcagcacgtgtactggccaggattggacttggaaatcgagcgtatggtcaggcaatgcgaagattgccagagcgcccaaaagagtccacccaaagcaccgctcgctccatggacgtcttgctcacgaccattccaacgcattcacattgatttcgccggtccctgttcagatggccactcctatttgattttgatcgactcattttcaaaatggccggaagtatacagaatggaccgaatttcgacaccagcaacgctccaagtcctccgatccattgtctaccgcctcggatttccagaagaaatcgtgtcagacaatgccactcaattccatgccgcagaatttaaggaattttgcagcgagtttggcatcaaacataccttcaccccgccgtatcacccgcaatccaatggccaagcggagagattcgttgatacgttcaaaagggccatgaagaaatgcgccaaagatggaaaattttgggcagaaaagatgcttctcgcctacaggacaaccccgaattcggcactcaacggactttcgcccgatcaattgttcttcggtcgaaggcttcgaactcagctgtctctcgtccatccgaaggaagaacaagccgaagtcatcaacccagccaaaatccgcaaatcacaagctgattatgcgcgaaaaatggcccgtcaatttgatcaacaccacggatcaaaatcggttgagtttttgccaaaagatcccgttttgcttttgaactttaatcgtggaaaacgattttggcttaatgggaccatcatcgaacgattggaaaaatccccgacgtatcgtgtccacgttccggcactcggaagaaacgtccaccggcacgcaaaccaactgcgacgccgttatcctcttgaggaggacggtaatgatacggtaaggatcccaccccaggctcaagaagagcaagactggacccatcgccgatccgcgagcctcctccgcaaccggcaccaattcgacggactcaggcaaagcgacgatctccgagtcctcctttggccccgcgtcgatcgcaacgccaacggaaagcgccgatccgcttctcgccaaacccctgagggttcagcttaaagaagggaggtgttggagtgttaaagaatttgaatttggcgcgcatcgattattgattaatgttgtgacgtgtcaatccctcccccttattcattttgtttatttaaacactccctccttccccacatggttccttctccattcatttgctattttacattttatattttgtactgcatttctcctccgacataaattgtgtttattattttattgtgtgtccaaagttgagacacaacaggttcattactatttttattctttagcctttagcaacgaaagaaaaatgaattgcaaattaattcaaataattaaatttttaagtttaatttttaataagccaacgaagtaatgacatgccatttcagaatttgttcttccatccatcataatttattaatcggttgatcaaaaattgttttggcacgtcctttgctcgtcctctcttttcttttccaagtccaatgtgccaatgtcgaatattttttgggctctgccgctatgaatgaattcgggtggcactttgatcacaaaaaggcgatggcacggctaaatgtgctttcagaatgcctttgtcgcctctcatttgtccctttcccccctctcactttaatatcgtccgcacagtcgtggattattcgcaattcgggctcaatttgactcaattcgcgtgtggtcccatccaaaacaaagcgtcctttgccatcggtatggcccaaaagtgaattttgcgattatttttattcgaaattcatttcatttgcgtggcacttgggccgcaggaattttcgcgcaacccccgcgccgtggcaatttttcggccattgcgctttttcctcagttgtcccccccccctttaaacaacctttgtccagtaaatcatccgaatctcccgggttccgatcaacgtcaaaaatggccaaattagtgtgtgctgcgaatgcgccgttacacaacaaaacgcccttaacgccaacgccttgaagccgaaaggaaatggcaaaagatggaaaattggacaaaa

SEQ ID NO: 72414 - DNA, 747 bp, Heterodera glycines
ttttccctttcgatgtttcctctcttcacacaattgcctttcccttctctccttttatttttgtccaattttccatcttttgccatttcctttcggcttcaaggcgttggcgttaagggcgttttgttgtgtaacggcgcattcgcagcacacactaatttggccatttttgacgttgatcggaacccgggagattcggatgatttactggacaaaggttgtttaaaggggggggggacaactgaggaaaaagcgcaatggccgaaaaattgccacggcgcgggggttgcgcgaaaattcctgcggcccaagtgccacgcaaatgaaatgaatttcgaataaaaataatcgcaaaattcacttttgggccataccgatggcaaaggacgctttgttttggatgggaccacacgcgaattgagtcaaattgagcccgaattgcgaataatccacgactgtgcggacgatattaaagtgagaggggggaaagggacaaatgagaggcgacaaaggcattctgaaagcacatttagccgtgccatcgcctttttgtgatcaaagtgccacccgaattcattcatagcggcagagcccaaaaaatattcgacattggcacattggacttggaaaagaaaagagaggacgagcaaaggacgtgccaaaacaatttttgatcaaccgattaataaattatgatggatggaagaacaaattctgaaatggcatgtcattacttcgttggcttat

SEQ ID NO: 72415 - DNA, 377 bp, Heterodera glycines
atgcccaaattttgtcctcgctttttggaatggcttaacctcaacaaattggaccaaattctccgcctccgatgcaaaacgtttagctgctgcgattatgagccatttgaccaagtgaggattaaaagcgattgttctggcatttcaaaggataattgacaaagtcacggccttttcagttggacgtccaattcaatttgaaacatctccaaacggaaattatggacaaagcgaacgggacgatcttctcggatgaactgctccaccttttgttcaatggaaatccgcacataaaagcatttagcactcgctgggtgatcaattgtggcgacgacttcaccgatcggctgattgaggtcgaaattcaaattaattga

SEQ ID NO: 72416 - DNA, 829 bp, Heterodera glycines
atggacactcagcaaggctatgagacggacgtgggagagaagggcggtcaaatgtctggtgagagagagcattcggaagacattccgaattttgccgtgacaggaggccaaaaacagcgaattgccattgctcgagctttggtgagagagccggcggtgcttttattggacgaagcgacctcagcgttggattcggaatcagaacatcttgtccaagaagcaatccaaaaaaatttgaaaggtgcgcagaaaaaggaaaagccattgggacgacattgtaaaaggagaaaaaagcccaagagaaattaaggatggaaggcataattaagcaaaattaaggacggactgtccttttgattgcgcaccgactgagtaccgtggaaaatgcggacaaaattgtggtggttagtgcaggaagagtggtgcagcagggagtacacagggaactgattgcgcaagagggactgtacaaacaactcgtccaaaggcaaatgctcggtaattttgggcatttttccgtttggcccgtttaatttgtcgattgatcactcaattagcttatgtttatatttcgagtgtctgatgtcggtaaatggttcagagcattggtcccttcgctttttccttcaaatgaaattaatttttaggcgccgaagtgaacgacgactttcccgtgcgtccggcgccgatgccgcagtcgcgccaaagtcaaaggcgaggttcgcgcgcacggtccaagtcgaaaaccatccgttcggactcgccgagtcagcaaagcgtcacggctcagagctttctcggctcaagtttggccagttcatacctttga

SEQ ID NO: 72417 - DNA, 1236 bp, Heterodera glycines
atgtccaacactctatccttgtacatgaacgtgttttggtcagtttgtctctgttgtctgatcactccaatggatcacttcagtcgtaacattgtgatgctgttcggctctctgattttcatgttttctctctcttggcgtctctccgttatcactttcatcgccgtgccaattatttttctcatttccaaagtttttggcgtttattacgacgtaagtcatccaaaaaagaattcaaagcttaaaattgattaattaagcgaattgcggaagaaaatcagcactcagtggcaaattccaacgacgtggccgaggaagtgctcagttccattcggacggtgaaaagtttcgcctgcgaacggttcgagtcgcttcgcttcctcagctttttgaacattaccctcggcattggagcgcgaaaagctgtggcacacatcggctttcttctcaccacagaggcgagtcaaagtggcggaaggcagagactaattaattaattaattacttggcgaattgggcaatcaatttggcaattaatcctgctaattggggaaattcatttggcattgtttcagttcctccaaatgggaatcctcacgatggtactcttctacggaggacatttggtcatccaaggaaaggtttgtccatgccgttatgaattttatgagtttctctgagaccgatgccactcaaatttggcattgtgtcataagaaagagttgtcaatggcccctcatcaatcagcctttgtttctgatcagatcagctcgggattgctcgtctcctttatgctctaccaattccaattgggcgaaaacctcagagtttaactcagaacagaaaaaaggaagtgaagaattaattattaaggaattaggcgaagtttggaacggacttatgcaggcggtcggcgcgtctcgcaaagttttcgaattgatcgatcgccgtccgttggtgcaaaatgacgggcgaattgcgccggacggacgcaatgcaaaaattgaggggcgcatagaattcagaaaagtgcgctttcgttacccgacccgaccgaatgtgccggtgctaaacgtaagcggcggacagcttccaacacatttgatcacctctcttgaggacctttccttcactgtcgagcctggccaagcggtcgctttggttggccccagtggcagtgggaagagttcgtgcatcggactgatcgaacacttttacgagcccgactcgggcgaa

SEQ ID NO: 72418 - DNA, 366 bp, Heterodera glycines
atgtccagacaggcaaaacagcaagccaagccaagggcttgcccaggtgagtaccaagaggatgactcgaccatggcaagtaaaaatgggaagaggacaagcggagaaaaacagcaaaaggaagaagctgcggatctgaggaaaagcgatcagacaaaagagtcggggcggaaagtatcaagcaaaagaaagaagaaaagtgatcggagtgatcgggcaaaaaagtcgaatgtttcggtgcgcccattccctccacacccaaaatattcccctccttcgacctctcaattttccgttgtccgtcagtccagtgaatgaatcttatcaaagaaagacaaaaattagggggggggggggtaattagca

SEQ ID NO: 72419 - DNA, 747 bp, Heterodera glycines
gagtcatcctcttggtactcacctgggcaagcccttggcttggcttgctgttttgcctgtctggacattctcgtcaatgtgataatgccaagactaatttcaattttccatcatcgttttacttccccgcaggtgctcggcttggcttgggatggtcgctttttcaccatcgataacatttaccactggttcgacttccgctattataacttcacactgaaccccgtggattttttggtctgtcccccgggggcttttctcgatgcgtcccaaaatgccttaggctgttgccattctccgcgtttgcgtccttctcggcggtgcccttggcgtatatttcaacccaaagggcggtgccgaggcgtgtgccaccttctccaatttgactttcgccttcgttttggtcattgtcgccttctcccccataaaattactcgctttctatgaacacgaggagatgcaattcgccgttggcgattggattttgatggtttggtgtatcgtcgccgccctttttgtccaggtccctggccgatcgtttttcggcacacccaattgcttcagggcatttgggtgaccgttttcgcaaaagtgcgcgaatcgatggtcacgcgcggcgacgtgcggcaccagcgaatgttcgagcaggtggacaacgaatacttcgcggagatgcaaaagcgcgagagcgaaatggacgcgcagaagcgcgagacgatggccatgctgtggcgactgttcggttac

SEQ ID NO: 72420 - DNA, 1374 bp, Heterodera glycines
atgaattcttcgaaaaaattctttgttctcattttggtcctcgcccttattgccgagccttttgttgtctgcaagcgaagtggcacttatgggaggtgggcaataccgtactcacttgactagtgtaccatcgcttactgtactgcccaattacgtatttttttatttccatcgtatctgaattggattggatcggtccgtctctttacttttctttcgtcctttggcaggggcgggtcgccgtcgcgcggaacttcgatacggagcaggtgccaatcactcatccgtcaattatggctcttaatttatttctgatcggaccgcttaaatcccatcaaatggaaaaaattgttttttggcgcttaaacttttatttactaaacccaaaattcgaaaattaccccgaattttgaaggatttcttccgctcttggacgaaattccggctcaaattacccgataggaggctatggacgtgacagaggcggaggaataaccggaagattatttggacataaaaatcggcataattatggtggttatgaccgttatgggacaggcaaatacgggggaaaaggcgcgggacttttggggggcggtggccgaggtgcggtcggacgcggcgtcgccggtggggggcttctcgggggactgagccgttctcgccatcgcgggttgggtggaggaggaggaggctacaaaacatcgatgttccgcaacagcggaatgggctcccgctcacgatcgaacacgttcaaagtgaggcgccgcacgggggaagaatggcatccattggatgagagggcactcggatgggagggggaaggggactatggcaccacttaaaaagagtgattttgggaaggggtaaaaagaggaagggggaggaggtcaaattcattaattaaagcaggagaccattacgaattcccatttaacagaatatgattgtcggggcagctgccggtttcttggcttataaggccggcaaagcgatcattcggaatgtggcggcgccaatgatgtcagtttccggggagggcatcgccaacccttcgcaacaattggcaaaaattttgcattattctgtcattttttaggtggaacaaccggcaatactactggggtaataagcaattggcattaccacactaaataccaaacgcattgccaattagggcctcagtattacccgtcccaccaccaacgccacggcatggcctcgcgcacaatgtgccgaatggccatcgacccgagtgacccggtgcttggccaagtgtacatgccggacagcaccaggcccaaggagatcgtgtggagttgcgagatgcacgaggttacgtcgagacaaattcaactcatcttaaacaataaa

SEQ ID NO: 72421 - DNA, 293 bp, Heterodera glycines
atgaagcctctgaaaattgacgtggatttcccctcgaatagtcatcccacttcccaagaattaaaccaagattgtattcctttgtacgaaatgcttgaattcgaggaacttcaattcccaaactattacctttccgaacaattgggaaggggtgcccatgcgacagtgatgccgtgccatttccatgggaagccggcagcggccaaacttttcaatgccaacgtggacttcaaaacgatccaaaaggaggccaagctgttgcacgagtttcgccatgaaaacatcatcgaatt

SEQ ID NO: 72422 - DNA, 2899 bp, Heterodera glycines
atgttgtcaaaagtttgttttccaaaatgtttgttgctgttgttattcagctgtataattggcaataaattttcattatgcgaccaaattttatcgcctcaaacaactgaagaaaaagattattcggaatgcggaatttcggtctttgatccgttcaacgaacgaagcgaagagaacacggaaataagccatgtaattatgttattaattacattcataattaggggacttttaactgaagcaaaagcgaaagctgtttttttgaccagaaaccgaaaatcgaaccgaggggctttaaagcgaggaggggaccaagttgcgtctaacaatgagacatcattaaggaataattacttttttcatcattttattaaactcaacaaatttaataaatccccggataaaaaacgaccgtaaccaattcccctaattaataatattaatttgttaggtattcaaagggcaaactgttgatgatgatcgcgcattgccgtggatggccacattgttaaggcgcccatgttctttcttttttcaaatttttttaaaattaattaattacactttttggcttaattttaaaaaatatttggaattaaatttaatctaattttgtgaaaacaattaattaggtacatgtaaattattataagtaaattttattaaaaaggcataaaaataaaaaattttatttattaagttgaaattgtccaaaatgcaactgtttatgaaccattttgcactgcaacaatcgttggaccaagacacattttgacagcattgcattgcgttgccgacataaatctcttcgcaggtacggtgaataaatatactgtacatgaatattgtaagaattttttttttactttataatttgacaaaagtataaaatttacaatttttaatgaaaaagattcccctgctattggaaatattttttgaaacaaagttttatttttttaaacaataaaaattgcgcaaaaattttatggctgccggaaccgctcagttgggcgcgcacggttgggcgccaacatgtttttccactatagctttttatttgttatccaaatccaacaatcttggtatcattcgaaagctcttaacatgctcacaactttaataagatataaattattttgtttaaataaaaattaaaaggcgcaaaaaaatatatatttttattttatgttcaatgtactgtacatcaatattgtcatattttggcacgaaatacggtatttctctaggttgctcgaaagcatgaaaatttaagaaaatttgattgaattttcagaaatttttgcaaattttttgaacctttttcatcactttttgaaaaccggaattaaattgatatttttttttgtgctaatagtgcaatccgagagttaagtatgagacacaagattatttaatttagttatgcttaagaaaggttatgacgaattttctcaaaaaatctgaaaattggcactttttgcgaatgacccacaggcactaatctgcttgctgttggtccgtggtcacttatattaaccaaaaaataaataaactaaaaaaagaaaaaataaaaagaaaaaagtgaagattgttttttaaatattatgccataattttttgttttttcagataattataaaattttattcggtgccgttcaaagctcaaaacaaacgcacaaattgcgcattaaacgcgtccattatcatgaaaatgcaacatatttggttcttaatgacaagttgaatcctgctagtggtgtttatggtgaaattgtgcacccggattttgctttaattgaagtaataaaaaaattcaattatttattttttaattaaatgttttttaagagcgtggagccaatacaattttcatctcgtgttagaccaatttgcttgtttggcataggtaagtatttataatttttttgaatttaaatttacctttaaatgcaattatataatcttaaaaaaattttcaaaaatttaaagcagtgaaaaatcattttttattgttataaaggaattttagaatttatagtaaaaattgttttattcattacgcggttttttttattaaggctagcctctaaaatttcaaaaaatttaaagcagtgaaaaatatttttttttttttgtacataattataattcaatattaatttgtattcatgctaaccccccatatttcaatattaaggttcctcaaatttgaaatattcattttctgaaaaaatttctgcccaacacttcaataattcacggccatttgttgttgccggatggtgctacacagagccaatttgctctaaaggaactcacaggacaagtgaccagctgatgtacggtacaatgcgcatggtttctaaagacgcatgcccacttgcttacggtaatgtaaaaacggatatgctatagctaaactaaatcggtatactatagccaaacaaaagcgggtatattatttgtaattccccgaaggtcggagaccaatcctaaaattaaaaaaacaatcgaaaatttaacaatttttaagggcgacagtggcagtcctttgctaagcaaaattggtgacaagaattgggtccaagttggtgttttatatggtggtggaggatgttctgaaaagcatcccttttccacaagtcggcgtcactgtaagaaaatcaaaaataaatatttaaatatcaattttatttattatttttaaataattttatttttcaattagcattatacacaccgatcgattgcgattggatttcgcgcgtgacaaatgatgaagtgaaatgtaaaggatggtgaattgaaaacggaaaaaatgaatttaaataacatttacattgtgacaacattttgatgcaatttacaaacacttacagtatttatgtacagaa

SEQ ID NO: 72423 - DNA, 870 bp, Heterodera glycines
atgctttttattggaattgacagaatgcttggaattgtatttggtgaaatgtaaaggaatacattctaaaatattattgatttatttccaccgtttttaggcatagcaaatgcaaaatccgactgtatttggctacgataacaattatttgtagtgctttaaatttcagtttttgtataacaatttaccaaagtatagaactgaatggtgatcaaatgatcactggcacttatgccgattttttcatggtaaataaattcttgctcacaaatcaacgaaaaagaatattttagggttcttctctatacagtatactatggctctttctcatcataattaccatattcatttatttatttgtcgggctcattataagaattaaatcggcaggtgataatttattaaaaaaataaaattaattttataatttaatgattaggtttgccttccgctgatcagattaattatcgtacttttcgttcacttttttgtataatcgtcgttaatgttggtggttactgtactaatttaatttatttaattttaatcaaaccatcaattgcttctccgatcactgcttggtttggccttgtgatcagcggaatttcactaaacattggtgcggcatcgaatgcacccattttgtgcttcacaaggtattataataattacttaaattaattaaatttttattttttttagtacggaatatcgccaggcattccagacggcgtttccatttgtgttcaaacgtttttcaaatgctaatcaagtaattccactacaaaatgggcatccattaggcactacacaatattgaatgatgtcatccagaagatatttttctggataaatcagtccatcattaaa

SEQ ID NO: 72424 - DNA, 430 bp, Heterodera glycines
atggcgaatctgatggaggatttcaaaaaaggaacaaagtgccaagaggtaattaacagtgccacggaatgacctaattaaggtaattaaggttcacttataactcattaatactgcttactccaagaatttatctacactaattacgcactttgttaaaaaggttacaacaattacagaaaaattgaaaatgatgccaattaccgcaatgattccataaatcagtgcacaaccaattagtgaccagctgggatggacatctttgaagaccaaataaaactgcaaaaaaattttaaaaaagtaatttttaaatatttcaattaatgactaccgtattgtacgttgtgttgtcattcattttgtttaattttatttaattaattttttgagataaaacaacgaatggcaaaatgctgaattatttgcttaa

SEQ ID NO: 72425 - DNA, 1098 bp, Heterodera glycines
atgatgaaagctaaggagttaaaagggagacttgagaaatatcaagttactctccaaagtttcgaattagaaattatttatcggcctggaaaaaagaataaagtggcagattttttgtctcgatataatataccgggaaatgaaaaggatcctgaaccaaaacaggaagaaaattcagatgagtttgaccttcagccaaaaattttaagtgcaaaaaatattaatgaaaatttaattgctgaaaatgatggaattttgaatgaaaatccaaaaataaccttaaaaacagtaattgaggcacaaacaaaggtaaaagaattggccaaaattttctatattttaaaaaccggaaagtgtccaaatgatgttctgaaatggaaaagagttgtttctgattatagcctaataaatggggccatttactttataaaaggcaaagaaaatatggaaagacctaaattaataatccctcattcattacgacaaaaacttttcattattttccattcagaaggccattttggattcgaaaaaacttggcacgaaattaaagaacgattttattggatcggaatgaaagacgacgttaaactgctaattgaggcgtgtgaaaagtgccaagtgaggaaaattcagccagggcaggccaaatcggctccgagtgtcccaatcgaaccatcaaatggcccatttcaaagaattcattgcgatttaatgggtcctttaaagaaaactgaaagaggaaacttgtatattttcttggcgattgatagtttttcaaaatgggttatggccaaagcaatcccggatcagaaagcgaatactgtatcagaaatttttgttgaaattgtggtccatcaacattcaactcctgagattgttgtgactgatcagggaagacagttcacttcgggaatttttaatgatttggcaaaaatatacggttttgagcatgtcactacaacaccatatcatcagcagtctaatggaatggctgaaggggctatgcgaatcatggctaatattatttctcaaatggtcaatgaaaaagggaataattgggatgaaattctgccgcacgctattttttatcattaa

SEQ ID NO: 72426 - DNA, 54 bp, Heterodera glycines; identical to SEQ ID NO: 53113

SEQ ID NO: 72427 - DNA, 1001 bp, Heterodera glycines
atccatccaatccgattgtgatcagtgacatcacttctgatgtgttcgaggccatgctgaatttcatttacacggacaatttatgcgcagtcaacggagaaaatgtggcggaaatgctttatgcgggtaaaatcaaattcaaataaaaaattattttactaatttattagcagggaagggattatatgtttttacatttttttttggcatatgctatcgcatgaaaagctcaaaaatagcatttttacttgttttccatacatcagacccagtttttagcatatataaaaacatattttggggtttcgttgtttttggcacatattttggcgattttttgggaaatttgatttttttttacaaaagttccttttttggcaatcaaattcttggcaaaatgtccccaaaaatgttcaatttcaatttttgtatttttggcgcttttcatgaccttttttcacttttaaggtaaaatttgatttttagctaggaaaattccgaaaaatgagtaaatttttgagagcgaaaaaaatttacgacaaaaaggattaaaatgcttttaattagcattgtgctagcgaaattgataaaaaacgagactttttgagaaattcacttattttttgagcagtttttttcaatttttggcacatattttgggagttttttggcacatatatatgtacatattcatatttggcgttttttagcacatataaatcccttccctgtttattagccaaaaaatacaatgtcaatgggctggtcaaaatgattcggaattttaatgtctcggagctgcgaaatgttttccgcgcttttgcaatgggtcggctggttgaggaagaggtggaaaattaggaaatttgtgaaaatttattaatggacaaatgaatttaatagagctgggcaaggcccaacccatgagggaagcagcaatgtttagaatccgaaatcaaaaaattatattacaattaaattaccgtagttcctgaaataaa

SEQ ID NO: 72428 - DNA, 399 bp, Heterodera glycines
atgtgccaacttctcgcagttcggtgttgttggcaccttttgacatgcattaaacaaatcactgctggtccgagactgattgaacatagtcgagggatcaaatggcgccttaaattgttcgcacgcaataaaatagggagaaacggacacattcagccaaaactgtggcatacggtcggcaaacacaatttgtgtacagtttgtgcccaaatggtcaatgtttgacgctttcggcacaggctaaagaaaataaaaaactttattaagagaaattttcagggcggccacctgcatatcgaaaaggctgacattagcatggacggagaaaagctaacttattacaggaaatcaagccaccatttggattacagtacccacccatcaactaattcgattgtc

SEQ ID NO: 72429 - DNA, 1591 bp, Heterodera glycines
atggcccgtcagacaagtgcaagggtatgttaatatattattttgaattttgaaaatcttttaaaattcaggacgtttgcacacggatttaaataacgttgtgcagaagttggtcgtgagttcattcgtgcgacatgaacgctgagcatgtggaatgtcagcgacttgtaactggactcaagcgacgtgctgctgagatgtgcgaagcacctgcgactatttcgtgctcaagtgctgcaaaaaacatgcacacctgtgctagcagctttccgagcaaagcgccacaaaaaagtgggtttatatccaaaaacaattttgttatttttttggttttttaggtgatcaaacgattgcgccgtgatgaaaatgcaccgcggaccgaacctctcaatttggagcagttggaaattccgaatacctatcgtatttacaagcgaactgaaattgacaagaaacactttctattggcggacaccggcgtttttcaaattcaaggacagaatggaccccaacggtgagacatcatttatacattaaatgctgatcattgaaccggtattaagaattctcatttttggaagagcttctacggcggattgggcccatcagatgaaagacatttacgcggacggcactttttcattgacgccaccgcttttcagttggcaatggtcggtgcggtccgcacagtgcttccggcatgcagtgtccgctactgttttttcaccttgtccgcaacatgaagaggcagatcagaatccttggcctcacacatgtcaattgaatttttcagatgataaatttttttcttagtagtttaggcttacaacactgatcatgctttcgccgagaagtctaagatgatcacttcattggcctttctgcctgtgcaccaccttcaaaatggccttaatgttcttcaaggacaaattccaccacaacttaacggcgttttaaattggttaagtccgaaggcgaattttatgatttttttgatttttctaggtttttggacaactacatgggccgaatgcgtttcaatgttccaatggcggcgcctctgttccacccgcacgaatggaatgttcatcagcgcaccttagatggtgctgatcgtaccaacaatttcgccgaggcattccatcgcaaacttcagcggcaatttagctgcactcatccaacaatttggcgcttcattgacacgatcagatgtgagcagaaggcaattgacgcagacatttcacgttgtgtcatgggagaatccgctccacaaaagaaaaagaagtatcgcgaagccgacgcacggattctccgactcgtgcaccgttataacgatatcaataaccagggattctttttttatgtaaatacatgtttttttcctggattctccatagcctaattagtaggaaaaacactttcttttttgtgtttgcgaacaaaaatcgggacttttatttacatatttttacatatttcggcatttttctacatattacatatgtacatatttttatacatattttggactttttcgcattttttcgaacatattttgaaatttttgaggatttttttaaggaaattttca

SEQ ID NO: 72430 - DNA, 140 bp, Heterodera glycines
ctcggaaagctgctagcacaggtgtgcatgttttttgcagcacttgagcacgaaatagtcgcaggtgcttcgcacatctcagcagcacgtcgcttgagtccagttacaagtcgctgacattccacatgctcagcgttcat

SEQ ID NO: 72431 - DNA, 155 bp, Heterodera glycines
acaaaaccaaaacatgaaattcgagacttatttctccttcggaccaagactaaaaaacccgagacttttcccgagacgctcgaacaatattgtaaatgataaatatttggtcaatatatcaaaagatatggtgcctcccgccaagggcgtaggca

SEQ ID NO: 72432 - DNA, 505 bp, Heterodera glycines
atgaatggtcagttgcagcagcgaattcggcacagcggtgttgccggcacaacaaacaatgccgcgctgaccacattgtcgatggcattgtgccgttcacaacagcagccagccgtgccgccgccgccgcccgagtttttcatcgaccaccgtaccaccacgttgttgaacggtggaaacggtagcagcacattgagcagcactacggtagcgattacgtcatccaacggtggttgccatgcgaatggcacagcagtcgtcagcgctgcgcaacaattggcaccatcaaacgtgacaacgccggcacttttgttgaaggcatacgaagcagcggtgtgtgattaatttatatattttaaattaatttccattacgaatcctcaaaattaatttttgaagatggtaattataatattcaaaatttaatttttctcggttttattttaattgcttttaaatttttttttacaataattgattgatagggctggaaaatatatgtata

SEQ ID NO: 72433 - DNA, 605 bp, Heterodera glycines
atgaaccgacggtaagcaattattcaattattattttgaaaaattacggattttcatttcaaattacaaattttcattttcccaatttttttaacaaatttcagttggatttgtggcgacgtttggatggacattctcccatcctttgaccatgctcaactcggcctcaaaatggcactgatttccgaccgttttgatgcgcttgtggacacgcattttgatgccaaaacgacggaatttagaatttggagagaaataaggattcgcaaggacaacggaacaaaagcgaaactctctgtacggatcgatggcaattttgtggattttccattgccggaccatccgctgcccaacataatccgtattaaggatcttcagatttagtaatttaaacgaaagtgtatattatattagagcattttgttatatgtatttttttcagctacattgaccactccgtcattgcatttctccgtgccaacaagcacgatttgggacagaatgggcaccgatttggagttgtctatttcaaatgcccgagccgatttgggatgtttttgtccgagaaatttggccaattcttacgacaaacgttcgccgtttga

SEQ ID NO: 72434 - DNA, 211 bp, Heterodera glycines
atgcaccccaccggtcccgtggtggtcgtctacgaagcgccgccgcaacagcaaacgtcgccggacaatgcgacacaaagggaaacgaaacagccgaaagagacggggaaaaacggaaacgaaattgtggacatgctccgctcatccatcgtcaaaatgtgcgtgaagcaaaaggacgaaaagcggcggaggacaccgacaattgacgaaa

SEQ ID NO: 72435 - DNA, 966 bp, Heterodera glycines
atgttcaagaaagctttggccggtgaaggaagttggttggatggccgggtccggcttcaacggtttgaacaaattttcaacggtcgaacatcgccgggaaattgtcgaatcggtggacatttggtaagacagcgccggaattgcaacatttgaagaaacggtgggcaatttttggtgggacgaagctgaaaaaataaaacaaataaggcggcgatgtaaaaattcacaattcagattgtgcaacaaacaaatattttaactcaaatcgcattatgagttgtgtttcgtccgccaaccccgccctccttcaaaagacagaatcacctgatcaacacaatatcgccatttatccaggaagtcacatttggagaacacctgacggacaaactgcgcaaagcccacccgttgacacggcacaaacgatcgaagtcgttcgggcacgtcgcaattgtcggagcaataaaagtccaagaaaaaccaatgggccaattcaatgtgaaagcagacgcggatttgattttccttctaaaaagtgaaaaatattcagatgattaatcgagtatgactcaaaaatgcctcattattcggaatattatagaggaatcggaagagaatgtcctccatgaccatctccggcacggtcggtccgaaacatttgacctccttgagataattgctggaggacgactgttgctggtggacatttactgggaattgctgctgttgaaccgatgggaaaagcgggggcggtctgttgcttgggccaacggaaggcgaaccaagtgccgataggcaccaccgtggaaaattttgaaaatctaagagacattacgccataaaattacaaattttctgaagaatttttaaaaataagaacaattgcccgaaatcagaacatttgcgcttaggcggtgccatttgttagtattagtgcaggtgctaaattaaaaacaaaagagaaaaaca

SEQ ID NO: 72436 - DNA, 70 bp, Heterodera glycines
atgaataattttggcgttggtcaaaaggactcgcagcgtcagcaaatagggcgcgtatctgttcttattt

SEQ ID NO: 72437 - DNA, 463 bp, Heterodera glycines
taattgtgccgaagatgaacaatgttttggcattttcggctgattatttgccggaattggtggcgcaacggctgaaggagcgattgggcataaaaatgccaaagaataaaaaccagcagaaaacgaagaggattttggccgaaccgatcaaagggacggaggcgaaaggcgcgcggacggcgaaaagagtaaaaaattaaattaaattaaaaaaacaaaataaatgcgatttttaagaaattaaccaaagtgttagccgaagcaagcaaaggttagccaatttaacacttcttttttaatagctcaaataattttaaagggagtcactcaatcgcctcattattcggttcaaacaaaacggacaaaaagtgatcggtggcgattcgaaaactaaccaacgattgttactatcttttggcccctttttattttgtttttttaaatattattctatttttaaaca

SEQ ID NO: 72438 - DNA, 56 bp, Heterodera glycines; identical to SEQ ID NO: 58360

SEQ ID NO: 72439 - DNA, 99 bp, Heterodera glycines
taacaatacacggcgattcaattttgggctccaagtacaattaagttggttttttcgtcttagtggtctgtgagttagtcaccaaaaagggggtctcaa

SEQ ID NO: 72440 - DNA, 361 bp, Heterodera glycines
ttggaaccaccaccatcacaaagtgtatgactggacgttttgagagttgcggatcgatcacaaacggagcagcttacggctacagacctgctcatttcactgtttcacggaggatttgtgcaacggcgtaatcgccatgaagccagccgccgttggctgtgccgttttggtcccattgatcattagtaaggctggaaatctcctagattctaaataatctataatttgttattttacatatttgtgttcaagatttttaattttcttaaaatcaaaaacaatttttgaaaagtatactccaaaaacgcagaaaagtttctttttaaaattagctaaaggaaatggatattttttattcaaa

SEQ ID NO: 72441 - DNA, 258 bp, Heterodera glycines
aaaattccctcaaaaataaaaggtctattgcgcaccgccctccctatcatgctcgagagcatttgtatgtgtataaaatttatcaaaaaaagagatagccatttttctgggataacctctaaatataaaaatcctctgtgaaataaaatggcgattgtgcacagccctccgtctcatacgcaagcgcttttgtgaggtataaaatttctcaaaaaaagagatagccatttttctgggatagagtataaatttaaaaat

SEQ ID NO: 72442 - DNA, 2872 bp, Heterodera glycines
gtgtggatgtgcggtgggtccatcgaagtcgtcccctgctcccacgtcgggcacattttccgtgccggccacccgtacaacatgacgggccctggcggcaacaaggacgtgcacggcaccaactccaagcgactggccgaagtttggatggacgactacaaacggttgttttatgtgcacagaatgggattgaaggtgccgcaaattatgaattgaataaacaaatttgacttctcttcttttaggatgttgaagtcggcgatttaagcgcccgcaaagcgttgagggagcgtttgggctgtaaaagtttcaaatggtatttggacaatgtcatcccggaaaagttcgtgcccgacgagaacgttaatgcgtatggattggtctgttcggaaattcaattgattgagatccgattcctacttgaaaggtgcaagatacagacgggaaactctgtttggacacacttcaaaggctggagaacaaagggacagtcattttgggcgtttgggagtgccaaacgggcggctcctcctcacaggtgacgaattttctatttatgctaattccaaacaattaaatgacaacaacaaacgaataaattagacgaaagattttttagaaatttctaatataaaaatcagagatcaaatgtaaaagtggtcaaaaatcaactaatttttgaatttgggcacattgcaaatcaaagcaggcgtcacctccgattacgtcgaggcattagagatgaagattttcagcacattttggatgacattcccacctgaaaattgaacacgtttttactaaaagtggaaaaaactcacagccggggcaattgatgtccatcttttgggacaccttcgtgaacccgtccatgcacccgattgaacatccgcacgggtagaaaaaagagttgaattcacggcattcgtttggatggcagaactggcagtcgatgtctcgttgtcggatggagatcagttcctcgcctaaaccgaacagtttctaattccccgccattttatttttacatttttccctgcaggcgtagcattcctccacattttcgtctctcagacactttctgtgaacatttaaatggcagcctaaaaaatgtgaaaattttgacataatttcgcttataaaatgcctacatgggtagaaaagtgtgtcgctgtttggctcaaggcacatcacacactcgcccttaaccagctccgtgttcagtccgatgttcacttccgccctttgctccccactgtcccattgcgcctctctttcttccgcagtccatccacttttgagaagacgcgctttaagctttcgttccaacagtccacagctgctcaaaatgcttagtgtgctactttcttcgtacgaccgcctcaacaccgcctttttgtccacttcgatgacgagagaaaagtctgatttatacggaggataacgcacactaaacatgaatttaaacaacaaaaaagattcgccctgacctgtaccacggagtcggactcacactcccaaatgagaagcgaaccttaaatagtctcaacaaacgattagtttcaaattgctgttttaaatttgatacccggactccgtttccgtcggccaagtccagagaaatggtgaaaatttgaccccgcttcggagcaaccaacagccaattgggtatttcgttcaacccgttgtccacaaaacgcaccaattggatgaaactgagttggtctggcgttgcgtttttttcactcagcagagcacggtcttcgtaaagctcttgcaaagacaggcaggagaagccaatgcggggaagacgcggaaagtcatcctgacaatgtgaaaaccaaaaatcgaaccacaatttgtacctcgaaaaaaatgtggacatcgacgccatccgaggacacatcagcgcacaattcgttaacacatttccgggaaattgcgaaatgcgcaaaacattgaaactgaatgtatggctcgagcgatgtttccgccgcctctttccgaagaattcgcacatttttgattaggttggtctgtgaggaagttgaggcaccgctgtcctggttgtcttggccgtcgtcactcaacgtgtccttttgtgactctgttggctctggggttttattcagaattggaagctttttctcggccggaagaggccttgcaaaaaatattggcatttcaattcacctagaacaaaaatgccgaatattgaacatttatttgtacacacaaaaagttcagagacataaaaaggagaacaaaattgatttaaaattattgattctttgattcttaacacagcgatcgaaaatgagcccaaaagatttgcatgtgtggctcagtggtttttgtaagatagccaataggaaacgggtgaatgttcgagtctgcttcactttattaatacttttatttatttacttccaaaataaaaaaaaatctatttaagctttggaagcaggcttttttcaaaatccgagctctagcattaacaaacaaaaaataatagattttaatttaaaattattttttaaggcgttcagttggagcaaagatggagaattaaggcgtgagagcacttgtgtagatgtgcaaaaatcttctgccgctgatgcacgttccaaacggaaagccattctcagagaatgcagcagacaccaaatttcgcagtttgaacaccaaaaagttttaatatttattatatttttttaatttgttccgttttaaggacggtccgttgaagcatttgtcctctgggctgtgtttggatgtgcaatcgctgaacgccggcgacgacatttacttcgcccagtgccataatgagaaacaaagtcaaccatggcaatttggcacatacttttgagct

SEQ ID NO: 72443 - DNA, 1461 bp, Heterodera glycines
atgccaatattttttgcaaggcctcttccggccgagaaaaagcttccaattctgaataaaaccccagagccaacagagtcacaaaaggacacgttgagtgacgacggccaagacaaccaggacagcggtgcctcaacttcctcacagaccaacctaatcaaaaatgtgcgaattcttcggaaagaggcggcggaaacatcgctcgagccatacattcagtttcaatgttttgcgcatttcgcaatttcccggaaatgtgttaacgaattgtgcgctgatgtgtcctcggatggcgtcgatgtccacatttttttcgaggtacaaattgtggttcgatttttggttttcacattgtcaggatgactttccgcgtcttccccgcattggcttctcctgcctgtctttgcaagagctttacgaagaccgtgctctgctgagtgaaaaaaacgcaacgccagaccaactcagtttcatccaattggtgcgttttgtggacaacgggttgaacgaaatacccaattggctgttggttgctccgaagcggggtcaaattttcaccatttctctggacttggccgacggaaacggagtccgggtatcaaatttaaaacagcaatttgaaactaatcgtttgttgagactatttaaggttcgcttctcatttgggagtgtgagtccgactccgtggtacaggtcagggcgaatcttttttgttgtttaaattcatgtttagtgtgcgttatcctccgtataaatcagacttttctctcgtcatcgaagtggacaaaaaggcggtgttgaggcggtcgtacgaagaaagtagcacactaagcattttgagcagctgtggactgttggaacgaaagcttaaagcgcgtcttctcaaaagtggatggactgcggaagaaagagaggcgcaatgggacagtggggagcaaagggcggaagtgaacatcggactgaacacggagctggttaagggcgagtgtgtgatgtgccttgagccaaacagcgacacacttttctacccatgtaggcattttataagcgaaattatgtcaaaattttcacattttttaggctgccatttaaatgttcacagaaagtgtctgagagacgaaaatgtggaggaatgctacgcctgcagggaaaaatgtaaaaataaaatggcggggaattagaaactgttcggtttaggcgaggaactgatctccatccgacaacgagacatcgactgccagttctgccatccaaacgaatgccgtgaattcaactcttttttctacccgtgcggatgttcaatcgggtgcatggacgggttcacgaaggtgtcccaaaagatggacatcaattgccccggctgtgagttttttccacttttagtaaaaacgtgttcaattttcaggtgggaatgtcatccaaaatgtgctgaaaatcttcatctctaatgcctcgacgtaa

SEQ ID NO: 72444 - DNA, 80 bp, Heterodera glycines; identical to SEQ ID NO: 51817

SEQ ID NO: 72445 - DNA, 80 bp, Heterodera glycines; identical to SEQ ID NO: 51817

SEQ ID NO: 72446 - DNA, 304 bp, Heterodera glycines; identical to SEQ ID NO: 53844

SEQ ID NO: 72447 - DNA, 304 bp, Heterodera glycines; identical to SEQ ID NO: 53844

SEQ ID NO: 72448 - DNA, 394 bp, Heterodera glycines
atgggcgatgaatttacagttaatgctgcgaatttggacactaatgagggtctgaaaaaggctatgttattataatattttaattaaaaaatacatgagtgaatttaaataaaaaaccccttttaatttttttacagctggagttttgacattgacttcttatgacgagtctgcactgattcgacacaacgacaaagcaattacttatgaattaacagaaattgaatatccataatatattctcattctttaaaataattcatgttaaaatgatttatcacagcagagttttcatcaaaaaaataatttaattatttttaaaaaactctgttaaatttttttatttgtgttttttaacacttgattccattatggaattttttttttgtatgga

SEQ ID NO: 72449 - DNA, 93 bp, Heterodera glycines; identical to SEQ ID NO: 68445

SEQ ID NO: 72450 - DNA, 658 bp, Heterodera glycines
gttttcggggcagtccccctgaaccgatgcgcccagatttatggggagaccgaatccttccggaatagcttcactatagcctgtactttaattctgcgttggatttttgctccccataattgtttgagtaccccaaacggacacttgaaaaaatcgatttatttttgttttcggggcagtccccccgaaccgatgcgcccagatttatggggagaccgaatccttccggaatagcttccctatagcctgtactttaattctgcgttggatttttgctccccataattgtttgagtaccccaaacggacacttgaaaaaatcgatttttttgttttcggggcagtccccccgaaccgatgcgcccagatttatggggagaccgaatccttcgggaatagcttccctatagcctgtactttaattctgcgttggatttttgctccccataattgtttgagtaccccaaacggacacttgaaaaaatcgatttttttgttttcggggcagtccccccgagccgatgcgcccagatttatggggagaccgaatccttccggaatagcttccctatagcctgtactttaattctgcgttggatttttgctccccataattgtttgagtaccccaaacggacacttgaaaaaatcgattttttt

SEQ ID NO: 72451 - DNA, 1388 bp, Heterodera glycines
atggtgccgaaacacgaggaacgtttggtgccattgttccgctgtgtggacgagttgttcgacaatgggctcgagtttcgaaacagcagatgtgaagaggacgacgatgatgttggaaatgtaataaaaaaattaaaaataaatcaaaaattattgctataatttaatttattttgaaaaaaaaactaaattttttttttaatgaaatggcaacaaaaataatttataaatttaaaaatggaaaaaaaaattgatttttgaaagttctttttccttttcattttttagcatttttttttgcgatgagcaaaataaaggagccagagaaagatttaaaaacttttaattaaaatttttttgtctttataaatttatttaagattttaaaattcactattttttatttttaaattatttttttgagtttttaaaatttttaaaggcattgaaggactgactgactgtttgctgatgtgcccgattcggtcggtacttcaacaacataagccaaagcagcagccgcaccaataacaaggaggacgagaacatggccaaaatgagggcactgaacgaaaaatatgccggcgcagagcggacaaatgagcaaaatgcgtatgaaattgacactttttggcactaaattaatcgggaatgaacatattattatttaattcctttaacaaaattggcactataaaaaaagacatttttgtatttgagaaagtgtccagaaaaatgcaaaaacacaaaaattcacctttggcacataattaataatggggaatgtcccaatttattggttaatttttttttataaaatttgcaccataaaaagacatttttgtatttgagaaagtgtccagaaaaatgcgatacacaaaaacttttttttattttttataattctattttttttaatttttgaaaattttagaggctccattttcctccaatttcgaccgtctcttccgtcgtcccatcataaattcgcttgtcccgcaatttgtcatcataatttttttttaatttccattttcatttttcaccactctaccacaaatttctgtttttctgatgatgctgcacttttttttcaaaaatttttttttttttgcctttttaccaaatgcaaaattttgcctttcccaaaaataacattctttcatttttaaaaattattttctttattatttttatcatttattttatcatcattttatcatttgcaaacatgacacccattcttttgtagacaatttatgtgttgatggatttggaattttacatcaaaaaatgtgacttttttatctccctctaaaacagataagaatgttggaatccaaatccaatgaatgcaaaaaatgatttaaaaatgcaattaaaagaaa

SEQ ID NO: 72452 - DNA, 1150 bp, Heterodera glycines
atggctctgcttctaccgatgctgctgctaatcttggcacaattgcaccagcacatcagcgaggcgtacattcgtcgtctgtcagacattgtaccatcgtcgtacaacaccaatcgctggctggcatcaaataatggtgccgaaggagagcatggagatggcaccgccgattcgcgccagctgctactcttggtgccaaccgaggcacaaataatgcagcaacaacaggaaaatgaggagctgaaaccgcagcaacagtacatcaacagcccactgttgcccatgcggtaggctttatgtacaaaacgcccctgaagcgcttatttgtgttctttttttcggttttatcaaaatttgttgtttgaaaaaaatttaggtaaaaattttatcaaatttcaaagtcggcaacaaaaattgttttagaaagttgctgttttttcgataaagaatttttgaattcaaataaattattggtttaaaattcataattcatttttttgatgcccatgaatgatttgtaataaaatttatttaaatgcatgattttgttaaacgctttttcttagatttttgattttgatttttaccaatttatataaattttaagaagaaaaaagattttttttttgcagaatttataattgtttaggttagaatttatctgctttacctaaaaaatgtttattgaaaatcagagaaatctgctgatcagtcttatttataacaaccaatttaggcggccttgctatttctcgccaatccaatgtctgttgcgcacccagggacagcatgaaatgtttgtgcatcatccggcaatcaacgagttccgcgctgatctggatctgagccgtagtgatcaatccaaagaatctgttgacccagtggtgatcggcgggagcacttctcaacaccagcaagtatcgagccgatcattgttcggcacatcgacaatgctggcacaaaatttcatttttaaataattttaattgtcaagaattgagtgggatgagagagatttatggaaaaaccgggacacgcgattgaccggggccgtgaccctgattttcaaccaggacctggatcgagactcaagaaaccggggtaatccagatcaatctcggtcccgctgaactctacacaacaaaataaa

SEQ ID NO: 72453 - DNA, 417 bp, Heterodera glycines
atgtacaatgacgaaaaaaggaaaaaagtaaatttttaattgggttattaaacagaattatttaattataccgaagaaaaatggaattaaatggccgccttattggtaattgagtgatcatttagtgttaatatggccagagaaaataaatatatatttttagaaaataaatgtacggcatgtgactaaacaggaggattgttttatgtgccgccaaccaataaaatgccaaaaaggcactcattttggcacatcaaataaatttagagcgtaggaaaaatgcctaaaaagggataaattatgttagaaattggttcaattcaaaaagtttttatttttgcttaatataaaaatacgaattaatatatggacataattttttagacaaaaaaaaatggttaatttttttttgaaata

SEQ ID NO: 72454 - DNA, 477 bp, Heterodera glycines
atgtcgcagtcctttcttaaacgccccttgatttctaattcccctaatcaaatcccgcaaaaacgtcaacagttcgtcgacgaagttacttcaatgaatttggacattagcacacttgacgacgaacagaccatttcaccagctgcccgtgccatcatttcacaactcaacaatctactgaaaattgccgtctccatcgtcaataactctgtctcagacattgactacgctgcggagatggaaagacgtcgctctgtagtcatcaccggacttcctgaaaaccagtcggagactccttctttccgtgccatttctgacaacaatgccgtcacaagttttcttgaccagctcggggttaagacccgttctgtagtttgttacagaataggatggtacaacacagaccgagcaaataatggtgcttggcgtcccgtaaaagtcgtgctccctgctctgctgatatgtcaacaaaactaa

SEQ ID NO: 72455 - DNA, 758 bp, Heterodera glycines
tccgcaattggcgatttccttggcgagaaggacgatttcaatttggaagtcctacaacattttgtgcgtctccaaccacttcggtcgctgccattggtgcaggcaatgcgtgggtttttgtcgcgtttccgcttgccaggcgaatcacagcaaattgaacgcatcatggagtatttttcggggcattaccatgtccaaaacccgggcatatttgagcatcaaggttggtaaaaaaagtttcaaaattgataaattgcaattaacttctattttaatgcaatgttagcataaaaacctatttttgaagattggcatcatactacgagcagaatataattttttgctttttcttcagacaattgctacaccctttgctacgccataataatgctaaacacttcgctgcacaatccgagcgtaaaggagcgcatgagtttggacaactttctaaacattaccaattcattgaatcttccgccggcactggttacggttggcaatattttttgttgctgggcatttaatatgaacaaataaaaatttaaaaaataaatggctgattctataaaaattatcgcaaatttgtttaaaaaacagaattaatgctccttttctgtatgttttaattctaaaatttaaggacatttataattccattcgctccgaagccttcaaatttccggacgacaatttgcaagagcagttctctgccgctttgtttcaacagtcggagaagcagggatggcttgagaaacaag

SEQ ID NO: 72456 - DNA, 49 bp, Heterodera glycines; identical to SEQ ID NO: 51181

SEQ ID NO: 72457 - DNA, 1139 bp, Heterodera glycines
atgagcgaatttgttgattggattttgggatttaaacgatttgaaacggttgcttttgctcattatgctggaaggttcgactcgcattttgtgttaaaagagctgactgaaagaggggtcgaaactgagttgatgatggcagacctgaagatttatcaaatgaaagcgcgtggtgtgtattttcgggatttctggctgctcagccaaaacaagttggcagatcttccaaagactttgggtttgaaaaccttagcaaagttgtacttccctcataagtacaacaaaaatgtgaactttggaaaaaaattgacacacctaccaccccttgaagattattgtccggacaatatgaaggaggaggaatgtgctaaattggtaaaatggcacaatgaaaattatagaatggaatttgagctaggttagagaaaatctgttttccttttaaaattgaattttaggagagcagctcaaggtttattgcgaaaatgacgtcgaaattttgatggaggcaattttgaaattccggcaattgtttttggagattactgatgggatggatgtgttgaaggacagtgtaacaattgcgggggttgtgatgagaatttttcgaacaaaatttttgagagaaaatcatctcccaattattccggaaggcggttatgagagagccgagaatcagagcaaaattgccgtgaagtattttgaatggttggctcaaagcaaaagagtgagacttagacacgcatgcaatgggggtgaagtggaaatcgggggattaaaagtggattgtatcatcggagctgagaaaaaaatcattgaatttcaggtaggcagaatttccttccatattttattttttgctaaagggttgtgcgtttcatggatgcccaaaatgttttttgccttggaccataggacccaatgggcgttgtatggaagtaaatttccgacgaactgagacacgaatggagtttttgagggaaaaatgtaaaaacttctcggtggaggaagtttgggtgtgccaatttcaaattttattgattattgaacaaatttaggaatgcgatgtgaaagagaacttgaaaaaatagggagatgaagaggttctttgacgctgtgccggataagggtccaataaa

SEQ ID NO: 72458 - DNA, 663 bp, Heterodera glycines
atgtcagaatttctcattttccttttgggtttctcctttgccatgcttctcatgttgtgtttgctggtttcgctggtgctctttgttctttgtgcagcatggtattattggacaaaagaagaagaaccagaagaatttgatgattttccagaatacccaccgccttattaatgaaataaattttttgttgaaatgtgtcatgaaaaaacttggtttaagccatgtacattttttctgctttaaaatttccatttcaaatatctaagcttttaactttaataatgttcaactcatctttttttgctgatgtcaaagaactagggcgtattccaacaccaaagggaaaatttagtgagaagaaaaatgaaactcaatttatgaaaatatttaggtatattttatgcacttgagttcgctaagctttatcaaacggttggacgtgaaatttctcgtgataaattccgacatatcatgaaaacagggaaaaaacaacatgaattagcattggttttgatggaaaaggctgggataaatacacaggagaaaacttttgggcttaaacacctcgaatttgtgcaaaacttttgggacaaagaattcccagatatatttcgtatcgttgcgtttgatatggtaaacgaacatttcctaaactgcctgtga

SEQ ID NO: 72459 - DNA, 1128 bp, Heterodera glycines
atgccatacaacgccctccgtgccccacaacaccccatccggtttccaattgtcaatgttccgccacttccgctgccccctcaggttggatactgttttttgaccctattttgtgccaacatttctcaaacttttgagttcttagggacaaccaatgctgcgtaatgttgttcctgttcaccaccaccatcatccaatcaacggcctaccacttccactgccccatcaggtcaaaactcatgaccttttttcgccttctcttgaccaacatttcccatctttgatttgttaggggccactgttgttgcgtcatgttgttcatgttccacatcaccatgtccaacctccaccgaatggtctaccgcttccattgcctcatcaggtcaaaaaatgacctttttttcgccttctcttgaccaacatttctcatctttgatttgttaggggccaccgttgttgcgtcatgttgtacctgttccgcatcaccatgttcatcatccaatgaacggcctaccacttccactgccccatcaggtcaaaactttgaattattttgacccaaatttctcatctttgatttgttaggggccaccgttgttgcgtcatgttgtacatgttccgcatcaccatcatccaatcaatggcctaccacatccactgccccatcaggtaaaaactcatgacctttttcgccttcttttgacccaaatttcaccgctttgagttcttaggggcaaccaatgttgcgtcatgttgtgcctgttcaacatcaccatcatccaatcaacggcctaccacttccgctgccccatcaggtcctaaacccgcagttttttctaagacaggagaaatttaggctcatcttgtgccgccccaaccatggcatttcccacctgtcatcgttcgcgtcccgcccgtcgcacaaaggaacgaagctcttcaagttcggaactttcaaaacacccaaaatcatcaacgtgaatttatttaggcgcctccaattgtcaatccgttggggcaaaatccacagcaaatgatccgttggccaagacaacaatggattgggagaccaattgacccccgctcacccccacattaatgagaaaacagaatgcatttgttaataaa

SEQ ID NO: 72460 - DNA, 184 bp, Heterodera glycines
aaacaaaaaaatcgattttttcaagtgtccatttggggtactcgaacatttatggggagcaaaaatccaacgcagaattaaagtacagcctatagggaagctactcccgaaggattcggtctccccataaatctgggcgcatcggttcggggggactgccccgaaaacaaaaaaatcgattttt

SEQ ID NO: 72461 - DNA, 960 bp, Heterodera glycines
atgcaaccgccacaactgtcgattgagcagcaacaacagtacaaatggatgcaagtgaaaagagcgacggcaacgccccggggaatgccaacttcgccgggaggtaaaaatttagggagggcggaaaagaatagccgaaaacttgggggagggagcaaagaataacatttgacacttcgcgtccccctaatgagtgtatgaacggtcgtaaatctttctgcttgcgaagggaggggaaggtcaaactcagcaccccccaaaaaatgccaaggcaaaataaaaatacgaaggattttcagtggcggaacagcgagaggaacagtcgcgccaccggggacgaattcgcgggactgaaagtgccgtggcgggcggaaaccgaacgaatttcacttatcaacagctaacggaactcgaaaaggtaacgaacggcacaaacagagagagaggcaaactcatgaaaatgcattaaggaattccatacgaacaaatatttgaacaaaacgcgacgggcggagatcgcaaacacattgcaactgcaggaggcacaaatcaaaatttggttccaaaacagacggatgaaagtaaatcgaatggcattttgggaggggggggggaaggcattttgataaattatgggtttaaagtcgagaaatgggcatggatgggactgagcacttttggcacttttttgggtcgtcggatggaaagtccgcaggaaatattgtgctgacaatttaccgatttttttagatgaaaaagcaaaagaaggagcacgactttctgctttcctcctcctcctccaccgccgccgcttcgctttggccaaattcggcggcttttgccaacccccacccgccctcaagcaatgccaacaacagttccgatggtctctctacggcacaactttcgtcgtccgcctcctccgccgaggggccgtcgccgtcgccaaaacggcactga

SEQ ID NO: 72462 - DNA, 1419 bp, Heterodera glycines
atgatttcaggagaaaccgaagtaattatattgtttaaaatttaaaaaaaactgaaaacagttaaaatttgattttcaacaccaatatccgctaaattctttaaaaatatccaaataattaataaacaaaatatttttgaaatatcaacaagttatatttaattttctttagttgggcgtgtacttatcattattgtagtgccaagaaacaattggggttatttttaatatgattcttctggagtctaaataaattagaaattattatatgaaatttattgtttgatatttcataaataaaatgctaaataattttatattgttattttatttcatttttctaagattcaaaattataaattatataagggaaatattaatttaaaataaatttatgtagaatcattttaccaatttattattaaaaatttattttctacgttaaatttacaatttgatcaggctttttttagattcatatccttaatttatttattaccaaaaattgttataagatattcttttattgaatatttgagctttgtaatattttatttttattatttattttttaagttttctgatattcttttttttggtccaataaacatttgtaacctaatttaaaaatcgttcatgtattttgtaaatcaatcagttaagacctgtgttgcccttgataaagcaatataaaaaattattttaggtttgtagtcttttcacatttttaagtaaattaatttttccttaactctttttcttagataattttattaaactttttgttttttaaaatcattaaaattttgtagatttaaattataacatcagctgtccgacctgctttcccaaaaacgtgccgccctcaaacgggcccaggacgagttagccgaggcggaaaggaccaaccgccgcccgactccggcccctgctggacgaccacttcctttggctgccatttgcccttcctcacccaaaaaatccgccttcgccaatcgcaatgccacggaagcagcaccggacgatttgcgagccatactccatcgacaattcgctcgcctcgccactgatcaagaggctgccgcccaatggacagagtgccgaaagcgcgaaattgccgaggaagcggaacgaatgcttaaaaggctgaaggaagtgatcgtcgactccatcgacattcagcgacaactcttaaatgagcaggcggtcgcctttcgatccatgcgccgaagtatggaggaggcccccgacaccgaagacgaagtcctctccgtgaagtccgtctcctcgagcgctggtttacctggtctttgcgcggggagtgtcgccaaagcgacaaaagaaaaaaaggacaaaatgaaaaaaattgtgttgattggcctttggccggtgattcaattcgtttgtttgagaatttga

SEQ ID NO: 72463 - DNA, 2926 bp, Heterodera glycines
atgccatccgattggaagacggaaaatgaaccgtacattgagcggcatgttcggctcaatggaaaagtgcacaaaatggtagtcgactcaggctcaaaattgacaatcgtgagaaaggccatttgggtcaaattgggccaaccgtttctcacagaaacaaagctcaagggtcgttcattcacagggaacattttcacatttatggggaatttcaaggtccaagcagcattggacgatggaatgcccctcgatttggaatgttttgttatcgattcgaaggacacactcgatttgatgggactcccatggataaaagcatttgagcgtgcctacaaacaagtggtggctacaactttgtcaatcgaaaatgttgccgacagtcgttggtgcaaccgatcaaacagcacgtcgacgcaattggagatggatttacagaacacatttccaagaatttttgagaaaacattgggactttgcaccaaaatcagggcccatctcaaaattaaagaaaattcatctcccgttttttgtgcagcacgaccaatcccaatcggcgttaagcaagaagtggacaaggaattggaccgtctcatcgatatgggcgtcctgaaaaagaccgactacagcagttgggcggcaccaattgttgctgttcggaaagcaaacggaaaggtacgtttgtgcttcgatttcagcacaggactaaatgccgcattggaaccacaccaccatccactgccacgacctgaacaactttttgcgcagctctccggcgcgaaagtgttttcgcaaatcgatttcaaagacgcatacttgcagatcgctgttgatgagcagtcacgcaagttattaggcgtaaacactcaccggggtttatttgagtgcagtagtttagccttcggaattaaaagtgccccagggatttttcagtgggtcatggaccaattgagcaatggaattcccggagtgcttggctacatggacgacttcatcatcgcctcccgttcaatcaaagagcattaccgaacactttatcaatttttccaacgaattcaggaatttggtttccacattcaactggggaagtgcaaattcctcgtccagcagatcaaattccttagccaaattgtgacaccaaatggaatcaaaccggactcggagaggacaaaagcactgcaagacatgcctccaccacacgatgtctcaactctccggtcgtttttgggtgccatcaattattatgggaaatacatcaaaaatttgcacgaaattcgtgcaccattagactcattgctcaaaaaaggagctaaatgggaatggacacgggaacatcagaaatcatttgatgaagcaaagtctgtgttgctgtcagacttagctcttacacacttcaaccccgatctcacaatcattgtcaccgccgacgcgagcaacaaaggaatcggagcgacaattcgccaccggttcaacgacggaaaagagaaagttttccaacacgcagcgcgaacactcaccaaaacggaacaggcctattcccaaattgagaaagagggacttgggctaattttcgccatccaaaaatttcatcaatttatttttggacgaaaatttattctccgtactgatcaccgaccattgttgggaatttttggctctaagagtggcatccccatattttcagcttcacgattgcagcgttgggcactgattctgctcaactacgacttctcgattgagtttgtcagaacggactgcacaggacaagccgatgctttgagccgactgatcagcgaccaacgatcaagctcaaaagacgaagacgtcgtcattgcacaattgttggccgacacggaagcagatgtggcacatgttttcaacacgcaaacggaacaattgccactcaccgcaagggaaattgccgaggcacagcgcagtgacccgctgatcagagaagttttggactgtacaatgggacgatggctaaacaaaggcattaatcccgaaataaaaccatattttactgtccgaaacaatctgtccataatctcagactgtctcgttttcaacggacgtacgatcattccacaggcactgcgcgatcgaattttgaaggcacttcacctcgctcatcctggcatcgttcgaatgaagagcctagctagagaattggtctactggccgtcgatggacgccgacattgaatcacttgtcaaacgctgtgttccatgccaagaagccgccaaacaacccacaaaacatcctctccaaccatggccatcaacaacatccgttttcgaacgtgttcacattgatcttgccggaccatgcagtaatggtagaacttacctggttgtaattgacacttattcaaaatggccagaaattttccagttaaacaatacttcgtctcattcagttatttcacagctacaatggttgtttgatcgttatggtgttccaaaaacgcttgtgtctgacaatggaccccaattttcgtcatccgtttttaaggaattttgcaaaaataatggcattaaacacattttcagcccgccatatcatcctcagtcgaacggagcagctgaacgctacgttgactacttcaaacgccaactcaaaaaatgtagtggtgactgaaattggcttagcaaatcacttctctcatatcgctcaacaccaattgctgttttaggccaacgctcaacagctgaattgtttttaggccgaaaattgcgcacaaaattgtcactcatgaggcccgaaaccattccaaagcaacaacatcacgaacacacgtccaaaatgaaattgcaatttgacaaaaagcacaatgtaaagccggtacagtttaaaattggagagcaagtccaatttctcaattaccgaaatggcaaaacactttggctttttgggcgcattgtttcaa

SEQ ID NO: 72464 - DNA, 364 bp, Heterodera glycines
atgcggcggaagtgcgggcgctttgctctccgaagcgtttgtccggccgatttcccaggcgcaggaatttctcacctacggacacatcgccccttttatgggcgcttttctcccacatcagtccgtttttggggagttaatccaaaggcatcattcaccgattattgctcatttgtcagatgcgactttatggtgaagaaggaagtgctgaacgaattccgaattccgcccgaattggacgaagcactcaaccgaaaatacaatgggcaaaagggggagggaggaggagaaagggaggaaaaggcagtctcgagaagggcaccaatggtcgagaaaggccaacagcagcagggggagggagaag

SEQ ID NO: 72465 - DNA, 298 bp, Heterodera glycines
atgccgtaagtgccgcgcgaagtgatttccttttcaaattatgatataattgatcccatttctcctatcatattgaatgcaaaatttatttgcattaatcatgaaattaaatggttgcagccgacattggtcatctcgtagggctaatttgaatgaaatttgattggactttttggtcaatgaatattttggtgcaaccgctgaagatattgaattccttaaggaataatgccaacgcttgaaaaggtgtcctttgatttgatgtatctcaaaaataattaactgttttattaataaa

SEQ ID NO: 72466 - DNA, 819 bp, Heterodera glycines
aaacaaaaaaatcgatttttcaagtgtccgtttggggtactcaaacaattatggggagcaaaaatccaacgcagaattaaagtacaggctatagggaagctattccggaaggattcggtctccccataaatctgggcgcatcggttcggggggactgccccgaaaacaaaaaaatcgattttttcaagtgtccgtttggggtactcaaacaattatggggagcaaaaatccaacgcagaattaaagtacaggctatagggaagctattccggaaggattcggtctccccataaatctgggcgcatcggttcggggggactgccccgaaaacaaaaaaatcgattttttcaagtgtccgtttggggtactcaaacaattatggggagcaaaaatccaacgcagaattaaagtacaggctatagggaagctattccggaaggattcggtctccccataaatctgggcgcatcggttcagggggactgccccgaaaacccaaaaataaattttttggataaaagttatttaaatgaactgactagataatatttaaaataggttatttctcttcctttcagtatccctgcaaagtttggtgcgcttctgatcagtttctgaaaaaaaagttaagcctaaactttttggcctgtttaaaaaggaattaaaaatttttaaaaattttattcatctccctttttgatagaaaaagcatcagagtgcctaaactaacatgtaaataaaatttggtgcgtttcagaaccctttctgaaaaaatatttaagaatgaattttgcaaaaaataaataaaaacgaaagact

SEQ ID NO: 72467 - DNA, 49 bp, Heterodera glycines; identical to SEQ ID NO: 51181

SEQ ID NO: 72468 - DNA, 57 bp, Heterodera glycines
ggtatagggaagctattcccgaaggattcggtctccccataaatctgggcgcatcgg

SEQ ID NO: 72469 - DNA, 317 bp, Heterodera glycines
atgcctattagcttaggtttatattttaaaagttttatcgaacttagcagataacgacaaacgacgtattacgacagctttggcgtttgtcgtttatcttttgtcgctcgtaattgtgattggcccctgctggggtccagtggtgccgaaacacgctgccgggggatttgaaaaatataacacgcaaatcgtctcacgtcaaaacgagattttgtttcggtacgagtttaagagtggaattagcacgaacttagttagaatttcatttgtttcggccttcaacttttattgagcttattgtctctacatacaaatga

SEQ ID NO: 72470 - DNA, 48 bp, Heterodera glycines
gactttcttggagactcgcactcgtccattttcgacgccggcgcgtga

SEQ ID NO: 72471 - DNA, 179 bp, Heterodera glycines
gtccgcgaatggactcagttggaccataaccatttcgaggcccgtctcgacatggaaacggcgagaaaatctttccttttttcctaatcagctgattaattggatttttagctaacccatggaatgcaagaacacacagtgattgtctacacaaaagtgatgtgagaagtgatcaaagc

SEQ ID NO: 72472 - DNA, 296 bp, Heterodera glycines
atggacctctttttaagtagcgcccaaattttgaagttgcattctttgattctcattgactcattcatttttgacatcatattcatggcagaggaacggcaacatgggcaacaaagtcgggaccaacgggacagatatagttctattttttctgaggcagttgatgcggaaacggactggaatggtagggatagatagctaacaaaaaaaacaaaattatttaagaaatctctgttaaggtctcatctcaaaaatggagcaaaaccaaggcaccattgacgacttcaagaaattga

SEQ ID NO: 72473 - DNA, 588 bp, Heterodera glycines
ttgatcatatgtccatcaaattgatcgaggccaatgagtccattgcgctcctgcggcgccagttggagtcacgcgacgaggaaattgaacagttgcgacgcgccgagtcggtggcgggcgaacgcgtcgcggacgcgcaacgggaggccattcggtggcgcacggaagcggaacgcggactgcgacgcgtcagcagcggacgaaatttggcggcatccgccgaaagcggagaatttgtcagtttttgaacgtatttttataaaaaagttggaaaattcacaaatttttacccatgctaaaattcttttggatttatttgtacaaattcgataggtgtcatattgttggctttttgtgggttgtcgtcgagtcaatttcctctaaaaaatggtcatatggatacatttggtcatgttacgaaatatttttcaaattttgaaggctggttttgacaaactgttgttgagcgactaccgtagtgcgctgtccaaataccgtacatggtcactgtttgcggacaaacagctgcagaccatgaaacagttgttggaggagtgcggcggatggaccgagccaaatcgttacaag

SEQ ID NO: 72474 - DNA, 908 bp, Heterodera glycines
ttttgatactaaagcatcagagtgctaaaattaacttgtaaataaaatttggtgcgctttagagcactttctgaaaaaaatatttatgaaacaaaaaaatcgattttttcaagtgtccgtttggggtactcaaacatttatggggagcaaaaatccaacgcagaattaaagtacaggctatagggaagctattcccgaaggattcggtctccccataaatctgggcgcatcggttcggggggactgccccgaaaacaaaaaaatcgattttttcaagtgtccgtttggggtactcaaacatttatggggagcaaaaatccaacgcagaattaaagtacagactatagggaagctattcccgaaggattcggtctccccataaatctgggcgcatcggttcggggggactgccccgaaaacaaaaaaatcgattttttcaagtgtccgtttggggtactcaaacatttatggggagcaaaaatccaacgcagaattaaagtacagactatagggaagctattcccgaaggattcggtctccccataaatctgggcgcatcggttcagggggactgccccgaaaacccaaaaaaaaattttttggataaaaattatttaaatgaactgactagataatatttaaaataggttatttctcttcctttcagtatccctgcaaagtttggtgcgcttctgatcagtttctgaaaaaaaagttaagcctaaactttttggcctgtttaaaaaggaattaaaaatttttaaaaatttattcatctccctttttgatagaaaaagcatcagagtgcctaaactagcatgtaaataaaatttggtgcgtttcagagcattttctgaaaaaaatatttatgaattaattatgcaaaaaacaaataaaaacgaaagact

SEQ ID NO: 72475 - DNA, 56 bp, Heterodera glycines; identical to SEQ ID NO: 52733

SEQ ID NO: 72476 - DNA, 55 bp, Heterodera glycines
aattggagattgggggattaatggagattgggggataattagagaaaatacggta

SEQ ID NO: 72477 - DNA, 615 bp, Heterodera glycines
atggaaagcctggtgccggaatacgacgttgccggcgtggtgcgcgagcgcaccggcggcgcgctgcccggcatcgtgccgtccaacacctacaccacgcgcgacgaccagaacatcgtcatcgccggcaatggcgacgcgatcttccaccgcctgatgctggccatcggccgcgacgacctggcctccgacccggatctggtgcgcaacgacggccgcgcccgccgcgtcgcggaaatcgacggcgccatccagcaatggtgcgacggccgcggcatcgaagaggcgctcaacaccctcaaggcggccgacgtgccggtcggcaagatctacagcgtggccgacatgttcaccgacccgcagttcctggcgcgccgcatgatcgagcagcaccagttcgccgacggcagtccggtcaagctgccggcggtggtgcccaagctctcggaaaccccgggcgggacccgctggatcggtccgtcattaggggaacataccgaggaagtcctgaaatcgctggggtatgattcagcggctatcgacaagctggcgcagaccggcgctatcggcatccccgcacccaaggagacaacacatgtcagtcactcgtcgtga

SEQ ID NO: 72478 - DNA, 3416 bp, Heterodera glycines
  unsure (1)..(3416): unsure at all n locations
aaaataatttgttcccgagaattccttcacacatttccaaacagtgattaatgggacttaattattcaaaactgtgctcaattcgtgcctatttaagctgcagcaatttctaaaaaattattcattttctttggcttccccaaaaatggcaaattttgcccctttttcccccatttttattttccaattaatttttattttccaattgctcggcaccgttttctgtgctactgtttatttgaaaaaacagtacggtgaaaacgatttgtatgttgagtcatggggcaaaacgaactgttcactgaacggaattgacattgcggcgcttggaattggccgaccatgtgaagaatgaccagatttaggtaaaaaagtgaactaaaattcattaaaaataattacatttacataatttatcaggcagtgaattattggggcgagcgaacgcttttcatgcgcgactcaaagcatttcgttgaccgtcctctgctgaaagatgccaaaaaagtcgtcgaggaattcaaaaccatttttgaagtgacggaatggagtaaattcgcggtcagcgaaatgagcgaagcgcaagtggacaaattggccaaatttgtccaacaaaattttggaatggccgacgaagcactgattgagtaaaatttacaagatataaataatggaaataaatgtttattataattaaggcatgttccggaagattgggtcgaatctccgccaaattttaaggaaatcaaagacgaaaagttggcgaaatgggcaacggaattgaacaaaatgtggaaggaaatgagcaaaaaaatgccaaaagacgtaaaattaattataaaattatcttaattaaaaatgataacattaagatggacaacaatgccaaccaaatgcattcgctgattcatttgtccaaccctttctcgttttccggtggccgatttcgcgagtttcgctattgggattcctattggatggcacgaggactgatcgcatcaggtcaaagtgatcaaaaagtgatgaaaatattttaattatttaagggatgacaaaatcattaaaaaatatgtgcagaattttgcggaaatggtcaaccgatttggcttgtgcccgccgggaggacgcatttattacaacaaacggtcgcagccgccattcctcacattgtgaattaaattacaatattttttaattaaacgacaataaatattgtaaaataattaataataaattgttaattaagtttggtcaatgattacttcgctgccaccggtgacattgcgttccttaaggaaataatgccagcacttgttaagctcaatcagtataattatattaaatttaaaatgtcctttatttatttctttaattttcactaatacttgaatttcatttccattagccaaaagaaatggtctttttccggtggatttttcatcaaacggttgagaccattttgcattgcaaaaattgcattgacaagaaaaaccctaaagaataatatcaaaaaatgaagatttcaattaagacaatgattgttcatcgattgaatgtgcactgatctttttgggattttcccattcgttttaaggtccttgtttttgtggcgtaagaatttcaaaaaataaaattttacaaaaatgataaaaatgtaagttaatattaaaaaaaatacaaaatacaaaaaaaattcggccctgatatttttatttgaattattataattaaattatttacatttgcttcttttttttgtttttaaaaccgacccaaatatatttgtttgcaatgctcaaattgaatgttttctccgattcgatttcttcaataaatttggcattgttttgatgcaacgacgaaccatctgatgaattggaaaccgatttaaaatgataattggtatttaaaaatggaaaaatttacaaccatcggccaacaaatcgacaaattcggcagccgtttgtcccttcgcacccgcataagccatggccaacgcaatttaataattttttgctaattttgcattttaatcaaatgatacgtattatcatctcatgcacacgtccctggaaattatttttaattcaaaaacaattaaaaccaaaggtacgaatatattattaaaaaattccgatattacagaatttttacgcaaataattccgttcccattcccacaataagctttagaccaatttgacttaacaaatgggactaatttgtaaattatagtgctaatatcgctcacttatcatgcagttatttactgatttttccagaacattttacactgaccttatcattttcaatggcgggaagtttgaaggtatttattccagatctgatgaaattaaaaataaattggaaaatttaaatttgtgatttttaattaatctattaaatttaataaagaattctttacgcactctccgcttatggtcaccgtaatgccattgaatgcattttcatttgcgcactcccaaataaactgctgcaaattcggtgttggaataccacgggaagggtaaacggagaaacggaagaagtcgaaatttcaaaactaaaatataattaataaaattataaatcaaatacttatttaattatttatggttgatgggtaattaattattaattaatctgacaatattttctattcttttttatttgccaaagtttctttcacctgctctcnaacactgttttcatttgggcgtcacaatttccatagaaaaacgaacttttcggctgctcaaatcaattttcacttttgccttacaatttttgtctgctcctcacgcgacgcatcgtcccaaaagtgcgagagtgcgtaaagagaaattcaaatttaaatttaaattaatcattttcggaggcacagtaatttttaaattgcttttacgtttattttcgtggccacaacgattgagaaaaaattcatccaggtttcattgagttttatcgatcgaaattttatttttcggaattttctttgtattttcgcattttctttgctaaaattcaaattttgctcaaaaagtaaaaaaaaaatcacgaaaaaagtcgcaaaaactaaaaaaagtcataaaaatcccaaaaagtaaaaaaaaaagtcacaaaaaactgcgtgatagaggcttcagacaaagtttagaacactttttaaggcattttaaggccaccatttagagtcagcaaaaaaaaagtcaccaggcccatttgacccaaaatgaggctttttgcccaaccaggttttttgtattttgtattaggaattttcgagtatttaacgacccaaaacatatttttttttagaatttgaaaaatgggttcgttaagactttctcgactcatccctcaaataaagctccccgccccctccccgaaaaagttgaaaaaagagtttacagggta

SEQ ID NO: 72479 - DNA, 479 bp, Heterodera glycines
  unsure (1)..(479): unsure at all n locations
atgacgactcaacaacgaatatttgggaatcagctgctttttctttgcatttttcttattggagttgtttttttcctcttttctgctgctgttgcaaatggtgctcatttagttgactcaagtgagttgctctctttttaaagtgatttaatcgaaatttcaatttaaatccgtttgttggaatgggtcaagacaaattggcatatttttggccaaagaaaatgccaaaaaatagtcaataaaaggcgcccatttccgattaaaaaatcataattaggcgttgatcaaattggtcgtgtacagcacaatcataacggcgacataaacatacgcagagggattgaacgcttcaacgacaatcggatggcacaaaatggtaaagaaaaatggcgaaaatacgaattcaagagaagaaaatctggctaatgttcaaaattgggccaaattctttcgnggagagcaatgaagaattaaataaa

SEQ ID NO: 72480 - DNA, 727 bp, Heterodera glycines
  unsure (1)..(727): unsure at all n locations
gaactgtggactcggacaaaggaaacgcggacaaaagccagggagcggacacggatggaaagaacccggaaaagccaaaggaaagccaagaagtggaagaggatggaccaaatccgaaggagtcaacgaaaagccaagaagtggaagaggatggaccaaatccgaaggagtcaacgaaaagccaagaagtggaagaggatggaccaaatccgaaggagccaacgaaaagccaagaagtggaagaggatggaccaaatccgaaggagccaacgaaaagccaagaagtggaagaggatggaccaaatccgaaggagccaacggaaagccaagaagtggaggaggatggaacaaattcggacgaggacgagctcactgaaagacaggaagcggaagttgatcggatgcgtgtccgtgccggtgccacctccatgcatgggcttgacaaacttgcgccaacgccaccgccgagtgccacttctacaaatgccatcgcaatacgagtggctaccactcgctggattagcgatacccattggagaaattgtgataccattcgtcaccaacaaattatgcgagcatcgtacccaatattgttcttgtgggaggggaaggtgcgtgccggtaactacgtacaaggcggacaaatgttgtgacagcaactttgaatggaagtgttgccccgatgtaagtattaagttaaaaagaaattattatncaaaattctgca

SEQ ID NO: 72481 - DNA, 108 bp, Heterodera glycines
atgacttccgaaaatgagcgacgatttcgtgaaaaactgtccattctgaatgagaattttctgcgatttctgcaaaaggcgtacagcaaaaaccctgacgcagatttt

SEQ ID NO: 72482 - DNA, 498 bp, Heterodera glycines
attttgttccgcaacgacccggcacaatacagggaggaagtgcgacggcgcgtggagagggcatcagcatcgacaccgcgagcgaggtcgtcatcaacaccaccgccggtagcgcaaccgccgggagaacagcagcaggggacgccgccacaaccgccggacggacaggggatgcaaccgccgggagaacagcagcaggggacgccgcaaccgccagcgacaccgccgcaagggcaagaagcgccgcagcagggcgaatggtacctttgatgtgacgtgatgccctctgcgtgatgatattattatatacttatgtatgtgtatatgtattgtattgtatgcatgtgtctgtcgtccgaccatttcattaattaatggtctctctctctctgtgttcgtttgccctgcttttgttcgctgttgtacatattatgtgtattgtcattatccaccaattattgtatatatatgtgtgtacatatgatggtgtatcgagca

SEQ ID NO: 72483 - DNA, 1016 bp, Heterodera glycines
atgacaatgaccgcaggttccatgacaatgaccgcaggttcgaagactttctgatgtttatctttctcataaatatattgttctgactatttaaggcaactttttttaattatttttatataaaaagtatgcctattttttgatattatagtaagaaaaaaataattatttaaattcattaatattttaaataattaaataattgaatgggccacatttttatatttaaataataattaaatttaaatgttttatcattgatactttttttggttcgaccgagcacctttaaattcattaatattttgtaagtgattaaaaaaataaataaattccataatggatcttttgatgtgtttttaaattattttgctttttggcaatatttttacaaataaattttatttaaataattgtgtcttttttgaaagttaatattttcttgtttaaaaaaataaatatcaaaaaccttggttaattaattaataaactaatgtttgataataatctgtatttttattctgaattattttttcatatttcaatgaaatataaatgtatttcatgaatatattaatgaaaatatttttattttcttataaattctaatattttaatcggtttcatgttagggttatttaatcatccttataaaacagtaacagattgcttttgcaaaaattccatatttcgtattcattcattatttttcacattacacatttatatacaagagaatttcaaagtaaaatttatccatttaataaatatatttaagttaaaaaaacgaacaaaggaaaaaaggcaaaatttttaattatataattaaataaaaaaattaaaaaaccttataatgcgattttgaaaagataaattcaatcaacaaatgagaacaataaattatatttgtaaaatttgattaattcaggttccgtaaaatatgatgaagaatgagtcaacattgaggcgtgaaaaaaatacatatggcaaaaaccatttatagtaaattataaata

SEQ ID NO: 72484 - DNA, 351 bp, Heterodera glycines
atgagtatttgcttcaactttgttttcgggtggttcaatttgagtgcatttacgctttaccacattgctcgtcccgctggttatatcttctatgtattggggcattgcagcagtgcgccggttcttttctttaccaggtccaaaacatttttttaattaaagatttacttaaatttttctattttttatttggcaaataaattaactaatttaattgcctacagttctgtgtaccgaaaagcgtatcaatccgtgttttggtcaaacaataaccaagtggcaccggtacagaatttgcaacgtcaaccaattataacgaacaatattcgtacctatatgaatacccgataa

SEQ ID NO: 72485 - DNA, 631 bp, Heterodera glycines
atgaccgatgccagcaaagttggaatttcggctattttatgtcaacacgacgatgagatgaaattgagaccaatttatttcgcttctcgacaatgcagtaaatatgagagccgttatgccgcaactgaattagaagcgttagcagtgagattcggagcaaagaaatttgctcagtttataacaatgctgccgacgagagtcctcacggatcacaaatctcttgtgcccatgttcaaaagcaaggcggagactggaaatgcgcgagtcgacaaatggctcatgtaattgaattcgagatttatgttgaaagtagaataccagccaggaaaaatgaatgtgattgcagaccttttatcgcgctcatttcaaccaaacaatgaaggaatcgccgaaccgccactggaggaggacaaagcattaattggaatgataaaagtattgacagcggaagaagttgaagcatcaattgtggagaaaagagaagcatggagccatgcctccgaagaaagtgaaatgaagcacatatatgcatttttgaagaagaaaattttcccgaacgatccaagacaggcgcaaaatttgaaggaaacgtccacaaagtacacgctgctcgacggactgctttatttat

SEQ ID NO: 72486 - DNA, 720 bp, Heterodera glycines
atgaaagagtactacgacaaacgaacaaatgtcagcaaaagagacaagcacaaagtcggggaccgatgtatggtcctttacccaggagcaaacgcgcgatccccgcacaaaaagttgctttggaacaactacggtccatacaaaatcgttgaaatgagtacttcttcggcaaaattggtacccgttgacaaaacagcgtcagaacctataaatgtacctttggaacgattggtcaaagttccaagtgaaatcccgaacgtttcaactctccctaagggcaagaacatgtataagaatactttgaaggctattttatgtccaaatgattggtctgaaaaaggtggccagaacgacggggaaattctagaaagagagcaaaattcaccaaaaacagtgtttcaattgaggacaattgaaaatttagacggcggaatggagacggacgacttttgcgaactgagttggctaatgagttgccaagggaaggaccatgaaaagtgcgacaaattgacgtgcagtgaacttgacccggtcgtggatgcctcgtcagagctcggaatgacttccgttcgttcgccattacaagcgcttttgactgcatttctgttgaaatcaaacgccgcagtctcagcttcatccggtcgcgatttggcagagctcattctcgactctgaacctggcatggagttggtgatctacgaaggagaaagacgggacaat

SEQ ID NO: 72487 - DNA, 1179 bp, Heterodera glycines
atgaatttcttcaacgtccttcttttcctcgccaactttgtcctttcaatgtaagactaagagtgaaacaaaaaatcaaacattaaaataaattaaaattccaaacttttaccgtaagaaaaaaaaagattttcaattttttgtaaaatttttcagtggcgctttcagttgcggagagtttttggaaacaaattcgatgaagttcaaacagacgttggaccctgacaacatccgtcaccctagtgtgaatcttggaaattattgcggtgctccagacatgaccatgtgttatggcataggatgcagctcaccggatggtacggattagggatggcattccgaggcccaaaaatttttcggaactcagaattctgaatttcgaccccaaaaacgtcggaaatcgaaaatttttgaaaaaatataataaattttaaaatttcagtgcaatttattaacagaaattgtacacaaattgttaattattttaaaaaaatcaaaaaaaaaaatttccgacctttcataaaaaattttggaaaccggaattccgacctcaaaaatgtcggaaaacagaatccgaaatcccgtgtcatcccgacgaaaaaaaaaattcttaaaaatttggcacgtattttttctaggcttaaaaaatgcgctgatcacggatcttagctcagattttggaaatcattgattttttgtcaataatttttcatcaactacatgatttttttccaaaattttaaggtaaagaaaagttaatccaattggactgtatgcatgcaattgacaaggtgaacatttgtaatgatatagaagttaaactgaaaaatgcaacacaattgcccgctgtgtactgtgagtgccagtttggaaatgaaggcgaagaaaagtcaaatgcgaatttttatgaaaaatatttcaagaatcgaacgcaaggtgtgtgtgtgtgtggtctgatatccctacaattgatcaaatcccccttttatttgggtacattaattagtcagataatacatcaattagttttggtgggatacagatttgtcggcagatggggctacccgacatttagggatttgtgacttgggacccgacaattggacatcccgaaacttggagacttcgacatttgggacttgggcatttgggggcaaaacgacatttagggatttataa

SEQ ID NO: 72488 - DNA, 114 bp, Heterodera glycines
atgtctttcttctggagtacaaccaacgcaattgtttcctcacttttaccagtcttaccggcttttgtcatgtcatccagccatcgacgcgatcttgaggccttcagcagtaag

SEQ ID NO: 72489 - DNA, 679 bp, Heterodera glycines
atgccatctgtgaacaaaatgtaagttacaaaatttaatccaataaaaattctacggtaataaggcaatgatttttgattaagcttatttttaatcttattggtatcaaataactcaatgggggcgccaaccgcttacgacatctgcttggctgcctgtggaaactcggagttgtgcgtgtccgcttgttgggctggtctaaaggctgaggttggggcggggtctgccccaatttttcctgcatctcatgattataatcttgattttacagatgtttgttggagcttgccctccagtatttgggccgttctgcatactcggctgtccctcagcctgtctgccgttccttccatttcttccagcgtgggcgctttgcatgtccgcatgcattggcgcacagccgccgccggtcttttctgaattaagaattttttataaaaattatatttaaaaatggcggagaaattcattcagatattaaccagttttcattctgccaggtgtgggcatgcaaccagggcggccttcacgccccgtgggaccagcagaactgcgatgtcgaagaattgttgggagacggctcaaacgcttagccagacgggctgcctgaattgacttttccatcgcttctgtagtgattagaccatcaaagtaaattgttcggcaatatcccaataaa

SEQ ID NO: 72490 - DNA, 1019 bp, Heterodera glycines
atgtctcctggatttgttataggacccttcaaatggtcaaatggggtatgcactatctaattattttgctaattctgatcaaatgtaattatttcgtaatctttttaccattggaaaataaatatttaatcaattagtattttaatcaacaaattaattaattaaacaaatacaattaactaaatggtgtttaatgattattttactttttaaatttatttataattaaattctttaaaatgacaaaatgctgcatttaaatttttttaatttaaattatccaaaaataaaatgtaacaattttcaaaaccaaaatcagctaaaaaaggtccgatagcgtttattgagctccttcaagcacacgtcacgttgatcaacaatttccgcctccgcgtcattacggccccgcccgtgggccgatttgacgtgcattatggccgctgaactgctcaacgattcaaaggcacggccacagagacggcacgtgtaaacggccatatgcaaatgcctaaatcagagggggggggtaatttgtaggcctaattagttaaaaataactgtatttttttttgcaaaaatatcccactttgtgttcatgtggttagttagctgactggagtaaatggaggccacaaattcaccgcactgcaaacactgaacatgcgaactgcttccacccggttcacttccggactgaggccgttcgcggagtgaaatctgggaaaaaaatattttgctgttttgacatccctaatcagtgccatatttggcattctattttaaaaccaaaaaaaaaaaaattaattttttaggaaatcacgggtaaataaatgatcggacgaacgggcaagggccaataggtccgaatatcttcttacggattttcgtaatccattttatcacagtttattatcccggaagaggaagtaaaaaaatgttaaaaatctgtttaaatgtaatcagttattattttttaaattgtaatcaaaaaaaggaaaagaaaatagattttaaataaa

SEQ ID NO: 72491 - DNA, 778 bp, Heterodera glycines
atgatgggcccgcatttgtttcctgaacaaatttataaaatggataccaagaatggcaattttttgaacaaaaaaagcatgctgttgttccaaattatgacagcgatcgatctgtgcggtacaatgccacatttccaaatccttgagacaaatgatcatgtaaactgaatgtaataaggtggaccaagccgttttctttctttgtaagcaaaattcaacaatctttgtatcattcgatagccttaagtgttagcctgcaaaatttaagagttaaaaaactggttgttcgagcattttttgccatacctttttgaaccgtaacgaaatttttcgaaatttgcaggcaaatagaggacacttaggactaccaaatgataccaagattgttgcatttggtttgcaaaaaaattttagccaacaacttgtgctcgtacgaaaacgacccggaccccagactgtgccgataggcgccgccgggaaaaaaaaatttttattttgaaattttaataccttttgttaagaaaaatgattttccttgaaaaattcttatttttcatttcgggggtgggtagaattctgcccccttcctggctacgtgcctgaccaagcaccctgatccggatttggggaaacgacctaattatcctcaaaataaataacattttcaggcagttttactgagttatattacaattccattattttcactgtatggacgcttttattcatcaaaagtcaattcaccaatcgtccaaagcatcccgaacaatgcgtttag

SEQ ID NO: 72492 - DNA, 407 bp, Heterodera glycines
tttattgaagaatgatgagtgggagcaaattaagagctggttggggtattgaaatgtgctgaagaagcaacaaaaaggttcaccgcagagccaatttcatttgtcattcctcaagcaagagcattacatgatgagttgtacgaaatgaaaattgttaaccggactgtggagacaatcagaacaaccctttattttgcggtcgagcggcgcttttttgggctagcgaatttgaagtagaaaaatttaacttaattttcaataatgtttggtcttagggaatatgcgctagcgacttttttggatgtgcgattcaaggacaaagtgctgactgaaaattccgcaacttttcgcgctcgagtcactgtctggatcaaaaatgaattgaaggaatgggaaattgataatga

SEQ ID NO: 72493 - DNA, 338 bp, Heterodera glycines
atggtatgggggaacggcggggagggaaacaagctagctgctgctcccaagaatgggccatcgccggtcgtcggagaaagggggcagggaggagacggacgcccagccaattcattcattctttcatgccattgttcgcttctcttttttttgcgtggactcaagccgccggaaatgttttttatgggaatttgtgtaggggaacaaaacaaaacaaaacacaaataaaataagagaaaatttgaaaagaaatgataaggaaagagaagagaagacgagagataaaaatgtaaagaaaaatggccgtggagagaaagaacaaaaagagaaaatagtaa

SEQ ID NO: 72494 - DNA, 714 bp, Heterodera glycines
atgccaaaacaaaacgaaatcgttataaaatattcctttctggacttgacttggtttcttgatatcgaagctgttttctacgctatttctaaaacggttataccaaaccccagatttttgaatccggttttcagaaaaaatgccttgtggtgaaaacaatatttcacatttcactccataactttgtgagttcggcacggatcgagaccgggataagaccattggaaagagcagctcgagctctacaagaaggtatggaaagaaaaaatagttatttctgggactttttcagaaatcagaattaattctccaatgtggcccaaattttaggccccagccacagccccttgcttctcccagttttaagtcttggatttgtcaaataaattcaagacttcaaattaataatcaaaaattctcttaaaatttttttgaacccaattcaaaaaaggaaaaaaatttgcagtcaaaaaattattcgaatttctccaattttgtttccataatttccgaaagttattcggtatcataatgccaaaacaaaacgaaatcgttttaaaatattcctttctggacttgacttggtttcttgatatcgaagctgttttctacgctatttctaaaaacggtataccaaaccccagatttttgaatccgggttttcagaaaaaatgccttggtggtgaaaacaatatttcacatttcactccataa

SEQ ID NO: 72495 - DNA, 276 bp, Heterodera glycines
atgtttgtgaaggaagagaagcaacgaaaaagcgaagtgaatgaaaaggagcagaagaaaggagaacgacaaatgaacagtgacactttgcagctccaatcggagttggagaaaatgttggcccatttgggaggaacgataaaaaaggaagaggagaaagaggaggaggaagaagacgagaatggggaggagttggaagaggaggaggaggaagagagcgaggaggacgaagaggaggaggaggagcagggcaggggccgagcggaggcgcacgaa

SEQ ID NO: 72496 - DNA, 1196 bp, Heterodera glycines
atgagcgctaaaattatcagagtgccgaaaatcgcatgtgatctaagcctagcaaaaaatggtgtaggtaaaaatcgtaattacgctcaaaaagcttctcaaacaattttagcgcttccaattccttctacaatcgcctttatacatcccattatgagcgctaaaattatcagagtgccgaaaatcgcatgtgatctaagcctagcaaaaaatggtgtaagtaaaaatcgtaattacgctcaaaaagcttctcaaacaattttagcgcttccaattccttctacaatcgcctttatacatcccattatgagcgctaaaattatcagagtgccgaaaatcgcatgtgatctaagcctagcaaaaaatggtgtaagtaaaaatcgtaattacgctaaaaaagcttctcaaacaattttagcgcttccaattccttctacaattgcctttatacatcccattatgagcgctaaaattatcagagtgccgaaaatcgcatgtgatctaagcctagaaaaaatggtctaagtaaaaatcgtaattacgctaaaaaagcttctcaaacaattttagcgcttccaattccttctacaattgcctttatacatcccattatgagcgctaaaattatcagagtgccgaaaatcgcatgtgatctaagcctagcaaaaaatggtgtaagtaaaaatcgtaattacgctcaaaaagcttctcaatctattgtatcgctttcaaccgccggccccccaaaaagtccaatttttttgcaaaaaattgtcccaaaattgcaaaaataggtatttttaggaaaaatctgttaacaaattgcaaattttcaaaaaaaaaattcctcgcggctcctaatggcatcgtcgcccatcccccttctggctgttgcctaaagtttttttgaaaatgagtgccgcaaaaaatggtggtgaaattcgatgttgagacgggtgcgcaaaaatttcggttaaaccccctcccccttgtcaagtattttaaaccagggcttccacaattaacaccaagcccgaaaaaataagattttaggctcaaaaataagaacattttacaacattttttcaaatcagttacttttacaatttattcgatcaaaaatgtatcaaattttatatttttagtctcacattatcaattttaacaattttggggaggaaaatgcaaacttgtaa

SEQ ID NO: 72497 - DNA, 336 bp, Heterodera glycines
atgcctgcaaaatgtcagtgttaaaatttcaaattgccaactcaaatctcagagaaaattaaataattttaaaataagtaaattttacagtaacttattaccagggaacggatttatttttaatgcgctcaaattttgccatacaaatcgactgataggattaaaaaacacaaattatttaaataggagttttattttcaattaggcaaaaatgaaaagaggaatttttcaagaaaaaaattaaaattaaaaaaaattaaattattttttctagttaaaatttttatattattaaacaattcaaaggcaagagcaatatttaaatggtttaataaa

SEQ ID NO: 72498 - DNA, 714 bp, Heterodera glycines
tggtcattgtgtgcaatattttccatttggctggtgctcagcacattggccgatgaagaaacatttggccaaccgcaagtgtactactcaatgatttcacgctacaacagcgacattgtgataatacttaactacgtgctgttggcacttgttttactcaccatgatggccaacattgccatcatggtacagaaccggaagatgcagatgcgcagtcggaaacggtaaacaaaacaatacttgaaaaattgatcagaggcctgttcaagaacaatcttgacaaaaaaattgttatcaataggggcctagtcgtttcctaaaattgccagtttggataaaaactgcaaaaaaaatctaaaaaaaaaatatattttttatttcataaaatttttatgtcagtttttgaaaaaattataaatataatataaaaattttaactatatcgcaattatctattattgtactgcttaaaaaatactggtgagaaaaaattaattttgtaaatgtcggtatgataattaatactagttgttttctaaaagtctgaaacgtccatttggcactttttgaggaaacgtacatttagtagcttttaggaaacgcctattaggcactttttagtaaatgctctggcaaatttataatcatttctttgtcagatttgccaatgccacggtgtcgccatcgtttagtcatgcccaaatggcattcgga

SEQ ID NO: 72499 - DNA, 499 bp, Heterodera glycines; identical to SEQ ID NO: 63619

SEQ ID NO: 72500 - DNA, 1345 bp, Heterodera glycines
gtgctttgcgttggttggttggcgtgggtgactgtggtggttgggccgtttttgcgatattatggctggaaaaaagatgcgatttcgctatggggagcgcggccgtctgggttcaagtgcttgcttgcgcttgtgctcggcattgaacggtgatggctgctgctggggtgccacctttgtcgtggcctcagtttctccagcgattggcagctgtcgaaatgaataaacatgcagctcgtctgtgtgttaaagaaatttggcgagttaattgacttgtgtaaatgtggcctaaggcacaaatgctgtggggaactcagcactggggatgctgaacctaaagttggtgggtggtgttggtatacgagtgagtggcgtattgccatggttgacaagccctatgagttcgtggatcggaactccttgcctggggaccagtgtgcttgcattcgaaaaaacacgagacataagcgcccgaaggcctttggcctgaggaagtgtcctaaccgggaaatccggagtgctcgtgtgagtgcctgtgcactgccctcggagctgtgtccagcggcgagatggttcttcccaagtccgggaagctcggatgcctggccagcgctgtgtcattaccacttgctctgtctccttcgctgcccatgcgcacgcttgcgctgaacggagttgtttctgctgaaactatccgtctttacaagacggctgtaatagcggcgcttggcaacgctcgctagcagctatctggttgatcctgcctgaactgatgtgttcatttcaaagattaagccatgcatgtgtaagtttaacctgccagacagggaaactgcgtacggctcattacaccagctataatttacttgaccttgacttcttacttggataactgtggtaattctagagctaatacatgcaccaaagctccaatctccccagagcggagcgcatttgttcgccacaaaaccaagcgccctccgggcgtccagtgttgactcagaacaactaagctgatcgcacggtcttgtaccggcgacgtgtctttcaagtgtctgccttatcaactttcgatggtagtgtatctgactaccatggtgatgacgggtaacggaggataagggttcgactccggagaaggggcctgagaaatggccactacgtctaaggatggcagcaggcgcgcaaattacccactctcaacgcgaggaggtagtgacgagaaataacgagaccgatctcttatgaggccggtcatcggaatgggtacaatttaaaccctttaacgagtatctatgagagggcaagtctggtgccagcagccgcggtaattcagctctcaaat

SEQ ID NO: 72501 - DNA, 807 bp, Heterodera glycines
atgtatcaactgttccgggcattggggtacatttttttcttcatttttatttttaatttattgcccatcatcccccttcaattttttagttacattcacagcattggcatttgtcatcgggacataaaaccgcagaatttgttgctcaatccgcaaacatcagtattgaaagtggggcatttaaaaaaaaattatttttaatttttcactactttttagctttgtgatttcgggtccgcaaaaacgttggtccagggtgagccgaacgtcgcctacatttgttcacggtcagttaacattttggcgttataattgcaaaaaatgaattttccgaaaatttctcatatttttcaaaaatggatgggattcagctttatttgagatagagccacagggaaaagatttgggtttttgcgtaacaaaaaaatcaaaatagttagctattttttctgctaaatttcaggtattatcgcgcgccagaactgatttttggcgccaccgattatacgaccaaaattggtacaagcaaaccaaatattattgtagttttagcatatattttttaccaacacataaaaagggtgcaattttttcagatgtttggtccgcgggcacaggtaaaaactaaaaattaaaaaaagtttttgtttctacggttttattaaattttcagtgcttgctgaacttttgcttggtcagcccttcttccccggcgactcgggtgtgtttgtactactactttttgaattgtttattagttttgtaaaagcattttcgggttttatgggaaaaccccatattttttaa

SEQ ID NO: 72502 - DNA, 284 bp, Heterodera glycines; identical to SEQ ID NO: 61132

SEQ ID NO: 72503 - DNA, 881 bp, Heterodera glycines
atggactttacaactaccgacaatacaacaaacacggatttgacaacgatggacaaggcaacggacgtggatttggcttatgaggacgccgcgacacaaaccgagcagttgaacaaacagctgaaggagcaggaacaaacgatcagctttctacgactgcagctccgcaacagagacgcaatgatcgccgatctgcgccgtcaattggaagagcaagcgcagacgaacccgccaacacgtaaaattctgcagaatttttagagccgtttatcatccaaattgtttttagcttccacacggtgcaaaaagaatgcgactacattggagcggacctcacggcgaaatttggtcgagaaaatcgttgatgtgatcgatcgagaccgctcccgatcagtgagccgatgttcgctgcaaactctacatcgtgaagtccgccacaaattcggacactacacaccaatgaagaaggaacaactcctacaacaacaaacaatccatggagaggatgggctgcttttgctgtcacaactcgggacccaaaaggcttatgtaaaaatgttttgcgatcaatcgaatttgaccggataatcctggcgccttttcacgtcttccagggcattggaaatgcactgatcaaagagctcgaaggatcaactgaaagcgcggaaattgcgaacggatttttcagaagcatcgcggccaggagagaagcgttcagaaaaaagacatgacggggaatttaatcagaaaagttctgattcatgctgaccaattggagaggctttactcagctgaatggcctcaaattatttgcaaaaccatgggacacttggcaaagatacaaacttttacaaaagtgctttttattttctttcttgaaa

SEQ ID NO: 72504 - DNA, 81 bp, Heterodera glycines
aacactgcgattcaattttgggctccaagtacaattaagttggttttttcgtcttagtggtctgtgagttagtcaccaaaa

SEQ ID NO: 72505 - DNA, 2031 bp, Heterodera glycines
atggcacggaagggcaaaatgccaaagtggtgggacgaccgaaaaggcatccgagtgaatgcaaagtgtgcggaaggaaaagcatgtactgttattacagaatccgatgttgcgaaagtgagtgacgaaaaaagaatatttataatttaatatacttaaatgtgagtgtgaatcagggagtcggcgaaagtacagcactttctgcagaaaagaaaactgaaaggatttttttcaacggggacggaaactgccaatcttaatttgaatgaaaatctctgttcagcagattctcttttaaatacattaaatatttttatttacaaatttcggaccggatctgtttagtctggccgttttagtctggcaagctgtttttgtcctaaattgattcaattctgcttttttcgaaaaatctttaatttaacgccacatatatcatcaatttgaccaaaagtccgcacagacaaaacgccaaaaaaccacgctaattcaaaaattgtcgagaatttcccttgtaaaaacggaagagccgatctcgagttaaaaacaagttctattaaataaacttggaatcgctagagggggtcaaaatatggccctatgcaaaattacaagaacatttgaacatagggaaaattttttcaactgggtgaaaattttaataaattaccgtcattttaaaggttaaaaatgatattggtacgtaaaaacgatagttaaacatattcttaagaatttccccttcaaaatgagaccaaaattgctctatttggtttactaatgaccaagttaaaagcattagaaatttcataaaaatcactgttttatcacttttttctcttggcgcactgtgcgcatttattttcattaatttttatgtagtgtctgactctcacatgtctgctgtttcttcgcagttcttgttttttttattttcgcttcgacacattattttttttataatgctgcgcacttttggtcaaattgatgatatatgacaccataacatacttatcaatatgttttcaacgaaaaaaataacaaaacattgaaaaatgaatacaggcgtatttcataatttggagaaatctcaactaaaaaatgatgatattatcgggattaagttggcatggtaatcttgatcattttggtgagcaggattaatattgttgatgttattgtaactctgcaatagtcgagaattctcgcatcgacggcacgatatttgcatgttttttgaggcacgacttcaccagcgacgcatcatgcgatgtctgcatcaaatgacttttctcatatcgaattgtgttgatgaagcggaagacagttggatatgaaaaagcaaaagtccgttgaagccttctatggaaaaaaacgtgaaaaattaacgttttactttgcctgaagaatataaatttgactgaacaaaggcggctataattaacaaaaaaatatttgtaagagttatggacaaaaacagcttgtcagactaaaccgaccctctgactaaattgaccctctgactaaactggccagactaaaacggccagactaaaccgacccccaccgacaaattgttataaattaaggctgcaagcaattctttcgtcatattattctcaagaaaacattgttcaattgttatgggacgaaaaactgccaaattgaaaaaggttgttaaaaaacgattaatctaaaagaaatagtaataaaattaaatttaattataatttttcagatggaactcgatgccgcggctgtcgcttggacaaatgccttttggccagtatggacccgacagtgatctatttgaaacaaaaagaagggatggcccaatatttggaaaggttggaactacgaaaaatgagtgcattgttgagaaagaattgcagagaagggaagaatttgttattgtgatccgattaagctatcagaatttgtctttactgatttttgaatttaaatattttatatatgatattcacgagaaactttcctaaataaaaacatttttagacaattcgaatatag

SEQ ID NO: 72506 - DNA, 66 bp, Heterodera glycines
catttgttaaacacccaatcgtcgctgtctcgggagggaccggcgccacatatttgttgtacactt

SEQ ID NO: 72507 - DNA, 636 bp, Heterodera glycines
tttgatggtttttaccataggtcatttttcgcaaaatcaaaaaattatatcacagtcgaccaccactgacgagaaaaaggcttcgcgcaagtcgacatcgagatcggtgggaaaatggtttgccagtaaatttgaacgaattttggttggaaatagcaatttttgtttcttcgggttcataatatttttaatattatctgttggggctacaatgtaaagggcccaaaaaatctcattttgtttttttactttgatttttcgagtcacttaataatccctttcaaaaaaaaaacttgaggtggcagccaaagacaaattgaacgaacttcaattgcgtgtgcggcaattgttggaccaagtggaacaaatcaccaaagagcagaattaccagcgctatcgcgaagagcgtttccgacagaccagcgaaagtaccaacgtaagaacggggacaagaaagtgaacggattgccaaaatatttaccattcgctttttcctgccttcacgctttaaattgcctttttcggtttcagagtcgcgtgctttggtggtccgtcggacaaacgattgtcctccttttgaccggtgcttggcaaatgcgccacttgaagggctttttcgaggccaaaaagcttgtc

SEQ ID NO: 72508 - DNA, 845 bp, Heterodera glycines
atggttaattttatgaataaattacgtggtgaaaacgaccaaacgatcaaacaacttcgttccgttattgccgaattaaaagatcaagtggccaaccagtacgttcgcattgacgaattaaaagatcaagttgccgaccagaacgtgcgtattcacgaccaaaaaaaggttttcctcacaaaatcgctaagagtttattggattcttgaaatttaggagattcgaaaactaagggaagacaaccaaaaaaatgcaacatttttccgttctacaaaaggcttgttgtgtgaaatcaaagggcaaaaccgtcggatcaactcagcaatggcaatgttcagagaacaacactttggttctgagacttgccaggaacatccatttccattggtcggaaaatttatttttgcttttataataatagcatcttatgtgccctgataatttgtgtcggtgtcggataatgtcacttccaaatttaagggggggggggcttcaatatcccactatgaaaaaagcaatacagccaaaacttcaaaaatagaagaatttgcacccaacaggactggtcgttcaattcggtccgcggcgtggtgaccgacttgaccaacaaacagcgttgctctctaattgaagcattccgtgctcgcatcatttccaaggaagattggatggtttgggacgatgtcggcggacgggaaattgagtttatggaggcagaaaaaatgcgcattgtgagcattgaggaggacttttacaagacggacccgaacagtggtgaacgcgtcacgctggcgaacgcggcaatgtttcaaaacatttggccaatccgttgcggaatgaaaaaa

SEQ ID NO: 72509 - DNA, 81 bp, Heterodera glycines
cactatgggtcaagcccagtgttagacaaaattctcataacgccaaatagcgtaattggcgtaaatttttgcgcgctaatt

SEQ ID NO: 72510 - DNA, 187 bp, Heterodera glycines
atgaggcgaaatgtggacaatgacagtggtgcaaacaatggcgcgaacatcagcagcaacccgaaaattgcccgggatgcggaaattgctcatgttgtggacactggaaatggcgcaaatgacgcgcttggcgacggaatggacattgggcactgcccaaactgctcgtggcattgcaatgtgtgca

SEQ ID NO: 72511 - DNA, 879 bp, Heterodera glycines
atgggcgtcctgaaaaagaccgactacagcagttgggcggcaccaattgttgctgttcggaaagcaaacggaaaggtacgtttgtgcttcaatttcagcacaggactaaatgccgcattggaaccacaccaccatccactgccacgacctgaacaactttttgcgcagctctccggcgcgaaagtgttttcgcaaatcgacttcaaagacgcatacttgcagatcgctgttgatgagcagtcacgcaagtttttaggcgtaaacactcaccggggtttatttgagtgcagtcgtttagccttcggaattaaaagtgccccaggcatttttcagtgggtcatggaccaattgagtaacggaattcccggagtgcttggctacatggacgacttcatcatcgcctcccgttcaatcaaagagcattatcgaacgctttatcaatttttccaacgaattcaggaatttggtttccacattcaactggggaagtgcaaattcctcgtccagcagatcaaattccttggccaaattgtgacaccaaatggaatcaaaccggactcggagaggacaaaagcactgcaagacatgcctccaccacacgatgtctcaactctccggtcgtttttgggtgccatcaattattatgggaaatacatcaaaaatttgcacgaaattagtgcaccattagactcattgctcaaaaaaggagctaaatgggaatggacacgggaacatcagaaatcatttgatgaagcaaagtctgtgttgctgtcagacttagctcttacacactttctcacaatcatcgtcaccgccgacgcgagcaacaaaggaatcggagcgacaatttcccaccggttcaacgacggaaaagagaaa

SEQ ID NO: 72512 - DNA, 201 bp, Heterodera glycines
atgggccagactttggtatggcccagccaaatgaacacatatgctgatcataattatggccaactgttcaaaaaatttttaattttcagaaataccgcatttagaatgggcccagacattggtatggcccagttaaatgcacaattatgatcgatcactttaatttcaggaataccgcatttagaatgggcccagactcaa

SEQ ID NO: 72513 - DNA, 231 bp, Heterodera glycines
atgtctgtttggccaactttttcacatcgtctcccttcagcttattgtgcggcttgcccatggattgtcccattgcaatggttcacaaggtatggtttcgaaatttttggaaaaatctaaaaaaatttttttaatattttattcacaaaataattgagaaataaaaaagaaattatttaggcatgtcatttaagtaattaaatttattcattaaaattttttcttaataaa

SEQ ID NO: 72514 - DNA, 327 bp, Heterodera glycines
atgggacaatccatgggcaagccgcacaataagctgaagggagacgatgtgaaaaagttggccaaacagacatactgtatgtttattttttgtaataaaatatataattattatttttttcaatttagtcactgaaaaagaaatccgacaatggcacaaaggctttgtcagggactgtcccaacggcatgctaactgaaattgtaaattaaaatttattttaaaaaattaattaattatttttcattattttaagggcttccaaaagatttacaagcagttcttcccccaagagggtccatctgattttgcagcatatgtgttcaag

SEQ ID NO: 72515 - DNA, 195 bp, Heterodera glycines
  unsure (1)..(195): unsure at all n locations
aatgagaaaaaagagatagccattttttggtcaagaattttttttgtttgcgtttcaaatatcgtaagattgtttgatagggccagacaagagaaggcaactgttggtaccaagtttgcggtaaaaaaatgagaaaaaagagataaccatttttggtcaagaattttttttgtttgcgtttcaaantatcgtaag

SEQ ID NO: 72516 - DNA, 642 bp, Heterodera glycines
  unsure (1)..(642): unsure at all n locations
tttcagtgtccgttttgggtactcaaacaattatggggagcaaaaattcancgcagaattaaagtacaggctatagggaagctattccggaaggattcggtctccccataaatctgggcgcatcggctcggggggactgccccgaaaacaaaaaaatcgattttttcagtgtccgtttgggggtactcaaacaattatggggagcaaaatccaacgcagaattaaagtacaggctatagggaagctattccggaaggattcggtctccccataaatctgggcgcatcggctcggggggactgccccgaaaacaaaaaaatcgattttttcaagtgtccgtttggggtactcaaacaattatggggagcaaaaatccaacgcagaattaaagtacaggctatagggaagctattcccgaaggattcggtctccccataaatctgggcgcatcggttcggggggactgccccgaaaacaaaaataaatcgattttttcaagtgtccgtttggggtactcaaacaattatggggagcaaaaatccaacgcagaattaaagtacaggctatagtgaagctattccggaaggattcggtctccccataaatctgggcgcatcggttcagggggactgccccgaaaac

SEQ ID NO: 72517 - DNA, 87 bp, Heterodera glycines
atgcgaataatgcgaaaggcgaaatgcgaaaagcgaaacctcggcccatccctgttttgtacgtatttaatgcttttggttccgtcg

SEQ ID NO: 72518 - DNA, 1009 bp, Heterodera glycines
atgaccgaccctggtaagtgatcggccgatgctcgcgatagcgacccgacagtttggacctgtaaatcggtaattaactaattggtaatttaacttcccacctgtcgattttgaaatttaacatgtaaaaacaattttgaacttttcttagataccacccgaatagatgtttacaattttttgaaacaaaaaaacttttgtagcaacgacttacctgtagtctggaatgcctaaaggggaaatataaaaatactgtatcatgacggaagagaggaaaacggcgaaatgccattagtaattagtgaaaattagtgagtggagagagagagaatgtggaaaagagagcacaagagaatcagagtgcaaatcgcttgattgtgttaattgttgtgccattcccacccgattcagtggaaatgccggcgcctgtcatcaccacaagcttgtcaatgcgcgaaaagtgttcctggaacttgtcaaacgctttcccatcaatgcaattagtcgtaggaacaaaacgatcagcgccaaaggatgaggcgaagaagcgacgggaaatcatctccaaacaaatcgaacaaagagaattaaaaacaaattcagtttttaattttcaataaaactcacaaaagccaaccaattaactaaggttgtggaaaatttgcaaaaaaaggaatataacatttataacacttatattttacacaacaatgaacaacagacaacaaaaagaaaataaatacaaaaatggtgagccaaaaatgccttcattcgttctatgtaagagaatgataataatttaatttaacttttgtcggcattgcatttaacaagtgataaataggagcccagcagatttcttacaactaaagccggttataaacagctaaaaataaaacgaaatctcacggctgttagcatctattttaatccatatccgttccaggtggtacacaagcaaatatgaaaatgaattttgataaaatttaaaaacaacagcaaaaataaa

SEQ ID NO: 72519 - DNA, 92 bp, Heterodera glycines
atgggacagaaggaatcccgtcatgcgtttgtcaattgtgccttgataaggcgagaagaatttgaagacaaaattcaggaactcaacaaaaa

SEQ ID NO: 72520 - DNA, 56 bp, Heterodera glycines; identical to SEQ ID NO: 52733

SEQ ID NO: 72521 - DNA, 49 bp, Heterodera glycines; identical to SEQ ID NO: 60106

SEQ ID NO: 72522 - DNA, 310 bp, Heterodera glycines
atgactgattgtgagcatcactccgtgcccccgtccgtccctcccgtcgacttttgtccgtcttcgccccctccgagttatgtttcctctcccacggcaccgcgcaacaatgccaacgacggacagcagcaaaacactgcaaaaggctgctttttaccctcgtgtaaaaatgccaaaagagcgacaaaagagaatgacgcgggcggcactgaaccatcccagccgacttcggccgctgtggtcgttccaatggccaaagacaaagtgaccattctatgccttggccataacagccaatgtgagtgccgcg

SEQ ID NO: 72523 - DNA, 231 bp, Heterodera glycines
atgtggagggaatggaatatcggtggagagggagagggaaaaagagggggagagagtgaaggtgaggtaagaaagagggaaagggaaaacgagtaaagggtagaaagagaagtgagaggaaaagaaagaggggaaatggagggtgaggccttgaaggagccatttctgttgtaaataatgacgaatttcagttctagcctctatgcagtctgaaggatcccgatggctaaa

SEQ ID NO: 72524 - DNA, 58 bp, Heterodera glycines
aatagtaaaaacttctcgccgttcggtgctgttcgctgcttatttgccttagattaat

SEQ ID NO: 72525 - DNA, 1156 bp, Heterodera glycines
atgattagccaccgatttgacttttacgtggacgaacacttcaaaactcgcaaatggacgctgaaaatcatggaaattgggcaggaaattggagagaatggcaccaaggaaatggaaattgtcaatttggatggaaatctattgccaattccgcaaatccaagtgccacgcaaagtcatcggattcgaagccatttcaataaggtgatgagaatgattttttggtgttttcttttttttaaacgattcatttatttttttacagatacatcgaccacaatgtcatcgcttttgtccaccattttcgccaacttttcgccgcctctccaattaatttgtccatcgaaattacgaatgaccgtcgcatttcggagtcgattttgcacaacatttggccactgctcgaaaaaaacattcaaagcataagattgtccgacgaaaatttccgccgtttgcgcaaattggtcccctcatttctcagcgattgtccatctcttcgctttgtcttttcccattttgtggatatcttcatcgaatttccggccgatgacaatgccatggcatcggatggacaagcattggccaaatggcttttcattgcccgtccggacgatgtgccaaaagtgttcaattgttctcttgccaaaacattgaattgggcgtcaaaaattgaagcattgaaagcggtaataaccaaattaattaatttaattgtattccaaatttcccacttttcaggcttttgcctcggcttcatctcctgtcaatttcatcgctgttatttcgttttttcatttgtctgctcaacactctgttgtgccatttgtgctgaccaacgaattgactcgggaacaatttgcgttgaaaagaattgacaattgctatcgttttttgttagtgcgttgtccaattgcgcgagacgaaagcaaatggacaaaatgggagacggaagcgatcgggaaacggtaaagaattgttggcaatcctgaagaattggggtttctatttaaaaatgttttaatttgctctcaaaatcaggttccggggattttcgagggcgatggtcatgaattaggacttcgtaatcgagcaagtccgagttagtttcgtgataaagcaacccccgaaaacccatggaaaatgattttgagaccaaa

SEQ ID NO: 72526 - DNA, 361 bp, Heterodera glycines
ctgccgtcgatgcgtgtcaacagcctctgaatgttggcgttggcccttccaatttggtccgatggtttttcttcgcaccgtcggcacagtgccaaagtttcacgtacaaagggcttcagggcaacgaaaacaattttctatctcggtttgattgcgaacagatttgccaaggtaatcaaatgactgttaatcggctcaattgtttatcgcctagcaaatccatgtgctgtgggcacgcctttgcgagaccaacaaggacagattggcttctgctcagccactcagcagaacatttgccccattggcttttattgccatgtcggaggcgacgtcaagacgagtttatgctgtccaatgatgg

SEQ ID NO: 72527 - DNA, 55 bp, Heterodera glycines
ggaagctattcccgaaggattcggtctccccataaatctgggcgcatcggttcgg

SEQ ID NO: 72528 - DNA, 594 bp, Heterodera glycines
atgcgcaattgcattggcaaagaattgactcgaattccaattccggtatttttgtggctttgtctctttgaaagatcgttgctttacaggtcaatttcaacgaaccactctcaatgcttcagcgtattacggaagacttggaatattcctatttgcttgatcgggctgctgaaaaacaggacatttgcgaacggctcgcctatgtcgccgcatttgctgtcagctgttattcagccaccgctgtacgtaccacgaaaccgttcaacccgttgctgggcgaaactttcgagttcgatcggagggctgatctcgggtggcggtcgctggtcgagcaagtctcacaccacccgcccgccgctgcccatcacgttgaaggagtgaattggcatttgaaccaggtggacacacttttttggttctatgccttctctctccatattatttattatcaacccgaaggaatttatggtcagttcacgctttcgtggcaaatatatgagcgtgattcccactggccatacccacgtgtcctttcgggacggaaaggcgcactttacgtttcaaaaggtggtcacgactgtgcacaacatcatt

SEQ ID NO: 72529 - DNA, 878 bp, Heterodera glycines
atgcgcaaacacatttcgccgaccttcctcttcgactgcccaaaccttgtcgaaatcgtcagcccagttttgcctgaacgtccgaccgttgacaattctgctgctcctgaaacatcgagccgtgacttgtacatgtggctgcacacgacgcgcgtcgaccgtcttccgttggtgtacaaattgctcaaatggaacaaccgatgggaccaattcgtcaacgaattgatgatggtgggtgtgtgggatgatcgatcgattgatcgacggacggacggatttcgtttttttctctgtgcccttttaatcattgttctgatgatcacattcatttccgcttttcagtccttcaatacggcgtcagtcccggtcaactacatggtgttcacttcgttcgaattcatctacaccagaagggaacaaatggtgaacatgctgacggaggagaggctgacgatgttgaccaatgtgcacccgaaacgaggtggtggcgtggtgtccttcgtgaagattgtgcgctgtccagcggagttcagtgaagctgacgtggtgtcctggttgcgtatgacgcgcttgaacaacgaacctcatccgaatttggtgaccattggcttcgcagatgacgaaattgggtatggacgagttgtcaaccaatttttatattcgggggtactcttacaatttctgtccctttgttttcagaccgttgccttcaaattgtgctgcgtccatgtcgagaaacagaccgggctgagaacagaagcaatgcgcaaacagtggatcaacagcagatgagccctaaacacaatcaatggccactcggatggaattatctgatcattatcttttcacaaaatgtaaacttcccatcaaatgactga

SEQ ID NO: 72530 - DNA, 1738 bp, Heterodera glycines
atgggatcagtcatatcatatgaatttgtttgccgccactacctgcatggacacattgacaaacgtcgcgctacaaaagttactggaataggcggcagttctaagacgcaaggacggtgtgtttttgattaatttcatcgcctaaaacatgaatttaaattcagattgacaattgttgtacgtattggcgatgcgaaggtgcgtgttacatttgatgtgatcaaaggattaccgttggatatgctgtgagtgttttgttgtcctactgtctttacatcaacccttttttcagtatcggtcaaaatgtgatggatgctctctgtgccaatcattgccgccaaaccgatcaattgacgtatttatacaaaggacaacgtctcgctgtgccgttgttggaaaattctgatacgactaaaacgaaagagaaaacgtggatggaccatcttcaatgcttaatgaacatcacctcctattccctcaatgattggatggcactcgagcagaggtgggacggtcggggtaaaacgacatgtgctaatttgggttaaatccatttttgtcaatttttggacggaatttattaattattagtcagattttcccattttttaaattttttactgcttcaaggaaaattgcaaacggaggagagaatatgccgttgtccgacttggaatgtggcggtagcacggaactcaatggcatggcgatcggcaccagcgacaaaatgccaaatggaggcgacaaaaagagtcaatgaaagaatcgagaaatgaaagattaatggcttcgcaacgaatggctgccttcacatggtcttggaaaataccgcaccgagttcatggagtgcctggtgaggtcgctttgtgtgggatttagaagcccaattctaccccgactatgtaaaaattaaggaacccaaatcctcccggggcgacaacttgttttgatcgaattttttcttttttacgattaatttttccgtttcaaggttgattcgcgaatgttggagcatttgagcaaaggagatctcggcgaaatgaaaatgatcgacagttttcaccggtgggaaaagaatttgaatgaaaaagtcaaaaaatattatcctcggcttttcattattttgattggcttattttgatggttctttcaaggacaagcttacactacggcattgtgtgcctgaagaaattgaattatgattggaagaaattggaagaacggcgaaacgcatcggaaaacgacaacagaggtgaaaaagagggaatttgtcgaaacgcgattaaataattgacgatctccaattatgtagatctaatggtctggtcaaatgagcgggtgatcaaatggctgaaaaagataggtcttggagactttgttacgaatgccgtcgactcgggcgttcatggcgcattaatggtagaaaaaaggaagattatccaaatctcaatattttaaggccttcgacacaacctttgatgtgcccgcattggcaaacattttacaaattccggacagtgacagcgcacgacggacattggaggcggagttccagaagctggtggccaattaccggggcagaggcgaggcgggagatgaaaacggcaaaggaggaagcggagagaagcagccgcaacagaagaagacgtgatctcacaaatgatctccatgctgtaattaaacttacctaattgatgactcaaatattaattgattttgttcattttcagataataaa

SEQ ID NO: 72531 - DNA, 185 bp, Heterodera glycines
ggagttgacccatagcgctggcattgcgctgtgtcaatgtgtatataagcaagcgctgtaagcaaaagaaatcatttggcttcactttcttttttcctcttttttttctttttttaactcttctttgtctaaactcgcgttttataacgtcctgttttagcgtattcagaagtgccgcaaagaag

SEQ ID NO: 72532 - DNA, 49 bp, Heterodera glycines
ggaagctattcccgaaggagacggtctccccataaatctgggcgcatcg

SEQ ID NO: 72533 - DNA, 378 bp, Heterodera glycines
atgactcagataaaattgctgaacgaggaggaaataaatatttctgaaataaaagtggagaaaaaagttgaaaattcgctgagcaaaatgcaaaaaacaaatgcattttttgaccaatcgtcggaaattgccaaccttaggacggaatttgagcaaaaaatggagaaattatgtgaaagaaccaaagaaaatgccaaggaagaaaaggcgaaaatggaaaaaacaaaagcaaatgcagcggatgaagggcatagactcggaacggaacttcactttctgtccaaatttggcactttcatttcgtcgccatttttccgttgatttccttaaattgagtattttttttacactgatcattagcgctataaattatatgca

SEQ ID NO: 72534 - DNA, 547 bp, Heterodera glycines
atggatttgaatcatggtaagtaaggccttatgacatgttcacagtttaaaattattattatcctggtaatggcttcgtctttctctctcagtctcagatcacttaaaacatcatcatgaaccatgcatgttttattgtttcggtctgatcacatcatatcagctgctctgatcaaagatcttgaccaaaattctgttaataatagtaatgaattaaaataaatatgtacttttttaggcctaccgtacttatttttgtcttattatattgtgaaaacaaaactgcaatgaaggggtagatttctacagttttttccccaaattttttcaatttaacaattttttataattattaattagactaatagtttttttgtttgttaagaattttcgaatgaaatccttttcgcattcgatcaacaacttaaaaatacttctttgactaagtctttttttgtgggctagttttgttgcccatcattcaaacagtaagaacactgctgatgtgcacatatatttttatatatttttgcaattgttgaataaa

SEQ ID NO: 72535 - DNA, 78 bp, Heterodera glycines
cgcatccaattccttctacaatcgcctttatacatcccattatgaacgctaaaagtatcagagtgccgaaaatcgcat

SEQ ID NO: 72536 - DNA, 438 bp, Heterodera glycines
aaaatggtctaagtaaaaatcgtaattacgctcaaaaagcttctcaaacaattttagcgcatccaattccttctacaatcgcctttatacatcccattatgaacgctaaaattatcagagtgccgaaaatcgcatgtgatctaagcctagcaaaaaatggtgtaagtaaaaatcgtaattacgctcaaaaagcttctcaaacaattttagcgcttccaattccttctacaatcgcctttatacatcccattatgagcgctaaaattatcagagtgccgaaaatcgcatgtgatctaagcctagaaaaaatggtgtaagtaaaaatcgtaattacgctcaaaaagctcctcaaacaattttagcgcttccaattccttctacaatcgcctttatacatcccattatgaacgctaaaattatcagagtgccgaaaatcgc

SEQ ID NO: 72537 - DNA, 575 bp, Heterodera glycines
  unsure (1)..(575): unsure at all n locations
atgttcgaaggcttaacatctaaagcgagtgcaattaatgggatgatcactgatcagttaaacatgcttattccctgggtgaagcaactaagcccaattctgtgagcttgcacatatttttggcatttattctaaatctcttttttgaacagccaactctattaaaatttatatttaaaaaggcaaaaatattatgtaaattacgattaattcgattttctctgaaaattcataaattttaacttttttattttttctctaaaatgatttttaattccaatttagaactatgtacgtgattcttcacttaagtttaacataagaaattttgagaaattgcaccctatatttgaaaaaatatgtgtatattttcaacccaataactttttttaagacgagtcgtagaccatcgtccaaaggtaattcggcaaagaatttattgaattttttgtccatcttttttttctcaaaagcactcaaattccanataaaactttttttttctcagcctaattattcagggctgccaaaaatatggcacgaaaagtggccaaaatatgcgcataaatatgcaa

SEQ ID NO: 72538 - DNA, 844 bp, Heterodera glycines
  unsure (1)..(844): unsure at all n locations
acgagtttggttgaacatgtcattgataccggagatgcgacgccaataaggagcagaatgcggccagttccgtatgcttatcgagaaaaagtttctgaaatgttgagggactatttgggtcgaggactcattcggccatctaattcaccgtgggcaagtccaattgtgcttgtgccaaaacgagatggaactttacgattttgtatcgattacagagcaattaactcagtaactaaaaaggacgcctttccacttccaaacatcgattacattttaatggcgttaggcggaaaacgctatttttcaactcttgattttatgtccggttattggcaaatcagaatgcacgaaaattcagttcaaaaaactgggttcatcacagaatttggactccatgagttcactgttcttccatttggtctgtgtaatgcagttgccacttatcagcgttttatgacgaatctttttgacggaatgataaatgatttcgtttcatttacgtcgatgacattttggttgcatccgagacttgggaagaacatttggtacatttaaaggaagtatttgaacgcgtcggaagagcagagttgaagctaaaaatcggaaagtgtcattttgctgcagaagaattaccgtttttagggcacattttgaccagaaatggtataaaaatggatgccgataaaactcgcacaattatcggtcttccgatccctgcaaccaaaaaacaattgcagtcattccttggtttcatgncttatttcaaagaatttatttncggttttggttcgttggcagcnccacttatgattgataaaagaaaatacaccatttgtcatgggtg

SEQ ID NO: 72539 - DNA, 787 bp, Heterodera glycines
atgagacaactcagagaaatcaggggatgctacacaaggataagcagatatttggaggaccagagaatgttcaagaagctgctgaaggaggcggacttttatgagcagagaggtaaatttattatttagaagcaattcaaagcgattaagggactaattgccataaaacaatgccaaaaatgtgtaattattaaagccctgaattttaggttttacctattttttacggataaatacttgatgagagaagcacgaaaatcatattttctccgaacaatttttgtattagattgactttttagcatccaaaaacacttaaaacggggatcagcacttttttagcattttcggtctttatcacctattttggcctttttccagaaatttcataccaaaaatgcaataaaaacgtaaaatgcacccctaagaatcggtcccaaaaatttcagaaaaatacgccccgaagaaccgaccaagaaattttcaattacaaccctaagtatcgaaaaaaaattttttttaaatatctccaaaatttattatttattttttcttgacaagttgcaattgttcggacgaaatttttgcaccttttttgcacctattttagtacctatttcagtatttttggcacataaaaatcccagctctagtcattatctaaattcgcaaaacttagaaatttttggccgtttttatttctcaacatttgtcttctgtgtgggtgcattagattaagatagcttttaacattttgattactctgatagggttttgctatataata

SEQ ID NO: 72540 - DNA, 886 bp, Heterodera glycines
  unsure (1)..(886): unsure at all n locations
aacgnccgatggcatcgcgaaatntgatggcggtcaaacagaagcagcggcccatgaaaccaacgcaanaaagggaaccaagttcagaaccaaactcnaaagggtttgctggcgttgtggcaagtttcaccatgctccaagcgaatgtccaagcatcaaaactgtttgccgaaagtgcaacaaagctggacatttggaggcacaatgcgagaagcaccatgagtggctcaaccggaacaaaaacggcaaatttcaagggaaaagagcttgcactcttcggatcggaggtgtaatggtgaacattgtgaaccatccaacgaggctcattgaaattaccgtggaaatgaatggaagaaaagtgatttttgtgcttgattccggcgccgaggtcacagtgatcaacgaagagactcactgtctgattggaaaacctcaattgcgccgatgccaagaacaagcagcatatcacgacggctccaagtgcactcttctcggaagaggggaagcgaaattcaaatttggagatgccacaaaaaacggaacgtattatgtgtccaaaagtggatcattgaatttattggggattgaaatgctggatgctttcggacttttggacgacattcgacaaaaagtgaactcaacactgcatttgaatgcaatcggaagaggaaatggtgacgaagcaacgattatggaggaactcaaaaagaagtttcctgaaattgttgccgacggacttgggcattgcaaaaaggtgaaagcacatctgtcgcttaagcccaatgcaacaccaatttactgccgaccgcgtcccgtcccattcaacaccaaatctgttgttgaggcagaattggagcgacttcaatcgatgaatgtcatccgtccg

SEQ ID NO: 72541 - DNA, 944 bp, Heterodera glycines
atgccaacgcttgttgtttttaaaatttttcgaaattctgactttttcattaattatttattttttgcaaaattaattcataagtattttttcagaaagtgctctgaaacacacaaaactttatttacaggttagtttaggcactctgatgctttttctatcaaaaagggagatgaataaaatttttaattcctttttaaacaggccaaaaagtttaggcttatattttaaaaagtttcatcgaacctagcgcactaacatcgatataatctctccaaattttgcaggccttctccattgtaaaggactaacttaacctgaaaaaatgccaacgcttgttgtttttaaaatttttcgaaattctgactttttcattaattatttattattttgcaaaattaattcataagtattttttcagaacgtgctctgaaacacacaaaactttatttacaggttagtttaggcactctgatgctttttctatcaaaaagggagatgaataaaatttttaattcctttttaaacaggccaaaaagtttaggcttaacttttttttcagaaactgatcagaagcgcaccaaactttgcagggatactgaaaggaagagtaataacctattttaaatattatctagtcagttcatttaaataatttttatccaaaaaaatttttttttgggttttcggggcagtccccctgaaccgatgcgcccagatttatggggagaccgaatccttcgggaatagcttccctatagcctgtactttattctgcgttggattttgctcccataaatgtttgagtaccctaaacggacacttgaaaaaatcgatttttttgtttcatatatattttttcagaagtgctctaaagcgcaccaaattttatttacaacttaattttagcactctgatgctttttctatcagaaagggagatga

SEQ ID NO: 72542 - DNA, 482 bp, Heterodera glycines
aaacaaaaaaatcgattttttcaagtgtccgtttagggtactcaaacatttatgggagcaaaatccaacgcagaataaagtacaggctatagggaagctattcccgaaggattcggtctccccataaatctgggcgcatcggttcagggggactgccccgaaaacccaaaaaaaaatttttttggataaaaattatttaaatgaactgactagataatatttaaaataggttattactcttcctttcagtatccctgcaaagtttggtgcgcttctgatcagtttctgaaaaaaaagttaagcctaaactttttggcctgtttaaaaaggaattaaaaattttattcatctccctttttgatagaaaaagcatcagagtgcctaaactaacctgtaaataaagttttgtgtgtttcagagcacgttctgaaaaaatacttatgaattaattttgcaaaataataaataattaatgaaaaagt

SEQ ID NO: 72543 - DNA, 120 bp, Heterodera glycines
tgtggtaagtgtgaagaactgtgttcctccaggcaaaaaattctaagaaaatttataagcatttgaagggttctcagcagattccctgcaaaatttggtgagcttctgatcagtctagaa

SEQ ID NO: 72544 - DNA, 554 bp, Heterodera glycines
  unsure (1)..(554): unsure at all n locations
atgacagaaagagcgtaagacagatgactgactgaccgtgtatcatccgacagacaacaataaattaattctttagaattcttggacgtctgacaagcaaagacccggacgcagtggctgggcaaagtccattacctccgcccggaccctttgtaactccaatggcacaaagtcgcttctcgggcatacagccgaaattcgccgcacttttgaagccgaaacaccaatcaaagaaagaaaatctgccagagaaagacggaaacgacaaacaaaatcaggaggaaacgcgaccgagcaaagaggaaaaacggactgacgctgatgttgagaagacaagtgataggagtacaaaggaagcggaaggaagttgcaaggaggaggcagaaccagtgcaagacgacaccgtgaaagaaggttgactttcgtacattccataaatgcgtatacgtattttcactttcccgttagttatgactagggactccattttaggcacgaaaagtcgcaaaatagacgcctanaaaggtaaaaaaaatctanggctcaataggcaa

SEQ ID NO: 72545 - DNA, 1722 bp, Heterodera glycines
atggctgctcagcggatgaaggtgtgctatcgcctcggctcctccgcggttgccgggtcttccactggtgccaatggttccgccgcgtacggtcgcgcttctgccgtcggtagcgccgctgttgcctccggaccgtcggccgatgcggtcgcaggcggagccgcgccaccgccgctgatggctgcgccattgatcgcggcggcggcggcgaatgccgcggcagtggccgccgctgcgcagccgtccgcacagcaacgcgccgttgccgccgccgcgccccaacagccgcagcaaccgcagacggccgctgttcaactcgcactgtctgcggccgacttctcccacctcttccagcactaccaaagtgcaatcggacaactgcagccgtcgatgggcagtgctgcggccgccgtcgccgctaaccaagcggcggcagctcaaatcgccgcagctgctgccgcggcaccgtacgtttgccaaccgttggcggccaccgcagcgacagtgctcccatacggtatgagagtcaacaaaatgaattgcttttgtattctgcttttgtcaaataattgcttccacattcgacaggttccgcccggcatcaaccaccgccccaattttccgcagtgactgccccccaggcgcagtcgctgtcccaattcgtgccgaccgcgatgcatcccttcgtcgacccgttgatcgcggcggcgaccggagctgccaacgccgctgttgcggcggcggcccatcagcacagccacgcggggacgatggtgacgggatcatctgctggaggaaatgcatcaacagcgtctcacgtggggccgcaacagaatggcgcggtgccccaggggtggccgacccaacagcagcagcagggctcggcaaatgccacggcacaaaaccaggcggcgacgttggcacaaaacgcaaacacaactgcggcactgttcccgtgggccatcgcggcagcggcacaacaagtaagctaattgggtttgatttcttgactggtctctctgatttttcaggccgccctgctccccggcgctggcaacaaccccgcgggcgccgctgccgaccttttccttccggcgaatgccgcagccgcggcggcggtgcagcggcaaatggctgctgcggcggcggcgcttcagttcccccatttgttttctgcgcccgtccaagcggcggcacaacaaacggccaaaaactactcacaacagctgcaactgttggcacagatgcaacaacagcagcaacaggtggaggagggcattttgttggagatgagggaacattggaatggacataattcttttttaaataaatgctccgtttctgttacactcaattagcggagttgcacattgaatttgggtgggaagggggggtggagggattggaaatgtttttacattcttggcatttttgtaatttttggcattttgtcccccaggaggaatgggctgcccaagtgctgaacggtgtccggccgatgaatgcgcagcagcagcaaatgctgcaacaacagcagcagcagcaacaggcgatgatcgcccgactcaaaaatgacgcggccattctcatgcaaaattcgttggccgaacattaccttttggagaggttgggcaaaaaataaaatgcgaaaaatattgaaatttggtcgagttttttaatcattttttgtgaattgcttaaacacttaacatttgcctgtaa

SEQ ID NO: 72546 - DNA, 921 bp, Heterodera glycines
atgcaacgcttcttggacattgtgtacgacattatgagtcttcgaggtaaatccccaattatattttatgaaactttttgatagaattgaaaatcacgcttttgtttgtatatttcgggactcattgtcagcataattggattttgcctttccaggctccaattttctttacattacaataagcatttaagttttccttttgcacaggatacatctgtgagcaattggatggaaccgttagtcaaccggatcgtcagaaagccattcaaaactttcaacggcctgattcggacgtgttcgcttttcttctgacaaccaaagcgggtggtcttggtctgaatttaaccgccgcagacactgctatttttctcgattcggacttcaatccgcagaacgacaaacaagcggctgcacggtgccaccgcatcgggcaggacaagtgggtcttatatttattatttttatacaaaaaaaaaacatgaatttttcaataaaaaatgtttgacttttttctcaaaactctttggaacaaagaacaaaatctttagattccctcataaagaacaaaaagtcttcggattccttctccatttttcgatttagacctgttaaaagcattcgtctcgtggcaaaacatacggtggaggagctgataaagcagagatcagtaaagaagctgaagctatccgagaatgtcttgggaaccgacgaaaaggaaggttttcgagtattttgttcctaggtttttttgaaatcttctcaggcccttcactaatgtttgacctgtccaaacttttgctagaggggctcaccgacctggagaaagagcagaagaagcacacacagtttcacattctgaccgacaaacagcttgaagagcgattgggacaaaccgatcaaaacggacattggcaaataaaa

SEQ ID NO: 72547 - DNA, 394 bp, Heterodera glycines
  unsure (1)..(394): unsure at all n locations
atgttccgcattctgtcaaattttgttttttattgttcttacgaatatgattggatcaaaagctcagcatattggcgatgttggtaaacatgggaaaatttgcaaaggtaagctgaattgatcacttttaaataatgaaaattattaatatttaaaggtaattttgtttttaaaattttcggcattcgaaaaaatttggcacatggattccaattcagtccttaaaatgaaagcgtccacatccccctttacagtatgtaacgacagataatttaactgtatttacatgattatccgcttttcaaaaaaaaaaatttttgatttaaaaaaaaaattcggcattaaaattatgttcaccaaaatgggctacatcctgngtttacaaatttactca

SEQ ID NO: 72548 - DNA, 954 bp, Heterodera glycines
atgcggacttcatcgacaaatttgcatccattggtgtacgaatcttatgaggtgctcaaaaaacatgcaaacgttgacaatcgattgacttattcacttcgacggctcgacaattttacgcggctcaactttttgatggaagtcgaacggaaaggaaaaacgaaaatacaggaagggaaagaagaggatgcatatatcctgtacagccgagccatgaccatttatcttatgataagtgagtcaattgacgacgaattcagacaaggccgcggaggtcaacttttctatgaaacttcacagcgtttgggtgtggattttgacaaagttgctgtgagtttacaacagcggttcatggatgggaaaggcgagttgcctaaattttgtgatccgttgggactgcgttgggccgaaattgttgaagaaccgatttccgaaaatttggaatgtggtaaggactccaattcgttggatgcccagaacaaaattcagtccattttgccgaaaaatgaaacagcacttcctacaaccgaagaattttccatcaaaattaaggggaataataaaaagcaaatttcacacatgacggacccggcaattgtgggcacgttggaaaagtcagaaaaagtagagaaattgatcgaagagagtggggaagcgaaaaaggagacaaaagagaaggaagaagcaggtgaaaagcaaaaggaagagaaaaacgatgaagaggcgaggccaaatttgaaattggtggaacagacattagaatggcagaaagtgaactcaatgaagcccatttggacacgaaggcatgcagaactggagaaaaatgagcacacgaaattctacaactccatcaccaaggactttgatatgccgttcggtcatttgcgcttttctgaaaatgcgatgccgaagtacattctgtatgtgccgaaaacgctggtcgctcacccatag

SEQ ID NO: 72549 - DNA, 262 bp, Heterodera glycines
atgggacgggatcacgcgctgtgcggacacacggcactacgtcaaacaggtggaaggggggggagggctcccacccgagccgcgaagcggcagagtgagtaccttcggtgcaggaaaattattaaggaagagagttcattatttatttatttttgcaaaattaattcataaatttttttcagaaactgctctgaaacgcaccaaatgttaattaaaagttaaataaggctctctgatgctttttctatcaaaagggagatga

SEQ ID NO: 72550 - DNA, 205 bp, Heterodera glycines
tgaaaaaaaagttaagcctaaactttttggcctgtttacataggaattaaaaatttttaaaaattttattcatctccctttttgatagaaaaagcatcagagtgcctaaactaacctgtaaataaagttttgtgtgtttcagagcactttctgaaaaaatacttatgaattaattttgcaaaaaataaataattaatgaaaaagt

SEQ ID NO: 72551 - DNA, 658 bp, Heterodera glycines
gttttcggggcagtccccccgaaccgatgcgcccagatttatggggagaccgaatccttcgggagtagcttccctatagcctgtactttaattctgcgttggatttttgctccccataattgtttgagtaccccaaacggacacttgaaaaaatcgatttttttgttttcggggcagtccccccgaaccgatgcgcccagatttatggggagaccgaatccttcgggagtagcttccctatagcctgtactttaattctgcgttggatttttgctccccataaatgtttgagtaccccaaacggacacttgaaaaaatcgatttttttgttttcgggggggtccccccgaaccgatgcgcccagatttatggggagaccgaatccttccggagtagcttccctatagcctgtgctttaattctgcgttggatttttgctccccataaatgtgtgagtaccccccacggacacttgagaaaatcgatttttttgttttcgggggagtccccccgcaccgatgcgcccagatatatggggagagagaatccttcgggaatatcttttctatatactgtactttaattctgtgtgggatttttgctccccatatatgtgtgagtaccccccacggacacttgagaaaatctatttttttgt

SEQ ID NO: 72552 - DNA, 1827 bp, Heterodera glycines
atgaaccagcagcaagtaattaaaacaaaacgaaataatgataaattggtgcatgatggtgcactttatgtgttccacaaattcagtaacgatggacttaagaaattttggcggtgtgagtttcatggcccggcagaccaatgcaagggtatgctaatatattattttgaattttgaaaatcttttaaaatccaggacgcttgcacacggatttaaataacgttgtgcagaagttggtcggagttcattcgtgcgacatgaacgctgcgcatgtggaatgtcagcgtcttgtaactggactcaagcgacgtgctgctgagacgtgcaagcacctgcgaccattcgtgctcaagtgcttcaaaacacatgcacacctgtgctagcctcttttccgagcaaagatgccacaaaaaaggtgggttactatcaaaaacaattttgtaaaaaattttgttttctttttattcaggtcatcaaacgtttgcgccgtgatgaaaatgcaccgcgagtcgaacctctcaatttggagcagttagagattccgaatacctatcgtgtttataagcgcactgagattgacgatgagcaattcctgttggcggacactggcgtttttcaaattcacggacagaatggaccccaacggtaagacatttatcgtttaaaccattaaatgatggtcatttacactattaaggattctcatttttggaagagcgtctacggcagattggactcaccagatgaaagacatttacgcggacggcacttttgcattgacaccgccgcttttcagccaaatttatgtgttgttggcaaagtaaagttaattgtgttatcacaatgttcaatctttttaggagagatggttgggtatttccaatttgctactgtcttttaacatcgaagtgtgccgcaatttatacgcgcatgttacagcttcttttggaacgatggccgaatttcgcgccgcagacaatttcgatggacttcgagttggcaatggttggtgcggtccgcacagtgcttccggcgtgcagtgtccgctactgtttttttcaccttgtccgcaacatgaagaggcagatcagaatccttggcctcactcgtgtaattttagaattttttattattccgttcccattcaaactcattaaggtttacaacactgatcctgccttcgctgagaagtctaagatgatcacatcattggccttcctgcctgtgcaccaccttcaaaatggccttaatgctcttcaagcacaaattccgccacaacttaatggcgttttcaattggttaagtccgaagacgagttttatgaatttttttttctaggtttctggacaactacacgggcagaatgcgcttcaatgttccaatgacggcgcctctgtttgacccacacgaatggagtgttcatcagcgcaccttggatggtgctgatcggacgaacaacttcgccgaggcattccatcggaaacttcagcggcaatttagctgcactcatccaacaatttggcgattcattgacacgatcagatgtgagcagaaggcgcttgatgctgatatggcacgttgcatgatgggagaagccgcaccccaaaagaaaaggaagtatcgcgatgccgattcacggattcttcgtctcgtccaacgttataacgatgtcaatattgtcccccaaaatgatcacaattatgccaatcccaatgtgaatcccgaaaacattaacaattttttcgccggtatttcccgaaactatgagatgcgaccctagtttgtcccattttgttattgttaaatttatgcattttttacattaaa

SEQ ID NO: 72553 - DNA, 330 bp, Heterodera glycines
atgtgctgctgtgttcgaatcgttgggcttaatttcggctgaaaaggaggaaatttatttgcaatttgaccaatttttgaaggagaaaatttatgtaaaaaaaaatatttaaaaaaatattttattttttattttcagccaatttccaaagcgatcgaagcttttctcggcactatgcgcgaatgtgcgcagatggcacgcgactcggcacgcgcgtgtgccatcttttcgcaatggagccgcgaatttggggaccaattgcaattgcagccgaattgggaggtgaaaagagaaaatttaaattaaaaaagaaatgcaaattatttgaaa

SEQ ID NO: 72554 - DNA, 79 bp, Heterodera glycines; identical to SEQ ID NO: 52291

SEQ ID NO: 72555 - DNA, 226 bp, Heterodera glycines
gcttaaaaacattgtacagcataattaaaacctaaaataattttcgtatatttttcacaatttatttcaaaagacaaaaaaaaatgattcaattttgaaacgaaatagtgcacaaaagggagggatggttagacgaaaagaggaatttttagaaaagagcgcaccccatctgatattcccatttttccgttccacaactggccaaaggcgactgtgctcattgaca

SEQ ID NO: 72556 - DNA, 81 bp, Heterodera glycines; identical to SEQ ID NO: 58971

SEQ ID NO: 72557 - DNA, 1099 bp, Heterodera glycines
tttcgtgcggctgaacaccgaaaatccctctaagcagttgtgcccacagaagcaatgagccaactatttagtaggctagagtctcgctcgttatcggaataaaccagacaaatcgctccacgaactaagaacggccatgcaccaccatccaccgaatcatgaaaaagctatcaatctgtcaatccttacggtgtccgggccgggtgagtttccccgtgttgagtcaaattaagccgcaggctccactcctggtggtgcccttccgtcaattcctttaagtttcagctttgcaaccatacttcccccggaaccggaagactttcgtttccgggaagctccccaccagggcgaataaatccgccggcggatcgctagttggcatcgtttacggtcagaactagggcggtatctgatcgccttcgaacctctgactttcgttcttgattaatgaagacattcttgccaaatgctttcgctgtagtccgtcttgctacggtccaagaatttcacctctcacgtagcaatacgaatggccccgtttgtctctgttaaccattatctcggtcagcaaaaccaataaaatcggaccgaaatcctcttctattattccatgcacgaacattcaagcgaaacgcctgtttgaagcactctgatttgttcaaagtaaactcgccagcccaccgacgccgaccggtaaaggccaacgccggggaaagaccggcagaaaagccaaccaaaccagtaacacacaaagtgtgcaccggacggctagcacagatccaactacgagctttttaaccgcagcaataattctatgcattttgagagctggaattaccgcggctgctggcaccagacttgccctctcatagatactcgttaaagggtttaaattgtacccattccgatgaccggcctcataagagatcggtctcgttatttctcgtcactacctcctcgcgttgagagtgggtaatttgcgcgcctgctgccatccttagacgtagtggccatttctcaggccccttctccggagtcgaacccttatcctccgttacccgtcatcaccatggtagtcagatacactaccatcgaaagt

SEQ ID NO: 72558 - DNA, 382 bp, Heterodera glycines
atgttgtgcaaatgcggcgaatgcttcgaatgcgaagatgaaaagcgccgcctcaagcgcaatcgggagctcaatacccgcaaagagcaaattaagaactgcacaggcaatcatctagcaccggctatgatggaactcaaacgccggaatatggaactgtttaaaaaggcttataggccggtgaagggcgtcatcaataaaataaccgggggtgagtttaaaaaagaaattgaaaaaaaacaaaaaaaattttttaggcccttggaatgtagaatgtgaggtctgccatgagaccttcacatacttcatggtggagtgggaaaactcccggaccgacttctcgtggggtcccgggaggaacatggtcgaagcggataacata

SEQ ID NO: 72559 - DNA, 1463 bp, Heterodera glycines
atggactcggcggcagattccattcgacagctacaacgtgcagtgcgcgaacagcagcagatgatctttttgctgagaagtcagatcgttgatcagagagcagtgttgcttcagaatatgatgcggattgaatcaacggaggggtacttggccaatgtaagttcaattttcaaacaagtatttaaaactaattaatttcgcttatttttataaataatcatttgattatttcagtctcgcgggaaccagagattcagcccgagatactctcccatggcgggagtggagctttcgctgctcggccgtcgacttgaggaacgagaacgccgacaacagtctcgtttgggtaggctgtaattttttttattgaaataacaaataattcaagtgcaagtggagaataataataatgctgcgggtccaagtgatggaaatgttcggcccataccaaatgaaaaccgtaaactaggaaatttttgtttaataaatttcgattttttttgaagagcagctgactccgctaagttcacgttcgggaaacaatggggctctgcaaaatcgtactaatggtgtgctaattttgaaaaaaaaactgaaattatttttgtttgttttttttttagagagcaatgtggctggaccaagtacggcgagtaatggtggtgacgatgaacgtgaaaacggtgagatgaacccttaataatttgaatcaaataaatgaatttttgacaggccccgttctaagcgctgtgattgaaggccacatgaaccgttcgcggatgcgtctaattcgggacgagatggttcatcgtgctgtgcagcagcaacttgagcaccagcaccatctgttgcttcagcaagcgcagcagcagcagcaacgggaagaacgcgaaagacaacagcactttgatcaacaaatggaagaagcagagcttcttcacgaacaactgcaggcagcagagcaggaaaacgacgagaacatcgaaccacagccccctcagcagcagccgcaacctcaaccgctgattcgtcatcagcagctgcagttcgaacgtaatgttcgactgcagctgcgcgagtcgcagcgatttgaaaggggagttgcctcgtcagtgctcgttccgccagcccagctctattgggagaccgaatgcatcatctgcaccagcaaccgcgcacacttctacagccgtaattgcggacacatctacctgtgctcgacatgtgcggtgaacgcggtgatccacaaggtcgcgacttgtatgctgtgccgtgtccgaattgatggaatttatccatttgtacgatgattgattgatgtatttgataactctcgaacaccctttatcattttgtccatcctatcattatcctattatcacaatttttaaacgatcattgattgccacttggcatttgcaattctcactcattatttaaactcatccaaccaatccaataaa

SEQ ID NO: 72560 - DNA, 502 bp, Heterodera glycines
atgtccacatcctctaataaaaattatttaccaaaaaaccaatgcccaaattgtgatggtaattgcaattttttcaatactgtacaaattttttttttcaaattttagatgatgaagttgacactgacccttcacccgaagaagttgagaaatggacgccggaacaagtgattgagtgggaccagcgttgctacgggaaaatgccagctgaagaagagctttggcaagaattcctcgacaaaggagaggcaaatgtcagtaaataaaatttttgatccattttttaaattatttctttaggttctgcgtgagttctttggcggaaaaggggcgcttgaagttgagaagagccttcgagaatacgcgaagaaaaaggaacgccgagacgcaattttgattgagaaaagaaatgaatacaaaaaatgatggaaaaaaaggataaaaattgagtgttcgaatttcaccatccgctatatcaatggcttttattttattcaataaa

SEQ ID NO: 72561 - DNA, 798 bp, Heterodera glycines
atggtgcttcttacggaaaaaatcgccaaaattttaaactgccgtgtcagcgagctccgtgatcggcttaatcatccttccgattgtgaaacggtggtgaaagcgctgacaggacaccgtgttaaaacaacatacaaagacagaaatggatacaccaaaagctttgcttttgggggaattacagcacaaggagctgcaataactatggcttatggacgtctgggtcgtcctttcaatgttaatgtggccgcacatttctacgtccgtcaccgcattaaactccgacatcctttcctccactgtgctgttgagagctttccggaaggacaagaggatcgcttctatcctcttgaattatgcgaaatggaggatggaccaaacgaaccagattggcttggtcgtattttcacagaaattcgtaacgacaactacacagacagcatgagccctgcaaaccgagaagttttaacgccggaagacacgtcaatgtctcgtgaagggcgtgatgagtgcagtcaaaatatttcttacaccttatggtaattaattttttttcaaaattgtctcttctctttcttaattttgtacttttccagccaaaaagtactctttcctatccttaattttttcgaaaatgtgttttagatgatacttacactttctggtattgattaatattttcaaaattgtctcttctcttccttaattttgcacttttccagccaaaaagtacactttccaactcttaattttttcgcaattgtctctttgttttaattcaatttaatgttttttgta

SEQ ID NO: 72562 - DNA, 1237 bp, Heterodera glycines
atgaccgacaaagaggctggattagtacatgcacctcgttggaagtaaagttttattttttaatattttattcaaattatttttagttaaatgcggcactagaggagggatatcgagtgacagagctgcttcgcgttctcgaataccacaaaagtgacaacaaactcttcaggccatacatgagcgagttcgttgttgaaaaactccatgcttctgggtttgatgagcaaatcaaaggcaattttgaggccgaagagcaatttattgcggaatgctgggaccaatttggaataaaaattgatcgaacaaaaatggtcccgaacaagggaaagagatcattggcaaaattggctgtgaataatttatgtatgttttttcgttatcctatgaaaatattataaacaaaaaatttagggggccgattttcacttcgaaattatggtctttcgcagacgctcatcacagatgacccatctgagcttggaaattacctggacaacaaaaagattgaaatcagcggccttgacatgctgacgccggaaagaattctgaccagttatcaattgaaaaaagattggatcaaagagcatccttgttcaaatgttgtgatttcactgttcacaacatcagcagcccgactacatttactgaaatcaatgcagaaagtggtcagaagtcccggctgcactcttttatacacgggtaaacatacaataattttctttattattctaaattttagacaccgattcattgtttcttgtacacccggaagactcaaacccacttcagacgggggtgcacttgggacaactcactgacgagttcccaaaggtaaaagaccaatataaatcgcgctgcatttttttaaatttagcacgatattttggaattcgtaagcggcggcgcaaagcagtacgggttgaagctacgaaagaaaggaacagcagacgaatttgaatacgtgctcaaacttcgagggattaggctcaattatgacgtgacagaaaatcaagggcttcgttataacacattcaaacagagtgtcctggaatttgcccgctccggaaagacagacccaattaaagtgttgtacccaaattttctccgcccggcagtaatccaaggcaatgtcacctccgctcccctccaaaaaatttataaaccttatgttggtaagggaattgtttgttcaaatgattttcgtgttctcgattttggtcacatttcaccataa

SEQ ID NO: 72563 - DNA, 832 bp, Heterodera glycines
atgaccgacagaggctggattagtacatgcacctcgttggaagtaaagttttattttttaatattttattcaaattatttttagttaaatgcggcactagaggagggatatcgagtgacagagctgcttcgcgttctcgaataccacaaaagtgacaacaaactcttcaggccatacatgagcgagttcgttgttgaaaaactccatgcttctgggtttgatgagcaaatcaaaggcaattttgaggccgaagagcaatttattgcggaatgctgggaccaatttggaattaaaattgatcgaacaaaaatggtcccgaacaagggaaagagatcattggcaaaattggctgtgaataatttatgtatgttttttcgttgtcctatgaaaatattataaacaaaaaatttagggggccgattttcacttcgaaattatggtctttcgcagacgctcatcacagatgacccatctgagcttggaaattacctggacaacaaaaagattgaaatcagcggccttgacatgctgacgccggaaagaattctgatcagttatcaattgaaaaaagactggatcaaagagcatccttgttcaaatgttgtgatttcactgttcacaacatcagcagcccgactacatttactgaaatcaatgcagaaagtggtcagaagtcccggctgcactcttttatacacgggtaaacatacaataattttctttattattctaaattttagacaccgattcattgtttcttgtacacccggaagacacaaacccccttcagacgggggtgcacttgggacaactcattgacgagttcccaaag

SEQ ID NO: 72564 - DNA, 3095 bp, Heterodera glycines
atgtcaaaatctcctccttcgaaacgagctcgccgttttttcatcgaagaattgcttcgggaaccctacaacgagctttccccaccacaaaagtcggcaaaggattacgtcagaaagctcgactcagagatcgaacacgttccgaaattccaatgggtgaaaaataagtctcgcttcgtcattgaagatgtaccggctgaccccgagggacttttaattggaatttttcaacactgtatggacgaagcaattggtgacagccgcttgaaaggagttcaaccaacacatctcggctgtatcatttccagccagttactgacatccgatatttggattccaattcgtcaaatgacacccgacaccataaacaccatacttaatcgctttaacgacgtggcgcagagcaaaaaacaggatggggtgacgctttggggagatgcatttaccgttattgtgacaacggttaaccgaaatggactaccagagaaaatgaagctaaaagggggagccgcgcggaagttggctccggtccaccaccgaattcatgaacaatgtcttataaaggttttcactttttttcttaatttaaaaaatcattttttagattaaaaatttcaatggagacaattactgcttattctacgcaatgcaagcgacgatggttcgggcagttggtgccatgacgcggcaacaattttacggatatctcaatggaattgatggaatgcgagggaagctgagaaccgaaacaacagaattgatggaagccgttcaagcacctcttggacagcccaattacgacgcagaaatttatgtgccccggattgttgattggtggaacaacgaaaagtttgcaggccagtggaagtttaaagctttcatctttggagcaatggggcattacaagccgcttttcaaatacgggccagaggaatacatcgttccaataattctctactttgacgatggacacttcaatggggtgcagaaaagcggaaatctttttggcaagccctattgtctgagctgtgaaaagacttacgaccgaccgaaacgccacattgctagttgcaaatcgcgctgcattaaatggttaatttcttgtaattttttattaccttttattttagctcacaaatgggaccacaattcccatgcaaaccaattgctggagttcggcaaaagtgcaaggattgcaataaaatgttcttcaataatgcttgctaccagtatcatctttcttccaacttttgtcaaatgagcaaagagtgcaaatactgtggcgtcgtatgggacatgcgtaaaaattgcgataatgggagagaggtttcttttaaaaatttaataatagtttaatattggaatagggtcacaaatgcaatgaacgctggtgtgaaaattgtcaaatcttccacgaatttgagcggggatgttttattcgcccattggagccgaacaagaagaaagaaacaaacgggtggcgccttgtcacattcgacgttgaaacaatgcagcatgagcctgcggacccgcatttccctgaacgaaagaagcatcaagtgaattttgttactgcaaaagtggcatgcccgaattgcatttcgaccggaaaatggaaagagagccttcttggaaaattctgcaaaatttgcggctatcatcggacaataacattcagtcaaatgccgttccgtgagacaacggtcgacagacaaacaattgaccgccaccctcttgttgccttcgttaaatggcttctctacaagcttccaaagcaatacgaaacaattgcctattcccatttcggcggacgtttcgacatggtcttggtctttcgggaacttttcatggagggactgaacccctcaatgatcagaaagggaaaccgtctgttcgagatgagggtataattttccatgtatttatttaatcattttcccatctcaggtgaaaagcagaaagaacttaaacccgaatgtgacatttcgtgattcttggaatttgattcctggcccgctcgcctcaatggtgcccatgttcggcttggacgtgcaggacaagcccttctttccacacatggccaacaaacctgacaattatggatgccaaatttttccgtcgaaagcagattacctggccgacggaatgaacccagagaaacggaaacaatttgatcaatggtaccagcaaaacaaaaatattccgtttctgctggatgagtcattggcaaggtgaatatgaataaatcaattttgataaaataataaaaaaataagctattgcaaaaacgatgtcgacattttaatggctggactcatcgcctttcgaggagaatttttggagatgacaaaacgaccggcaggcatcgatggaaaagccgacagagcagcgtacaaaacaccgcacaacggcattgaccctgtccgacattgcgtcacaattgcgtcagcctgcatgcgccattttcggactaatcacctaaaacccggacatttggcacttgtgccggagaagggttacgacagctgtggagacaatcagagtgaactggctctcaattttatgcagtggtatgccgaaaagcacggcgttcggattcaaaatgcattttcggctgacggagaaaaaaggtaactttgagtacaaattaaatctataaaatatttcaaagggtgggaaatttccgcttggacggctggatcgagtctcaacaaaagggactcgagattcacggatgtgtatggcacgcatgtgcaaagtgctacccggatgacaacgaagttttaccatgtggaaaatctgcgggccgcatccgagagctcaaccaaaagcggatggattttatactcggaaaaattcccaatgttgaagtgttttggcaatgcgaaatcgaggcaatgctggcccgtgacagacaaatgcggcagaaattcagcgaattcaatggagatggaggaccaatcgatattcgcagttgcttcatgggcgggagaactggtcctttaagctttatcacaaagcggcaaagggcgagaaaattagctactatgactttaccagcctctatccttttatcaagtgaatatttgtcgtaa

SEQ ID NO: 72565 - DNA, 1242 bp, Heterodera glycines
  unsure (1)..(1242): unsure at all n locations
atggtcaaagaccgcctcatggaatttcaggtaatagaaatgactgccttttccattttgttacgatatttatacatgcttttggtattttcagcagttgtccggtatgaatcggaacattgccgctaaatgcaatccgtcatggaacagaccaatgaaggaccgactggggaccctaaaaccggtcggttttttgttttattttcccaattaatgataattgcgttattaaaaacatttcaaggccgaggatgaccatttggtggcgagccaaagtcagttcatggaagactttttcgagcaggttgaagagattcgggccagcatcgacctgatcgccacgagcgtggaggaagtgaaaaagaagcactcggccattctgtccaacccgatcaacgacccaagtgagttttttgaggaaaagtgaagatgtaagactaaaatagagttaagataaaacagactgtagaattggcaggcgtgtggttacatagctccatgatgacctaacctacctatatttttctttaaacgaaaatttttggatttaccaagaaaaagcgggttcaatttttcctcattgaattttattcatatttcgggatggggcgggggttttccgtcgtttataaatagtcactttcgaattttttaaaagacaatttaaactttttaaagaaatcaaagagcagctggacgaactgatggtcgagatcaaaaaaactgcgaacaaagtacgcgggaaattgaaatgtcagttcatttgttactttttatttgttttgggttttatttcatttataatttattcggattggactttttcattcaaaagtttgcacgattttcaactgaaattcgaaaaggaattgttagtgccaagacaaggctccaccatcggaatttaaatacttttttctatttccagccatcgaaaataacctcgaccacgacgaaaacggaggacaagcgaacgtcgacctgcgaattcggaaaaaaccgagtgtcaactttcgaattcggataaaaaaagcgagtgccgaccaacgaattcggaaaactcagcacgcaaccctggcccgaaagttcgtcgaagtgatgaccgactacaacaaaacgcagacggactacagagagcggtgcaaagggcgcattcaacgccaattggacattggtcagtgggagggcacacgactaacgacggactcacttttggggcccttgtatctagtgnggaattag

SEQ ID NO: 72566 - DNA, 403 bp, Heterodera glycines
taaaaacatttacgtccatgccaggctgaaggcgtgcctcgaaggttacttccattggcaactcatctggaaccaagcccgcctcaggtgcgtacacaattcgaccatcttccacaaaaattgtgccatttgttgacgaccttttttggcaaaatttggcaattttttttatgaaaaatttttaaaatttggaaaaatttcacttattgccaattttgaggctccacgactcgtccggaatgcgcagtgtttggatgggccaatttgatgagcggcatcggtccgtgacgcggaagcagaagcattccgagcagccgtacaggtcggacttgcgcagatcaaatgtgccgggacggcactgatcacaccgggggccaactacatttttctgatggaaaataaa

SEQ ID NO: 72567 - DNA, 564 bp, Heterodera glycines
atgtccaatggccaaaccatcgaattggtgtcggccaatgggtttcacttctcggacggagtccaaaatgtggaagaagtctcttctgaagggacttcttcctcttgcggaggctctcgactcactcacaattatccaccaacgactttgctttcgacggcagaagtattttcgccccaacaagttgagcctgtgtacgtgaatgagaagcagtacgcgcggattttgaaacggagggcagcgcgagcaaaattagaaatggaaggccgaattccgaaacaaagacgggtggggagaaggaaggggaggataagtgtgcaaatgccatttaacagaaatatttgcacgaatcgcggcatcggcatgctcagaatagggccagacgtgctggaggaaagtttgactcgggacagcctcgggcgaactcctccgcttcagttcaaggctcagagggaggagaccaagagagttcgaagaaagacggaagcgaaccgatggacagacaaatgccaaaagacagcccagacaaatgaccacaaaacattttataccctcaaggaatga

SEQ ID NO: 72568 - DNA, 481 bp, Heterodera glycines
atgtcatttgtcaaaaattcttcacacaattatgagaaaatcttgaccggtcaaagaaataacagtcgtaaattaagagaaaagggtgacagttgtcaacatgtcgtcgcacaattacgaataattctatggtcaatcaacaaattgacgccaaacatgagaaaaaaagacgccacttgtcaagaaatttggcgccaaaatgtgaatatgagtcaacttcttacaaaatagctttaatatctgatgctagacggaactgatcaacgttgggcttaaatgtgtaagcacgcagggacttctaatcggtgtgggcgtgtcacgctgatcagctccccgaatatcggccggttcgtacaccctgtaatttacacaaatcattttaaaaattttgctaattttgttgttgcttttttggtctcactatattctgttgctttcctctcctcgtggctttttcaggaacaatttttaaattcatgaa

SEQ ID NO: 72569 - DNA, 1079 bp, Heterodera glycines
  unsure (1)..(1079): unsure at all n locations
atgttttttatagatacatatatgggagggattggctgcccaaagggcgacaaacaaaaagncgatgggagaaggtgagagagtgtgtgttgaacggagggcggtgagaaacaatggagacgaaagagcaggcagaaaagaacaggggaaagaaaacagaggaacaggtttccgctgccgtggggaatttccaatcgatcattctcattactaaggcccaacttccaatttgggaattcaataactttaattcaaagctttgattatcttttaatcataaaagtaacacatttccataataatgttttaatttaattgattcccatatgaccaaccaactaattaatgttttgcaccttttctctctctctctctctctctctctctctcttttctgtgctattgcggcgccgcgacgagacgtcggcgcccagtcaaaacaaaagaatacttgcggcgcctaaacttgcggcgctatcatttcttctttggggtgttgaaattttgtcatagcagagaatttttagtctattgattgtccgtgatctcatggattttacattcagatttctgtgagtgatcagaaattgttgatttaaaaatggtccaaaagggttcaggaggcaatcaaaattaaccaattattagagaccgacttttgaggcaaatgcctttttttcttatcaaacataaataacgcattttccacttggtttgaggcttctacgttgacttttattatgcctttttcgggattttcgtgccttaaatgccttttttggcatttttcccttttggtgctttttggcttttttccgaaaaattccattaaaaatgcaataaaatcgggaaaatacacccctaagaaatgaaaaatttttagaaaatacacctcctaagaattgaaaattttccttaaaaattgatcgccaaaatttcattttttttcttgataaaaaattttaggtttaaaaattttcttattcgaaaaacattataaaacatttaataatcattttaatgtccaaaattaagttattttgttaagtttcacgtgttttgctccctaaaaatccata

SEQ ID NO: 72570 - DNA, 87 bp, Heterodera glycines
taattatcatcctttccgtcacattcttatttaaagcaatgccgaaaatggattttgacctcttcgatatgttcgcacccattgtgg

SEQ ID NO: 72571 - DNA, 896 bp, Heterodera glycines
acactgaagatgtccaaaagttagctgatgaaattttcgcgctaacttcttcaacttgggacatcatttcaaagctccgccatgtcagtaagcatgccatcactttcgttcgagtcgcctcccaaattggcagtttgattgcggccggggctgacttagccttcaaagtaagaaaaaagaacgatataacaccgggattattaatcggaatataaaaattaattaatttcattattttagccagaatccgaggaattcaaggcgattcaaaaactgcatcattttgtagaagcaaaattcgcagcattgtcaagacacgttgagcatcaaacgaacgagcttaaattttttttaacagaaaccgattattatgctgtgggttgttgttttaattttatttattttatatttaatctaaaaaatatgacgaatagcattttttctaaaatccactgtgaacacggctcacctataagtacaaaatttttcaaaaaatttaaaaaaggaattttagatttttaattaattataatcaaaattaataattttggcttattttggattttattttcaatttttaaaatttatatgcatatttttacttttattgagcgtgtttagcaattttttgtgcatatgttggagcgactaataataaaaataacagttagaactatacaaatatactgtatgatttcataaagaacccaaaataaatttttttaaaaccgaattttcagagtgtcacgcgcccattgaatggcattcagagttcatattcaggaataactgacccattctcgaaccgaactcaatataagtctgattttatctctcggtgtacggaccgctcttcgccatatgatgtgctattggtaataattgtaattaattaa

SEQ ID NO: 72572 - DNA, 49 bp, Heterodera glycines; identical to SEQ ID NO: 64413

SEQ ID NO: 72573 - DNA, 474 bp, Heterodera glycines
atggtgattagaagaggtacaatggtgattagaagaggtacaatggtgattagaagaggtacaatggtgattagaagaggtacaatggtgattagaagaggtacaatggtgattagaagaggtacaacggtgattagaagaggtacaatggtgattagaagaggtacaatggtgattagaagaggtacaatggtgattagaagaggtacaatggtgattagaagaggtacaatggtgattagaagaggtacaatggtgattagaagaggtacaacagtgattagaagaggtacaatggtgattagaagaggtacaatggtgattagaagaggtacaatggtgattagaagagatacaatggtgattagaagaggtacaacggtgatttgaagaggtactttttctgaaaaatcgaaaatttccagaatttctggaataactttttttgtttttgtggtataaatttcaaataaa

SEQ ID NO: 72574 - DNA, 281 bp, Heterodera glycines
  unsure (1)..(281): unsure at all n locations
ccaggactcaaatgtcccgctgaggccaaaaattttttctatttccgggaaaaaatcgaaatttttccgaaaaaaataccagtcgatagagctcgaaaaactatgttttggaagtggtctccgtttttctgggaaaattcgttaaaaaatcctaaaattcaaaaacccgaaaaccgttttttaggcctagctcgaaaaattttgaaaaatttcgaaattttaaaatctgggaaaattgggctttnntaagctctacaataagtctgctggccaccctgcgc

SEQ ID NO: 72575 - DNA, 159 bp, Heterodera glycines
atgccatttttattcccttccattgttaatacgaataatacggcgtttaatcggattaacgacaaatcagcaaatgttcgccaaaaattggatatgatggaaacagcgcttgtgcacctaacgactaacaaatgtcagcttaatttcagtgccgaaaag

SEQ ID NO: 72576 - DNA, 76 bp, Heterodera glycines; identical to SEQ ID NO: 51235

SEQ ID NO: 72577 - DNA, 843 bp, Heterodera glycines
atgtttctgatcgcgaaaattgtgcgggggcgacgattgcttcaccaattggagcaggaagaagagaaggaaaaggcgcagaaggaacgcgagaaaatcatggcgaccaaagcgggcggcggaggtgaaaagggacaggggacaaagggactgagacggaaagtgccgaaagagaaacgagcaatggcattcctcgggactgagacagaaagtgccgaaaagggataatagagaaaggagcaatggcattcctcgggactgagacagaaagtgccgaaaagggataatagagaaaggagcaatggcattcatcgggactgagacagaaagtgccgaaagagaaacgagcaatggcattcctcgggactgagacggaaagtgccgaaaagggataatagagaaacgagcaatggcattcatcgggactgagacagaaagtgccgaaagagaaaggacaatgtcattcccaggaactgagacggaaaatgccgaaaaaggatagtagagaaaggaccaatggcattcatcgggacggcgaccatgggactgagacggaaaatgccgaaaaaggcagtagagaaagaagcaatggcattcctcgggactgagacaaaaagtgccgaaagagaaaggagcaatggcattccccgggacggggaccacgggactgagacagaaaatgccgaaaaaggacagtagagaaaggatcgatggcattccccgcgacggatggacaatggtactgagacagaaaatgccgaaagagtaaggagcaatggcattcccgggaatcgaacgatagattagtatcaatgtttcgcaaaaagaaaaaatagcacgaga

SEQ ID NO: 72578 - DNA, 528 bp, Heterodera glycines
atgccgttaataatggacaaagtctgtctgtccccgcgtcatttgtcccctgccaaagtgccggcccatttggtggccaccacctcagttttattggccgggttgggagcgtcggccagcggcagatggaggcgttcgttcaacgatttggcccggttggactttggaggggtacaacagcagcaggacaaagaggaggacgacgagcacagccggtgttcacagcggggccaaaaatggcattttgccaaactcaaaaattacattattctcatccaatcttgaacattgccaaccaaacaccgaactcgaaaacgccccaatttttacgttttaattttctgcagaagggccgttcgacagcgcaccgattcgtcgctgccatccgtggacgaggagctgaccgcgtacagcaatcacaacgccaaaatgcggcgcacttcgtcaatgccttccgtggtcgaatcggacacacatgggaaagaagcttttgccattgtaaaaaagggtaatcgtttagcagattaa

SEQ ID NO: 72579 - DNA, 765 bp, Heterodera glycines
atgagcatggacttggccatcgaacacacaaaagttggtgacaccgacttggaaatggacagagcaattgtcgggaaaatattttccaattttcaggtccgtcaagcgtttggcaagtccatctcccaattccaatggacacagttcaaattggccgaaatggccacaaaggtcggtcggcactttccattaaattgggtcattcattcaaatccattaaacttcaaacgctttttctagagggttcagtgtttttttaattcaaattttgtctcgattcaaaatgccattttcagctggtcacctcgcgacttttgctgcgcgaggcgtgccaccatttgcaggaggacactccgaacgcatcggcgatgagcgccatggccaaaatgtacataactgacgaggcattcacggtgggttcattctattgtgtgatatgacgtgaaaagaacgcattttccaactatttttccggaattttgtgccacatttgggaaatggcatttttaaatgatttgaatcccccaatttgccaacctaaattttctgcttataaggtgattaaccaagcgctgcaaatgttcggcggctacggcattctcaaggactacgccctgcagcaatacctgcgcgactgccgagtccaccaaatcatcgaaggcaccaacgaggcgagtttttgttttatattgtgcgtgccaactccgacggcacatatttcgcatttatttttgaattattttcattgttcagataagactctag

SEQ ID NO: 72580 - DNA, 713 bp, Heterodera glycines
gaaggattcggtctccccataaatctgggcgcctctttcggggggactgccccgaaaacaaaaaaattgattttttcaagtgtccgtttggggtactcaaacaattatggggagcaaaaatccaacgcagaattaaagtacaggctatagggaagctattcccgaaggattcggtctccccataaatctgggcgcatcggttcggggggactgccccgaaaacaaaaataaatcgattttttcaagtgtccgtttggggtactcaaacaattatggggagcaaaaatccaacgcagaattaaagtacaggctatagtgaagctattccggaaggattcggtctccccataaatctgggcgcatcggttcagggggactgccccgaaaacccaaaaaaaaattttttggataaaaattatttaaatgaactgactagataatatttaaaataggttatttctcttcctttcagtatccctgcaaagtttggggcgcttctgataagtttctgaaaaaaaagataagcctaaactttttggcctgtttaaaaaggaattaaaaatttttaaaaatttattcatctccctttttgatagaaaaagcatcagagtgcctaaactagcatgtaaataaaatttggtgcgtttcagagcattttgtgaaaaaaatatttatgaattaattatgcaaaaaacaaataaaaacgaaagact

SEQ ID NO: 72581 - DNA, 49 bp, Heterodera glycines; identical to SEQ ID NO: 51181

SEQ ID NO: 72582 - DNA, 490 bp, Heterodera glycines
gaccggttggccctttgggaccgattgatggtgttggcttcgaaggtgcaaaaagtcatcaatctgtcgtccaaaatttcatctgtccagaacacggaccacatgatgcaacagccaacggaggaacagcgccagcgaatttatcaaagtccaatttttatttgaaatgaatataaattattacacattaacacaataaatacaccatactaaaaatgacgttttagctgataaagcaaagtctgcactgcttcatcttctgctcactgattgtctagcgaaaaatggtgggacaaaccaacgaaatggttgtgagggaaaattgttcaatttcatttactttcagatgaaacaaccgtttttgaccgttttaaaatgttaaaagaggaaaacaattgtaaaattgctccagagatgttcagcaatttaccattggcacgattattagtcaaatttgggaagggaatgacaatgagacgaggactcgcgt

SEQ ID NO: 72583 - DNA, 227 bp, Heterodera glycines
atagcttcgagcagcaaaaaatgtacgaagaggcgaagctaagcggtttgagcacattgtaagttcggtttgagggaggggggggaagtgatggtcgaactcgagtgcttttcaagacaatggttggaacgtcagagatcattgaacaagaggggtaaaaagcggaagcaggaagtggacacgaaggcatcgaaaggacgcaaaatccgttacgtggagatcccaaa

SEQ ID NO: 72584 - DNA, 772 bp, Heterodera glycines
atgaaattgtttctgatttccctgattgtgcttggcattctgctgaccaatttggaggcatttcgccaacaaactgttggcatcagaggccgtctgatgtgtggcaatcagccgttgaaggacgcgaacgtgaaattgtggaacaaaaacacgctcggtacaataaacagagattaatagtaattatttgggacggaaattcatgtaagaaaaattgcaaaatatttccaaaaaaaaaaaatgccgaattatgtatggaaaatgggtacaaaaaatcatcaaatattaattaaaatatgtaaatataattttattatggtgttttggattaaattcttagaaaagcatgaaatagggcacaaaatgccgcaaaaaaaagaaactaaggcttagaagaataatattttttgctttttaaacattcgttttggtgtaaatttttatgaaaaaagaggtggttttttaaatatttttcaaaaaatgcttttaaccttttctaattagtattatgtacattaaaatttttgaaattttgtgtccggtaccagcaggactattccccctccccatgtcacagaataggcatttaagttttttaaatttttcaataaatttttcaggttccgatgaccaactggcggctaacaggacagacaatcatggcaattatgagttgcaaggaggcgttggacagctcaccaagatgaatgtgcatttcaaggtgtaccatgactgtgacgacggaatcaaggtggaagaaattaaaatttaa

SEQ ID NO: 72585 - DNA, 125 bp, Heterodera glycines
atggcacttcaatttcgcgcaccagcagctcagccaacaacaatgaggaggtgctgttgtgcaaagtgtgctcggacaaagccagcggctttcactacggcattttctcttgcgagggatgcaaa

SEQ ID NO: 72586 - DNA, 491 bp, Heterodera glycines
atgtcgtccgcactttgtacaatattctcattatatttgttgtaagttttaaaatcaaatcccatatatttttgttttttctaaattttagaaactttctgttccaagtttcgcacaaattttttctgtgcatacgaaaacaggcatgttcgttggtttgaaatggctgagccgatatggcagattgcttttgtgccgaagctcaactaaatgcgtattattcgtttaaataatgttgcaattctccatggtattgcagcaattattcttagataaatgttttataaatttaattctatttgatcatataattttatacaaggcaagtagaatcgataaagaataaataaatttcaatcgtttgtaaataaatataatcataattatataaattccaataaataaattttaattggttttaatttttaaatttcagcagaattatttaaattctattttttcaataatagcaaagcatttacataaataaa

SEQ ID NO: 72587 - DNA, 80 bp, Heterodera glycines
gtcctgcccataatatctgtggaatggaataaattttggaactgcgctgcctaacggcggtgcttaaagtgcgctaaaaa

SEQ ID NO: 72588 - DNA, 836 bp, Heterodera glycines
atgcttaaaagggcgagggaattcgaaaaagcgaacaattggcaaaatggaaacaaaaaatactacagcataatttggaattcgcctttctatgacggagtttcaaaagtgagtgtttgatcaaaaccaaagctcaagatttgaaaagcccaaagaaatccccgagaccgagtcgagactctcgaccagcaacagctcaaggacagtcaattcttacttttctgcgtttttagatataggccattgtttttcctagggtagtgttccatggctcttatcttgtcaactccaacccagaaatttccgttcctaatgtcgtagaaccgatttttcactccagaatactgtagtgtcagtattcactgtccaaatgataggagaagcttctccagtgggaaaaacttattaaaaattcactaaagccgaaaaacagacagataaatgaaaaagaaaattcggcatcgttgtttctgtgtcgtgccaaattaggaaaccataaaaaacataattttaggtagaggacagagcatttgtcgcatttgtgaaagggcggtcaacttttgacactttttgcacggaatttgcggatgaattggcgaaaatttgctatgaaatgacagaagagcagcagcaacccacgtttgaccagcagaaagaatatttggcacaaaaatatgcggcacacattggcgttgtgtatttaatgcgagagaattggcactgtgccaaaataattgggagcgaattgggaagtgatgggcagcagaaagagtgccaaaaattacacaaatattttgacattttttacaaatatttgttttgtgtttatgctgaag

SEQ ID NO: 72589 - DNA, 678 bp, Heterodera glycines
agtctcaacttgggattcatttgatttccaagcggctgcccaaaagggttcgtcgtacacgccaatttttttttttaaagaaatgagttttcagcgttcgatattttccgccaagggcctgtcggttggaatacttcctcgtcataccgacgtctgaatgcaattgttgagggttcgcttattagacagagcagagacggtcgcaggatttaagcttggatgggataccgcccctgaaaactgaaatggtgttttggaggggggggggggggggggtaccaaaaaaaattcctattttaccatgaatttcggcaatggtcaagaattggtgtcccgacgaaaaaaaattaaaaatttcgtaggtgttttttctaggcttaaaaaatgcgctgatcattatttaaactcgcctgaatttctagtcgagccttattcccgtcttccgaaggagagtggcaggggtggtggagtcgtaccccccgcaccgcacccctccccctgggaccgcacctgagacagagcaataaagaaatattaccaatttgaaaaaaaatcattaaggactttctgagtgtgaaaaaagacgatgcgatcgcactgttggatttggtgggtctccggatgaaagaggcgagacgactttggatgcactggtgatggatggcccagggcataaaa

SEQ ID NO: 72590 - DNA, 122 bp, Heterodera glycines
atagagtgcgccgtcatgttctaacttaactttgtttcgttttgttttaattttttgctgctggtccatattatataatttaaatagccttaatttagtttataaactcattaaattataaa

SEQ ID NO: 72591 - DNA, 144 bp, Heterodera glycines
tttatacgggccaggacgttttggcagtggccgttttcgcgtgagggccgttttcgcgtgaaaattctcgggccaggacgtttttgcgtggccgttttcgcgtggttgcatataaaagagaattcataactcacattatatttt

SEQ ID NO: 72592 - DNA, 631 bp, Heterodera glycines
  unsure (1)..(631): unsure at all n locations
atgtcaanttttaaaacattacaggcagcacttctgctggtcgacgtcattcaacaagtaattaaattatttgagggctataatttatttgcattaattaaatttttaaaaattgcaggcagcgcgtctggtgtacgtcgttcagcaagtaattagtcatttgtgggacataattttttacatgaattgaattttaaacactgcaggcaccacttctggtccacgtcattcaacgagttaaaattatttgtgagggacgacgtggaattgattcttgtgatttattgttatttaaactgacgcttgtaaattatcaaaatgatgattaaaaaatagctaaaaattataataaaattccagaacaaacaaaggcagcgtctcatagtttcgggaaataccaatgaagaaattgataatgctttgcaaccaattggacacgcagtgaagttctgttggaagttgggcctgaaagcgggccagttgcgtctgagccaagtttagaccaccataacttttttctttgttgaccaaatccaacaatattggtatcattcgaaagctcttaacaagctctatcggctatccaaaaatcacaaatacataccgacatataaaaaagttataaattaaa

SEQ ID NO: 72593 - DNA, 327 bp, Heterodera glycines
atggtcaatgtaagttgggggcggtaaaatttgaggccataaaaatggcacttatacaggataggccccaaaaaaaaaaaaaatttatttgtaaaatttttaaatttaattaattgtttaattattaaatgaatttttacaaatgtcgcaggctcaattaaaatttttgtatttttttttattaaaattaattcagaaatttaatttaattattttattaaatttaatttatctcatttttaaacaatttacagctcgacgagtcgtcgaatcaggaggacgaggtgtttgttgaagctcatccgatgcaaccggtcactgctgacg

SEQ ID NO: 72594 - DNA, 85 bp, Heterodera glycines; identical to SEQ ID NO: 65905

SEQ ID NO: 72595 - DNA, 216 bp, Heterodera glycines
atggaaaatctcaaaatccaaattgtgacagtagttttcaaaaacgatgctgatccgttcacagttaaaggatttgatcaaaacaatgctgaattgtattcggctacaacacagtcaggcacatttaacaatgaaacatggcaatttgtgaagatgaatgttaatcattgggagggattggacgccggcatgattactttcaaagatgggaatgag

SEQ ID NO: 72596 - DNA, 479 bp, Heterodera glycines
atgcttaatttggatgcttctagaaaaagttatggcgttgataaattgatcatttttatggtgatcattattcaaccaagtataactttctatatacaaatcgcagatccaccattccaaaagcaattctgtaacaaatttgtgatctttccagtggcttcattttctctagaaaaaatttaccagccccttagggatttcgaaaatttcccctatttttagtgtattttgggtgtcccggtcactaggaaggagtgatctgatcaagttggtgtaagagacttttttgatcagcaccaaaagttatgcaagcatgaattatttcaagtttttaaatgaactatacgatagtttttcaggtttgagtcaagacttttttggggcactgtatttctctcataaaaatgtaattgtatgggaaaataaaataataaatcgaaattataaatatggtcaacaaatctaattaatagattaaa

SEQ ID NO: 72597 - DNA, 668 bp, Heterodera glycines
taattaaatccattccttcgggggaccgtgccgggtgccgcggggtaagcagtgctggttcgtttcatcacggcaccgaaccttttggctagtcagcaatcgttgcttaacttgccagatcggacgggtgcgcatgattccactgttccaagcaccccaccaaaagcaaaacgatataaccaaaatataaggaaaaattttttaaaaatttttttctccatcttcctttttgatactaaagcatcagagtgctaaaattaagttgtaaataaaatttggtgcgctttagagcactttctgaaaaaaatatttatgaaacaaaaaaatcgattttttcaagtgtccgtttggggtactcaaacatttatggggagcaaaaatccaacgcagaattaaagtacaggctatagggaagctattcccgaaggattcggtctccccataaatctgggcgcatcggttcggggggactgccccgaaaacaaaaaaatcgattttttctagtgtccggttggggtactcaaaacaattatggggagctgaaatcctacgcagaattaaagtacaggctatagggaagctattccggaaggattccggctccccagtaatctcgggcgcatcgattcggagggactgccccgaaaaccaaaaagtcgattttttca

SEQ ID NO: 72598 - DNA, 112 bp, Heterodera glycines
ataaaagtcaacgtagaagcctcaaaccaagtggaaacagcgttttttatgcttaatatatcgaaactagtgcgcagaaaaaaaaggcatatgcttcaaaatgcggtctcta

SEQ ID NO: 72599 - DNA, 89 bp, Heterodera glycines
accgaccaggtggtggtgccctcctgagccttgccactttcaatttcttcaacaacagtaggggtatggtagaagctgttcagatatga

SEQ ID NO: 72600 - DNA, 538 bp, Heterodera glycines
atgccggccgacaatgaagcacgactgtatttcggcacatttacttccgggtgtgccaacgcgatggcatccaatgtacgggcggacagtttaattgtttttggcggtgggttcagcgtgttcagcattgtctggtggtcagctgcgtaatcattttttcgttgctgattcgtgacaaaattttgggcaggcatttttgtggcttggagtactgttgttttctgtaggacaaaaaattatcaaccttttttaaatgccaaaaaatatcatacatgttaccatggtactgaaatttttcgactcaagagtcacgggcaaataaacgataagatttaaagtagaaaaatgttaagccccgggtgggaaccgaacccccatcaattttttcaaccccagtaaccgtctccggtcactttacagtaatattatttaattttctgtatttatagcgtattattggtataattatagtcattctcagtactcaatttagttgatcagcacagaaaattgttgctgacagtgatcagagttacta

SEQ ID NO: 72601 - DNA, 262 bp, Heterodera glycines
aaacaacagtactccaagccacaaaaatgcctgcccaaaattttgtcacgaatcagcaacgaaaaaatgattacgcagctgaccaccagacaatgctgaacacgctgaacccaccgccaaaaacaattaaactgtccgcccgtacattggatgccatcgcgttggcacacccggaagtaaatgtgccgaaatacagtcgtgcttcattgtcggccggcattgttcacttcggagtcggcaatttccaccgggcgcatcaggc

SEQ ID NO: 72602 - DNA, 520 bp, Heterodera glycines
catttcaatcactgggactcactcaatccaccaacattccaatcacattccaatctctgggactcaatccaccaacagtccaatcaacgggactcaatccaccagcatttcaatcactgggactcaattctactgcatttcaatcactgggactcaacccaccaacattccaatcaacgggactcaacccaccaacatttcactgggactcaatccacaaacattccaatcactgggactcaatccaccaacattccaatcaacgggactcaacccaccaacattccaatcattgggactcaatccaccaacattccattcaacgggactcaacccaccagcattccaatcactgggactcaatccaccaacattccaatcactggcactcaattctcctacatttcaatctctgggactcatcccaccaacattccaatcactgggactcaaccctccagcattccaatcactgggactcaatccaccaacattccaatcaacaggactcaatccacca

SEQ ID NO: 72603 - DNA, 323 bp, Heterodera glycines
atgggctacgaaactgctgatggtcaccaaaggaaaaggaatatcgcaatgccgacgctgggattcttcatctcatccacccgttataacgctatcaataacaatcttgtgcccaaaatgttcgcaattatataaatgcctatgtcatatttcagggatggcattccgaggcccaaagattttcggaaattggaaatcggaattcctagcctcaaaaatttcggaagatcggaatttctgaaactgtataaaatcaattaaaaatttttaaatgttttaatggctaaatttaaaaaattctaaatcaagttaataggaataaa

SEQ ID NO: 72604 - DNA, 284 bp, Heterodera glycines
atgttaagctttcgaatgatagcaagcttattggatttggatgctgccaaagagaaaagttatagccaaaaacataaactttatgtaaaatctgagtagggataattaacaagtaccaattatttttcctcgcattttcagttggatttgcaacgacgtttggatggacattctcccatcttttgaccatgctcaactcggactcaaaatggcacttctttcgccacgttttgatgcgttggtggacaaacatttcgatggccaatcagaatttccaattttga

SEQ ID NO: 72605 - DNA, 141 bp, Heterodera glycines
atgaagttcaaggccatgtacgggacttgccgcgagatgttgccaagttattgtgccgagcacatgtggcggcagttcaacggaaagaaaactttagcggcatttaacaatatgatttatcacattgccttttattacccc

SEQ ID NO: 72606 - DNA, 75 bp, Heterodera glycines
atgaagctgtccatggagcaaatcagtcaaattccagaactgcgcacgaatcagtttaaggagcgaatttgtcag

SEQ ID NO: 72607 - DNA, 535 bp, Heterodera glycines
atgaattttttatttattaatttcatattttttaccgcactgttcaactccgtcaatagccaatgcttctcccctgaagagtaattttacacttttaatttttaatttgtaattttaaataatgttcaggtcgaatgacactcagttggacaagtgctgtggtgaaaaggtaaattcaataatacagtatcattaagttcggtacggtcatattcatcaatcgattaattaaataacgtatcactaacttttggtacgtcattaatctatcgtttaaattaaataacgtatcattaagttcggtacgggcattcattcatttatcaattgattcatttgccaatatattttgtcaaaatgttcaactttaagctggtctacactttgaacattaacgaatcgtgttcaattcgtggaaaaaaattcaactgttcattggcatggctgttggaacgatacaaactttcggacaaatacacaatcgaagcgaacactgaagtaaaataaatgattatttaataattcaagaaaaata

SEQ ID NO: 72608 - DNA, 747 bp, Heterodera glycines
atggcattgctctgtgccgctgagcctgactgtatagtgccaattggacagacgaaagaatgtctatacacacgaattgcaccaaatctgacttgccatcgccaacatcaaagtttgctagatactctgctctacaacatggaatatcggaaacaaattgcgggttggttggacagatttatgattttgtttaattaaatttatcttttctttttaatgacagatccctcatttttgccacatacaagcgctaagcatccgcgatggtcagccaaattcattggttcttttcgcatcaaacattcccgatcattcgtggggaatgccgaagaatggctgagcaacgtcaaatgttgctgaacagtgatgacccgcaattgtcgggaccaaaacaattaattgacattgactaatttcaccaaaaaaatatgataactttgattggcatattttcactggagataccgtattggagttttgctatatcctcaacgaaacacatatatttatgaaaaattggatttaacaggattaatcatgaaaaagggccaaattctacatttcgatgcctgctgttggattcggaaatgttattatatatatttttttggttatttatcaaaatgctgattcatccttatccgttttccagtccctctcatcctttttcacggatgttcgacagaatgcataaaaaaattccaaaacaattttgataccacacggaaaaacactttcaaatgtaaa

SEQ ID NO: 72609 - DNA, 360 bp, Heterodera glycines
atgagttttcttttacttttgaatttccgcttttgtccaattggttggctcgttgaagcagggccgggtaacagatgagaatgctatcaattcagattaacaatttataaaaaaaaatttctaattttcatccaatttatagtttttttttcacccatcctcgcaatttccgacatcctgaaccatcagacgaaattcaattctgtaatattcattgttggcatggcattgtgccaatagactaaattgcacttgtttgaatccgccgccaccatcagtcaaatgaacactttaatttgaaaatttaaaaaaatttacgcttcatcagttgttgacaattgacaaatgatgcacattaaa

SEQ ID NO: 72610 - DNA, 364 bp, Heterodera glycines
atgccggcatcggttgacagtagcagtccgcccaaatccaaatcggaaggcaacctggaacatcagcaaaaggatgaagcgaagaagaatggaggagggtaataagcacaatgaaatataaaattgaatacctaaactgaataatatttttatttttgtaattaaaaattctcagaactttaatcaacatagaaagggtaattttcgatttcaaaattattaaaaataaatatatttaaatgaaattttatatgtatcattttttccaactaattttcagttctaaagatgattatgaacagaaagagcagcagctgaagaagacagaagagaagcaagtggaagaggaaagcgacgggtaaaa

SEQ ID NO: 72611 - DNA, 508 bp, Heterodera glycines
caaaagttttttacaaccacatattgccaatctaatttcttgcagattgaaagccatccattgcctgccggttctcggcacagcaaagcactaatacggtgtttgactcactttaaaaaataattcattacccaaaagttttttacaaccacttattgccaatataatttcttgcagatttaaagctatccattgcctgccggtctcggcacagcaaagcactaatagggtgtttgactcacttcaaaaaataattccatacccaaaagttttttacaaccacatattgccaatctaatttcttgcagattgaaagccatccattgcctgccggttctcggcacagcaaagcactcactaatagggtgtttgactcacttcaaaaaataattcattacccaaaagttttttacaaccacttattgccaatctaatttcttgcagatttaaagctatccattgcctgccggttctcggcacagcaaagcactaatagggtgtttgactc

SEQ ID NO: 72612 - DNA, 85 bp, Heterodera glycines; identical to SEQ ID NO: 65905

SEQ ID NO: 72613 - DNA, 256 bp, Heterodera glycines
gtaaaaaaatgagaaaaaagagatagctattttttggtcaagaattttttttgtttgcgtttcaaatatcgtaagattgtttgatagggccagacaatagaaggcaactgttggtaccaagtttgcggtaaaaaaatgagaaaaaagagatagccattttttggtcaagaattttttttgtttgcgtttcaaatatcgtaagattgtttgatagggccagacaagagaaggcaactgttggtaccaagtttgcggt

SEQ ID NO: 72614 - DNA, 532 bp, Heterodera glycines
gcttaaaagcattgtacagcgtaattaaaagctaaaataattttcgtatatttttcacaatttatttcaaaaagccaaaaagtccggaaccaattttaaaaactaaaatagtgcacaaaaggggagccgccgcacggcggggcttaaaagcattgtacagcataattaaaaccgaaaataattttcgtatatttttcacaatttatttcaaaagacaaaaaaaaatgattcaattttgaaacgaaatagtgcacaaaagggagggatggttagacgaaaagaggaatttttagaaaagagcgcaccccatctgatatttccattttccgttccacaactggccaaaggcgactgtgctaattgacacgtagttgtccaataaggtacttggactttccacagtaaaatgtggtacaaaattttggaactgtcccgcctcacggcggggcttaaaagcattgtacagcataattaaaaccgaaaataattttcgtatatttttcacaatttatttcaaaagacaaaaaaaaaa

SEQ ID NO: 72615 - DNA, 547 bp, Heterodera glycines
atgaattttcttttatatcgtcgtcaacaattacttgctcaaattttggatgcaacacaccgaatcaatgtgtttgatgctaacttggcgactgggaacatgggcacagaggaacgtgagcaagccatcgccgaccgtgaacaactgtttgaattcgtccgcgaacttttgcgacaactcgacgttgttcgggaagatgaaaggcggatgcgacagagacagagagacgacgacaatgacaacaattctgaggtttattcacactggttttgggttcctctagtctgactgacttaacgaattttttccacccttttttggacaaaaattagttgtatgaaaattcggggttgtccaatttgcttgaccaaagactgttgcgatgagtgagtcaataggctctattcaatttacgcgtccaatcagtgactatcctcatggacaaaagcaacatacaaaaagtttttcctgaactaacccaaattcaaacaataagtcgaaaattcaaatttttgaacttcttaatattgccataaaagtgattaaa

SEQ ID NO: 72616 - DNA, 393 bp, Heterodera glycines
atgtccgtattttcgtctgtcgccgaaatgtccgtattttcgtctgtcgccgaaatgtccgtattttcgtctgtcgccgaaatgtccgtattttcgtctgtcgccgaaatgtccgtattttcgtctgtcggagtcggagcctccggagttggaataggtgttgttgtagtcgttgttgttgtggtggtggtggttgacttaaaagaatcgaggcttaagaaaaattgacaccgaaattaaaaaacaaattctttataaaaattttgtaagaaaagtggggccaaatttaaaaaaacaattattttattgagacatttttttgtatattctggtataaaatttagaaaatatttaattgtaataattaatattatgctgattatattttatgta

SEQ ID NO: 72617 - DNA, 890 bp, Heterodera glycines
atgaagcaaaatgagattggtaagctaaatcaaaagtataaaaaatcaaaaaaaaaaaatccggagcttagcatatttggttcaaaacggcatcatgaacaatacaaatgccatacaactttattttaaagtatttttatcactgacgcattttccactgtcgtcgtcggccgaaacgtcgtcggaacggaagactttttgaaccataactttgtaaggaaatgaattgagttttcataaactgttttactgaaaaaataatttttttcgtcaattttttttactttgcttttaaaccgctttttttggataaattttgcgatttgtgttttaccatctttaactgctttttcatcggaaacttgcagcctttaagtcaatttttgaaaattttaagagatttttaggggctcggcaaccggtgcaccccaaaacgtcgtcggaagactttttgaaccataactttgttcattgtcaattaaattaagcattgttgatgttgttcgatagctctgtgtgtgtattattaaaacactttatattagaaaaataattgtctaaacagaaaaatcattcattggtattaaatctttgcatttgtaagtaaatcatttaaattcattaagcaaaaactgttgatgagaagccatgtgaaacaatgaattgcttgtttggcataagaattggatgtaatggcattttattaaaattaaaaaacaatttaattttaataaatttacaattttagagtgaaaagaatgctaaaaagtgaaaaaaggaagaagaaaatgattgaggacaaaaaaaaagaaatttattatgtttgctaattttctttttatgcattttttgttttcaaaattattttcaaccataaaaattttaataaa

SEQ ID NO: 72618 - DNA, 929 bp, Heterodera glycines
atggccgagaaaatgtaagtccttttttaaattgaatttgttctttgaatagagcccccccctgctttatttttttaacgcacttcggggggggggggtggctttaatggagggggcggggctattgtcgaaaaatgtgatgaattaaaatacaaccgcctcctctcatcttggtgtccttgttctgctgctggtcataatgcgaatttttacacagtatcacaatattaggcctaattaataccgtaatcgcactgtacactgtgtgttcttacagtagtgcctcttcttcttcctcttttgtcatcatcctcactctgttgctgctttttctccatccggcgcttggtggcccggcggcctacggcatatgccaggccggctgctctgcgctggtggtcgcctgttatgcggcggcgggcgctgtgttcggcacggtcacgaccggcattggcactccgccagcaatcattgcatgcaacgcggcatacggaacgtgccaagccgcatgctgggccgcacttcacgcgccgacgctttgatttgatgatggttcccaaaatttgggcaacggaatgattggctctgacgaaagtgccatttaaatgtgaccgattttgaattgccaaattggcaaattttctttctcttttgtcaaatcatttttaaatgaatttctatttttgtaaaatgttttttttgaacttttcagtccacctttgttttggccatataatgttgaaatattatttatttctttttttaattaaatgctccaattttgattgctttaacaaagacttcattttcgatttaattgataaatttgaattttttaccgatgaatgaatgaatgcatttgatcaaaaaaattattggatgtaaaagttgtgcggatgattcatttggcaaatttatttatccgacaa

SEQ ID NO: 72619 - DNA, 897 bp, Heterodera glycines
atggccaagatcaggtccctaattatgggccttcaaactgattttggcactctttttgcggagatttcgatgaaaaaaattgaaaaatgcaaatggacaagcaaaatgtttccttgtattgttgcaaaaataaaccaaattgtggcatttgcagaacaaagtggctcatattgtgacctgtcgccatttgagcgagccacggaaatgcttaatgacctaattagtcggaaggaattagccaacccaagtaaagaacaagctcaaaggattgtggatgagttggttgttgagatgaaaatgggcatttggttgaacgaaatgaaaaccaaaatgatcaattttgaaaagccttttgtcgacattaaagggtttttcaaattttcgtcggatttaagtgccgaattagctgaaattaatgctgcaatttgtaaatggccaaattccatgaacaaaaaggtacatttaattgatgaaaattatcatttaaaaattaattaattaattcaggaggaattaaagggcaaaatcggcaaattaatttccattgcaatggaaaagtcgcattttttgaagcaattaattgtacaaaaattggacggattgcttaaaaaagcgaccaacgcttttgaagagttaaaaagtgaattggaagaaacaaaagaagcggaagaaaattttatgaaattcaacaggaaaatcatcgacatttacagcgacaaagccatgcacatgccggacgacgtggacttcgcggtgttcggcattttggaaaggactaaaaggggcgaactgttgttgccgacggcatttgaagagctgcaaaaagtgattgagcatgagaaaagaagcgccattgaagcatttgaaaacaaggaaggccaatcagagaaatgctaa

SEQ ID NO: 72620 - DNA, 796 bp, Heterodera glycines
  unsure (1)..(796): unsure at all n locations
ctgttgtgggagttccaaaggcgcaaattggcagaattggaaacggcacaaatgactctttttctgaacncaagcaatttgtgtgggaagaaaaaggcagaggagggacaattctttggagagtcaaaatggcacgaaacggcagagaaagtgagggaacagatcagccaggcatgtgaagaaggcgaagagagtgccgccgttgaaggcggagaaagtgaggggacgacgaagaagacaagcgaagacattcaggtcagacgagcagagaataccgagagaaaggccccattgaattcagtcggaagtcacaaattacatggaaactgcccgtctcgagttgggccaaccgtccaccagcggcaactgcgtcgacccgtcctctccaccactcgtcacacattttaactcaatggccgaactgctcttttggtggcggattaatgccgaacgcttcccacgccttgtgcagctcgcccgtcagttctgcgcagttccaatggccaacagcagtgaccagaggaaggcactaagcaacgacaatgcggaggaagagaaagtgacgcggagatacgcagccgaacagatggcagaagatggcgacatggcacaattggagagcggacggacagaacagttacagctgctcacacagctgatgaccgtgagaatggcactcagagagggggcgacagaaacgaacgaaaatggcaaaaaacgaaacgaatgcatggcaccaaatgaagaaattacaactattgaaccaattagagaaacatcagaaattaaaatatga

SEQ ID NO: 72621 - DNA, 54 bp, Heterodera glycines; identical to SEQ ID NO: 53113

SEQ ID NO: 72622 - DNA, 198 bp, Heterodera glycines
atgacggagtatgccagtgttgcagtgagaaagcatttacacgcagctttatcttaaatttgtattatactaaatcaaatttttttaggtattattgaacgctttttatgatttatcattttttttgggggttttatcgtataaaaagacaaaaaaggaatttcattttctccgaaaaactctcggattaatttgaca

SEQ ID NO: 72623 - DNA, 425 bp, Heterodera glycines
atgggaagtttttgggcaaatttatataaaaatggtgccaaacttgtgaaaagtgccggtgccgtagcaacaaaaagtttattatgccagttgggtcaactcgatcaagtcattgtcaatacatttgccaactcattaactcaggttttttaattttaattaaattaaatttaaattcttttaaaatactcagatttctaattttaatttattttaaatttatatatacttattttttagcgttttttattttttggcaaatctccaattgattatgttgaacaaaatgatccggcaatgggacaccttttgcaaaatttgtacaccatttaccaaaaacttaagctgttgaagtttttacgtaatgcaattaaatggaatttttaacaattttatataaaagttttttcttaaaaattaataaa

SEQ ID NO: 72624 - DNA, 1193 bp, Heterodera glycines
atgctctttgaagatttatctgctgggcaaaaatcagcagtgttttttcaaaaacgattgataatgacgacaatgccaaatttgaaatttgaaaaatctttcttctcccgcgatttgtcggaaacaatatacttatttgttagtacaatacataatatacatcattgggaattttgaattattcttgaacccgagcgtttgtcttagttttcaatgactaattagcctttaaaatttagtggaaattttaaatagtaaaaaattttttgcagttcgatattttatggttttaaatttaaaaaatattttaatcggataatattataactctaaagaaatttttaattatttttgtttttaaatagcaatttttatttattaaaatttcattttttggaaataaattatcctcggccttatatccatctccacaccagggatgggccaaattgaaaaataaaaagcgaaatgcgaaaagcgaaatttgcgaaactgaaaaatgcgaaatgaaaaaaaagcgaaatgcgaaaagccaaaatatgcgaataatgcgaaaggcgaaatgcgaaaagcgaaacctcggcccatccctgctccacacccataaatttttcgcttcgtatagcaccttagttttttaaagggaaatgaatggtcgggttactgtatatcttggtttttgaactccattaccgtaattttaagttcaacgacaaatactatatttttgtaggaagactactgtaattgatttaatcaaaatttaatgcattttaatttattgcataacaaataaaataaaaattacgacacagatggtgagagcacaacagcaccaactccattagcatcagcaacagaagctgaagaggaggaacagccgattttgctcaattatttggacactttggcccagtcaatttgtgtgatggcgatggaacaaagtgccaacaaattgttcgagcgccaaatccaattgttctaccaattcgccgatggtttggcaaatgatgtcatccattcggtgcttcgattggccgacgaagagccatcggattttgacgacgatgaagtggaacaggaggaacaggcttttgaagacgtacattctgctgaagaagaagcggaaatgatgccgaaggacgacaaaaacgcatttttggcagaaaagtaaaagtttagagtcaaaaata

SEQ ID NO: 72625 - DNA, 445 bp, Heterodera glycines; identical to SEQ ID NO: 70325

SEQ ID NO: 72626 - DNA, 365 bp, Heterodera glycines; identical to SEQ ID NO: 61014

SEQ ID NO: 72627 - DNA, 2667 bp, Heterodera glycines
atggccattctgctgaagtgtgtgctgctcctctcaatcatggcgattttctgcgactgtatggaccccggcaaaaaaggaaagagcaaaggtaaacccaaaaataaaaataatttttataattttattttaagccattcgaaaaaaggctgagcccgatgactattttaaaatgataaattttaatgcaaactaaaacgatgatttcttttcctaaattgatcgtgaagccccatcccgttcatttgataattctattgtctattaattataatgaatttatcaattaataatgtttatttacttaatgctcagatccgatcccaatcccgaaacaggaaggtgagcaattaagcaatgaaaacgaacttaaatagaaataaggatataaaagttatgtttaggttaggatttatagggctagaaaaatgcacaccccaaggattgactttttggccaaaaatgaaaaaaaatttgaggctcatcgaaagttttatggcaaaaattaaaaatctcatttttttttatcattttcgcccgcacaatcgcaaatcaaataatagaagaagtgatttatgaaataaataataaagaaagacaaggcaatttctgcactaaaatccgatgaattttaaggaaagccgagcagcagtgcagcgaatagcccgacagtaacaaaaggcactccgaaacgtggcggtaaattttaaaaatcaaaaattgaaaaagtaaaaaatatatatcagactaaaaacataaaaaaatgaggtccacggaaagttttatggcaaaatttaaaaaagccataatattaatttttaagtaaatatcgaatttttatacaatttaacatttattatgaaaaccaccgtagacagttttaggcaatattttggcaaaatttcatgtatcatttgaattcaagttcaaaggttgcgcgattgcttagtggctatttacatcttttatttttttttaatatatttttattttcattaaagattctgctgaattgaatattttagttacattaaatttattttaatgaaaaaattggtcagaatttttttttctgcaattaggatttaagcaagctttaaatcagagctcgcaagtgtagtgctgaatttttagggttttttaaactaaaaattttttcatttttgaccaggccaaaatctgctaaaatcacctaataaataaagttgccgacagaaattaataaatttttcccaattacataatagatttgcacgaaaaatattgtggatttttaagttgttttttaaattataatcaccatcaaactatttgaaacttcgaataaagttcggaatttagaattccaatcccccaatatctgaattcggtgttcttttatattaaaaaaaaatacctaaaacaattccaaatgtttttggtattttggctttgattttggttatattcctgcttccttccatttaaaatatgaataaaaaatgctttcattaacaaaaaatgcaaaattgctaatagaagaagtgatttatgaaagaaataataaagtaagacaagataatttcagcactaaaatatcaaaatctccgtaattacgaagttagagatttccataatctaaatccaatttatgcaagcccggatttaaaaccaaaatgaaccaatagcaaattaaatttttttatgtgcactgatgtaaaataataaaaagaagaaggtattagttaataaaaaattttaatgcatgcaaaaatggtaatagaatcaattaattgaataaaataatgataaaataagaaactgaggcaaaagcttttttaatcttaatctttttatttggacaattctaatttcaatttttcttttaattttaactcttcctgtttttctctttaagaacttgatacccccgaattttacaaaacgagcccaaagaacaaaattaatagcccgagaaagcccaacaacggctctccgagaaagggtaacagtaaacataaaataattaattaattaataagtcgaataaaactttgcaaatttcgtccggtggccctatgggtgtatccctgaattgtttaaatatgtttctgtaaactttgactattccgttgttttgagtgtgctttactttcgaatttactgacttgtaaaaccaagtgatatgatgaatttaaaaaatcgtgaaatataattaaaaaaatatattcaatgaattaattcctaaaaaaaataagtagaattatatttaaatttcatttcgctaactcttctttataaaaatccaatttttcaatatttaaaaaaatatgtcaaaaatttgaaaataaaaaaatccaaagtctgtatatactatataaaccttgtgcatatttcagaatattttatataaattctgatgccacattaaagttgcaacaaagttaaaatgtgcttacatttttcttaatttattcttagtaaaatgtaaaaccttattgtactatttatgaacattgataaaataagtccctttttattattttagataaaaaagctctacaaaaggaacgtcaagaagaaagaaagcaaaaagaaagagaaagagaaaaccgtttcctgcgaacgaaatcaacagcaggtgctaaaaatggctacccaacatttgaggataaccccgccatttga

SEQ ID NO: 72628 - DNA, 628 bp, Heterodera glycines
ggcattgaaggccaaaactgctgcattgtgtttcatttttgagaagacaaccaaaaatgattgttcatgcaaagatttggagaaggaactgctccaacttgggctgccctcgggtttttttttaccattttttgaaattcgaaaaatcttggacaaatttttcttggcacagaccatgtcagtgtactggttgaactctacgattccaacagggccgcattgtgtgacagtttggcagggcctgcaatcaaaggttttttcatgagaggcggtaattttacaaaaaactgctcctccctctttgacaaaaaaaaaaaagagtaaaaatcagttttgaatatacaaaatccgaattttatttgtttctgtgggtttgcgattgattcgagttaatccaatttatgtccaaattttcaaaaatttccgaggcctaattttagaaaaaattgaaattttagccccttcactaacagtggtgtgcaaagagcaggttccaacggctgccgacccgtcagtgaaaagtgactattttcgcttggacacaacaagttcggacgggtcaacagcaaccctgctcatccaccgagatgagttggtacagttgagaacctgtaagattgctgtcgca

SEQ ID NO: 72629 - DNA, 1053 bp, Heterodera glycines
catcgaaaagttgccggaccgatgtcttcagttgattttctcctatttgtcccccactcaaatgctttccgtgggtcgagtgtgtcgcagatggaagggcattgcgtacaggtggctgttggaaaggaaattaagtgtgatttggcggtgccttaggcgcaattagtcccagcagttcccgaatttgccattttttcgagactgactcggcttgaattgtccatcttttgtctttttgctgctaatgtgccttttcgccctttagccccgtcctttggagttcggtgtccttccgtgtcaaccatggcggcattcaggtgacctcgaaacactcgcgtttcacttccgtaacgttgcgccgcaggtgaccaaccccgagcttttcgcccaaatgatcggagttcgctttaccgaactgcgcctttgtgagctgtccactgatttgatcactccaattgtatttgccaatgattttgtgccaaattcactcgaagtgccttttgccctctttaggtgctccatgaattggcgagtcgttgtccaaaactccaattcctcactttgggtactaatttattgtatcaagtataattggtccattctttttcagatttttccaccgctatgcaggttaacccatctgtcaattggcatttaaattataatgcccactggattaaaattggcacatttgcccctctcatccaaaaagtggcatctttttcatcccatttaatgacacttttttggcacattacatttaccccccccccccccccccagttgcacgacttcaacgacctccaatcgtttccgagtcgtctccgttctttaacgttgtgtctcagtgaaaacatttttctcgaaggctttcttcgtaaagtgtacactttcatctccaggtcactcttcttctcatcacaatatttttgcttattttcctctatttttagtgttgaaattctgcacattatcggttttcctcctcttccaataaattccattcgcttctcttaaggaacgtatgaaaaaggtggaggacgaggaggagga

SEQ ID NO: 72630 - DNA, 48 bp, Heterodera glycines
agttggacatttcgtgggtcagcgattagaccatggggaaatccatga

SEQ ID NO: 72631 - DNA, 501 bp, Heterodera glycines
atggagaaggcctgcaaaatttggagagattatatcgattttagtgcgctaggttcgatgaaactttttaaaatataagcctaaactttttggcctgtttaaaaaggaattaaaaatttttaaaaattttattcatctcccttttgatagaaaaagcatcagagagccttatttaacttttaattaacatttggtgcgtttcagagcagtttctgaaaaaatatttatgaattgattttgctaaaaaaataaaatagtgaagctttaaaaattaataaaaaattttaaattcagaattactggagttagcatcatagcagtgcttttccttgtctttttgatgctctcgcaaaatctggttcgcttctgaccagtttataaaaaaaaagttaagcctaaaatttttcgcatatttaaaaagcaattaaaaatttttagatttttttattcatctcccctttttgatagtgaaagcatctgagtgccctaaataacatgtaa

SEQ ID NO: 72632 - DNA, 135 bp, Heterodera glycines
gaaagggagcagcgttttcgcgagtttgagcaaaactatttgggcacacgcgacgacattgaggcgcagataaagcaggagacggaagcgaatctgaaagccatggacagtaatgttgcaaaaaacaaacagcag

SEQ ID NO: 72633 - DNA, 124 bp, Heterodera glycines
aggtaacttatggcgcaaaatactgcacaaattgaagagttcgttcgtttggtgctcagttcatggccttcatatcaatttgcgattaaaaatcagttggcgggatcattaacaagtgccaagg

SEQ ID NO: 72634 - DNA, 61 bp, Heterodera glycines
atcacctctgctggatatttttgtggattctttgatcccttaataaaccaaagtttaacaa

SEQ ID NO: 72635 - DNA, 96 bp, Heterodera glycines
ccaaaatagtgatttctagtgacgaaaagtgacgtccaaatgaaaaaattttaacgcagaaatgcgttttttgagctcctttcttcaaaacaattg

SEQ ID NO: 72636 - DNA, 188 bp, Heterodera glycines
atggagaaggcctgcaaaatttggagagattatatcgattttagtgcgctaggttcgatgaaactttttaaaatataagcctaaaatctttcgcaaatttaaaaagcaattaaaaatttttagattttttattcatctccctttttgatagtgaaagcatcagagaaacggatttaacttttaattaa

SEQ ID NO: 72637 - DNA, 364 bp, Heterodera glycines
ggaagctattcccgaaggattcggtctccccataaatctgggggcatcggttcggtggggactgccccgaaaacaaaaaaatcgattttttcaagagtccgcttggggaactcaaacgattatggggagcaaaaatccaaagcaaaattagagtacaggctatagggaagctattgccgaaggattcggcctccccataaatctgaggcgcatcggttcggggggactgccccgaaaacaaaaaaatcgattttttcaggtgaccgattggggtactcaaacgattatggggagtaaaaatccaacgcagaattatagaacaggctatagggaagctattcccgaaggatcaggctccccataa

SEQ ID NO: 72638 - DNA, 1302 bp, Heterodera glycines
atgggaagagaatcaaaggtagaacccgaaatttcgcatggaaaattttgagggaaaagtgcaaaaaatttttcaatcggagaagtttgggtagaataaaacatttagaaatatttttattttttggtttataggagtgtgacgtgaaagaggaattgaagaaaaataaggagatgaaaaagttctttgaaagtgtgccggacaagggaccgatcaatccgagggatgcttatgccgggggaagaacgatgccattttgtttgtacgcaaagactactgaagaaattgagatatcaatgttcgacatcattagtttgtacccctttgttaattatggtaaaatctgcttaatttttgttagtttcctttcgcttaagacaccccataccccgttggagtcccgaaaattgtagtgagcaggaattttaatgtgaattggacagcacccgacgacgtaccctatgatggacttttgaaagtaaaagtgatcccaccgaaaaatcttttgtaccccctcctccccgtgcacatcgatgaaatgctcctcttccctaattgttggtcttgtgcgagaagggccaagaatgaatttgtgatgacaaaagatgtaaagaaatgtaaccatcgtccagcgcagagagcatttttggggacattcacctcaattgagttgcggaaggctttagagctaggatatagaattgtgggattctatcgagcgtatcattttgaacagtttgacagtcaactgttcaaaggatatgtgcggatgtttttgaagataaaggtggaagcgtcggggtggccggcggaggtgaaaagtgaagatggaaaaagagcattcatcgaaatgtacaaggcaaagtatgacatcggtttggattatgataagattgggtttaatcccggactaagaatgattgcaaaattggtgagaaattataaaaaatctctaaaaattgttcgaatttaagggattaaacagtttatggggcaaattttcgatgcgcaataccctttcaaatacggaaattgtgggcagcatggaacgttggatggaattggggagagacaatacaattgagtttgggcgcccagtaaaaataagcgaagagatatcaagagtcgtgtaccggaaaaaggaggagttcatcagggagcataaagtgtcgaatattgttttgtcattgtggaccacgagtgctgcgaggctaaagctgtacgagtacatggagcaggtctacaagaaggaggggtgtaaactgctctattgtgacacaggtgaaaaggaataaaaagaaa

SEQ ID NO: 72639 - DNA, 1668 bp, Heterodera glycines
atgagccgagaagctgagccgggctggaaaattgagaaaatttcagtggacctttattgcagtgccctgtcagaccccgtgatcatccctgcccgccccttccaacaatcgaacccagacattgttttcaacgagttcatgcacagacagcaatcatttggagaagtgaatttgttagaccagagaatttcaataattattgccacttattctttccctgttaaataaatttttttcatttttccctttcattattttttgtttattacaataattatttattcgacctttttctttattaatttttcagttaaaatgtactcgtttcaaaactattttgaggaggctctcgaaaaagaagattttttctggcagaaaaacagagcagaagtggaggcattgttaattgaggcttcaaattataaaattataatacacagggactacgaaagccgctattctgattatattgccacctatcaccgcaccccactcttctgtttctgcatgattgagagaaatttaagatttttttacgacacaggaaccgggacgcctataggaagggttacaactgtgctacatgttaccgttgaggcgagctatacaggagagggattcatttcgcctatgttttccttttggttttattgggagggcaggagtcaaacaacaaacgaatctttcacgagccgtctttatttgtacactgtttcgatgctaagagcaatgggcaaagcctggggcagagaactacttttgaaccctgttgaagttttaattgatatgttctaccaacgtatagataggttggaacatagaaaaaacaatttaaaaaaatattttagagatttggtcggatcgtggtcattgttctatagactcccaccctcactttttgacacttcccgccgggtggttgcggagaataaactggaagaatttttaaaattaccatcattttttcgcatgcttttttataataaatattaaatgttcatgttgtttttaaagtgaaggttttgacccaaatatttaatcaattttaatttattatttttggtagaattccagaaaatgcaaacaatcgctgaaattaaaaatttcgagattgttgatggtggaagaatttttgttgtgagagcgagaattgagaatgtgatggaggcggagtacagggtttgtaataaaaatgaaagaaaatttcagtttgtttaggcatgcactttatgccgtaaaggggcttgttcttgcggggctgagaaaaagatgacatcttatttgaaggtgtctgtggcagatgatacagggcttttggaaaatgtgggatttttcggtgtgcgtgggaaacagaatgggatggtaacgcaacgcttttttaaaaatccatatacatttaaatttaggatgaggtcaaaagtttggcgggcgccgtgtgcaccatgaaaatcggcgctagggtgaaagaattcggagggaagaaggggatctattactctttggttgatattgtcaacctttaaatctataaataaacttgttaattttttcaaataaaaatgttttacttaaaattatttctagtttggttcttgttggtcggaacggaaagttgttgcctttcaaaagaagaaaaagagcaatttaccagtgcccgaagaactgtag

SEQ ID NO: 72640 - DNA, 579 bp, Heterodera glycines
atgaattttcataaatcggaaaaagctaatgccattttattggaggcagctaaaagagagacggagagagcatggaaggatgttgttgcactagaggaagaggttagcgattttgccaaatcttctcgggaaactcttaatcgtgcgataaaatcccgagagaaagccccatacgctaatggtgttcgggagttttacataaaaatatccgactcaatctgggaaattttcacaatcttggacaaaattaatgtagagtcagaaaaggcagaagctgtatggagggaattggaaaaatgcaaagacttcgaactggcaactaaatttgaggaaaaatcaataaacgcattaaccgaagcccataggttgcatttcgaatcccgaagagtgcataataaaataagagcgtatgaaaatagacttcaaaatattgtctgggaatttattggacaagtgtaagatataaaaagaaattttttttattaaaattaatggaagagtttgttgaagttgaatcattttgtcagaccaatacaaaatttggccttaaaaaatacatagccaaattttattttaaaa

SEQ ID NO: 72641 - DNA, 439 bp, Heterodera glycines
atgtcaatgcaacaaaatcaagggtccgatgatgttttgccaatgtgggcggtaccggattttgatgaaatgggccaaatgccgcagcggcaaaaacaaaaaaaaatcccaacgttgaaggagtttcggaaccaatggaaggaacgaagacttctgtgggagagggaagaagcagaaaaaaaagaccccaaaacatggaagaagaggaccgatgagatgaagaaaatctgtgaggagagattggagcaatcgaaaggtgcaggcggcagcaacaaacgacaggaaccggacaaatacacttggaactggggcgaactgcagcgccaagaaagagaatatttggacgggggtctatggggaaaatgatgagatacccccccccccccccccttcacctccctcccgttcgtttgatcgattattttattttctatttgaa

SEQ ID NO: 72642 - DNA, 1236 bp, Heterodera glycines
atggcattcgcgcaaaatgaacaatttggtctacaaacggctgagacattgcgacaaacggacgcccaactcttgacaacaaaacacgcattcagccccacagaaacttctgcagattcgctttttaaatctgtcgttgctgctgtaactgcgcaagcaacatcacatcaaccgtcaacctcgtcatcgcaactaccaacacaacaaaatttggcatctgcatcaataccacaaccaccgcaacaacaacagtcaatatcgataatacatccccaacaacaacttcaatcacaactactaacacaacaaagtttggtatctacatcaccgccatcaccaccaccacaacagccatcagcatcatcaatgtcgcaacagcaaccatcacaaatacgccaacatcaaccgcggcaatttatcgatagtgaaggaaggctaacagcccatgtattcatagatgaggacgaagagacggaaacacagcaacaccaaaaccaacaatattcgcctatatctgacagtccattagagggggtgccaccacccgacaacgataaccaaatcacaggcctaatgacttctattttaaatgtgttttttaaaaatcaataaaaaactaattttaacaaaaattggtaaaaaacaggcttagcagatttaaattttcaaaaactttatttacaagtaaaaagcctcattttaggtcaaaagtctcatttttacaaaatttattcgaaacccaaattaaaggcctcaaacatcctcaaaattctcaaacccacaaaaatactcaaatcctcatttttaaaaaacatcaaagactcaaaaaaccaccaaatttggattaacacacagttctggggccccgataaaaaccaaactaatttagcgcatcccttcatcttctggatcatcggcgtcaacaacaaatacttcaaagtccgggcatgaattaagaaagcacatacgcgccctgtacgctgaactgggcgaaaaacacgcagaacagagagacagagccaaaaatgcgattgactcgaaaatcgggacttcttcaacatgttcaacagaaggaggacagaagcgatcaactaccaacacagacaaaattaaaaaaaaagttatccaacatcttaaatttaaacattctcatacatgtttattatgtgatttaatccacgcaggttatcaaaaataaaaactaaaaataccaatatttaaaaaatcgcaaataaa

SEQ ID NO: 72643 - DNA, 2743 bp, Heterodera glycines
atggatttgcacatcgacgattacttgaacccattttatgactcggtgagttgtgcaattaattttccacgaatttttacattttttgcagcaccgaaatgagccctttctgtgcgacattgagctcagtttgtcctcatttgcggtgtggacaaatctgtacaatcgcttcgacgtcggaattcagccgagggaatatttaagcgacatttttgccaatgcgaaactgcacatgcaatccatgaagaaagtgatggctatgcccgagacggattctgtaagtaggcattttaatccaaattaaaattgaaaatttaacctaaaaacaaattcattttccctcaaattctttaggaatgcctccgcgtttcgttcgcctggcagccgttgctgaacgcagacgaatgtgccaatgagaaatgccgacgcgaatttttgtcacgcattgagcgccgcgtgcattgccaatggtgcggccaaatttattgccaccggtgcatcagaaaaagagcaaatagcaacaacgaaatggacaaccacgcccccgtctgcgttctttgcatgcaaattgcttgttaattcccattttttgtcctatttccacctccacttttttttctcctgtgattttgtaatatattgtcaatttaacaatgaaaaagtgatactgtatgtttgtttgggtactataattgtgttttcatttgtcattgcttcgcctaaaaaatattcatcgctttacgattgttagttaaaactgttttaaatgtcttttccaaggaatggacgaaagggaacggtcgcgagctaaggaattttgggccggaaggcgtacaatgacaaaggtgggcattttcaagctcaaaagcatcttatttctcaaaatgacccctcctccctttttattggcccggaacgccacagttttgccattttccagcccagctttgactgatttcggcacacatttccctctgttaaggcagagtttgtggcggagtttttgacccatccggacattgggcgccaccgttgcgcgcagatttgtgacttcgttttccaaggcagcgatacattgacgggggatcaatttttgttggctttcgatgcgctcaaaactgttggatggccatgcggcgtcaagtgggacaaatttgccattttttccgtgccaaaatacagcgaatgcaacggaacactgaacgaaatcattgccggtgtcacgcactgtatgttttcctttctctttattttagagctttatatacatgtcaaacttcacgaggggggagggcggggacaataattccagtttttaagcgtttccaggcctgttaaaaatatgaaagttcatgtggacaaatacctccaaactctaacttctgttggaatactcctggtattagatcactgaaattctatgttcaaatgcatttaagtacttaaaagtgcatttttttcaaatcacataatttgcaaaaagaaagggtcaacacttttttggcacgtttagttgaggttgatcaaattgcgtggctcgaacgccgtttttgggaacgatgcgaccgccgctcgttgagcatcgcggacagtacatttgtgtccactgttctgtcagtcatcaaacggtcggaggtggccaacagagtgtttcggctgttcaccgagcactgtaacagcgccatcgggttcaaggagtacgtgtgcggtctatccagtctgtgccaggggccggaggcggaacgaatgaaatgtgagcgaattcggctgttaatttctttaggaaaaccaaaaattttaagttgttgttggcatttgggactccgacatggacggcattctatcgtgcaatgatttgaatgaaatcgctgatttttttggattttcaatggtggcgaactccacaacttttttactaatcgtatttttaggaccttttagtgcctcacgttgaggaagagcaaacgcgggacgctgttcctcttcacatttttgactttgtctgtttggccagcaaaagtgcgacagtcagagaggcacttttgcaattttcggacaaagtaacaaaattcgaaaaaatctgtttgaattactttgctaaataagtttcaaaaaaaaaagaagtaaaatttggcattttctaatctcttgttatttaatttcgctttttcctctttgtttaaattctttcttacaattaaaccgtttgtatttgatcttcaaaaatgcgttcattaattggcatccttttagctttgggttgcactgacaacgagtccaagcagttcgccaacagtttcgtcaccatcgacaacgtgtaacgatgctgccatttctgttgacgacgataaatcggaggaagacaaagaggacgaacaagaaggaaaagaacgccaaaaggatggaggagatgacgaacaacgacgacgacaacacggacaggaacagaagcaacgcccggggggacggcgacggatgggcggcgtacgaaacattggcaacacttgctatttgggggcggccatccaaacgctggccaatgtttcgctgcttagcggctttttactcagcaagtggtttattgggctcatttttgaatttattttcccattttttgcaccaccaaacagtgagcagcaatttcggcatttgccattagtgaggcattacgtgcaaatgctccgctcccttttggtggcgaaagagacggcgtcgccggtggagtttaaggtattccccgagg

SEQ ID NO: 72644 - DNA, 160 bp, Heterodera glycines
atgatggatgccggtgccattctgattgccatctcaacactgccaaatatggcgatgagttatgccggcgatgactccgcttacggtgtcaccaacaacccgcacgacacacgtcgcatcacgggcaaacattttaatccaattagtgttaatgagggct

SEQ ID NO: 72645 - DNA, 894 bp, Heterodera glycines
atggcatcacatccggcactggtcgattcggccaaaatgtgcattccgaccgtggcgatcgtcgactcgaacagcggtgagtggcaataggaaatgaaagaatttgtccaataatccgtgcatcagagcccaactacgtgtgctacccaatccctggcaacgacgactcggttgaatccgtcaactttttcatggaaatgtttgcaaaagcaatccaaaagggccgagcggagagcgacacttttctggagggcgcgaaagagaagaagcatcagcagaaaaggacgatgggccagcggaggcactgaacgaacaaacggagggcgacgaatgatcggagggggggggggggcgaagacggactgattcctctgcttattctttgtttctgtccactttctatgtttaggttttctgaatacacttttacccttttaaattattttgagtgttttcccataaaagtccgctgctatttctccttatttcttttttttttttgattcaatttgttttctgttcgatgtcttctccgcttggtgtgaatgtgtttatcaccggcgccaaccgaggcattgggctcggattggtgaaggaaatgttggcggttggtggaatgaaaaatgtgttcgccggttgtagggacgtcgattcggctgcggtcagtggacgaacccttaggggaaattgaaatttttaacctcagaccaaaaagggaaaaagagctttaaggaattgcaacaactgcacgacaaaaatggaccattgcgactgatcagaattgacgtcagcgacgaccgaagcattcggacggcatttggccaagtccaaaagcaattggtggacaaaggcggactgaacttgctgatcaacaacgcgggcattcttctcaaa

SEQ ID NO: 72646 - DNA, 306 bp, Heterodera glycines
  unsure (1)..(306): unsure at all n locations
atgtttgccacactgaagacaacaagttcaagcagacatttgctgccaattctgttcatcttctgctgttgctaccgcgccttttcaaatgtatgtcaattttggcttttttaaattaatttcaatttttttttgccattttagtttggtgatgcggccattgtgccattgtcagccctgggccgctacaaggtgtcacttggcgagctgaacgaattgctgacagaacaacaacgctcggctgacgcagtgccaagcactggcgacaaattgccaaattatgccanagttggacaaaaaaaataa

SEQ ID NO: 72647 - DNA, 323 bp, Heterodera glycines
atgtgtcaaccgttttctcttccgctcttaggcggtggcattgtgccgttgcccactgctcgtccgtctcaaattggtgtgggcctccaattccaagccgaacttcccgaaaatgatgacgaacaactgcaaaaggagagaccaaaagcacctgatgaggaggacccttatttcaggtagaccccgaacattattctcattttcctctttttatttcgaaaatttgatcacttaaataatatttttagcattttaaattgaattttcttcccccactgctaattggttacttttctgttttagacccccccagaaattttcaa

SEQ ID NO: 72648 - DNA, 1131 bp, Heterodera glycines
atgcgaaattcgaaaattttaaatttgcgactttcaaggggtgggtctcaaaacagaaaagtaccgctaattgttgtcaaaattggcacatatttttccatatgatttagccaagccgaccccgacgaatgcctttggaatggctcaaaattcgcctcgccaacgttcatctcttccaaaacgccgccatggttctccaaccagcagctgctgctgaacttgaaggagttggagtcgttctgctccgttgcacggcgacactccaacttggacattgaaagggtgggagaaattttcatttttaaagcattgtttacagtagtacgtttggggattgtgccctggtggcagggatactgtggtccttgtgatgttttgtaaaaaatatttgaattcactgttttcccattgtttttaccaatatctcttatatagtgtgctgctcgagactgaaaatttcccgagactcaagaccgaaaaaaacccgagacttttctcgagccgagacaaatttcttacgcacaaaatttgtttgaggcacaacttgttgcaaatcattaggggtgtacgaaaacccgagaatttctcgagtgtcaagaccgagactctcgagcagcactactgttgtaacttgtagtaaaatgccattgtgaattccaattgcaggccctccacctcttcaacacgtccaacttctgtctccaaaacgcactgcgcgatttggaacaattcgctgccaattgcaccaatgcaactgtgaacacaaaatggacacccgacatggatgaacagttcattgaactgttgaacaaacaccagaaaaattttgggaaaattgcaaaaaatgtaaatcattttgaccgtaattttcgcaaatttctacggtgtctttttctaagctaccgtatgggttgacggtggcccaattggtgcaacggtattacacgctgaaaatggagcgctgtttcacctcaaacgaggctcaatttgtgcgctgttccaaccttaaaatgtgagaaagagagagaaaagaatttgaagaaattttttaagcatttggccccgtaggggtcaactcagtctgcgcaaagttcaaaaagttataacttttttctttgttgaccaaactta

SEQ ID NO: 72649 - DNA, 1059 bp, Heterodera glycines
atgtgccaaccgtgcgaactgtacgcgaggtgtgttttgttacggcacaccattgcattggattttggcatgtgccagaatacgaatttgatcacgttaagaaaactttatgaaattttggtccgtcggggagcagatctttaccccccccccccccccccccccgtatcaattccctccgtgaatttttttttcaaaaacttcaaataaaaaattattaaattttcataaactttgaaaaccttttcagcaattaagatgaattataatgtttttttcaaaaaagctgctgaaaaattcccatttattttgtaatttatgaaaatattttaagtttcaagttttaaaagcacacttttcaggaagcaaaaaaagcaccgtcctgtccaactgttgctggaaaatgacccgaactatgccgacgacctcagcaagcagcgtaatgagcatgacaatgctggcacaactgccgttgttggcgccgacacaacgggcgcaaaggcagcggaggttgcgccgcgacggcactatccgtgccatgacgatcgcaattgcatgttggcatgtgaggcagcaacacgcgtgcgagtgcagcaacagcagcgagcatcatggcacttcaacatcaaagaggaagtgccgatgacgccggaggacaaagcgggcgcggtggcgattgaacaaagtgacgatgaagcagcggacggatcaaatgttgctgagggtgaagcaagaaatgagaatggaggcgttggcattggtgggggtggcgagcagtacaacaacggcgacaaatgtctacagcaggaggaggagcgggagatgaagcagcgctgggcccagggtaaggacgactcatcaaactcattctcaaaacgctcacaaattttggggaaaatgaactcaaaagcattcaaaaaactgtaagaattgattctaaaggcctaaaattgggaaaaatcagaattagttttttctttctcataaaagtggcaagagagtgccactaatttggttttttagttcgggacctatgttaaatatttgtcaatttgttta

SEQ ID NO: 72650 - DNA, 99 bp, Heterodera glycines
ggattatttttcaaaacacctcgtagactgggggataattggagactacgggattaatagagactgggctataattagagcatatacggtattcagttt

SEQ ID NO: 72651 - DNA, 374 bp, Heterodera glycines
atgtttcgaataaatataattgtgtgtgaacgtataaaaaattttccgttggcaagtgtactcaccagatttagaaacatcggttagaaatatttccaatatgcaaattcatataatttttagctttcgaacctccaacaaaaggaatcgactgcatcaatatttttatactttcatgacggtcattatgaactaataagaaaaccacaaaagataaattaattatttttttattttttttcttattataattagaatttccctttgaaagttgcaaagaaatattgtggcacttattgtggcacttcattttttgactcatgctttatagcaccagtaatatggttttgcaactttaaaaaaggtttaataaa

SEQ ID NO: 72652 - DNA, 238 bp, Heterodera glycines
atgagcggtgcagtgccatttttaaaaaataaaatcattaatacaagagttcaattaaaattattcagcctaatgtaatcagaaaagtacacttaattcaaattaaattcattcaccttaaggacttacttaaattttttaattaaaatttaaacgaatattactaaattttagtaatttagcccttttattgatcaacgattaaaaatcacaaaaattagatttaatcctgatcaaa

SEQ ID NO: 72653 - DNA, 468 bp, Heterodera glycines
atgagaggagaagaaaaacacattggaaaaaatataaaagaaattgaacaaaatatcgtaaattatcaagagaagataatgaattttggcgaagaagtaaatctcaatctcaactttaaagaaggtaattatttagataatttttttaatgaaaaaattcttttttttttaaagtttttttcagaaatcctaaaatttattttgccttctttgattgctgaatgtattacatccaacttattatacggaaaaaagatcgaatggaaaatgttggaaatggcacttgagaaaattgggaaaaaagaattatgggaagaaattgaaaagatttacaatgaatggaagacaaaatttgaaaagaagtctaagaatgacgacaatgtaatggaaaagatggaaaaaatgaaagaaaaattggaggaattgaaagatgaaattgaagaagaaaaggaagagaagaaaaagtaa

SEQ ID NO: 72654 - DNA, 2092 bp, Heterodera glycines
atgccgacaaaagttgagatgtcaaaaggaataagtgtactgttaaggagaggtggcgaagatgaagatggagaggttgtggatactccacctcgaccacccgctccaccaccaccaccacctccaccgccaggtaaatgccctccacgtggaccaaatcctcccgctcctccaccacctccaccgcctgggagacgtcctccacgtccacccagccctccttctccaccaggaagtccaccgcctcgtccacaacgtccccctagaccatgtagagctgctgcaccttctcggagaggtggtctcatagagcaatggcggaaaagacgatatgatatacaactacggcggcccgtggtgcgggatcttttggcggaagcagctgcggctccattgcccgaaagtgacgatgaatatgactatatgctggagagtggattcgcgctgccagcaccatcacagtactatggagatttgcctgtactacccgacaacgcagacgaaattgaggagatggacactgttcagcgcaggattgccaccagacgaagattaaaaaaggacttggcagatgatgatgatgatgatgaagttgatttacagcgaaaaagaaataggatttatcacccttcacctccacggctcccatctccgccacggaaatctgagccaagacctcctccaacagccaagagagaacaccaaaaacaaacaaaggcagaattgaaatcgtcgacatcaaagaaaaccggtcaccccacccctacgcctcgtccaaaaagagaaccggagtttgggctggacccgcgaccatccacatcaaggcaagctgggtacaacccgcctccctcaacacctaaaataaaacacgatccaacaaagagacccaagccgtaccgtattccgaaaagagagcctaaaattgagcgaacaccacaacaacaacaacaacgccaacctcctccagctgctattgtcgaagaaatgcctcttattcctcctcctaggagagggaccaaacgccgccaccccgtaaatgatgatgatggtgacggggaggtgcgcataagaaaaagagtgaggcaaccgagaagggtaagagtacagtactctcccgagccaggtccatcaacatctgcacaaagtgatgagcaacaacaacaacaacaacaacaacaacgtgagctgtttgccattccgtcaaatcaactgaccatgacacagagaattgagagattatacatcaaaatcaacaattatgctgaacgtatgggcgttagggggaatacaattcacaccgcaaacggcaagccgttggcgcatagcaatttgcgaatggtcatcaggtatataatagacagaagagcgggccgccccaccattaagccacctggagcggctatattggaagagaggcttaggcaggacccaattttgtattcatggacggctccaccaaagagaccatcacagagcaaaaccacccggacggcacgggcaatcaagaaggaatttcgcccgaaaaaatggagctgatcaacaccactcttgacaaattgtacaataatccatcttccccagcggcgtttgcaggtgttacagcgctgtggaaagaggcgcgaaaaaagattaaacatttacggaaaaaggacgtgcagcattatttggatggtcaccgcacctacactctgatgcgcccccgcagggtacgttttccaagggccaaaactattgcagcgggattcatgaccgatgttcaagtggatttggcagattttcaagctctttcgcgccacaatcggggtcatcggtatctgctcgttgcggttgatgtcctatccaaacgtctgtttgttgtaccgctgagaaacaagagagccgaggaaatgctggaggcattcaagcaactcatcgatcaaatgcccatggcgccccaccgagttttctccgacaagggcaccgagttcaagaacagattgctcaaggaattctttgaggagcgggagattgagaagcacgaacccgtccattcgacagtaaaagcatcaattgcggagagagccatccggaatgtgaagcagcgattgtatag

SEQ ID NO: 72655 - DNA, 536 bp, Heterodera glycines
atggaaaattcacaaggcgaattagaacaattttattcaacagccgtaaaagttttggatagactaagttttttcttactaaaacttgactgcaaaggtagaactatgaaagatagcagaattaatatggtagaattttcaactgttgcttagaaatttttaatttttaagaaaagaaaattgaactatcagtcaaatgaaggacaatcacagattaaaaaaaattaaaagtcaggaaacaacattaccattgtcaaattcactaactgaatttgaagaaaatcgacaatgttctattttatttgaagaaactagtgaaattattttttctttactcacattttttgattttagcttctgaaactgatgcatcagcggttttagaaataatttcaaataaaggtttgaaattatttagtcatttaaatcattattaatttaaatccgtgaaagaaaattattttttaatcctatgattgtcacgggatatattataacatataatattcacggacacaatggaagatgtcagttaa

SEQ ID NO: 72656 - DNA, 673 bp, Heterodera glycines
atgagcaacagaccaacggaaatttcggggggcgatgaggacgcggatgaggaggaaatcgatggatggagtggggacgaggaggacgaattggagcccatcaacccgaatgtatgtgctaaaaatggtggcatttctcaaaaaaatgccattttgacacatttaaacttttttttttgaggggaggatgactgaaatttcgctacatcccccaccaatttttgaaagttaatcccaaattttaatacggatttccgaaagagccgtttattttaatctataacattgaagggcatttccaaatatcccatttcaactttcatatgaaattggccatgaaaaatttcaaaaaaaaattttttttttttttttgatttacgcatttgaaacccttttttgattcgctttgaaatttcaaactcctccaaattaattaaactcactcatttttttcagtgtgttgaccgttgtttggcggttggccaagcgccggacgaaacggcattttccgacaagtggaagagagagttctccaagcggccaacatggttcaacgcggacatggcactccaccagattttgcgggtactttcttgtggcaaaattaatttttggtgttataaattacggatttcagggccatagcctcagatttcactatattcttccataa

SEQ ID NO: 72657 - DNA, 75 bp, Heterodera glycines; identical to SEQ ID NO: 54636

SEQ ID NO: 72658 - DNA, 513 bp, Heterodera glycines
tttgggaggcaatggaattgtggacgattatcaggcaaaagggggaaaatggacaaaaaaagggggaagggataaactaagagagagacgatgcaggtgatgcgccacatggtcaacttggagtccgtaaacacttacgaaggtgaggaaggaaatggcatggaattgccaaattgtgacaaactttggcgaaatgtgcccatttcttaggcacccatgacatccacgcactgatcctcggcaaggcaatcaccggacaccaggcattccaatgagaagacgggcgggggacggacgaccaaagcgattgtcggaattggggaagtgttgtcgggttgagacggaggaagcgaagtgaatgaatcttcttttgccctctcaaaaatatcatttggcacttaaactcttacttttttttacggatttttcaatgccaacatttgccttatgattggaatgtttttacaaattattaggccaaataaatgatatttattcgaaattcaataattt

SEQ ID NO: 72659 - DNA, 77 bp, Heterodera glycines
gtccgtccattttcacgcgctcgccaaccgactttcgcctgctcaacgaccgtctcctcgcccgtcgccgtgtggac

SEQ ID NO: 72660 - DNA, 143 bp, Heterodera glycines
cagatgcagtgaaattgagcacttttcggcgtgtcaaatccggcacaaattcgtcagactttgtggaaatgcctttcacgggttcggatttcgacgtcagaccgcttctccatcacatcactcatgccagtttgccagacatt

SEQ ID NO: 72661 - DNA, 1048 bp, Heterodera glycines
atgggcttaaaatatgaacttattaaccaaaggcaggggtttgttgagaagtgtgacggctgctattttaatgtttttcattctaatgtgcaggtttggatttttcaaacagttttatttattttggtttttatgttattaattttaaaatccagattggtgaaaatttaaatacacaaaaatccattatttttgtcttctaaggaattttatttatattttctatgttcagtttccaccgattgtgtggccaccacctgaaggtgcttctgaagatgttgtaagccaacatttgaaaccttttcatgacgtgctgcgcttcatttctgctaattgccttacaattgttcaacatcctgaattgtatgatcaagcgaaaaagactcttgatgcggttaacctgctcaatggtgtgttggatcagcatcgacgacagcaacaggggcaggggcaacagcagcagtacaccggaatgactgtgttggaaaacagtgacaataaccgccgacaaactaataatggtgatgaagaaatctacatttctgatgctgatgacgatgatgatggcattccatttcttgtgcgtcgcttcttgaacgctaacattgctgatgaacaaactgtaacagcagcagagcaacctgattatgctaatggtgaaacatcaatgttttgtgatgacgttgcggaaatggagtgtcagcagaactagtcttgtactggtaaacctgcttatatatatatatatatatatatatatatatgcaatttattttttagaggcagggtttcacagcgtcagcgtcgtaataattcttttggttgaagctgttttttcgcgtctttttttaccgaaacattgacaatcaactaaaaaaggcaaacagaattttttattatagatttcaattattgttattagtttaatatataattcttttttatcatacaggcaggggctttttgttttattggatgtattggatctactgtgcgtgatttagtgctaagaaatggtggacgaaggaaaattttcattttatggaca

SEQ ID NO: 72662 - DNA, 939 bp, Heterodera glycines
atgtccgacccgaaaaaatacaatattgaacaagcgcttcaaaatactgaacgtgcaatcgaaccctcactggactggcaggggccaacccaacagcaattggaagagaaatgttagagaattatattaaaaattacgtaataaaatgtgatgttttttggtatagatataaaaaattatgattctctaactcctctttttaaagcaatgcaagaagaaaacagccctactgcaccgtcaccgttccagcatcagctagcgcagcagaagcagcagcccagtcgtctggtaagcaatgttgtatttaatgattcttacatgaaataaccgttgttcattattctcagggacaacataattcttctcagggacaacaccctcaaatgcttccaactccactacatccacctcttgagctgtttgaggaaggtttgcgttacaccgccacctggacttttgctgctatgttcaataagcctttggaagctgaaagaattgccactacgttgagcgatgcttcaatgttgttaaacatgtgtgtgcaaattctgaatcgccgaccacagcgtttgcagcacggattgcaacatccaacgtccagttcgcagcagcactagtaacggcagcagtagccgccgctaagtaattttccatttttatgaacaataatttaatttgaaaatattatttatcatattatttcttatcatttctattccacttgtcacagttcattagtcggcattagttcagcacttcagcatcatgcaacaacaccatatggtcgtcgttaatccgctcgcgggtgtggcaggggcagaaagatacatacacataagagctactgcctgcaaaatttcttaaattttttatttttttatgggaatcggcagtttttaagaaaatttcgaatcatagacgtgtaattttcgcgtttca

SEQ ID NO: 72663 - DNA, 925 bp, Heterodera glycines
atgttcaaaaaaatggtaaaaatgttcagcaaaaacaaagataaaatgaaagtccaagaagaaaatcaactggaagagaagtaccgaaatttgaacagtttaaaagagacagacccggcaatggcacaaattatggagaaattgcaaatgcacattaaggaggtcaagtcaggtaatgcaacaatgatttatcttctgtaattattgtaatttctctattgtagggaaaatttcggagccgttgaagcaatatttcatttttgtcattcaatttttggcaaaacgacatcacatttcggtcgccgaaattgtgccgattcaaaatatgaaaacaaaaaaagtattaacagagttagtaaagctggttttagaggaaaagcgaaaaaataagcagaaaaatgggaaaaataaggacacaaatggacaaaattgccaatctgagaataaatttaaatcgaacaaagctaaggaagagcgaatgttacgccttttactcacggcattagacaacgtaaacggcacgattaatttatcaatggacggtaagccagaagctgggcattatttgacactaattgtaactatttgcgcagatttaagcgggaccggcgtagcttttctagattttcaggtcccggaaaagcaaaataatgatgtgctaaaataggaaaacagatataaaatcccaggttttgcgggaaaaaaagtattttttgaataaataatattttatttattaattcaggtttatttcattatttttttgtaaactgataattttaagagccctttttcgatttttagagttgtactttttggaaaatcttgaaattttaattcttagagggatgtattttatgttgcattttttattatgacaaaaagatgaaagaaaatattggtttctatcttttatgtattaaaa

SEQ ID NO: 72664 - DNA, 70 bp, Heterodera glycines
atgcatagaattattgctgcggttaaaaagctcgtagttggatctgtgctagccgtccggtgcacacttt

SEQ ID NO: 72665 - DNA, 105 bp, Heterodera glycines
ggggcgtttgggggactcacacaattatggggagcaaaaatcccacgcagaattaaagtacaggctatagggaagctattcccgaaagattcgggctccccataa

SEQ ID NO: 72666 - DNA, 56 bp, Heterodera glycines; identical to SEQ ID NO: 52733

SEQ ID NO: 72667 - DNA, 750 bp, Heterodera glycines
atgatggtgcaatggaactcactgctctcgcaggtggtcacagaggttgaccacccacagccaatcctggagcacatcaaagaaacggcggaattctccgtcaaacaggtgatcgaaatgcgacggaggggaggggaccaaacgcagtgagtggtcttgggactcgatctggttaaacattcattactcattctttgctattttcagtttcgtgacgcatgcttgggtatgatcagcgaattgacacgcacttcggtcgattggcaactgaacttcccaaacgaaatggcagaacaggtcatctccgtgtcatcaatcctcggaacccgacttatgcaaaataatgtttaggaaatttccgaatatgagaactcaatccgaagacaagaacaattgttgggtaaaatcagacagaaattggacgacgaaattttgtcgggagaaaattcgaattttgtaccttaatgtttggattatcacttggatgaatcgcttatcatttatcattttactatattatttggttctttaatcacgccaatcactgttaagagttccgactgtttgaattcaaccgatttttagttgtttttgagaccaacaaaatgtggcatgaggcgcgaagacaggagaaaatggtcagagccaaaatggtggacaatgcgaagagaaacgagcggaggaaacaattctatgaaagtgtggtcagtttaagggtatcagaagaatatccaccaaagttataataaa

SEQ ID NO: 72668 - DNA, 139 bp, Heterodera glycines
gtcacacttcgacaaattcgcaaacgagcagcagaaatgaggaggaggatgacccgcacaaccgacagtcatgttcaagtggataccaaagatagaggaaccattattcgtcccttagatgcgtcattctcacaacccg

SEQ ID NO: 72669 - DNA, 966 bp, Heterodera glycines
caagttggacgtatgtgtgctcaacatgcactgaacatgcttctgcaaggcgattacttcacgcccgattctctcgcttcaattgctcaagaattggaccaaagagaacgtgcgatgctaagggacgaatctgagtttcaaagtcaaaattacgacgattcgggatacttctcaattcaggtgcttgtcacaaacttattcaggtttagttatctttttaggtgataactgaagctttgcgtcgtcaagcgaatttgagtctggagcctatcataagcccaaatgctatgaaggttttgcaaaatcccaggtattaaattctttcttgatttgattgagctgaaaatgtatagcgttttctattagctaaaaacgatatttcattttaattactgcttattgtaaactacggtagaccaataaccctccctcttcctaagtttggcacatgcttacatttgtcacctggaggaccattggttcacaattcgcaaaattgggacgacttggtttatcctcaattcgctgttcaaagcaccgcgcattgtatctgaaacgtttctcgaattgtacgtccatcagcttaataccgaaggtaaacattcaaaattatggaacaatccttctgattgtctaatcttttcatgttgaactgtttaattttgttttaggttggtccctttatgttgtcgaaggcgaattgcccgcttgtgcagcggaaactgtgccaagagaattttggaatgagacgcgacggacaaaaaagtttgaaaatgacatggaaagggcaatcgcattgagcctaaatgaagcacggccgtttcttgttacaaaggcaattctcggaataaaaaatcgacgtgctttttatttttattttttagactgccgatgaagaattgtttggagcggcgacgccggtgatcagccaagccgaggagttggacatccaggaaagacttacga

SEQ ID NO: 72670 - DNA, 105 bp, Heterodera glycines
cattcgcggagcatcattttcaatccgttgaacccgaccatacgtattctcggcagccgttgtagtttggcatcaattcacccgccccctcaacaacaacaatga

SEQ ID NO: 72671 - DNA, 682 bp, Heterodera glycines
atgccatcttttggcaaaatgccactttgttccatttccgcggcaccgttgtctttcagccttaccccgtctacggcaccggcccgggcgttggcgcttaccctccgccagtcggaccggacagcacatattcgccacagcagaaccgacgatttggagacgaacatttgcacagatattacgacaatgaaggcggacggcaccaccgatattgacgaagaaatgccatcagagcacagactgacaaaagtaatagcaaaacaaatttcttaattaccgaaaagctccgatcgttcatttccccaaaatttactgtgagcccttacagtagtcccaacatttccaatttggcacacattttcgatttttatgccaatttaacaaacgcaaatgaatataaatgtttagaagctgttcacatttgcctattaaatcagcaaatttgggcaattaaagaatgccaatgttttctttttgtccattctctgatgaaaaatgactgtcggggagtgccataatcaatttgtgtgccggccaagtggtgggcggggccagtcgataatgaattgcgctgggtaggggggggcaatgcgggaatctgtcaattttagcagcaaaagtgctcaaaggcggaagcacatggaaatctgaaagcagacaaacgcagccttttaaagcagta

SEQ ID NO: 72672 - DNA, 285 bp, Heterodera glycines
atgcgtccccagcgtcgtcgtctgcggccaatccaactctttcaattggtccttttgtctctgtttggcattttgctttttgcaaaagtcatttataaaacggtaaatttgtggatgaattgcgaaaagaaaatcaaattgtaataattacagctgttctctcaggaaatggattcagaaaagggcggcatcgtctttttcgctatttttatgttcatcataatcattctttgcattcgcgaagtttacaaaggcatagataataacttattcatttttaattaa

SEQ ID NO: 72673 - DNA, 988 bp, Heterodera glycines; identical to SEQ ID NO: 45371

SEQ ID NO: 72674 - DNA, 950 bp, Heterodera glycines; identical to SEQ ID NO: 9783

SEQ ID NO: 72675 - DNA, 901 bp, Heterodera glycines
atggcccttaaaactggcgatgaagagcccatcagattattgggcaaaagggtcaacgaatttgaacaggtagggttcggtaaccaaggcttggtttttgattgtttgtgccaggaattgaactcacaattgttgccatattggaggagggacaatttgcgtgagcaagtgaagcaattacggatggcaatgaaaaaactcaaaaaggcattcaaaaaatcgacgaaggacgaagagaatggcactgaaacagctgaagagaaacggagcaagggaaagagcggtgcgaaaaagaaagctgaagcggtggagaattgagatgacaggcgaagtgttgagctgttttcataccttttttgaggttgagggggggggggggggtcggcccccatctttcgtcataaatgctccggaggagggaggcctttgtaatcgggaagaggtcaaagggggaagggtcgacgaaggggggggggagagaaagagtaatacgatattccgggtgcaccccaaaatgtttttccgacggcgcctaaaatccttatttccctaaaaaatgacaaaatcgcaaacattggcctttttggacaaaatctgtaacaaatcccattaaaattacaaaaaaaaaaaaaatcccagcggcacctaccggcactgtcggaccccatatttcccaaaagttttttgaaaaacatgccgcaaaaaaggtggtaagaaaaaaaggccgtttacatggctgacccccttcgcaaagttagccgtcaatcccctcccctttgacccccctccctttttttaacgtatgactgtttttgccagcgattggtgtgacactgtcagtgttattgttggtataatattttgtttatatataatttgacactcaatattataaacctta

SEQ ID NO: 72676 - DNA, 726 bp, Heterodera glycines
  unsure (1)..(726): unsure at all n locations
gtgtgttgagcattgtgaggagggcttttacgcggacggcgacaaatgcaaacgatgcgccaccgactgcgagacgtgttcacaagcggaactatgtgacaagtgccacgatgcaaaactgctgatagacgtcaaacattacggccatttggaccatggccgttgtgtcgcgacttgtcccgaaggattggtcgcggattgtaagagaggagtccctcgtcgggtaggacgtcggctgaactttgtctttaagacagactgacaatccaagccaagtgcgtgctcagaaggaattcgtgctccgccggttacttcgaaagtgcgcaaagcgtttgtttggagtgcgacaagtcgtgcgcaacttgccatgggcctggtaagccgaagggagcttcgttggacatgaaaaagacgcaacccaaaaaggtccgctccaatgcgacgaatgtgcacagggctttgccaaccatacgatgggttactgtcgccagtgctgttctcccgaccaattgactcagaaggacttgcactgtgaagattgctccaagagttaccccgaattccccacgaaaagccatctgtcaatgctttctcttttggccaactttttcacaatcattggcctcgtccttttgngcactgttcttttttatttgtgtcgccaattgatttgctgttgtttcnggattggtcgcaatggaaatcgttctgatctcgagtaaattt

SEQ ID NO: 72677 - DNA, 657 bp, Heterodera glycines
gttttcggggcagtccccccgaaccgatgcgcccagatttatggggagaccgaatccttccggaatagcttccctatagcctgtactttaattctgcgttggatttttgctcccgataattgtttgagtaccccaaacggacacttgaaaaaatcgatttttttgttttcggggcagtccccccgaaccgatgcgcccagatttatggggagaccgaatccttccggaatagcttccctatagcctgtactttaattctgcgttggatttttgctccccataattgtttgagtaccccaaacggacacttgaaaaaatcgatttttttgttttcggggcagtccccccgaaccgatgcgcccagatttatggggagaccgaatccttcgggagtagcttccctatagcctgtactttaattctgcgttggatttttgctccccataattgtttgagtaccccaaacggacacttgaaaaaatcgattttttttgttttcggggcagtccccccgaaccgatgcgcccagatttatggggagaccgaatccttcgggaatagcttccctatagcctgtactttaattctgcgttggatttttgctccccataattgtttgagtaccccaaacggacacttgaaaaaatcgattttttt

SEQ ID NO: 72678 - DNA, 441 bp, Heterodera glycines
atgcaccaccatccaccgaatcatgaaaaagctatcaatctgtcaatccttacggtgtccgggccgggtgagtttccccgtgttgagtcaaattaagccgcaggctccactcctggtggtgcccttccgtcaattcctttaagtttcagctttgcaaccatacttccccccggaaccggaagactttcgtttccgggaagctccccaccagggcgaataaatccgccggcggatcgctagttggcatcgtttacggtcagaactagggcggtatctgatcgccttcgaacctctgactttcgttcttgattaatgaagacattcttgccaaatgctttcgctgtagtccgtcttgctacggtccaagaatttcacctctcacgtagcaatacgaatggccccgtttgtctctgttaaccattatctcggtcagcaaaacca

SEQ ID NO: 72679 - DNA, 1367 bp, Heterodera glycines
taacggaggataagggttcgactccggagaaggggcctcataaatggccactacgtctaaggatggcagcaggcgcgcaaattacccactctcaacgcgaggaggtagtgacgagaaataacgagaccgatctcttatgaggccggtcatcggaatgggtacaatttaaaccctttaacgagtatctatgagagggcaagtctggtgccagcagccgcggtaattccagctctcaaaatgcatagaattattgctgcggttaaaaagctcgtagttggatctgtgctagccgtccggtgcacactttgtgtgttactggtttggttggcttttctgccggtctttccccggcgttggcctttaccggtcggcgtcggtgggctggcgagtttactttgaacaaatcagagtgcttcaaacaggcgtttcgcttgaatgttcgtgcatggaataatagaagaggatttcggtccgattttattggttttgctgaccgagataatggttaacagagacaaacggggccattcgtattgctacgtgagaggtgaaattcttggaccgtagcaagacggactacagcgaaagcatttggcaagaatgtcttcattaatcaagaacgaaagtcagaggttcgaaggcgatcagataccgccctagttctgaccgtaaacgatgccaactagcgatccgccggcggatttattcgccctggtggggagcttcccggaaacgaaagtcttccggttccggggggaagtatggttgcaaagctgaaacttaaaggaattgacggaagggcaccaccaggagtggagcctgcggcttaatttgactcaacacggggaaactcacccggcccggacaccgtaaggattgacagattgatagctttttcatgattcggtggatggtggtgcatggccgttcttagttcgtggagcgatttgtctggtttattccgataacgagcgagactctagcctactaaatagttggctcattgcttctgtgggcacaacttcttagagggattttcggtgttcagccgcacgaaattgagcaataacaggtctgtgatgcccttagatgtccggggctgcacgcgcgctacactggcaaaatcagcgtgcttgtccttccccgaaaggggttggtaaaccggtgaaaatttgccgtgattgggatcggacattgcaattattgtccgtgaacgaggaattccttgtaggggcgagtcatcaactcgctctgaatacgtccctgccctttgtacacaccgcccgtcgctgcccgggactgagccatttcgagaaattcggggacggttagtgttccggcttcggtcggtatgcagactggaaccg

SEQ ID NO: 72680 - DNA, 494 bp, Heterodera glycines
atgtccaaggattgctttggcgtagagcgcttattcgaaaaagaaatccgtcgccgcaacagattggtgagtgtacttgcacattttttaccaaaattacattcccaatttaaggagcgttttgcccgttcagctgcgaattcaagttcctccttcggaggacgcattggaagcgacgaaaatttgcagaacccaaacaaagaagggcagcacaaattggcacaacagcagcagctgacaatgaaaatttcgcatccgaaaatgttgacgaaaaatgaaaacgccgaggacagagaatggacgccaagggaagaggctaagaaacggcgtagcgaaggcggataccgcttctttggcgtaaggtgagtggaacaaatggaaatgccgaaaataattacgaatgcaattgacatgtctaatcatcatgaaaatttcgttgtttcagaaaaccaatggcacagaaggcgcgtgacgaaatgatcaaactgcgagag

SEQ ID NO: 72681 - DNA, 1027 bp, Heterodera glycines
atgaacttgtacacatcaacgcacaaaaagaagtaatcatgtctggcattggggacaaaaaaacaaattattttgcatgacccaagaccgagaattgaccccgagagtgtcgagaccgagaaactcagaaactaaaaaattcatgaatcaaattttatcaaagtatttttgcttgccaaatattttatataagcgatcaaagcaaattaattttgaagaaagtagtaaatggtgcatttaaacatcttaccttttcaaatcggtatctatttgttaggtagcaataagttttcttaatttgccgaaaaaatttgttaaaagcttcaccaagtttcaaataattacaccaattttctgcactttgtttgtcataatcttattctaaattggagaaaaaaaaattatttttttgaaattttgcagaataataaagagaaaaatatttcgaataataaataccacaaagaatacatatatatttgttgtttttgagcaaagttatcaaattatttgttaaaaaccccgaactaccgtattttacgaaaccaccagcacttttattccactcattaaggcatacccatgtggaattgtttggagataaggaggcatgcgcaaacatttctcttggagagtttggcattttggatggatttgctggccctgtgccaacgaacaagacggccttgtttaggaaccggtccttttgggggtacctgttgtgcatggaggagccaatcactgcactgtcctatgacatgttggccggccttccgcaacagggcggcaaattgggagtgattggccacaaggacaatgacaagtgtccgtttgcaattcgactggtaatgatgccgtaaaatttaattaattgagttgtctaattacatttttttcaaacaacaatatttgcatacatatagggcggtgagaatggactggcgaaatgtgtgggaaaaatgtgcgcgaaaagcccataggcaatgtggcgacatgtctttgtaatgtgtacgaacttacgaataaa

SEQ ID NO: 72682 - DNA, 427 bp, Heterodera glycines
atggcttccccttcgctgatgaatcgactcattttcccatttcttttgggagttcttctccaaaacagcaacaacattgttgatggtagtggcattgttgattggaccaccgggaagcagttgaacagtgtagagtcgagaaaagcacccgtagtgatcacggagagtggagaaatgtgtgcaaataaatttaaattattacgatcttaaatttttaaaaattaaaataccgtatttattgaaatagatcccccggtgcctctatttttcaaccccccccccccccccctcaaaaggggggctttatttcagaggggggctctaattcaaggggggggggggctttagttatcaacacccttgaaaggggggctttatttcagaggggggctctaatattcacgggggggggctataactcaataaa

SEQ ID NO: 72683 - DNA, 666 bp, Heterodera glycines
atgggtgggaatgcgaaggaaaaaatgctccggttcaatgacactgtgaaaattggtgaagcaacagcggattatgatcgtaaaacattgccgaatgatgaagttgtgccattgctgaccgaacagtacaaggccgacgcgcacaacgtgatggagatgtacatggaggacaagaagatgacctgcatgctgctacgctttaaccaaaaaaatttagataaactgtgataattagtgatttatgaaagcatatcgtttatattgactaaaatttagactaaaaattttcgaaaagaaatatcaatcaaaaatccaaaaaatggccaattaagaagatgacctaattatattatttctgcttttgtgttttttttatgttcttataattcttttattggaattgggaattgtaaatcactaattcatacaaattattaaatatgaaattttacattgccgaatgtcgaatttgtgccatttttggccgaacattacaaggtcgacgcgtacaatggagtaaaagaagatgacacgcctgctgctacgctttaaccaaaaatgcccgctatagcaaattttgggacaaaagaactataaattttggcattatgatatttttatggcaaaatataatttgatttaaattaaattgacttatccaataaa

SEQ ID NO: 72684 - DNA, 438 bp, Heterodera glycines
aaaatggtgtaagtaaaaatcgtaattacgctcaaaaagctcctcaaacaattttagcgcttccaattccttctacaatcgcctttatacatcccattatgaacgctaaaattatcagagtgccgaaaatcgcgtgtgatctacgcctagaaaaaaatggtgtaagtaaaaatcgtaactacgctcaaaaagcttctcaaccaattttagcgcatccaattccttctacaatcgcctttatacatcccattatgaacgctaaaattatcagagtgccgaaaatcgcatgtgatctaagcctagaaaaaatggtctaagtaaaaatcgtaattacgctcaaaaagcttctcaaacaattttagcgcttccaattccttctacaatcgcctttatacatcccattatgagcgctaaaattatcagagtgccgaaaatcgc

SEQ ID NO: 72685 - DNA, 1242 bp, Heterodera glycines
atgcatcgcgaaatccgcgaaacaatgcatatgcaactgcacagatgcagtgacagttggtgtggtcctagcgacccaatttacgggcggtgcaagaaggggttcccagccccttactcaaaatgtacgattttgcgcccggacaggcccgcgatgtatttccggccttcaccaactgatggtggtgcccaattagaggtaaacggcctaatatacgacaactcacatgtcgtgccgtataatccttatattctgctacgttaccgagtacaccataatgtactgtttgcatatggtaacaaagcaaatattaaatacgcactcaagtaccctttcaaagggccagggcattgttatgtcgagtgcaaacaagagtccggcaataaaatcggaattgatgagccggctcaatatgccaagatgaacttccgtggtgcaacggaagcatatgccattgtccattcactgccatttgccaaactttcacatcaggttgtcaaacttagcatccatatgcctaatcaacaaccgattgtgtacagggcttttcagctggtgagcaaagctcaacaaatccagcaaggcgaactgccagagacgcaatgttctgcctattggaaacaatggcaaaatgaatggaagcatgatccgaagctcaaggacatgctttttgaaaaagtccctgagcattttatatgggcaaaggacaaatggaacaaaaggaaatataacctaacaaagagaccaccaatcggtcgaattgttcctgtacccccatcggacccggaaaggttcgcgctctattcacttatgcgtcactttcctggagacccagaccatcttaagatggttaatgggttgctttgtacctcattcactgaggctgcaataatgcatggtcttcttgaagacgacaaaatttgggacaaaactctggcggaggcagctctgtcgcgctggccagatcagatgagatggctctttgtgagcatcctggtctatggccagccgagtaatgccatagaattgtggaacaagtacaacgaccaaatgtacaatccgcaaggcattattactctggcacagcataaagtagcagagcttgaagccctagccgacattgattggcggctgcacagctgctttaacttaagctgtgtgcattttagcctgccagacccgccaacttcaattgccaaaaatactgacgcggcaattgaagagttttttctttggcgatga

SEQ ID NO: 72686 - DNA, 404 bp, Heterodera glycines
atgaccaattctggcattcttcatccacaaaagtgagttgagttggataggaccggaatttttcttttttaatatatttaaaattggcatttttaatcgcttgtattattttcatcagcagcccactcatacatagtcttaattaaatcagtgatcagtgacaaatgtaaaaaaaattgcatttatataattagtgttaaaaaaaaatcattttttaaatcttaatatataaattttagtttaattttaaacattgaattaatgttaaatttgatatggatgaggttggattaacccgtgctgggtcgttttataaatccgccaacatggggctttcataaatccgtcactacaaagaattttttatctattaaaaaaataataataattgtatataaaataaa

SEQ ID NO: 72687 - DNA, 64 bp, Heterodera glycines; identical to SEQ ID NO: 51065

SEQ ID NO: 72688 - DNA, 59 bp, Heterodera glycines; identical to SEQ ID NO: 72149

SEQ ID NO: 72689 - DNA, 773 bp, Heterodera glycines
ttactatcaatcactaaacacttttggtatctcttataaattatgtctttttttatttaagtataccgaaaagtcgccgcgagaagtgtctatgaaaaagggcgacgtgctgacgctgctgaacgcgtccaacaaggactggtggaaggtggaggtcagcgaccgccagggcttcgtcccggccgcctatgtgaagcggattgagcccggctcacagcaccaccatcaggtgggaaagccgacatagctaaaataaaaaatcctaatcttaacggacaaccccgtttttggaattttatgagcaatttaatgagagaaattcccaaaattttcaaaaaataaccccttgcaaatgaatcaattataaaaataatttattttttttttaaaactatttcaataaaattaaaatgattcaaacacacaatcgatcagtggacctgtgattttcgagaatcttgaagccaacataatttcgatctcacttctcggccaaattttccataacaaagctgctttatttgtcaggcgttggccggccaaccgatgaacaccatcaatgccaagcagagtcagattgaggaccaatacaagcgcctgttgatgctgggcgagcagcgcaagcgcaagttggaggaggcgtgcaaggcctaccaggtgagtaaaacgacggttagatcattttttaaacaaaatgtttgtcaaaatcttgctcaaagcaatataattttaattttccacctgttttaagtgtgcgcgaagcaaacgatttg

SEQ ID NO: 72690 - DNA, 2147 bp, Heterodera glycines
atggctttttctttggtttctttgctccgtcgttttcttccgccataccatcaaaatttggtgtatgtcatttgcggtgcgcacattttgtacggctcaattgcattggcagtccgtaagtttatttgttagttttcattttaatattggaaagagagtgatcagcagctgaaaaataaatttttggagatatttgtaattaaaattatctaatgatgatgaaatttgcataaaaatttctgtcccccgtccatttgagatcagactttttgggtgctctcaacgcgcattttccccaccgcttttgacatgttcgacgacacgcgcaacagagtgatggactacgacaccatgtggaattggaccagcaggtgcctccgttccgccaattttttcaatattttatcacccgtttttatgttcagacagcagctggacaggtatcagaaccgactgaccatcagctgggtggtggcgacttttggtagtgattactaatagtattatgtgaaaatttgttttttattttaaaattatataattaataaattaaaatccttttcccttttcagatatttttatggccattttgtgcatcattccccaattttgcaaggtcgaggtgagcgagggcaacagagtgcaggagttggacttggtgagagggggcgggggaggaggcggggaaaaatacgaaacactctattctttttcattttgaatttaatttggaaattatttttatttatttcaatttttattgaaaaaattttatggtctccattttcggcttattatattataaattttacggttgtccaaaagaaaaagcgtttttttaatgtcaaaaaatttttcgcctggcgctaaaaatcgcaaaaatttggcagtttttagtgcaaatctgttaacaaattgcactcgaattttaaaaattttccccggcggcgcctaccggcaccgccggccttcgattccccaaaattttttggaaaaagcgcgccgccaaaaaaatggttttgttaagcagcaaaaaataataagcgataggtttgaatgagttggcaaacatccttgtttcgttggcaaactcaacgtatttttcttttcttggtaaattgaaagcttattaaacggaattttatgcgcatgcgaaaaaaggaaaacttttctgtgatgagcaaaaaaaaaaaaggtcgtcaaaaattttttgacccccccatcgtaaaaaaaattggccctggcgcaccccccctgcgccgatcgtacatcgtatggggtcggccctggcgcaccccttgtacatgtatgatactcatgtcttttatattgtatagctttcgtaattaaggtctgttgaatttttaaaataccctccaaggaacattcgacgaacattatttccttaaaattcaaaattgtccaataaatcccaagatatttggcattgattgtttttatccacctgtccttatttgtccttaataaagccccccccccccttagtgtattcgccgtcccgtcattgccaaactgatggccccgttgcttttgttggccaatttgctgttggccgcctgtttgggtgccgaacgatggtattgcccggctgaggaccgactgtttccactcccttttcgacggtgccatcaaagaggaggtgttcctgaccaacttcgagcgcgagttggaatgtgtcagtgacgaggacaaagaaggtgagtgacaagggtcaattaggcagggcactaattaacagctaatgaagcgaaaacacaaaccaagagtgcattttctaatcccctattagcaacagcgctttttgctaatcagattaagtaaatcatttattcaaaagtcattaggtgtaattaaattgacgcgacaaatttttcttaaatgttaaattccagtgtattaatttagcaaggatttatttatcaaatgcataatgcttagcttccaatggaacgaattttagtgctttaaaattataaaactttattttaaaaatcatatttatttatttttttctgcatattttccccgtctttaggcaccgatgtgtgggtaagtgtcgtcgtttaccgcaacaataatttttcagagtattaaatttggttaattttattttgtttaaatttgaa

SEQ ID NO: 72691 - DNA, 483 bp, Heterodera glycines
atgacttttggcggaaaatataatggggagagagataacgcaaaagtgagactgtttaatacagccccagtcatacaaaagaatttttgatgaagaagaataaagaagaattaatttaaaagagagtattaaggaaagagattaagacagagagagaacagagaacataatgatgaatctgcgtctcctaccaaaagattcagcgaagaagggaagagaattctcttcccatagcactctctattgaaattattttctctaccctccttcatcaaaaatattttgtatgactgggactgaaactcatttgtcagcagtctctcatttttacattatctctctccgtaaaatttaaactgttcaaataaactttaaaaaattatcgcaatttttatgtagatatttcagggctcgtatcgtccaaagtcggcttccaaggactggtatgccgatttgcaagggcataatggggaaaactcatga

SEQ ID NO: 72692 - DNA, 825 bp, Heterodera glycines
atgggtaggttttaggttctaaaaatgtgaaaataggtgccaaaaagtcccgaatttagggggtgtaaaatcgaaaattttctttaaaaagcaaaaatattatgccaaatcattaatgagatatataatcttaaaaaaaaattctcgtcaaaataaataaattttcgagatgattttttgagaaatttttaatttcttaggatgtattttataaaaattaaggtcgattcttagtggtgtattttttttaattttaggtcgattttagggttgtatttttcgtttttattgcatttttttgataatattttgcgcaaaacgccagaatagaatcaaataggttttacaaaattttttttggtttttaggctctaaaaataaaaatctagaaaataaatgccaataacttgaaaatagcgtaacaacaaccaaaaaaacttgtttttcgtgcgtttcaaaccatagaagctcagaaaaaaaaacagttaaaaacctaaaaatatcatccctagtaataaattggctttcggctctaaaaacccaaaataggcactaaaacctcaaatttagtagtgtaaaataacaaatttatgaaaaataaaacaaaataagccaaaccagtattgaacataattttttaaaatcaaaaatttgtcaagaaaataaataaataaaatttgtagacgaatttttgagaaactttttaggagtgtatattttaagaacagcggttgatttcgacactgagtgatttcaaccgtgtgatttcgacaatgattaaaaaattttcagtaaaattttctaagattttaagcaattttctta

SEQ ID NO: 72693 - DNA, 503 bp, Heterodera glycines
atgggggaggggagggcgtggcctttgttgttttgtttgctcagtcaagccgtgctcgcccacaacacattgtatgtgagtggccaacttgggcttgtgccggggaagtccgaattggtggcgggaggggtcgaaaacgaagcgcgacaggcgatgaccaatttgggtgccattctaagcgctgccggcacatcatttggcaacggttggcacttttagaagccaagagaaaggcacacccgattcagtggtcaaagtcaccattttgctggccaacatcgacgacttccaaacggtcaacggcgtgtacaaatcctttttcagcggggacactttccctgcacggagcacttatcaggtggcagcactgccgaagaacggacgagtcgaaatcgaagcggtggcaatcattgaggacacaaagcattaaaagaaatgaaagtgacgacggaaaaaatgcccaaacccaccccgagtcaaaaatcgagacatgtgtcaataaa

SEQ ID NO: 72694 - DNA, 312 bp, Heterodera glycines
atgctgcataatgggcagtattgctcgccgacaaatacgacgctgaatggagcattcggacggatgatgtcgacgcggaaatgggcaaaacgctggcttttgactctgagcgcagtacgcatccaatcgaggcaatttctataaattgatattatattgtaaatagagaatatttagggtcctattgataacccagatgaacttggagaaatttacgattcgatctcgtacgcaaaatcaaattcaatcattcggatgcgcttcaatcatttgggcgaagcgatttccaaaaggccattcgggattacttga

SEQ ID NO: 72695 - DNA, 635 bp, Heterodera glycines
atgtcaaaagtagagatagaatttttcgaatgtacggtaagagtaagggttgcgagcctctaagtcaatgagtatttttgcccattaaactatttattaattaaaaaagagggtgagaacagcaaaaagtgaatatatataaataaaaacatatattaataatatatatatatatatatatatatataggatagaaaatgtaattatatttagaacatattcaaatggacaaaaatttaatttgaaaagcaatgaaaaatgattagccaaccttggcttatcgtctttatcatttatcacaataatcacttggtcatttctttcttccgttttgaaatggcttcttaaattaaattcagcgagtcgtacacttcgtatttttcttctgcttctgcgtttaccaattttgtgctgctgcgggctatgaatccttgctgagtgttgcgcacaatgcttccgtcccgcgtgtcgcccagcagaaagccgaaaatgcccaattcgacggcgacgtcgccgggcacggccccctccaggggaccgaccaggaaattctgcaacattcggaatttggaagtggcaattttatgaacatatactttgcttttccaattattggtcatttcaacattaattaa

SEQ ID NO: 72696 - DNA, 117 bp, Heterodera glycines
atgtactacaaggaaccactcgcaaaacaaagacaagttacaaatcttgtcgaaacaattctttgccatgttgttgaaaaaatgtcttccattgaagtgagacgagtatgtgaagag

SEQ ID NO: 72697 - DNA, 2361 bp, Heterodera glycines
atggtatatttacctttttgaaaattttcttaagctttttttaatttccgtgtcaaagcggtaaaataattttttttaatgttaatttttaaataatatttttttaatttatacaatttttgcacttgttgcttttttggccaaaaattgctcatcgccaaatgcttgacactcctcctatttatgagaaatttcagaaaaagccatggagcagattatttgaaagaaaaatatttgctaaaatgtggcatgccatcgaaaaaaaaaattaatttggcgcattatttttttaattctaccgagttttggctttttttaaattcaaaattgtctagaaaccgatgtacggctatgtttttctgaaaaagctttaaaatttcgaattaatttatttattaattcctctttttacagttccgcgtgtgtgccgaaaatgcgtttggccgttccgacccattgaacaccgacgtggaccggcccggcctcccagagggcccgatcacttatccggccacaacaaagtgagaaattttcaaaaatataaaatattttaaaaattttgcaccgaattttggaatggtgccaaaaaaatcggtgccaaattttgcattgcactaatttttttttaatttgactcaaatttaaaaaaaatttcagtgcatctttcttctctttttgatggtgacacaaatttaaaaacatagcaaacgaaaatattgacaattcaattttttccattaaataaaacggaaattgggtcagtggaaaatgcgtcagtgaatcagtatttctttaaattgagatacggtagtaatattactgaattataacttatttttaggaatttgtgaaagttttaattattttgacttttaaaaaattaattgaaaaattcagaacaaaaatattagaaaaattttgaccttttgtaatacaatacttaatgctacagtaactttattataaaaatactgtattactggcaccttttccactgacgcattttccaggagccaaaaatattactattaaattaattttcatttaaatatggcacaaaaattttcagcaaagaagtgtctgtgcaggggccaagtgttgtgccgttgaaatcgcagcgtgccaacgaaaaggaaaaggacgccatgcaaacccgaactcctaaaacggcacaaccttcgtctgcgcatggcatcggaccatccttgggtaagaaatgagtttggatggaaaatcttagataaaaggctttctttaccagttcggcatttagttcaaaaacgattatctgcttgtctctttttcaattttaatttaaaccgtttcattttttataatttttaattagttcaaaaaacagttaaacattttccacggacatttttaatttttaatttaatgataatttaattttaaaatatttgtactttaattatattatttcttcactaaaaaaggaaaataaaatttacttttttatcaaattaatattttcatttatttaaatatatattttttaaattatgtatatatttataatattaaatttatattaattttttaattttttaaaaataattatttcaaactaaagaaaataaattattgttttttttcaaattaaataattatatttcacataattttatatagaatatttttattaaaataatgcattttgtttcagactcatcagaccaaccattgtcctccaccgcccgtcgtcgccagccgcgcagacagaaaagtgccagaaaggatgccactgacatgcagtggttggtttaacaaaaaataataatttaaaaaataataaatttaattcatttattttttagttgtagcaagaatttaccgccacgccacaaaaacacggtgagcaaattcggattttttaaattatttattgggaattttgagaaaaattatttttttaaatttttataatgaactggaaaaaattttttttttaatgatgcatatttttgaatttttataaaatatttacaaatatttttttttgattttttttcaatgattcctcttctgttgatcatgtttccgctaaagcatcaatattcaaaatttttttctaaaattgatcttttttctttgtaaaatttttgctttaaattgtccccataatctaaacaaaacttttaaatatttaatgttttaaaaaatcatgaacaggagcggaccgcgtccggtggcggaaggcaacgcgttggcagcaccgcggcggaccggccggcacaggcggcagcagcggcttacgctggggacgaagaggcaccgaacgaggaggaagtggccgacagtgagggggagcagcagctgctcgacatgacgacggttgag

SEQ ID NO: 72698 - DNA, 1670 bp, Heterodera glycines
gacgacaacccaaaagatgacatcaacggagtgatcactggcgatctgctgattgtcatggcgcaaatcattgttgccatccaaatggtacggattttttgaataaatattttttcttagggggctcgacagcttgaaaaaaaattcctggtcctatccttgacttggggactaactaagacatggactttatttgacaaaaaagaatcacggtccataaaaaaaaccctggaggtagtctcaatttgtacataatcaagtcgatgaattttcattttttttttgcattcatttatacccaaaattctattaatttcagtgttttcacacttatattaacttttttatgtttttcaatttgtaataggcttaagaaaaattagtttgacgactccggctataattcgacatttttaaaataatttttttttctggggtttgaccaaaaaaagcaaaaaaaaaaagataatttattttattccaaattcctaggtttgggagcagaaatatctgatgcaatacgacgtgcctccactgctcgcggtcggactggagggtgggttttgcaattaaaatttttgaaatttcatttttttgttcatcaacaggcctttttggtatgattgtgctcggctctctgatggtgccaatgtattacatccgcgtgccggccaccttttccagagacccagaacatcgtaaaaaccgacaaaaaaattttccgaaatttaaaaaaaaaattttccaaggcctcgaagacgtcttccacgcatttgcccaaatccatcagaggccgatcattttggcaccacttttcctgacaattacgaggtggtgtggcttggttcacagcttgtctttgtgtttaccctgttttgagtgctttaaatttctttttccaagcctgcaaaatttcgaaaatttacattttgtttttcaaaaaagtggccacaaattttcataaacctgctttccctactgattgcgaacatttttgccatctttttgaaatttcgagagatgtcaaatgatttcgaattcgttcaattacacccagcataaattctaatatatatatataatattatatttactttccacagtattgcgttcttcaactttgccggtgttacggtcaccaaacgcctttcggccaccacgcgaatggcgcgttttttttataattaattttagagggcgggacataatttcgccaccgatatattttgccggtcgaaatttcgccgccgtattttttcttgaaatttatgatgaattagtaagttttttcaaatttttttaaaaaattgctaaaaaatttaattttcatataaaaaaattcttaggcgaaattatgtcccggcgaaatttgggatgcatccttaattttattcatccatttttgtttaatcaaatttggcttatctcgtcgcctattattgcaacaggtgcttgacagtgtgcgaacattgctcatttgggccttttccatcccattctttggcgagcggttcatccctctccaggtgtgctaattgtttcggaattttctggtgaatttgttgatgattaattttgggttaggcactgtcaatcttggagccaccaggaaataaaaataaaatttcgataatttttttgaaaattactgctccctgttccaactcccc

SEQ ID NO: 72699 - DNA, 954 bp, Heterodera glycines
atggaaaacgcaaagatttcccttttataccaactcgaacaacggaaagtttcgaagttggagagagaaaacagagcattacgggaacgaatcaacggccttttggaaaagcaagacgatgagagaattgaacttttggtagctgacagaacacgggtactaaatatatacaacgaaaattactttaagtactttattttttagcgaaaactcgtccaactccgcgcaataactgaacggaccataaaatccttggaatcaggaatcaacgaatttagagcttttgtaaccgacataaatgaagcgtatgtttattttagttttaacaaaggattgtcgggaagaagtcagctcaaatcgacaaatttgttaagaatggatgaagaagagaataaaggagcgattcaaccgttgaaactcgtcgacattagcaatgaaagcgaccgcattcttcgcaatttctctcctaagcttaagcgaagtctgttttaagcttttgttacttgtgattccattctattctttttttctgtaactaattcagttcccgaatctccgatggttttgtcggcaatttcgacttccaaaagcggctcaaattcgcaatcagagtcattccgtacgggtttggaagaagaggaggaggaaagggcaaacggaatggaagaagttgttaacgaaacgcctcacttggacatgatggagacgagtgggacagggacggaagttgagaacgcgtcgaattccaaagggaagatcgaacagaggaagtcggccatcgcaccaatctgctcaatcactttgcgtcaacgatcgtccgcaatgaaatttgcaccctccgaaatgaagcggactcacagtgggcactatcacataaaagctgggaaaaaacaagagatcgacctgggaaacctgggtttcatggataatattttgacttgttatttcgagtga

SEQ ID NO: 72700 - DNA, 696 bp, Heterodera glycines
atgcaaaagaacgcacctgaaccggaaaagctgacctcaaagcctatcgggacgcttaatgagactaaaaaaatggaagagacaaatgcgacaaaagcgggaaatcggagccaggaaccgttcatgaagcctactacgattgtcggtgaccattctaacgagacagaacatacgcaaaagccaattttgacctatacgccggaaccaagccctgaagacactgatgagccagaagagtcggacaaaacggaacagccaacgaccaaaaactccacttcagagccgatcgaaaattctacgacttccaccgatcgccatgatgagaccgaaacgtataagccaattgtgaccgaaacgactaaaatgccgagttccaaaccgatcgaaaagcttacaactaccaccgatgactatgatgttgagacgagtgaaagcaccaccgaaaaaaaggagaagatccgcagcggcaaaccgaccaaaagtaccagaaaaacgactaaaagcaccaagtcagtcacggctcatagcactgaaactctgaccaataccacaacggcatcggcaatgccggataatggcaccaccactgaaccgagtgaagggacggcactgccccccgagcaaagcactgcggcaaaatttattttcggctttgaatttggacgtattttttttaaatatttgaaagttggttaa

SEQ ID NO: 72701 - DNA, 725 bp, Heterodera glycines
atgcgcatcctcggcattggcattggcgtggatgagaaatgtgccgatgccacccatgcacagaagagacttcatgcgggtaatataaatggatgaaacaaagtgggagaagggagggatttggtatttccaccaaattaattttggattttgtcggatttatttggcttattttcacttttcaaattatttcgactatatttatttattttttatctcagtttgcctttttcagatggattggttggtcttcgctgcagacaatttgataacggcgcttccgcaggcgccgtgccgctgcgttcctcgctgaccgggcgcagtacgctcgccgttaatccctcgcataaagcgggtgccgttgtgccggtcgatcagtcagtcgttgctgtgccatcgtatgacgacgacgatgacgtaacacatcaattatcattaacagttgattgcataattaacatttatttaaggcattcttctcatgaatatgggaataaagaaacaacacacaaaaattgcgggtgatttgttatttatgccattttaattttgaaatttgttttttctgatgtaaaacagtttttcttgaaaaaagcaataatattccaaatcattccaaatggtaattttgatcaatttgtgcgtaatcgatgagcactttgaaagtctttgaaggaacaaatttggttctggaatattcccgcaagtcattaacaaatacacaa

SEQ ID NO: 72702 - DNA, 823 bp, Heterodera glycines; identical to SEQ ID NO: 45404

SEQ ID NO: 72703 - DNA, 49 bp, Heterodera glycines; identical to SEQ ID NO: 60106

SEQ ID NO: 72704 - DNA, 471 bp, Heterodera glycines
atgacacttcggccggaatttttggtaattttttgttaatttcttataatttgcattattgaattggcaaaaaaaaaactatttaattttgaaataatttaaaaattatatttaacttattattttcaaataaaaaaatatatataatataaaattctttaatgaaaaattaattaataattatatcatgaacattaaaaaatatatttatcaaaaatattctttaaataatttattttattatttaaataattttatttgtttttactttttcttttagctgagagttcttccaagatcaaaatccatgatggcgatgaaattccgatcactgaagaccctcctgaagcagtacagctaccaaagcaacatgatacgtttggcaatgatcaacagctgaaaaatgcgcaaatccgtgacgatgaccaattcccggatggacgaaatgccaaagtgatgacaaaaaataaa

SEQ ID NO: 72705 - DNA, 992 bp, Heterodera glycines
atgcttgctggtaggaaactaagttgaagtgttttctaattttaaaaaaaaattccaggcctctacctatacttggaagagctgcagaaattggcaacttttcagtaccaactttttccagttcagtccccgttgaataactcattaggctttgacctgagcgcagggtggccagcagacttattgtagagctttggaagctcgattttctgaaatttaaaaatttcgaaaattttaaaaatttttcgagctaggcctaaaaaacggttttttggtttttgaattttaagaatttttaacgatttttcccagaaaaacgaagaccacttccaaaacatagtttttcgagctctatcgactggtatttttttcagaaaaatttcgattttttcccggaaatagaaaaaaattttggcctgagcgggacatttgagtcccgggcccataactcgtcaggagttggttttagccaaaaatgacctcagagcaaaattgtagagctttttaagctctatcgaatggtgtactacatgtttggaaattttcaaaaattttcgagctaggccccctagaaattttcgaaaattttttttgggttgaaaatgggggtcaaaaatatttttctggggttttttggggtgctgagcacgaatatgatgtttgtttttcgtttcatgatttttggaattttttaaaaattctttattttttggcaattttttggccctcgggattttgggcgaatatttgaaaattcataactcaatggaggactggtcaatttaaatgaattaaagctttaaaaatagagaaaaataaggagaattttatggggtttatttggttttataatgttcaaaagaaaaaaagttattccagaatttctggaaattttcgatttttcagaaaaaattcataactcggttctgtaaaggtgtttttgaaattttaaatacttaaaaaatccgcaattttttgctctattaaataaa

SEQ ID NO: 72706 - DNA, 829 bp, Heterodera glycines
taattaaatccattccttcgggggaccgtgccgggtgccgcggggtaagcagtgctggttcgtttcatcacggcaccgaaccttttggctagtcagcaatcgttgcttaacttgccagatcggacgggtgcgcatgattccactgttccaagcaccccaccaaagcaaaacgatataaccaaaatataaaggaaaaattaaaacaaaaatttttctccatcttcctttttgatactaaagcatcagagtgctaaaattaagttgtaaataaaatttggtgagctttagagcactttctgaaaaaaatatttatgaaacaaaaaaatcgattttttcaagtgtccgtttggggtactcaaacaattatggggagcaaaaatccaacgcagaattaaagtacaggctatagggaagctactcccgaaggattcggtctccccataaatctgggcgcatcggttcggggggactgccccgaaaacaaaaaaatcgattttttcaagtgtccgtttggggtactcaaacaattatggggagcaaaaatccaacgcagaattaaagtactggctatagggaagctattcccgaaggattcggtctccccataaatctgggcgcatcggttcggggggactgccccgaaaacaaaaaaatcgattttttcaagtgtccgtttggggtactcaaacaattatggggagcaaaaatccaacgcagaattaaagtacagactatagggaagctattcccgaaggattcggtctccccataaatctgggcgcatcggttcggggggactgccccgaaaacaaaaaaaatcgattttttt

SEQ ID NO: 72707 - DNA, 1079 bp, Heterodera glycines
atggaccttaacaatggtttttacgacagagaagaggacaaagtgaaattgaccatcgatctcacaactgttgatgaaccaaaagtggacaaattcaatttggatcaaagcaattcgaaaggcacactctttatggaaattgaaaaagtgtcggaatttgcgcgagaaataattggaagtgaacgtaaaagcgaaactgtgcacatcaaaggattgccatggaaaatatgggcaggaatagaaaagaaaaatgaaagcactgagaaaaatgagaaatggatgggctttttacttttgtgcgatgctccaaaagaaggtgtaaaattactaataattaatatatatattaacaacaattaattaattgatattgagcagaaaattggagccgcaaatgttcggcaaactttcgaattgtttcgcaaaagaacggagtgccggattttaaattagaattaaatgaccatgtttttgacaacaaagagaacaactggggattcaatttcatttcatttgctgtgagtgacaattaaacattcccttaattgaccaattatggggtaattaaggaactgatggacccaagcaaaggcttttacgaccaaagcgaggacaaagtgacattggccattgatgtcacagtgaaagaagcaaaacggaagacgaaacataaatgcccaatatgatttggggaaaaatgccattgaatatcctccatcctatgatgaacctgtttttttatttattaatttttcttgattatactttcaaaactgctgatatatgaattaattaattgtcggagctgttttagcagactctcatttttgagtaccgaatttcaatgataaacattttagtcataaacccaattcaaattttaccattttaggtcaatgtttacaattttttggacttggatttattgcattaattttgttaggatttacgtaaacatttttttaaactttttttttaaattgaaaccattcctaattgactgatcattttttccttttatttaagcagaattttttgggaccagaaatttgggaaccgggaagtttgggcttattaaa

SEQ ID NO: 72708 - DNA, 537 bp, Heterodera glycines
atgccattttcgactaatggacggatttctgatcgaaaaaagggcacacttttgatggacattgaaaaagtgtcggaatttgcacgagaggaggttgggagcagtcggtacagcgaaaaagtgtacataaatggacttccatggaaaattgaagcagaactaaatggactcgttgacagtgagaaatggttgagcatttatctattgtgtgatgctactgaaaaaggtgcaaattaactgttattaaatgctaattaacaacgatgagtaataatcattaagattcgctttggcgctgctgcgttcgttcggcaacttttcgaattatctcgcaaaaaattgggacggagaattcgattgggacattttgtgatcatgtttttgacaaaaaatcaaataatttgggattccctaatttcgtttcgtttgcggtaagtgccaattcaaacaaatattttaatttgacattcgtggaccagccaatattgaagttcatttatttatttgcctggtgtaaagaaatcataacaaaataaa

SEQ ID NO: 72709 - DNA, 1349 bp, Heterodera glycines
atgtcaatggatcggatgaagcatttgttgagcacgggtgagcattcggatgtgcactttttggtgggggacggagacgcaaaagaggcgagtttaattaaaaataaaaatttaattttatttttcaattgcaatttcattaattatccacgttttttaaaggttttgccagcacatcagcttattttgaagagcgtttccgatgtttttgaggcaatgttccgttttgacgccattaattactgctgtctgattgtgagaccgaaaaacccttgactttagactttttttttgtaaaatatgttcctcaaaaaatgaatgtttttttaagtttgtcaaaagccaaacaatcattagagggcttaaagaaatctcggtcttctaaactcgaaaacctagacaagaaaaactcgattcttttctcgctttggcactctcagagaaagactacattttaaagattatttttcctttgaattttagaattttgccaattgttgtttggcttacattggcaaaaatgcggacactttgctcaaatcggatgcttttttgcaaattgaccaaaaattgttgtgcgaaattttggagtgtgacgaattgcaaatccgtggagaaatttcaatttggaatgcggtaattttaacaattaaatttaaaaactaaattttattagtcatttaattatttccattaaatttttttaaaggcactccgttgggccgatgaaaaatgccgtgaaaatggcattgattgttcagcagagaatcgccgtcaaatgcttggcccggcactgttcaaaattcgctttccgcttttgtcaaatgaggaatttacgaagaaaattggtaaaaaataagtcaaaatttcaaactcgttctctgatgagatgccgtaaaaaattcatatttttgtggcgatttttaaaaatgttttttaaaatttatttttcaataagttaatacatatttacagttcccttcggtgttttgtcaaaagatgaagtgatcagcgtttatcagttcaaatcccttccaaattgtcatgggatttccgacggaattttcccaatgcaatttccgactaatggacggatttccgatcgaaaaaagggcacagttttgatggacattaaaaaagtgtcggaatttgcacgagaggaggttgagagcagtcggtacagcgaaaaagtgtacataaatggattaccatggaatatattggcaaaaataaaaacgaaaaatggaggcactgacaatgagaaatggttgggcattttcatttgttgcgatacttcgaaaaaaggtgcaaaattactaatagttaatatatatattaacaacaattaa

SEQ ID NO: 72710 - DNA, 522 bp, Heterodera glycines
atgagcgctaaaattatcagagtgccgaaaatcgcatgtgatctaagcctagcaaaaaatggtgtaagtaaaaatcgtaattacgctcaaaaagcttctcaaacaattttagcgcatccaattccttctacaatcgcctttatacatcccattatgaacgctaaaattatcagagtgccgaaaatcgcatgtgatctaagcctagcaaaaaatggtgtaagtaaaaatcgtaattacgctcaaaaagctcctcaaacaattttagcgcttccaattccttctacaatcgcctttatacatcccattatgagcgctaaaattatcagagtgccgaaaatcgcatgtcatctaagcctagcaaaaaatggtgtaagtaaaaatcgtaattacgctcaaaaagctcctcaaacaattttagcgcttccaattccttctacaatcgcctttatacatcccattatgagcgctaaaattatcagagtgcagaaaatcgcatgtcatctaagcctagcaaaaaatggt

SEQ ID NO: 72711 - DNA, 762 bp, Heterodera glycines
taattaaatccattccttcggggaccgtgccgggtgccgcggggtaagcagtgctggttcgtttcatcacggcaccgaaccttttggctagtcagcaatcgttgcttaacttgccagatcggacgggtgcgcatgattccactgttccaagcaccccaccaaaagcaaaacgatataaccaaatataaggaaaaatttttttaaaaattttttctccatcttcctttttgatactaaagcatcagagtgctaaaattaagttgttaataaaatttggtgcgctttagagctctttctgaaaaaaatatttatgaaacaaaaaaatcgattttttcaagtgtccgtttagggtactcaaacaattatggggagcaaaaatccaacgcagaattaaagtacaggctatagggaagctattcccgaaggattcggtctccccataaatctgggcgcatcggttcggggggactgccccgaaaacaaaaaaatcgattttttcaagtgtccgtttggtgtactcaaacaattatggggagcaaaaatccaacgcagaattaaagtacaggctatagggaagctactcccgaaggattcggtctccccataaatctgggcgcatcggttcggggggactgccccgaaaacaaaaaaatcgattttttcaagtgtccgtttggggtactcaaacaattatggggagcataaatccaacgcagaattaaagtacaggctatagggaagctattcctgaaggattcggtc

SEQ ID NO: 72712 - DNA, 650 bp, Heterodera glycines
atggacgcgatcagtgaggaggaactgatggcacagaatgccgtggaaattgccaggtgggggcgtcatggcaaaattatttgatgcggatctcggcttttatagcccgaaaatcattccatagaaatctatttttcggcatttgttatgctcctaaatgaatgacggcgtccttatttgcattttgtacaatttggcccatatttagggcactattttgggatttttttccgattaaaaaattaaatagccttttctttgcatataatttttaaaaaaatctaaattttgaatttaaaaaaataaatcaaaatcttttaaacaaagaatatcaaactactccaattttttaaaaataatgtaaaaaaatgaaaaaaaggagatgaaaatttcaagacttttggatttttttttgataattaataataatttggccagaaaaaatggatcaaaatttgtaattgcctaatttggaatccatttgatcgttcgtgtccagagagttgcaagcaatccgtggcctcaccgactcgtccgattctggtgtacatcttcaacagcaacaacagcacgagttgcaactccgtcatcgccgtccgttcccagcccaacaacaaattcatccaaacggtgcaaatggagggatttaa

SEQ ID NO: 72713 - DNA, 162 bp, Heterodera glycines
cgcgtttgttaaaactgccaatgggtttgaaaacaaaaaatgggtaaaataattaaattaatagcttggctcaaattcaaccaaattaatatttcgtggtatcattcaatagctttaattgttctctttcagaatataattttcctaaatttttaacttaag

SEQ ID NO: 72714 - DNA, 163 bp, Heterodera glycines
cttaagttaaaaatataagaaaattatattctgaaagagaacaattaaagctattgaatgataccacgaaatattaatttggttgaatttgagccaggctattaatttaattattttacccattttttgttttcaaacccattggcagttttaacaaacgcgc

SEQ ID NO: 72715 - DNA, 269 bp, Heterodera glycines
gcatccgtttgacaaatacaaaaagaaatttgaagaacgggaggtgagtttgaagaagcaatagaagttgtagataaatttttgaaatgtatttatagtcacataaggaggatagcacgccacaacgggaggagagcttcacagtgccaaaggtggaggtggaacagcccaaagttgaggaggaagaggcggcagcggaagaggaggtggaagaagaggaagtggaagaggaggaggaagacgaagaggaggaagaggaggaagagtga

SEQ ID NO: 72716 - DNA, 199 bp, Heterodera glycines
atggaccagaaagagactctaactgctgaacagttgcagaaagtgctgttggatgctgagaaaagcggagaatattcatatgaagaacttcttccaatttgggaggaggcgaagggaatgattgaaaacgaagagcaaatggtttcactgtacacaacgtttatttatatgtcgaggcgcttcgccgaaagggaaaaaa

SEQ ID NO: 72717 - DNA, 1575 bp, Heterodera glycines
atgcattttcagcgatatgaaattttctctgttactcgcaaaaggccaattccatttaaaccgtaagcaaattccttttcgacttaattttgtttaaaaagtgtccaaaatttagcccacaagtggttcagaggcatgtggcagaagggctattcgtggccatcgttttccagcgaaaattggttcgttgtccatggagagcagaattaaagataaacaaaacgggcggtttgcgataacgttaaaactgatcattgttggcttaagcaaactatcacctgtaatttttttttttttgagtggagcccagcttctccaatattactaaacgtttaacaaaaccatggagtttttctatgatttttttcttgttaatgcattgtcttggtgattgtcccattgtgctttcagcaccggatgtccgcctccgattgtgacggatcatgccgttaatcaacttcgtaacatatggacgcgcaaattgaacattcttaagtggatggccaattcagacaataccttggtttgacaccgcaaaaaataaagcaaccaaccgaaaaatttcaaaataaatttgtaattttagaaaaatgcttcttcaagagatgctgatattttgtcatacgagcagttcgacttgttcgttgcggacttagatgaaagtgatttgttcaatgtgactattttttaaatttttttcatttgcttttttaccttctctactcagatggcaagagactaccagattggcaatcatcaccttagcgcaggcatgtttccaaaatcgccattcacccctccgccgcgcggaaaaataatcctaccgaatcaacggttcatgatctctcttccctgtcgccgagtgccagacggtgaaattctccatgtctggtttttagtggatattggtaagcacccatttgttatcaacatgtcttcataaaactgcaggatcaccttacaccgctgtgtcatgtacaacactgtctgctctttacggcaacagatcggaacccgtggaccacttttttctgaatatcttggtatttttatgtttatttaactaaaaaacataattgaactatgtttacatatttacccgaaatggccgcaaatcaactatttttagcaattcactatttaaaaattttgtcatgcaattttttacaagatctttttcaaatttgtacgcagtttagctcttctttaaaacatgaaatattttggtgtgttttaaggacccacacattaatattggatgtcaaatatcgagaggacatttttccgatcttaatttgttggggacaaacactctggaagcacttcaactcacacccgtcgctgactggggcaataagacttttgtcttagacaaaatgtaattttttttttgataattaaatcgaaaatgacatttttagtaagctatcaatttttgggcgtttttatgttgttggatgatgtacgaggaaaagaagattatttaattttgttttggcgattttggcatttcgttaaaaaaataatttttaaacaattttcatcttaaaaaatatatatttttatctctataaa

SEQ ID NO: 72718 - DNA, 272 bp, Heterodera glycines
tgtcactctcacagatggaatcagctcgtacattgtcacagtgtttgagtgaaatggcgcgacacgcgaacaatgaaacggaaccacaacgaaatgtcattaaaaggaaaaccagctgttcgtctggtgatctacaacagaatcagccaagctttgcgtcagaacaaatggatgacaatgacacggcctaacacaactttcatggatcatttgatctattgttaattcgttccttctccgttgcgaatttgagcaattcgaatttctaatct

SEQ ID NO: 72719 - DNA, 3662 bp, Heterodera glycines
ctaatcattcacaacatttacattccaccaaacagcagctgcaacaactcaaaaccaaacatcaacgggttcctctccggcaaccaggacacactcatcgttggcgatttcaatgcccaccacactacttgggacgcaatatcccccgaagacgagcgcggcgtcgacttcgcagaatccatcgaccaacacccatttgtcattctaaatgacgaagacactccaacccgtgtggccccccgcggcaattccactattctgtcatccccggacatttccctcatcagcgactcgctcgccacttcaacaacctggaaaacaacggcagctcttggtagtgaccatctaccgatcaccatttccatccaaggccaaatctaatggagtcacaccccacgtcgcactttcatcaatttctcaaaagcaaattggaacaactttgctgacgaagtcgactcactcctaaagaccctccctaaaccaacgaacattgtccatggcgaacgacgcctccgctcggcaatcctgactgcacctgcccatcacatcccggccggtcgcataccgaaaattcgtccctccttccccagcgacatggtccacttggcaaatgaacgcgaccatctccaactcactgatcccgccaaccacagaattcacgatttgacaaacactatcacaaagcgtgtctgccaatttcgccgtgaaaaatggctagaacacctcaaacgttgtcctcgcaatagcagacaattatggaaaacaataaaaagcctcaacaacaacaccaaagaacaaaacattccccttcattttaacaatcttccatgttatgacaactcaaaggcggcctccctcctaaatgccgcattccatccccgcccttctggccgaccttcaaaagtcaaccgacaagcaaatcgacacatcgacaaagccatgcgtaattccgcagaatttgcttcatggacggccaccacagtccagttggccataagtaacaccaaaaactctaccgccttaggtcccgacaacatatcctcatcccacattcgtcacctcggacctgtcgccgtcaaatacatggccgacctcttcaatctcaccatcacatcaggcatcattccacaactatggaaaaatgcccgtgtcattcccattccaaaacctggcaaagacacaaccaacccgtcaaactaccggcccatctcccttctatcaccagtggcgaaggttctcgaaagactccttcttccccacctcaacgcacacctcccaccccccgccaaccaacatggcttccgtcgcggtttctctacagtcactgccctccattcaatccacaaatacatcacagacggactcaaccgacaagcaccagttgaacgatcggtcgcggtctcccttgacctctcaaaggcctttgacaccgtagaccaccgcctcctcatccacgacatctcaaacacaacacttccccctatcatcaaaagatggatccgcaactaccttggtggccgccaagctcaagtcgttttccgaggcaaaacctcctcccatcgcaccatccgcatgggtgtcccacaaggcagcgtcctctcacctgccttatttaacttctacaccgccacaatccccattcctccaccaggaattcacatcgtcacctacgctgacgacatcaccattctggcccgcgcaacctcaatcgcaatcgccagcgataaaatcaacgccttcctcccaacaagatccgcgtattcacaccattgacggccctatcccattcctgtgcaacccaaaactcctcggaattaccttcgacccactcctcacattcaatgcccattccgtggaacttcgatcaaaaatccaaaaacgcaacaacatcctccgggctttggcaggaacaacctggggacaatcaaaagaagtactcttgaccacctacaaagccatcgctcgcagtcttctcaattatgcagcaccgatttggtccccccaactggccgactcaaattggtccatcctccagagatgccagaactccgcccttcgcacaattacaggatgcgtttccatctcctctgccgaccacctccacgcggaaacatccatactccctgtaaaggaccacaacttcctcctctcccgccaattccttctggccactcggcaacctggtcacccctcctacacatccggcgaggagaaagtggtcacaactttttaaaaccgtcaacccaaaagtcaattttggtttaaatgtttattttatagagataaaaatatatattttttaagatgaaaattgtttaaaaattatttttttaacgaaatgccaaaatcgccaaaacaaaattaaataatcttcttttcctcgtacatcatccaacaacataaaaacgcccaaaaattgatagcttactaaaaatgtcattttcgatttaattatcaaaaaaaaaattacattttgtctaagacaaaagtcttattgccccagtcagcgacgggtgtgagttgaagtgcttccagagtgtttgtccccaacaaattaagatcggaaaaatgtcctctcgatatttgacatccaatattaatgtgtgggtccttaaaacacaccaaaatatttcatgttttaaagaagagctaaactgcgtacaaatttgaaaaagatcttgtaaaaaattgcatgacaaaatttttaaatagtgaattgctaaaaatagttgatttgcggccatttcgggtaaatatgtaaacatagttcaattatgttttttagttaaataaacataaaaataccaagatattcagaaaaaagtggtccacgggttccgatctgttgccgtaaagagcagacagtgttgtacatgacacagcggtgtaaggtgatcctgcagttttatgaagacatgttgataacaaatgggtgcttaccaatatccactaaaaaccagacatggagaatttcaccgtctggcactcggcgacagggaagagagatcatgaaccgttgattcggtaggattatttttccgcgcggcggaggggtgaatggcgattttggaaacatgcctgcgctaaggtgatgattgccaatctggtagtctcttgccatctgagtagagaaggtaaaaaagcaaatgaaaaaaatttaaaaaatagtcacattgaacaaatcactttcatctaagtccgcaacgaacaagtcgaactgctcgtatgacaaaatatcagcatctcttgaagaagcatttttctaaaattacaaatttattttgaaatttttcggttggttgctttattttttgcggtgtcaaaccaaggtattgtctgaattggccatccacttaagaatgttcaatttgcgcgtccatatgttacgaagttgattaacggcatgatccgtcacaatcggaggcggacatccggtgctgaaagcacaatgggacaatcaccaagacaatgcattaacaagaaaaaaatcatagaaaaactccatggttttgttaaacgtttagtaatattggagaagctgggctccactcaaaaaaaaaaaaattacaggtgatagtttgcttaagccaacaatgatcagttttaacgttatcgcaaaccgcccgttttgtttatctttaattctgctctccatggacaac

SEQ ID NO: 72720 - DNA, 319 bp, Heterodera glycines
gcatcctgtaattgtgcgaagggcggagttctggcatctctggaggatggaccaatttgagtcggccagttggggggaccaaatcggtgctgcataattgagaagactgcgagcgatggctttgtaggtggtcaagagtacttcttttgattgtccccaggttgttcctgccaaagcccggaggatgttgttgcgtttttggatttttgatcgaagttccacggaatgggcattgaatgtgaggagtgggtcgaaggtaattccgaggagttttgggttgcacaggaatgggatagggccgtcaatggtgtgaatacgc

SEQ ID NO: 72721 - DNA, 145 bp, Heterodera glycines
gatcagtgagttggagatggtcgcgttcatttgccaagtggaccatgtcgctggggaaggagggacgaattttcggtatgcgaccggccgggatgtgatgggcaggtgcagtcaggattgccgagcggaggcgtcgttcgccatg

SEQ ID NO: 72722 - DNA, 3423 bp, Heterodera glycines
gtgtcacttggtccagcgttgactgttcctcgtcctcctccccatttcgcccttttctttgtccatttttgccacttttctgtcctcctccactgtgtgccattctctcttcggttaatgttttggcagacagaacttcgaccagttcgtcgtcctccgcttgtggcgattgcctccgtgacgtaatgacaatgcgccgctcctccgccaacgaatgattacatttgttgctggttgcacagctacaaccgatttgtccaaaaattaatacctaattatagaatctcaatatttttgttgttattgcttttctcaccactttttttgcggcttccgccgttgtgcaaaagtgagaagtgcgccttcggtgtccgcactataaacatcaatgccacttctgaaatcggaaccgatccaaatgtcatctttgtgaacactcccacctcatggccaatattcgcgccactttccgtccattcacttccccaacactcatttcagtggaatttgtcgagttcgctgttgttgaaatcgaactttctttgccattgtaaattgaagcggcactgacactttcaacaagattttcatcctccttttcaatgccttccacttttaaattggcaaaatccatgtcactttcgacttggaccgatcggtcaacaaatttgcaatatttttcctttccaagcgaaaaggcatcgatgaattggaattcgagtacattcttccgcgtcgtattggcaacatcggttttctaattttgtattttatgtattaattaattatttgctaattctcttttaccattttatcaatgttcagttcgtttgctttctgctctttcaaactgatcacttcaatcgattcagcgcattcattcaatgctttttctttaccattcgaatttggcatttctgaaggaaacctaattttataatttataataatgaggtttttgcctttttctttttccaatttatcgtcagactttttttttggttgtttttccaaaatcgaaagcagagtaaaaggttttggttcactgccaatttgtccacttaaaacgcaactaagctcctcctgaattactgtaaatatcataaattgagaaatgcttaattttttatttattataccttcaattgagcatgaagttgtctaaaagcttttacaattggaaacagcaacgtatcattatcagtttgagagtctgttagcaattggtcatcgtccaacaaaacgttaatcaaagctggatccaaattggaacataaatttgtaatacatcggcgaatgctttgttcatcactcatttgtgtacggcggatttggacttaaagctcaaacagagggaaaaggaatgcggtaattgtcagtttttaattttgggttggtgccagacgtacaaaataatttcaattttaaatttaatcaataaattattgtggcattttgtctgtctttaagctttttcgtgctccgtacgtcgtccgcagtttttttacatattcagtttcatttgcgtagcttgttctttaacttagctttcgtgagtacttttactgtttaatcgatcgtaattgtctctctgaattacctaattcttttcttcattttctttgttacaagaattttttttttcatatttaagttttttttattaccgtaccccccttttaactattattgtattgtaatttctgttgtcctgccctaatatggcaatgatggctgaggcaaatggagagaccccactgttgaatggtggtgacctaatggactcgaattcaagccaagaagggtcctccattggcacgggcaccgaaaacggagtatttttccataagatttttgagtcacgaatttttattgtattttttagttgtccaattcctcatctgaagctgctgttattaacaatgagcaccagcaaaatggtgggaacaatgttcctgcaccaaaaggaggacaaagtgaggggaccgacttggacaatgttccatggggcgaacggatacgcgacaccacggggaaacggtaacgaacattttgagcgcttttttatatattaaaagaattgcctttttatggtaacatcacttgaaaacaaaccaatttaagaaaagaagaaaccagcaatgagaagaaaaaggagaaaaaagctgaggaagttatgccgaaaaagtcaaaggagtcgacctcaaaaagtcgaaaaaagaacgaaagcagcggagaggaagaagactttgacgacgactccgacggggaagaggaggaatatcagccaaaggtaaggcgaagagaaggaaaacggatgaaaaaggatgacatacttcagaaaaagaaacaaaagtcggacccatccccggcgaagaaaagcgacagcaaaaagtcaacgaaaacaacaaaagttactaaggtggaggtcaaggaagagagcggcgctggggttgagcacaagaaacggaagacaacgaaagttgaagtgaaggaagaggtcagtcggaagaagaagcgaagggaaacaatgggagggaagggacactcaaaagtagagaaaaagcattctaatttccctggaatattatttgtttaaccctggtatttttggacatttccagccctcctcttcccagggaagtccgtccaagaaacgtgtgaagaaacaggaggaagaagaggaagtgtggcgctggtgggaggaggacgagtcgaacgcgggcgcctccgatgggtccatcaaatggcaaacgcttgtccacaaagggcccgtctttgcaccggcctatgtgccattgccaaaacacatcaagttcaaatacgacggaaaggtatggtggaattacaacttaaaaccaaaatttgatatgggagttttttaaggagatggatttgtctttgccggccgaagaagtggcttccttttacgcgaaaatgctcgaccacgactacacgtcaaaaccggtgttcaaccagaactttttcaaggattgggtcaaagtgatgacaaaggcggagcgaggcgaaattaaagatttggccaaatgcgattttaggtaaacaaaaaaaaaataaaaagacgagagattttgtaactttacatccattgaaaggcaaatgcacgctttttacgtgtcggagtcggagaagcgcaaagcgcgcagcaaagaggagaaaaaggcggagaaagaggagaaggaaggcgagggaaaggtgtacgggttcgccatgttggacggatacaaacagaaaattggcaacttccgaatagaaccgccgggactattcagggggagaggtaatttgagtgaaataagagaacgaagaggaaagcgagacttgttgatgaacaggtgaccatccaaagatgggttctctgaagaaacgggtcccagccggaggatgtgggtcatcaactgc

SEQ ID NO: 72723 - DNA, 995 bp, Heterodera glycines
atgccaaattcgaatggtaaagaaaaagcattgaatgaatgcgctgaatcgattgaagtgatcagtttgaaagagcagaaagcaaacgaactgaacattgataaaatggtaaaagagaattagcaaataattaattaatacataaaatacaaaattagaaaaccgatgttgccaatacgacgcggaagaatgtactcgaattccaattcatcgatgccttttcgcttggaaaggaaaaatattgcaaatttgttgaccgatcggtccaagtcgaaagtgacatggattttgccaatttaaaagtggaaggcattgaaaaggaggatgaaaatcttgttgaaagtgtcagtgccgcttcaatttacaatggcaaagaaagttcgatttcaacaacagcgaactcgacaaattccactgaaatgagtgttggggaagtgaatggacggaaagtggcgcgaatattggccatgaggtgggagtgttcacaaagatgacatttggatcggttccgatttcagaagtggcattgatgtttatagtgcggacaccgaaggcgcacttctcacttttgcacaacggcggaagccgcaaaaaaagtggtgagaaaagcaataacaacaaaaatattgagattctataattaggtattaatttttggacaaatcggttgtagctgtgcaaccagcaacaaatgtaatcattcgttggcggaggagcggcgcattgtcattacgtcacggaggcaatcgccacaagcggaggacgacgaactggtcgaagttctgtctgccaaaacattaaccgaagagagaatggcacacagtggaggaggacagaaaagtggcaaaaatggacaaagaaaagggcgaaatggggaggaggacgaggaacagtcaacgctggaccaagtgacaccaatcccaacaactttggaactgagcaattccacatgatgaactaacaataagttattccacgttaccaattaaagtgta

SEQ ID NO: 72724 - DNA, 722 bp, Heterodera glycines
atgtgctcgtatacaatgtttctggcgatgtgtctgctgttcgcagcggtgactttggcaacttcaaatggcagcgaagaaataattgccgacgcaaataacggagacttggcgatgactgtaagggttgttgttgatctttggctgagctttttttggccatggttattatccatattaaaaaacgacaaaattttgcttgtatacaaaatcaaaattggcggtaattgcccaattaaaatataattacaaaacacaaataaattttctttaatttaacatacctacataaatgttttgagtttaaacaaaaaaataaaaattttattttttattttttcaggctgtgaatgcaactcgtggaatgcgcttgaagagatatgcttcgtgcaacacccatttgagcttgtgcaaccagttcatgtgcaaccaatgctgcaatggatgtaacagttttggatgtttcggttttatgtgcagcgattgctgcgcataaaggggatcaaagccggcgggctcggaaatccgctgctgagcaacagagatgaaaacgcaatgacggattacagtgttttttggcccccctcctcataattatggactttacggattgtctccatctttaaaaaaatcgtccctaatttcggattacagtatttccgttcttgaaaacccaataataacaaatgacaccaaaaggtccataatttttggtgaattta

SEQ ID NO: 72725 - DNA, 393 bp, Heterodera glycines
gtactgaagaagacttattcgcagatttatggaaaaacctcctgatacccatgaagccacaaaagttagcaataaattacgaaagacacggaataaaacgcgaaaattggattcatcaaaatattcataattttgacaaaagtttattaacgacaagcttaaaagctgaagatgttagcagtgagcgtcaaaatgaagaagatattaagccaaaaatattagaagaaatcaaaaaagagacattttcggacgaagaacaaaatgcaatgaatgtaaggacaaaattaaagtttccaaaaaaagaaatatacgacgaaatgatcagtgatggcattgacgagaaacaagccggtgatcagagcaattcgtgttcttcaaaaactgacgatttgg

SEQ ID NO: 72726 - DNA, 687 bp, Heterodera glycines
atggcctcggcacaccaacagccgtttttggaggcgccgaacgacaaaatgtccacgccgctcttccaactcatttcggccgccgtgcagcccaaggcggccatcggaaaacggggggagacattcaatttggatttgaataaatgtaatataatttagattaccaaaacaatgttggctaattgtgttccttacaattattttatttttagaaattttcgaaataattcttgataattcattttgccttttctgcccattttccctcaatatttcctcggtttctcactgcgtttgcgaatcgcgccccgtccatgtgcaagggaatgccatgcgaatgcgcaatgttcgcaatacgacggatctgtgccaatgagtagagcgtgccgctctccgtgctttgggtgatggacacagccatagggcggcccgcgtgcacagacacgggatttggcggatagcgttggattgcctcctctaatgcctaatcaaacaaataacaatttacaataatatttaaatgtaattaaattattttacgaaaattaataaaaataaattctttcagtatgtacttaatattagccagtaatcacttatacttaattatctcctaattaaccactaattacttatatttggttatcccctaattagggccactgatcacttgtacttaattatcca

SEQ ID NO: 72727 - DNA, 1222 bp, Heterodera glycines
aaaatgatcaatctgagctccgacaattggaccgggtgccattcggccatttcggacgcactttcgcgccattccaccggggcggacgccgcgtatggcgacagtgagctggacaagaaagttgagaggagattctgcgaaatttttgagactgaattggctgtttttctggttgggacaggtgtggccaaattggcacttttcatggctaaattcccactttttgccccaggcaccgctgccaatgcgttgtcaatggcttatgtgaatcgcgcgggtggcatcattttcgcgcatcggcatgcccatctgattgaggacgagtgcggcgcgcccgaatattttacgggcggcgccaggttggtcggcgtaagcggtgccgagggacgcattgagccggaagtaattactggctaattaggggataataaatctgttagtggctctatttattggataattaagtacaagtgatcagtggccctaattaggggataaccaaatataagtaattagtggttaattaggagataattaagtataagtgattactggctaatattaagtacatactgaaagaatttatttttattaattttcgtaaaataatttaattacatttaaatattattgtaaattgttatttgtttgattaggcattagaggaggcaatccaacgctatccgccaaatcccgtgtctgtgcacgcgggccgccctatggctgtgtccatcacccaaagcacggagagcggcacgctctactcattggcacagatccgtcgtattgcgaacattgcgcattcgcatggcattcccttgcacatggacggggcgcgattcgcaaacgcagtgagaaaccgaggaaatattgagggaaaatgggcagaaaaggcaaaatgaattatcaagaattatttcgaaaatttctaaaaataaaataattgtaaggaacacaattagccaacattgttttggtaatctaaattatattacatttattcaaatccaaattgaatgtctccccccgttttccgatggccgccttgggctgcacggcggccgaaatgagttggaagagcggcgtggacattttgtcgttcggcgcctccaaaaacggctgttggtgtgccgaggccattctcgtgttcaacgacttgcagcaggtgatcagcgacggcacttctctttcgcatggcttttgagcttccaaatatcccttt

SEQ ID NO: 72728 - DNA, 56 bp, Heterodera glycines; identical to SEQ ID NO: 52733

SEQ ID NO: 72729 - DNA, 922 bp, Heterodera glycines
gacttcaatcactagggactctattctcctgcttttcatcacctggactcagtttttatgcattccaatcactgggactcattctcctgcatttcaatcactgggactcaaccctccagcagttcaatcactgggactcaatccaccagcattccagtcactgggattctgttctcctgcattccaatcactgggactcaattctcctgcatttcaatcactgggactcaaccctccagcatttcaatcactggtactcaattctcttgcatttcaatcactgggactcaacacaccagcatttcaatcaccgggactcaattctccaggacttcaatcaatgggactcagtttttatgcattccaatcactgggactcattctcctgcatttcaatcactgggactcaaccctccagcatttcaatcactggtactcaattctcttgcatttcaatcactgggactcaacacaccagcatttcaatcaccgggactcaattctccaggacttcaatcactgggactctactctattctccagcattccaatcactgggactcaacacaccagcatttcaatcaccgggactcaattctccaggacttcaatcactgggactctactctattctcctgcgtttaaatcacccggactcagtttttatgcattccaatcaccgggactcattctcctgcatttcaatcactgggactcaaccctccagcatttcaatcactgggactcaatccaccagcattccagtcactgggactcaacacaccagcatttcaatcaccgggactcaattctccaggacttcaatcactgggactctattctcctgcgtttcatcacccggactcagtttttatgcattccaatcaccgggactcattctcctgcatttcaatcactgtga

SEQ ID NO: 72730 - DNA, 128 bp, Heterodera glycines
tatggcacggaaagacttccggtttccgacatttttggggtcggaattccgacttccgaaatttttgatgaaaagtcggaaattttttaaatttttttttcaaaaaactagtaagttttgtacaattt

SEQ ID NO: 72731 - DNA, 1867 bp, Heterodera glycines
atggaatgtctactctcggacgatcaacggagaagatcgcacgaacaatttcgcagaggccgcacacaggcgactgcagagggcttttactgctctcatccatcagtatggcgtttcattgagacattgcagaaacaacagaagctacgagattccgaagtgtccaagtgccttgctggattcgatccaccgcaaaaagcaaaaagatatcgcgaagcagaccgtagaattctcacattgacacgcaattaccatctattgaatattggtgatcccgatcgtctcaacgttgataattacaacctacatactattattaattttcttgcaggtgtctcacacaattgttctatggacccttgaattttttgcttggtttgttattgtcaaattgttgaaataaaaaatgatcaatagttcgaatcaaatatcgaaaatgcattaattaagtaattgatattcattgccattgataatgtggtactaaaacatacttgcaatgaaaacagtggccgatcatttcgtcactgatcgtttcgtcactattcagtagagaccgaaccgggccgggcccggtaccgggttttcccgggcccggcaacccggcccggcgatttttgggaaaatccgggttgaccgggttaaccgggttgaccgggttttgagaggtcgggcccggaacccggtcgtttttgaaaatgcaacccggcccggaacccggcatttttgaccgggttttaccgggttatgatttaacaaaaatttgttctttttccttcaaaaatctctttggcataatgtttataaatatttttttgtcaattttctggtaaatttttcatttcattcgaaaaattctactttattgaaatgataatttagttctttttaattttaagaaaatgagtcttatttggcaaattggcctatttaaaaaaacgtcaaagctacagcaatttgtcttgaatgtcaagcaaatggaaagctcaaatatgaataccagcttgccaaaggaacagttaaaactttgcatactcatcttcacgccattcacgaaaactccgaattcactgaaaagctgaattctcttgaatcgaaagccgaaaaggacaaaacaaaaacagaagacaatctcagactttcagtcttccagcagaccgcctatttcagactgtaattctttttaattagcttaatagtttgtatcttttttcagcacaactctcttcgtttgataagaaaattcttcattttttggtgcaaaaaaccattcccttcggcgctgtggatgaccaaacttttcattctttgtttccccatcaaaaagtgaatgtttttataggtgatgaattacattaaaagttaaataaaattaatttttcaattttttcagaaaaactgccttgccaattgtataccaacgtgtcagacagaaaattaaagatgaattaaaagaatccgcatttattacactgacaactgattgttggagtggaagcacatgcaaccttttgtggtacaatttgtgtttttctttttaattatgattggttcaataacagcttaactgcgcattcaatttcaaaatggaagtatatgtcacgtgttttggcaattacggaattttcagaatcacatacagggaaaaatatcgctctcaaaattgaggatttactgctcaaatggggcattgttaaagaaaatgtgcatgcgattatatcggattccgcagcaaatatgaaatgagtgataaattaattaatttttctttccatttgtttttatttgcaggctttcgtcgagagggatgaaaacgaaaatcgcattttgccaatgccgaacggaccttgcgctgctcatttattga

SEQ ID NO: 72732 - DNA, 687 bp, Heterodera glycines
atgggcctgggccagaatctgacgtttaattttagctacatcgtattttacgtgagttacgtgaaattttaggtgcaaaaagttcaaaatttgaaaacaaaaattttaatggttggcataaggcaacaatatttcgtaaaagctcattattgattgcttttagcttgtttccttatatttaagccggttttgaaccaaaaatgcgaaactagaaaaattagaagttttgacataaaaattattagaaaaaaaatttcaggggggtggtaaaacccggaagtaccaaaattttaacgttgaaatgctatttttgagcccctttcttcatagcatatgcgcagaaaaatatgttaatccatataatttataaccctacttattacattaggagtctaaaattgactcgctgtatttaggagtcaaaaacagaacattttgcaaaattatgttatttacaatttattcaatcaaagtgttatcaatagggactcaatttttaggcaaatgcctaaaatttttgcgcacttaatacgcacagataagcacaaaaaacgcattttccacttggtttgcggtgcggtgtctacgatgacttttataatgctatttttgcctatttcggggtttttgtgcctaatgtgcctattttagattttttgaaaaaatccttaacaaaaatgcaataaa

SEQ ID NO: 72733 - DNA, 421 bp, Heterodera glycines
aaatttattcatctccctttttgatagaaaaagcatcagagtgctaaaattaagttgtaaataaaatttggtgcgctttagagcactttctgaaaaaaatatttatgaaacaaaaaaatcgattttttcaagtgtccgtttggggtactcaaacaattatggggagcaaaaatccaacgcagatttaaagtacaggctatagggaagctattcccgaaggattcggtctccccataaatctgggcgcatcggttcggggggactgccccgaaaacaaaaataaatcgattttttcaagtgtccgtttggggtactcaaacaattatggggagcaaaaatcaacgcaaattaaagtacaggctatagggaagctattcccgaggattcggtctccccataaactgggcgcatcgggtcgggg

SEQ ID NO: 72734 - DNA, 321 bp, Heterodera glycines
atttataagcatttgaagggttctcagcagtttccctgcaaaatttggtgagctttcgatcagtctagaacgttggggatcaaatgcaaaaaataattaaaaaaaaataatactggtgtggtaagtgtgaagaactgtgttcttccaggcaaaaaattctaagaaaatttataagcatttgaagggttctcagcagtttccctgcaaaatttggtgagctttcgatcagtctagaacgttggggatcaaatgcaaaaaataattaaaaaaaaataatactggtgtggtaagtgtgaagaactgtgttcctccaggcaaaaa

SEQ ID NO: 72735 - DNA, 248 bp, Heterodera glycines
aggcactgcctctgacatgttttttatttatttagaaaaataaatttattttttttctttttgattattttaattgtatttcatcctgaaattttttaataaacattttcaaactttcaccttattaatttaaggcgaattttgccttttttaataaattctcttgtgaaaaggcaaaaaaataggctcttttaaatatgcctatttaaatgactttaattgctggcctttcgcttacgaccatacca

SEQ ID NO: 72736 - DNA, 417 bp, Heterodera glycines
atgttcccttgtcagcatgctcttagatcgatttgtgagtatgtagaagaaaaccggagatgggcaatctcaactcttttaactgaccctacgggttttgccagaattacatttagaattcccaacatacatgctagaaaagtcggtccgaatttattcagagtttggccttgtgtccaaataaacagtactgattattcttttgctcctctagaggaaattaatcctggtaaaacaaaatgttttgataaaataccgattcgattcaaaacagcgggtaaagaaagatttgcgtacttagatccgtcatcgatgatagtctcccctactgctaagatggcgccttgcactcatttccggaagcaagtgctgcgaatttcgggagatgtgatggaagttgattaaataacagcccaa

SEQ ID NO: 72737 - DNA, 463 bp, Heterodera glycines
atggatattcccgacaaccctaaaggggttcgtcgcaccacttccgcctgcgggcacaatacagtatatgagttgagaaatgaggaggagatgagtgaaatgacaatttcggtcattaataggaaattttggtcgggaaagacggcagtgaaagtctctgacttagaggccgcccataacgaattggtcaaattggaagacggaatgaaccgttccattagggctcttaaccgttgcatggacaaaaagacaaaatgggtctcggaggttgtctcaaatgccaactcaaattttgagatagtcaaggcccaaattgaaacattggttgaccgaatcgacgatctcgaacgagcaaatgatggaacagatgccgacagcacagtgcgcgagcaggacgactcctcacaatttgaaatgccgtcgaaggataacaagggcacaaaccgtggcttgttaagcacag

SEQ ID NO: 72738 - DNA, 379 bp, Heterodera glycines
atggcacgacaaatgagccttcctctgtttaaacgcaccaaaccgactgtaagcattttcacgttggccaggtacataatattttaatatttttttcaacctttagttttttttaatatttcagttgattctttttgaaaccaaacattcagcaacggggatttggtgtgccgttttgctgatgatgttttttctagtgtggttcctctggtgagtttaagcattcattttatttaaacattttctatttattttattttaaagatggccaatggaacggatgtaccctggcacttcgtcaatgaaacgaaggacggatgaggatggtaaacaaaaattttgataaattatccgccaatttatcttctgcttatcgata

SEQ ID NO: 72739 - DNA, 354 bp, Heterodera glycines
atgtgcctcaggaacagtcagctaaggacaactcggagatggccaattcagccgatggacaaccaaagttagtattttaaatttttttaaactattttaaagggaattttcaattttttccagccgagtcgtctcctctgccgaattgccctcagctgacaggtcctgacggtgctatgacgttactcaacaccatcaaaatgggcgttactcaaaaaccatcaaataaatttttttgatataactttgctcagaggcaaccaaattttttattcgtgatttcattcgatagccttaagtgttttctattatcttgcaaaatttgaaaaaaaattcattaacaagtaagtttaa

SEQ ID NO: 72740 - DNA, 662 bp, Heterodera glycines
aaacaaaaataaatcgattttttcaagtgtccgtttggggtactcaaacaattatggggagcaaaaatccaacgcagaattaaagtacaggctatagggaagctattccggaaggattcggtctccccattaatctgggcgcatcggttcggggggactgccccgaaaacaaaaaaatcgattttttcaagtgtccgtttggggtactcaaacaattatggggagcaaaaatccaacgcagaattaaagtacaggctatagggaagctattccggaaggattcggtctccccataaatctgggcgcatcggttcggggggactgccccgaaaacaaaaaaatcgattttttcaagtgtccgtttggggtactcaaacaattatggggagcaaaaatccaacgcagaattaaagtacaggctatagggaagctattcccgaaggattcggtctccccataaatctgggcgcatcggttcggggggactgccccgaaaacaaaaaaatcgattttttcaagtgtccgtttggggtactcaaacaattatggggagcaaaaatccaacgcagaattaaagtacaggctatagggaagctattcccgaaggattcggtctccccataaatctgggcgcatcggttcggggggactgccccgaaaac

SEQ ID NO: 72741 - DNA, 76 bp, Heterodera glycines
aattactggagttagcatcatagcagtgcttttccttgtctttttgaggccctcgcaaaatctggttcgcttctga

SEQ ID NO: 72742 - DNA, 325 bp, Heterodera glycines
agtaaaaattgtaattacgctcaaaaagcttctcaaacaattttagcgcatccaatcctttctacaatcgcttttatacatcccattatgagcgctaaaattatcagagtgccgaaaatcgcatgtgatctaagcctagcaaaaaatggtgtaagtaaaaatcgtaattacgctcaaaaagctcctcaaacaattttagcgcttccaattccttctacaatcgctttatacatcccattatgagcgctaaaattatcagagtgccgaaaatcgcatgtgatctacgcctagaaaaaaatggtgtaagtaaaaatcgtaattacgc

SEQ ID NO: 72743 - DNA, 49 bp, Heterodera glycines
ggcttcgccttcggcttcggcttcgagtgctaagccgagcttcgcccag

SEQ ID NO: 72744 - DNA, 397 bp, Heterodera glycines
atgaagaaccattctgctcttcaattctcctgggcttttcttcgtctttttctgtgttggctgacggataaagcgcaaaaaacggagggcggacagaaaaagtcagtgacgcatcaacattaaacatacttttcggcatttgatttaggcaaaatttatttttcattttttaagccctgcgattgctcgtccaaaacgaggccacggctatgggtacaataattggggaggcaacggtggatatggatacggtggcggatggggcaacaacggtggatggggcaacggtggatggggcaacggtggatatggatacggtggcggatggggtaacaacggtggatggggcaccggtggatatggatacggtggcggatacggttacggttggaagtag

SEQ ID NO: 72745 - DNA, 662 bp, Heterodera glycines
atgtctgttttgcacaaaatttcggctgcaaaaagccgacgaaattctctgtcagaacaatttcatatggctgaagaaatttgtgaggttttggaagaagcaaaaatgtatgtataaacgatgcttaattttaattattattataattatttatttattcagctttatccaacgacaaaattctactggatttccaccatcggatgtaatttggatttatttacaatttttaaaatttataaaaaaaaaatttcggagttttttatttaattaattcactgaaaagaatgaaaatgatttcatataaattaatttatagtaatactttattaaaattaattaatttattttttaaataattatgttgaattttgattagatttgttttcctcagtggacgcatttaaaacaatacaattcataaaaaatttaaaatgttaattatttcataattcgattttttattatttctatttatatttgttttttaattatttatttttctacacaaattttacacacattaatttaaattttaggattttcttttattatgctctctgcgtgacctattggaaaattcattggttcttgcaaaatcggcagcagaacaaactaattttgagagacgaagcaatgaaacatgtaaactttttttttga

SEQ ID NO: 72746 - DNA, 386 bp, Heterodera glycines
  unsure (1)..(386): unsure at all n locations
ctgcattcgggacaacaatntagaccatcaactcggaacacagctatgcggctaccccagtacagttcggcatcggctcaccggcaccatcaactcttacgtggacaaccactgtgagtccacgggagcagcttgttcaatactcgttgagcccgctatcgacttcggcagcgccttcaggcagaattatttaatcaattcatccgtttaaatttaataaaaaaaattctgttccagcatgggagtacgaaatcgttcgggcaccacattttccaattccgccggcactttttttcaaattgagggatatgcattaaaattgaaggattcgaaaaatatgatgattcaattgtccatgtcccgtaatgaattttatttaatgttta

SEQ ID NO: 72747 - DNA, 466 bp, Heterodera glycines
atggccgtgttggagaatttattttgcgcggcaattccaacagttaaacagccgcagaaggaagtgagtgcctaaaaagtataaaatgcaaaggaaaagccacggcttaaaagtcaaggtgtccgtcccttttcaggcaaatcattggcacggccaatggcagcagaaaatgctcgccaattccctttttcaactgcgaacggcacaaaatggagacgaaattgggaaaaacaatgctcaaaaaacaaaagaatttgagaggaccaccgaagagaaattcaaaaaaggttttgaaaaagcagcgaataacagagtgaagcattctgattggtttaagcgtcgcttggcgaaaaatgcaacgatttcctcggagaattttgtgccgaccaaaatgcccgctgtgaagagagccgttgtcgttgtgttgtgccaatggttgaacagaatgggaagtgccaacaactga

SEQ ID NO: 72748 - DNA, 613 bp, Heterodera glycines
gccgggcgaaaggttggaccatttgcgaagataatactcaaaagtcaaactcagctgtgccgaggacgaattgtgcacgggcggctcattttgtggcgaaaactctatttgtatgtgcgccccgggggaaagcgttcaaatagaaaacggaaaagcgaagaaatgcatgttgcaattggaggaaaaggcgcgggacagcagccaaccggtcaaggcggagccgggccaactttgcgtggagggcggcatggaatgttccggaggggccaagtgccagaatggcatttgcagttgccctgagggtacgtctgcttttggcacgaccattggccattcatctgtcgtcccgttgccttttctatcctccctttttttcttcaggccacactctcttccgcaatgagtgccttccgcctcgggcattgccaataagcattgagaaaattcacactcattctgccctttttgcgccccaatcagcagtgatggacagtccatcttcagtcggcacaaatttcgaccccaatttacaggatccaatcccatccaaaaccgtttcgcccggggcaatgtgtcggttggtatttagtctgccgatgtttcacgtttattt

SEQ ID NO: 72749 - DNA, 4322 bp, Heterodera glycines
atgggcaaatccattcactaccaacatcgatcactgctgatcggtcaccctcgccaccaggtgttgcccggggcgagatgcgacactcaaaaagggttggactgtgtgggcgagtcgcactgcttctacggcatttgcgtgtgtctgtacggcttggtgaacatcggcaacgaatgtgccaatgcgaacgtattggagaaagtggcacccggcaaaaggtgtctgccagggcagcattgcctgggcatgtcaaagtgtgtaaagagcaaatgccaatgcgaaaagtgagcataatgccgccataaccttatgaacggttcaactcccaggggacaaaagttagactcgaaattgcgccggtgcatcaaagtggcaaatgcagcaactgttacaacgccattgttggcatttccttcgggagcggaagtggtcgtagggccaacgtcaatcgtcgaaattcctctgggcaattcggcggatggcatttcgcaaagcgatggcgcgagagaaaggccgaccaaattcatttacgccatccctgcagctttagcagcagcggctgaggaggggaaattccaacagattttgacggctaatcaaatgtcaataaatttgatggacggcgaaatgcgatcactgatcagtaaactgatcgaacagcaaaagcagagcaatgaaacggttgtgaagagacaaaacatttgtggcggagaaaggtcggcggaagggcgacgaacggaggaaaggcccagttttggtttcatttcagtggtccaacaaattgtcagcattttcctccaattgtcacttcaaagcttccattcagtaaaccaatccagcaacaattcttccaatccgtccctaaatcggcttcatcccttcaaaatcccttccaatccatccaattggccgcttctttcaattcgccacaccttcaaggccagcctggctttttttgtgctgctggcaatgtttgctatggcggtgccatttgcttagctaacctttgcatttgccggcccgggttcagacccattgatgggttctgccaaattgccaaggttaatttgggcgaacagtgctttctggacgaacaatgcaaggcgaatggcttttgcatcgatggggtaagcttcacaatcgcttgtcattcggtgcctttctccgctttctgttatgccattgccgtgcccaattcggtgccatgcgtcgcactttccttcgcaatgttttccatcggcaccgttgcccaacgcggcccgtcgctgccgtgggcgaagactgttccaaagcgcaagcgtgcggatggaactcaatctgcggaacattcagtggagtgtgcgaatgtgcaattggcatggaaagtgatcaggtggggacaaccggcactttggaggtgcgaaagggcatccaaatgatcactaattaccgcaattagcgaggacgctcactcccctttagggcgcgtgtgtcgttgctcgccgtcctcgaggaaccgaatgtatgaacaaatggcgaaacaaaatgtttcaggtctttaggccttagcagttccgactgccacaaatttgccttctgcgacaacggattctgctcgtgcaaaattggctttgaacgtatcgccggtttttgtctgccgcccgctcgccccgtcgtcgacgacccaaaagcgtactttgacccggaaaagatgaacaaaaatgccaaccatttggacgtggaaaaggacaactcagaaggccaattttggccgagcaagcgaatttcgccaatcgaagttttccaagcggagaatcgacgggaaaaggctggcggaagttggacggatgagcagagaatggacgactcgccgaatttgggagacaatggacggaactcggcagaaactgcttttgccaatgccgagaatgcttctccatttccgtcccaacaaagcaaaaccttcgctttttcccgccactttccctttgccaattcccaacttcgctttgtttcctcagaaggaaatgagtttttgtcgccaaattcaaaaggacaatttcaacaattaatgcttcttcctccaacaattggtgcttctttccaacattttcctgcgcattcgaaaggaaaaaaagcgacggaaaaagcgaaaagaaaaagcgcaaaagataaagccaaggagaagcagaaaagtggcaaacagaagcaaaacggggggaacgaagtggcgaagccgggcgaatattgcggcactaacgaaaagcaatgcgcaggcaattcgaagtgtttgagtgggtggtgccaatgcggggagggagcccacgttcagacagagggaatgtgcgtggaagagccgggaaaatcgctggtaggctcatgaaccgttcttgaagggcattccctgtcctctgtccttgagaaggaatgtccggttctgtctttgaatgggttatcctgttctgctagggctgtcctgcccatcgtctttttcctcctccgcttccgttcagcgtttgccctccgcttcttccgagttgctcccccataagcttcacctccccttcgactcgtgcttctcaaatagaccttgcatccacggcgcctcttgtgtccgatcagctgccctgcttttcgttcaaaagttgggtatgcttttcctttgcttttattttgtccccgtcccattgactcatttcctcccccaaaggtcccttctgtcaatgcaatcctggactcgttttcctgcataaccaatgcattccccgtcgtcccgagcttaaagttgccaaggtttgtccgtgcaaccataaaaaaacattttgcaaatttagcccggcgagcggtgccgtcccccctcagtcatttgcgattttggcgcaatttgtggcgaagaaagcatttgcaaatgtcctgcgcatcggaaattactcagttagctttacataaatgcaaagttaaaaagcattgttcgttttttcagccggcctttgcgtccgtttggcattgcccggcgagtcgtgcgcaaacggcgaattttgtgccgacgcggcgatttgtgctcctggactaaatgcatgtgtatgccaagtgggatggaacgtacggaatgggaaatgccaaaagggagagacattgaggaaattgatgaccgaagggggagagacttggaatgggcagagagaaggccaaattaggcccaagtcacacatggcatcatcggtggccaaactgtcgcttctgctgtacgggcaggtacttaggcattcgagctgagttggacagattggccaattcagcactgccaattcgactcagactgtgcccaccttcgcaacgcccattgtgcgcctgtcacacggaaatgcgcctgtgaagacggcttttcccagttgtattcgtccatttgtgttcctgagaacaaaatcaaactgccgggcgatgagtgcctttcggtaattcgaattttggcaaattaaacaatgaaaaacaatgccttgcgcagagtgcccacttttgtggtgggaagtcgtggtgcaaaaacggacgatgtgcttgcattgggagggactctcaagctgtggaagggcgatgtgtgcgcaaagcgagcaaaaagaggacaattcggagaaatcccccgaggggacagtcaatggcaaaggcattggactgctcaaaggacgggaaaagtgagttgttttggagaacttcatggaaaagtacaaaagcagataatgggacaaagggacaatgcgccacggagagggaatgccccgaggggacgcattgcgcgcgggagaaatgccattgccgggaagaagccgaaaggggagcgaaattggcttatggagtgacttcgaaattggcaccaaagcaggcaaaatgagaaaaagggaggaaaatgaaaaaatgatttaaaagcaggagaagaaagagcagaaaatggagaggaggaggagaaaagaagggaccgaagcagaagttggagaggaagaagcagaaggagaagcggatttggaaagggattacgcgttgggagagccaaagtcggtggcggcgcccaaaacggaggccatcgtcggcggagcggcactcatcaccgccgccgccaacagcagcgcaatgccatgccatttttgccgggcactttttgtgactcgtttagtcagtgcggagaaggggccgaatgctttttcggcaaatgccagtgcatttttctaggccagcgattggcatttttgaacggagttacaaaatgtgtggcagaggaagagaaaaaagggaaaggagcagagaaaaagacggagagacgaaagagaggtgaaatgattggagagacagaa

SEQ ID NO: 72750 - DNA, 545 bp, Heterodera glycines
ggaagaattgttgctggattggtttactgaatggaagctttgaagtgacaattggaggaaaatgctgacaatttgttggaccactgaaatgaaaccaaaactgggcctttcctccgttcgtcgcccttccgccgacctttctccgccacaaatgttttgtctcttcacaaccgtttcattgctctgcttttgctgttcgatcagtttactgatcagtgatcgcatttcgccgtccatcaaatttattgacatttgattagccgtcaaaatctgttggaatttcccctcctcagccgctgctgctaaagctgcagggatggcgtaaatgaatttggtcggcctttctctcgcgccatcgctttgcgaaatgccatccgccgaattgcccagaggaatttcgacgattgacgttggccctacgaccacttccgctcccgaaggaaatgccaacaatggcgttgtaacagttgctgcatttgccactttgatgcaccggcgcaatttcgagtctaacttttgtcccctgggagttgaaccgttcataa

SEQ ID NO: 72751 - DNA, 411 bp, Heterodera glycines
atgacaaaaacactggcggaagggagggaaagcggaagaaatggcacggagacagagaaaggcacagcaccaaaagcaattggtaagtgttgagaatgagaagaagatgaagaggggggggggggggatgggagatcattaacggatagccaaaaacaactcattaactaataacagcggagagacggactaaccaaacaccgaacgaaccgacaaatgtgccaactgctgatccgctcaaaaacgtatcaaagtctgaaccgacaccaaatgtgccaattgctgctgacccccgcagcccattaaccgatgtccgttcactgcgaatattcaaccaaaatttaacggggagagaaacggtttctcacgcatgcaatgttgattttgtataaataactcttctcattacta

SEQ ID NO: 72752 - DNA, 1610 bp, Heterodera glycines
atgcggcaaatcagagcgccactggatttggacgcatacgacgccgacacttatgtgccgctggtcatcaaccattggaacaacgcgcaccaacagcagcaccgctttgctgttttcatctttggaacaactggccactacaaaccactttacaaatgcggccatgacaactacgacacaccattggcgctttattttaacaacagtcattttgacggtgtacacttcctcagcggactttttggtggaaaaaagtattgcctggagtgcgagaagccttataagaagccgtcggaacacaaccagtcctgcaaagcgcactgtctgatgtgctcgcgcgttggacctgcgtttccgtgtccctcggagcctgacttcttccgaaaatgcaaagaatgccacaaaaacttcaacaacgcgggatgctacaatcaccatcttcagtccaactactgcacgcgctcaaagaagtgcaaagactgtggtgtgatttggaacgttgccgacaacagcaggcgtaaacgaaagggacatgtttgcggagaaaaattctgccttctctgcaacaacttccacaacacagagcgcggctgctacattgcaccatttgagcccaaggaggagatggacgcttatcggttcgttgcatttgacctcgaggctgaccctcatctgcctgaacgacgcaaccacgagccaaacttcattgcagcaaaagtgtcttgccccgcctgcattgaaaatggcagatggaagcaaggaactgccggatgttgggtgtgcggcccacaccgaaccgttgccttctgccaacgaccatttaccgacactccggttgacaagcaagtggtcaccgacaaccccatgcaagcatttgttggttggttgatcaacgacttgccgatcaaggccaacaccttcgcctactcacattttggtggccgtttcgacatggtcatcacattccgggagctgttccgtcgcggctataacccggagatgatcagacgggtgagtatgtttttacatatattttattctgataaacaaattaagggcaataaaatgtatgaaatgaagctgagggcgcagaagaaccgacaccccaacatcgtcttccgagattcgttcaatttgatgccctgtgcgctcggtcagctggtccccgcctacggcttggacgtcgaagagaagccattcttcccgcatatggtcaaccgcccggacaactatggccgcgaaatttttccgacccccgacgactacctcgcccatggaatgatgccagaaaagagacgacagtttgacaactggtacgaacaacatcggagtgaaccattttttctggacgaggcattggccagctactgcaccaatgacgtggagatcttaatggcagcgctggtggcatttcggcgggagttcttggaaatcacaagacgtcaagaacctgtggacggccgtgaaacgcacaacggaattgatgttctgaagcagtgcatgacaatcgccagcgcctgcatgaagcacttcaggacaaatcatctccctgctgatcatttggccatcgtaccggaaagaggctacgacaacgcccaaaaccagtccct

SEQ ID NO: 72753 - DNA, 328 bp, Heterodera glycines
atgcaactcagacgtcagtttgaggagatccgccagagcattggcaactctcagcgcgtcaccaatgcgtctgaccccgacaacgcgaaaaccttttgggcctcttgggacggcacccgtgatggtgccattcggcgccatcactacatgcagctgggcgaggaaggaaggtagttgcctttaataatgcaaatgcttttaattgttaatttctagaggcgcaaagagggagactgcagttggaacgggactgagcattggaccatgcgaagagatgcgacaggaagggtatgtgtgcattccatttaaaacatcaccatccacatag

SEQ ID NO: 72754 - DNA, 108 bp, Heterodera glycines
atggccggctttctgatgaagcaaatggtgggcaataagtttgacgaggtgaccaacaaattgggcggcgatgatgagcaaaaaacggtggacggagaggacccggag

SEQ ID NO: 72755 - DNA, 285 bp, Heterodera glycines
atgacttatgaagaactaaagttttgtgatcgctcattgggtactattggttgtgaattcattcacaagtgtggaatctgccgtggccatcaatcaacagctttctcagactgattttaattgcgtcatcaaagtttactgggattaatttgttttgagttatattttggtttgttctgttaatatgatgtaaaatttagaaatgggaaccatcatattgaagaaatgctgttggattacaattgtgaagtgttgaacctgtcgatcggccactcaactttttga

SEQ ID NO: 72756 - DNA, 160 bp, Heterodera glycines
taagcctaaactttttggcctgtttaaaaaggaattaaaaatttttaaaatatttattcatctcccttttgatagaaaaagcatcagagagccttatttaacttttaattaacatttggtgcgtttcagagcactttctgaaaaaatacttgtgggttaa

SEQ ID NO: 72757 - DNA, 818 bp, Heterodera glycines
taattaaatccattccttcggggaaccgtgccgggtgccgcggggtaagcagtgctggttcgtttcatcacggcaccgaaccttttggctagtcagcaatcgttgcttaacttgccagatcggacgggtgcgcatgattccactgttccaagcaccccaccaaaagcaaaacgatataaccaaaatataaggaaaaattttttctccatcttcctttttgatactaaagcatcagagtgctaaaattaagttgtaaataaaattttggtgcactttagagcactttctgaaaaaaatatttatgaaacaaaaaaatcgattttttcaagtgtccgtttggggtactcaaacatttatggggagcaaaaatccaacgcagaattaaagtacaggctatagggaagctattcccgagggattcggtctccccataaatctgggcgcatcggttcggggggactgaccgaaaacaaaaaaatcgattttttaaagtgtccgtttggggtactcaaacaattatggggagcaaaaatccaaagcagaattaaagtacaggctatagggaagctattcccgagggattcggtctccccataaatctgggcgcatcggttcggggggactgaccgaaaacaaaaaaatcgattttttcaagtgtccgtttggggtactcaaacaattatggggagcaaaaatccaaagcagaattaaagtacaggctataggggaagctattcccgaaggattcggcctccccataaatctgggcgcatcggttccggggggactgcccccaaaaacaaaaaaatcgatttttt

SEQ ID NO: 72758 - DNA, 95 bp, Heterodera glycines
  unsure (1)..(95): unsure at all n locations
atgttgatggatgcctgggggtacctcccaggcggngatcgattagccattccactgaatgactcccgactgaactccgattgtccctttggctg

SEQ ID NO: 72759 - DNA, 802 bp, Heterodera glycines
  unsure (1)..(802): unsure at all n locations
atgcgcgactttgactttctgaaggaaatgcaacgcgccgaaatggaaacaaataagggatttcggcaaatggttgatctcacagaaaattgttataaagacggattcaaacaaccgctgatttggttttgccaacgagcggtaaaaaattgaatttcaatttaaatgaaccttttaaatattttattttaaatttaaataaatttaatttatttgaggattatatgacacatcaaagtgaagaaaatgatgagaagaaattggaattgaagcaggtaaaaattgaattttatttccaaaattttgtaaatttgactaaaagtctaagaaataaaacattttctttttctggtggaaattaatgccggcccaattggcggccttggcacttcgtcccgtgtcactatgcttcatcagcatgtcctttccatggccaatgccgacacttcgcccgcggcgctgccgcctaatcacacggacacaatggtggccaaagcactgcacatggcatggtaaaagcaaaaaatgttaattaaaaatcactgaaaagttctgaaatgaataaactgacaatttttttagaaaacggaaaaaaatatcgaatttcaccccagcgcatccgaatatttgcggggtggcgaaagtcgataaaaatttatataattttgaaatttaattctcgggttttgagaaaaatttcccaggttaaatttcaattaaaatttcaaaagaaaatataaaaactttngggggtggaagtttgggcgccagaaatttgggcaccaaattaaggatttaaaaa

SEQ ID NO: 72760 - DNA, 735 bp, Heterodera glycines
atggaccaaggatttaaatgcaaaaatatgtgcggtcgtctgttagagattgaaaacgacaggaaaatctgtgttttcaaaactgaaaatattttgagacaatgtagtcggattaaagaagttgtcaaagaaaattgggacatgaatgtatttatccaagggagcatatacaatggccttggaagaaaagaagttatgataaactcaaaaggaataccgaatgattggacaaaagacgacagttgccaattttttgacaaattgcgaaaaaagttaagagaatctggaatggcattaacccggactctgataatcccttcccgaaatgtctccattttggaaatcacaattaattctgatgaccaagaaataaatgctcaaattagttgcaataatttgattggattgattaattcgaaatggttggcatgttgtgtgcagttggatgtacgatttaaaactttatattttgccattttggaatgggctgacgttttaccaaatttgatcaaaattttaccagaaatttttgaaattcgaaatgttacatacacaaagaaacaaatttttgaagtactgaaacaaaaacttatttgggagacaaccaattcccagagcatttcttcactactcattggattttttgaattttatacaaaaatcaatttagaagagagccggttgaatatgaatgaaggaaaaatcgatttttgggagaaagtgctcaggaaatga

SEQ ID NO: 72761 - DNA, 704 bp, Heterodera glycines
tttggtgcgctttagagcactttctgaaaaaaatatttatgaaacaaaaaaatcgatttttcaagtgtccgtttggggtactcaaacaattatggggagcaaaaatccaacgcagaattaaagtacaggctatagggaagctattcccgaaggattcggtctccccataaatctgggcgcatcggttcggggggactgccccgaaaacaaaaataaatcgattttttcaagtgtccgtttggggtactcaaacaattatggggagcaaaaatccaacgcagaattaaagtacaggctatagggaagctattcccgaaggattcggtctccccataaatctgggcgcatcggttcggggggactgccccgaaaacaaaaataaatcgattttttcaagtgtccgtttggggtactcaaacaattatggggagcaaaaatccaacgcagaattaaagtacaggctatagggaagctattccggaaggattcggtctccccataaatctgggcgcatcggttcggggggactgccccgaaaacaaaaaaatcgattttttcaagtgtccgtttggggtactcaaacaattatggggagcaaaactccaacgcagaattaaagtacagactatagggaagctattcccgaaggattcggtctccccataaatctgggcgcatcggttcagggggactgccccgaaaac

SEQ ID NO: 72762 - DNA, 206 bp, Heterodera glycines
tgtggtaagtgtgaagaactgtgttcctccaggcaaaaaattctaagaaaatttataagcatttgtagggttctcagcagtttccctgcaaaatttggtgagcttctgatcagtctagaacgttgggtgataaaatgaaaaaaataattaaaaaaaaataatgctggtgtggtaagtgtgaagaactgtgttcctccaggcaaaaa

SEQ ID NO: 72763 - DNA, 177 bp, Heterodera glycines
atgtcggcatcgaacgccctttggaaggcacccgacggaacagtgggtggcaatggtataaggaatttgatgaatgattttaatgattttaatattaccacaaaggcagttcaattgggacggcgggcgggccgggcccgagcagtgttttggccggttcgaatgccaaagttggcg

SEQ ID NO: 72764 - DNA, 193 bp, Heterodera glycines
tcaagtgtgtttatacgaaaaaatccaaatttattaacagtctttatcaatttcgcgaaaacaattgcaaatcagatacatttcgaggtgttcgggggtaaaactcattcgattatcggccaaaattgatttgtaaattgaaaaactgcgttcaacgtcacaagaagtcaccggcgcatatttcatagatgcc

SEQ ID NO: 72765 - DNA, 193 bp, Heterodera glycines
tcaagtgtgtttatacgaaaaaatccaaatttattaacagtctttatcaatttcgcgaaaacaattgcaaatcagatacatttcgaggtgttcgggagtaaaactcattcgattatcggccaaaattgatttgtaaattgaaaaactgcgttcaacgtcacaagaagtcaccggcgcatatttcatagatgcc

SEQ ID NO: 72766 - DNA, 173 bp, Heterodera glycines
gctcaaaaagcttctcacccaattttagcgcatccaattccttctacaatcgcctttatacatcccattatgaacgctaaaattatcagagtgccgaaaatcgcatgtgatctaagcctagaaaaaatggtctaagtaaaaatcgtaattacgctcaaaaagcttctcaaaca

SEQ ID NO: 72767 - DNA, 819 bp, Heterodera glycines
ttatcaatgccgtgcgttcactctcgggctgacacccgcgcagcaaatgccggccgaatgtttgcaatatgtgtgcgttgtggctggtgaaattttccagaaggcacatgagtgcgaatgtgacttgacgggtgggtcggcttttttttgacagcaaaaaagggaaaaatgcataatttttacttaatttacaggttctgtgtccggtatttgtgagccaatgggtggtcaatgcgagtgtaaaccaaatgttattggaagacggtgggcatccttttttaaaagttatctatgactagagaccggaaatttcaattttggatcttgctgcgggattataattcaatttttttttgctgtacgggttccgccggattcgtcccgcaaaatcccccaatttgctttgcggaatgggataccgcgaaatcccacccttgctctctatctctgtgacaatgtcggcggagttgacaaatatcggggtttttgggggagtcggtagcacaagggaaaatatagcgtccgggtcggaaatttctccgggaattgttgtcaaggttccgcttaaccttgtttcttaatactgaagttgcgaccgttgcgcggttggcacttacggatttggtccgtccggctgttcgtcatgcgattgtgacagtgtagggtcactctcaaatgtttgttttacctcattgtggttactgtaaaaaaaaaatgttccttcgtatttaaggcgtgcgacaaacagtctggccaatgcgagtgtcgcgaacgcggcatcaccgggcgccagtgcaaccaatgtcaaccaggattctg

SEQ ID NO: 72768 - DNA, 454 bp, Heterodera glycines
atggtcgccggatatttgaattggccacaggcgactttcgccagcaaaattgaagaggatggcgcttatataaaagtaacgcgagaaatcgacggcggattagacactgtgaaattgaaattgccagccgttgtcaccgccgatcttcgactcaatgaagtcggtcttgtttcaacaaacattgattgtttttgttttttagcctcgttacgccaccctcccaaacattatgaaagccaagaaaaagccattggaaaaaaagacagcgcaagaatttggcattgacatgactaatcagacagaaactttggaagtaataaatataaaaacgatatcgtaactaaagtttatatatctaattaaggtctccgatcctccagttcgacaggcgggcggttttgtggacgatgtgcctggattagtttcgaagctcaaggagaagggagtgatttga

SEQ ID NO: 72769 - DNA, 203 bp, Heterodera glycines
gtttagatgtttcagaaagttttcttggttcttttgtttttacttgcctttacagtctcaaatttgcggtccgatgaaggaattggggaggtattttttatccacttccctctaaaattgaattctttttacgtttagatggatgcgaatcaaaaacctttgaattcggctcgaatactcgcttccaaattcactctttctca

SEQ ID NO: 72770 - DNA, 49 bp, Heterodera glycines; identical to SEQ ID NO: 51181

SEQ ID NO: 72771 - DNA, 1149 bp, Heterodera glycines
ttggctccggttgtcaatcaatcgtcaatcgcttcgctcattcgttgtcttctattgcttcttctgaacctgatgcgccctcaatgctgacacaaatcccgggcccgaagtcgaaggcactgaaagaagaaatggagcaagtccatgtaggaggattataaaaaaacaattgtaatttttttgaattttcaatttccttttaatttgattgaccggtgcccaaagtgtcatcactctaatggaaaagttacaattcagcaaacaacgtccatcaatttcttcgcggactacgagcgttcctttggcaattatttgattgacgcggatggcaacgcactactagtacgaggacgagaatttgacaaattaattcctttttttccattctttaggacttgttcactcaaatttcgtcattaccgctgggctacaaccatcctgaactgatcaaattggccactgatgcacgactaattgtgagtttttcaatttactcaaaaataacaatgctcactcgttatgcttcatttactattttaaaattaatgctttatcgtcctcagaccaccgcggtgagtcggcctgccctcggtgcttttccgcgcagcgattttgcccagttggtcgcccgttcgcttcattcggttgcaccgcgcggacttcgccatgttcagacgatgctttgcggctcatcggccaacgaaaatgccatcaaaacggcctttattcattaccaaactcgtctaaggggtggcagtccgccgacagcgcaacatttgtccagttgcatgcgcaacgaggcgcccggcacgccacaactctctgttcttggcatgtgttgtggcgtttttggcttattttcaatagtttttcagggtttaacgggtctttccacggacgaacgcttggcgtactgagcataactcggtctgtctgtccaaacatttgttataattttggtacttttccattttgggcctacacctcaaaataaaaataaaaaatcaacaaagagcacgcttaagagacaatttaaacgttccatccccatagcataaattagcgtagcgattaaggaccttttcggttttgcgcataacttagtgaatgtggaactttttaaaatcttgaggtgtaggacctgccagg

SEQ ID NO: 72772 - DNA, 1314 bp, Heterodera glycines
caatgcccgaggatggaatcgcccttggccaggtcggcggctgcgcctcactcttggaccttttggaggagaacctcatcctccctctccgtctcatctccgcgaacatcaaaattccatcttcgctgtacagtccgccaaaaggttttttaagcaacaatgttttcgtttgctttgaatttctgcttttaggtgttcttttgcatggtccgcctggctgtggcaagacactcattgcgcgcgcaattgccaaggaaatcgacgcgtttttcatcaatttcgacatttctttgctcagcggtttgtggaaattgaaccactcacaattattgctattcatactttttcagatatgtggtacggagagactgccaaactcaccaaggcattgttcactttggttggtttcttaagtgcgacagattgtggacttgaatgggatttcatttttcaggccggaaagattcagccatgtgtcatattcatcgatgaaattggtactcaatatgtttcaacgattaattccgttcggttatttgtttgttccttagattctgtgctgcgcgatcgtcacaaacttgaccacgaagtcaccgctgtgatgaaaacccagttcatggcgctttgggacggctttctcagctcaaactccgcagtgatcattatcggtgccacgaatcggccgcaggacgttggtaagggattatttgttaattaaatcaaaaagttgtctcggtgacgctgtctgaatcataagtttgctcctttttcgtcaataatattttcataatcctcacccattcaaagtgctcattttttctatactccctccccttaatccattgagtgtggctgcatttacaataaattttttcagataatgccattttgcgtcgtctttcgctcaaaattcacgtcccattgcccgatgtgaatgctcgcgagcagatccttcgtgtcatcctgaaagatgagaatttggaggacaatttcgacttcgaaaaaattgcacaagcgtctgaccagcggagtggggccgacctgaaggaggtcgtccgtctctcctttctgtcgagctatcggagcgtcgtcaaggaactgttcatatcgggcggacggtgggtgaaaggagtgacggagaattataataaataacaacacagccattacaggggaaaatgcgtcagggaggtcgaattatcacacaatgacgtcatcctggcacttcgtcagttcaacggctgcttaaacgactcccaaaaggctcattgctctaaaaattatttgacggaagaagtctttgaggtggattga

SEQ ID NO: 72773 - DNA, 376 bp, Heterodera glycines
acaattgaacgtgaaattgacggatggtgaaagcaactttgcctacaatgttttgttgatggaacggtaaatttgaatttttattttttgaaaataccaaaaagaaaatttaatttaatgattaactattttttcaaattatatttcatttatttgccaataatttttcataaaatttggtgtccatttttcagtctttgtccaatggtcaataaaatgggagtagctgcaaacaaaagcaacctgatcatgcagccacttgagtaaatcttatttaaaatctaaatccttaaatattgcttagagaatactttagtgtgtgtggttaaaacaatttttgatatatttttaattaaatttagtataagataataaa

SEQ ID NO: 72774 - DNA, 174 bp, Heterodera glycines
tcactcgcaataaattaagaattgttggtgttgttcgatagctctatgtgtttattattaatttgcaaaatctcaaaaattttggttaagtttcaaaaaagttatggccagaaggaactcaaaaacccagtaaatggactttttttttgctctgattttttgtgcataaataaa

SEQ ID NO: 72775 - DNA, 657 bp, Heterodera glycines
atgacattccaaatttgtactcttccattttgtcctgaatcaccaaaattcagtttggtgttcaaagacaacgctttagcagctgaaaggggcctgaaaaaacttcgtggacgagataatgtaattattattattatatgtcaatttaaaaaaacacttttaaataaatttttaatttctggtttgttatcaaaaattttcaaaataataattaattttataaattgaaaagttttgacaaataactaactgttttcaaatttaattttttcatttattttacatattttatactatttaatttattgtgtttttgtattaattaaccttaatttattactaattttttaaattaatttgttttaggtaaaggaagaattagagcaaatattgtccgaaagttcatcagcagaaaaagggacatcgaacaattttcaattttttgatttgtttaagaaaccactgaattggccacttacgttggcaatttttatgcatctctcacaacaatttagcggaattaacgccggttagaatcttaggattaaatcaaaatgataaaaaattttcattaagcaattttctattctacaacaatattcaagaagtctggccttgctggtcaaagtatatttttatgataatgaacatataaaa

SEQ ID NO: 72776 - DNA, 453 bp, Heterodera glycines
atgggtgctctatccacccaccaaatttcatttggaaatctcacggacacctggggaccttcctttgtgagtcgttttaaaaaaacatcataaagggcattagtttttcaacaaaaaaaatattcataacttttctcaaaagcaacaaaatgttaataattcataatatttaatagccctaagttttttcaattagtctgcaatatttcaaaaaaacttgaaaagtttcattatgaccaacagaattcaaaattcctgggttttcaaatatttaaaattttaattttttagtaaaattataagcaataaattttgtattttgatggttttttaaattatctttttatggaataaaaattggaattttagtacttttttgttttaaaccaatctgaaaaatttttcctatttttttaggatactgttaacacagttacgatgattcgactttag

SEQ ID NO: 72777 - DNA, 217 bp, Heterodera glycines
cggagtaggaaaaacgtcgtcagccgaaacgtcgtcgaacgaatttttcgaccattacttttttctttctcaaccaaattaaacattcttggtattattcgaaagcattcgaaaaatgctattagcctgcaaattttcaaatatttttatttatgcacaaaaaaatcagagcaaaaaaagttccaattactgggtttttgagttccttctggccata

SEQ ID NO: 72778 - DNA, 915 bp, Heterodera glycines
atgccaaaacaaaacgaaatcgttttaaaatattcctttctggacttgacttggtttcttgatatcgaagctgttttctacgctatttctaaaacggttataccaaaccccagatttttgaatccggttttcagaaaaaatgccttgtggtgaaaacaatatttcacatttcactccataactttgtgagttcggcacggatcgagaccgggataagaccattggaaagagcagctcgagctctacaagaaggtatggaaagaaaaaatagttatttctgggactttttcagaaatcagaattaattctccaatgtggcccaaattttaggcccccagccacagccccttgcttctcccagttttaagtcttggatttgtcaaataaattcaagacttcaaattaataatcaaaaattctcttaaaatttttttgaacccaattcaaaaaaggaaaaaaatttgcagtcaaaaaattattcgaatttctccaattttgtttccataatttccgaaagttattcggtatcataatgccaaaacaaaacgaaatcgttttaaaatattcctttctggacttgacttggtttcttgatatcgaagctgttttctacgctatttctaaaacggttataccaaaccccagatttttgaatccggttttcagaaaaaatgccttgtggtgaaaacaatatttcacatttcactccataactttgtgagttcggcacggatcgagaccgggataagaccattggaaagagcagctcgagctctacaagaaggtatggaaagaaaaaatagttatttctgggactttttcagaaatcagaattaattctccaatgtggcccaaattttaggcccccagccacagccccttgcttctcccagttttaaatggtggatttgtcaa

SEQ ID NO: 72779 - DNA, 1081 bp, Heterodera glycines
atgggtgacacgtcaatcggacaaataaccgacagatccaaagaactaaaacttggcagcccgaaagaacaattcaaccaaagacggataaaatcaaaagggcaaaaggcctacagtccaacaggacaaatgaacgacgaattacaattcgttagttctaaaacacaacatttcccaattgaaacttgcttaaatatgctgaaacaaataagaattgaaaaattttctggtaagataaaaactaaaaaataatcatttatttgagaaaaattaaaaatgttaaaatttatttatttatattgttaaaataaaaagaatagaaaaaattaattttttatagattttctcaacgatttacttttggcaaatttttacaaattttatttggaaaacataacagatgaaaaatgcacaatttatttgcatattgcaatgcttattcgaacaattgaagccaaattagaaatgtcaaatgctctgggcttcaaaattccaaattttaaacagaaatggcacacatttaaatgccgaacagctgcatctgaggaagagcctcaatttctattggaaaaattattttttgtacaaaacaatttggatgatttcgcattttggtaattaatgaaaatttatatcatgttttcgattttccttgtttctatcccttccaagacctgcctcagcaaaatttcccaaaaaatttcgctaaatttttaagaaaaccatcaaaattagcaattttgatgaaaatctgggtaaaaaaaagtttggccaaaatcctcaaagcctgggacctccctgttttattttaaaattaaaaataaataataaaattaaccaataaatcaattagattttaaaacaaccaccttaagctctgcgaacagtaaaagatgtatggaacaaagtgccgttgcacttttggacagtgtcaaaatgcgacgtgtgggcaaaaatgttgaagccgaagtaaccgaagacgcattttttgatggcaatctcatttactcactgatcgatcaaagtgccgtgactgatgacgatgctttatcatcattatcattgggaacatcgtcctcct

SEQ ID NO: 72780 - DNA, 99 bp, Heterodera glycines
cggcaccaagtccgaatctgtacccatccgcgaaccgagttgagacatttcggaacatgcgctgtcaacccgggccaggaattgttccgctgcggcgtc

SEQ ID NO: 72781 - DNA, 838 bp, Heterodera glycines
atgaatactgataaattttgccttttttacgcgaggatgtcgtcaattaattatttaactatggataaatattcgtttattcgttttatgaagaacttagcaagacaaaaggaagcggctgttgaacttttacgtaattgtggaattgatggaaacgaaattgcatttgagaagtccgcagatccgcggaagtcgatccgagttttgtggaagggccctatgggccgtgaaaatgtagtgccgatatttttggagaatggtcactgggatggattaaagaaatatgtttgctttttcaaccgtgggaggaagttctgtattgattgaaaatttatgaatttaaagtgcaaaactcgaagaaacattcgatgctgatttggagagactcatgtttattgatgccggtgaagcttgagtcgctgaaggcgacatttaatttggactgtgaggacaagccctttttcccctattattacaataagaaagaaaattatggaatacgattggaacatctgccaccgatggaggactattcgccgggatctatgaacaaggctaaatttataaaattcgaaaaatggtaggaaaatagaaaaatttttgaataaaattcttttttttcaggtacaatgagaacaaggagacgcccttttatttggatgaagaattgagaaattattgcagaaacgacacggagattttattgttgtcgattattgagtttcaaaggatattgattaacgacattactaagggatttgacccactaccgaggagttgtacgaatgcgggggttgcgatgaatatttttaaggcaatgtttttattgacggagtag

SEQ ID NO: 72782 - DNA, 539 bp, Heterodera glycines
atcaatcgggtaagtaatttttaataatatatttaagagataattttattcaataatttttcaggaacaattttactgaagaaatggaaaattataaattaattgacgaacggtcgatgatttgcgaaaaatttggattcacgaagaacattacggaatttcggatcaattcggatgtgagacgccctgacgtagcgatgagggacgcaatcgacacaatgattaagatggctttaaaaactacggaagaaaaaatgaagcgaaaagtgcggatgtttggagtggcaattacgggtgctgggcttgcttccccggtttgggtaccatacagggcgtacccgcagaacaatgcggatgttattatgcaggagattaataagttggggcagagtggggacggagatgaaaataagaaaacgcttttgttgtcggagcctattatgatgaaaattactttcgtcacactgcccagtggagaagggccgaggaatgtacataaatttgatttcggatttaaggaacaccaacggataagataa

SEQ ID NO: 72783 - DNA, 429 bp, Heterodera glycines
atggcccacttggagctcaaacattcaacgcctgggttcagagtcaagcaaccctggcttcatacccatttagagtttgagaataggttaaggacatttcgtccaccaagtcctctaatcattcgctttaccgagtataactgcttaccgagctccagctatcctgggggaaacttcggagggaaccagctactagatggttcgattagtctttcgcccctatacccaagtcagacgatcgatttgcacgtcagaatcgcttcggacttccacccagagtttcctctggcttcatcctgctcaggaatagttcaccatctttcgggtctcagcgcatacgctctgtctccgccccatcgcatgcgatcgagacgggactatgttgcgccccaacaccgcagtgccagggatcacacatcagctccgtaa

SEQ ID NO: 72784 - DNA, 64 bp, Heterodera glycines
gtaaacttcatctaagactaaatacggccacgagtcctatagcgaacaagtaccgtgagggaaa

SEQ ID NO: 72785 - DNA, 1019 bp, Heterodera glycines
accctaaccctggtaagaaaaaactaataattaatcaaaactctattatttagtactaattgtaagatgagtaattcaggtgaacaaaaaggcaacccttctggagtttggccagattttgcacaaagtgtccttgcaatttccacacattaacacccgaggcggtgccgtcaagcaatttcatgccatcaacgacttggagaacaatttaatgaagaatgtaagtacaaaatgtacactaaaaattgcttaaaattattgcaggaattgcaaggatttttcgacggtccggccgtgaagaagcgcatcgaacgtaaacaaattgtgaacattaaccgaacatttggggctcggcttagctacgaagtgattgttgtccctttatcttttttaattgcttttttttttgttaattatagatatccgttcgttttggcgagaatgggttgccggaagggcatcgtcttgagttggacctaattggtgctgcagggcaaagtttttgtgcctttttggcgaatggaattactgttcgattggagggcgaagcgaatgattacgttggaaaggttttagtgaaatgcggcgtttttgaataattatttttaattagtgtttgtccggcggcaaaattgtcattcgcccctaccgcaattcgatctatgcctctgaacagaacactttgattggaaatgtggcactttacggagcaacttccggtaataaatgcatgattttacaacaaaaatgacggaacacttccttcaaaggaactgccttctttcgtggaatcggcggagagcgattcgcagtgcgaaattcgggcgccacggcggtgattgaggcggttggggaccacggctgcgagtacatgacgagtggaagagtggtcgtgctgaatagcatcgggcggaactttgcggcggcgatgagcggcggattggcatttgtttatgacaagtgagtggtggagaagagacagcactcaaaagggcaaccaccaaatgggagaggggtgc

SEQ ID NO: 72786 - DNA, 770 bp, Heterodera glycines
atcgtcttgggctcaacccaccaacatttcaatcaccgggactcaaaccgtcagtatttcaatcactgggactcaatccaccagcattccaatctctgggactcaacccgaccagtatttcaatcactgggactcaatccaccagtatttcaatcactgggactcaacccaccagcattccaatcactgggactcaacccaccaacattccaatcaacgggactcaatccaccagcattcaatcactgggactcaacccaccaacattccaatcgcctggactcaacccaccagtatttcaatcactgggactcaacccaccagcattccaatcactgggactcaacccaccaacatttcaatcactgggactcaatccaccaacattccaatcaacgggactcaatccaccagcattcaatcactgggactcaatccaccacattcaagtcactgggactcaacccaccaacattccaatcgcctggactcaacccaccagtatttcaatcactgggactcaacccaccagcattccaatcactgggactcaacccaccaacatttcaatcactgggactcaatccaccaacattccaatcaacgggactcaatccaccagcattcaatcactgggactcaacccaccaacattccaatcgccgggactcaacccaccagtatttcaatcactgggactcaacccaccagcattccaatcactgggactcaacccaccagcatttcaatcactgggactcaatccacca

SEQ ID NO: 72787 - DNA, 1948 bp, Heterodera glycines
atgacaataaacgctgtgctcagctgcacggaacgggaaacggtcaactcgctgatccatgtcactggcggttcagcaaccaatttgcaagttttgcacgctgctgccgacacgggttcagtcggtagtctggcgggtgctgccttttggaggcattcgaggcaaacatttatgcatttcagggtcggatttgtcttccgccaccagtccattagacatttcgacttatttgtcggcaattaatctccgcgcgggttatttgggtcaaatcaaaggaatgttcgaaatgttgcgtgatacgcataacagtgaagaaattgcgcatcagcttctgtcggatcacttggaaaaacttttggactctgccatcaaatcttctgacccggacagcatcagcaaaccgttgcatctgatgacagcttattgcaatttttgttcacgtatcatcatttttagaatttttggagataaaaaaaagtattatttaattttaatcgcagaaatcaatcagagaattttgcacgcggtcatttgggctccattacgaagcttcacggaacagacaatgcgcaattgcataatttgttggaattggattttggtttcaatgaaagacattcaaattgatgttagtgaaattgataaattaggtaaaaattactgaaaatttcttttagtttttacaacaaatgaccagctgttggaggattgtgtcacagcaaaatttgggtcttttcagcagagagtacgactcttttgcttgtccactttcctctcaaaactgtgggcaaaggccgacgccaaatgccattccgcataatatttggatcaacgtacgttttcttggagccggtgacttcattagtattccctcttaataaatttagaaatatgaatatttcgaacatttttgacaaaagttagaaaaactaaactaaaaataataacccataaaaatgcaattcattttaaaattcaaatttccctatactcatttctcagtatcttttgctttttgagttgtttttattctcccacagtttttggctgaaagagtgagcctcgcgcggtattgcggccgagaacaaatcgacttgttggagatgatgttcattcagtccttctctctgagcattggcgagagtgtgccttcgtctaattcggcgtctcctgaccaatttttgttcattcccgaacaaaacaaagtggcagataacactcgtaacttctttcttcgcaatatctattcatggattttccgttttttagctcttatttcccgtaatattgtcgctgtcggtccccgtttccgcttactttcgtccgcactgacgatggtccagggcgagacaagcggatgccgcatttcgaagaacattctccgccatcggatttatgccgtggcattcgattacttttctatcggtccccaaacgccattatatggaggggcatctcttcagaatgacattcgcagcattgtcacattttggcaagcactttatgccgattcaaaatacattcggaaggagtcattctccaccaatggtctttccacttccttttatgactttttctgtaaaattgttaagataatgaaattcttttcaacggtcttccgccacaattttacggaggtcaacacacaagcgaagctgcgaagtttaattacgggaaaaacatcacattaatacggttgtgattaaggaaccaaacttggcatggttcgactccgatctccggcggttggatgacttcgacagcaattgcaaacagaacactgatggggacagtaggacaaaacccactttctaatttacgcatccaagcgaaaatcaacgaggagaatgctcaaatgattgatcgacaaatgaagaacattttacggaaacgacaacttctgctgatccttttggtgattggaatcagcttttattattatgattag

SEQ ID NO: 72788 - DNA, 585 bp, Heterodera glycines
atgcacgcgttttgcgctcgagctatttatcatcgggcttgtcaatccaaagcgaaacaacaaagatgctgttttgaacgaataaagggcataggttattttgaagaagtgtcaaagaacatgcagcaataagcctgcaaaatctaataagtggaaaatacatgagtatagaatttattttcagaaagtgtcaacagacttttggaaaaatatatttgcaatttatcaaaaattttgagaagtgagttagaaatgataaacttcacgattcaaaccaattttcgttgctctaattaatccaaagcgaaacaacaaagatggtgttttgaacgaataaagggcataggttattttgaagaagtgtcaaagaacatgcagcaataagcctgcaaaatctaataagtggaaaatacatgagtatagaatttattttcagaaagtgtcaacagacttttggaaaaatatatttgcaatttatcaaaaattttgagaagtgagttagaaatgataaacttcacgattcaaaccaattttcgttgctctaattaatccaaagcgaaacaacaaagatggtgttttgaacga

SEQ ID NO: 72789 - DNA, 691 bp, Heterodera glycines
atgttttgtaatggtaagcaaacaatttttatcacaactttaaatttaattttttatgttttttaaagaacccaaggcaacgaagcacttgctgaatatgatcagagatttatcgacattttgcgcaaaaatttggagaattctcgtgactttgggtatgttttactcaaactaactgaggaaaagatggacatattgtcgaccagcagtgagaaacagaaagcgaagaaatacgaacaattgtccatgtatgtataactaattaaaattaattagtgagctaattagttgttgataatgaatgggaaattgggtcattcattaataacaaaattatttgacgcctctgtctgggttaactcatttatcttttcttttccatattttcaaattcttgcagattatatgcctatttttaatttattttggaattttggttcacattttgtgtaaaacatttatttttcagcactcgacattgcttttctagaaaattttgtcatttcttgataaattataacccaaaatcggacgttttgcctactggacatttcgcctactgaatatctcgactactaacctaaaatagatctttcgaaaacgaatttcaccaaatatatctgaattaatttatatttagctattttagaatgctaatgaaatttagcctaaaaaagcaaagaaatattta

SEQ ID NO: 72790 - DNA, 412 bp, Heterodera glycines
atgtggggaatcacagaaactttggtcgccaacatcgcggtgagcatttgcgctgggtttgccgcccaccattttatccggcagttcattccggtttttgttgagcggaggttgtacggtttcgacatgtgcaaggtccttttacgcccaagggaatttgtgtctaaaactgttccatggtgggaggacgttaatgctcttcccgaaattcatttttaatttccgaaaaccgactaaatttgcagagggacaaagaaaagatcgctgagccaatgggcgtcgttgcggccgccgtctatttgattttcgtgttcgccttcatccccgtgcccttttacgaatggctcagtcaaaacattctcttcgccggtgccgctgacaatcgccacggaaaaggcactcaaatcgaacg

SEQ ID NO: 72791 - DNA, 80 bp, Heterodera glycines
ggaagctattcccgaaggattcggtctccccatcatagcagggcttttccttgtcttttggactgccctcgcaaaatctg

SEQ ID NO: 72792 - DNA, 288 bp, Heterodera glycines
atgggacgaaacggaggaggggaaaagcgggagaagaagcagaagggagacaaagaggaggcgcaagaggagaaaggaggaaaaagtggagggaaaggaggagaaagaggaggagggaaaggaggagaaagaggaggagggaaaggaggagaaagaggaggagggaaaggagggttttttcatcggcggagagtgaagcgcgcgccatttgctgaacggactgataacaatcaaataacccaaaccattaaattgtattttgcattcgacacatatgaacaaaattaa

SEQ ID NO: 72793 - DNA, 1054 bp, Heterodera glycines
atggctctctccaaggatatgcgtgcccaatttatgcgaaccattcacaaaacggtgcggttcttttggaagggcaatgcagcaggaacaacaatatcaacaagagcactgcaaacggtagccgactcaaaccagtacagtagccaaatacggtatgtcaatgttcatgctactggaagaaccaatcggattactggacaataattacgcaaggaattcgaagattatttgcacaaattcttttgataattaaagataattattaattttacatttgtaatgctaatttttgtaatttaatagcaattttaatttttcatcgttttattcgaacttttgattgataatctatctagtcatataaaaaaataaatcatcatccttaacaatttttgtccaataattaattacttaatttattttccatttttcgtcttcatcacatccataactttgtttctgctttcatcgcgcttctctgaatttttgtatttgtgccgaattgtttaattgaaaatttcacctaaacattttaattaacagcgctttttaggtgccgtggacttcctttgaggaatgctttaaattcctaaaaaatatgtttttaatagggtaggtcgggaccgggaattttgggcaaaaccgggaccgggacttttcgggttgaaaaacctgagggaaaaaaccgggaatttcccggttccggtcaaaactggtcaaaaccgggacttcggtactcagttgtccgtgttttggtcccggtcccgacctactctagtctttaatcaaaaatcttttttaaaaaattttgccaaaaaaaaacctttgcgcaagcacagtttgcttcacttaaggaaacgaaaatttctaggcatttttattttccggtcaaaaattttaattaaaaattaacgaataacaaaaatgtctttttattaatacaaagcaaaaaaaaaagaaaagaaaaaaatgcaaaatgggcaaagaaagaaaagtgaaaaaataataattttcagcaaaagaaaaaatcatttttaattagaattacaataaa

SEQ ID NO: 72794 - DNA, 386 bp, Heterodera glycines
atggttgcacaaataaggcctttgcttgccgattttgtgggggaaaaccaagtggacaatattttcaaaattcttggcattccgaccattttggaaggttcgaatgatgcattattattagtagacacggaaagagaagaaaatgttgaaagtaacaaaaaaagtacgacaaaaaagaaaaagccgaagaagaaacagctaaacactgaagaaaatggaggagaagaagcggacaaaacagcgacaagtgacaaattgtcccaaaaaggtgttgctaatgagagtgagcaaagtgacaaagtgtcggcaaatatttcaggggaacaattaacgactgataaacagccaattaatgatgatggtgatggaataattaaaactaatag

SEQ ID NO: 72795 - DNA, 89 bp, Heterodera glycines
  unsure (1)..(89): unsure at all n locations
attttgttacggttattattcaagtcgcccctaaaactcggttgtcggcggtacgcttcattaattgctccaatttgtgccctgngtaa

SEQ ID NO: 72796 - DNA, 721 bp, Heterodera glycines
atggatttaattcttgccaccgattggataaacaacgcttatcccgaaatggatttagaggacgccaacaaagataacaaagagccaacgaaaaagcaagaggaggaggcggaggatccaagctggatcagtctcattgacgaggagatgaagcgcgagccgctcgctccaattggtgaggaggcgccagcaacaagttacttttgttgtcattgacatgtaaattttaaattaggcactccaaaaaagtgtggttgcgccgaacgccgtcgccccgtgccgctcgtggaccacctctgcaagcggttcaaatgcagtgcccatgaactgcatgtgcttttcaaaagcctagagaaacgccgggacattgtggagcatttgcgctccatccaactgcgcaccgcccacctgcgcccttccgtgcgcaattttccagtgcggtgcaatgacctttccatcctggacacccactccgccccagcttaccgaggctacctcagcataacggtgtttttatttgttttgttttgtcggtaccacgcaatttaaaggtacggatgcactactacataaaacatggcatccgcttgcgccaccccaatttgccgtgcgtcgttgaatttggaggcggagaccacaaaaccttttttcctcttgaaattttgtccattgttttgtagatgtattcaatttccaattgtactgttgtttttaaaataaa

SEQ ID NO: 72797 - DNA, 464 bp, Heterodera glycines
atggctcttcgcgttcttcccatcgtcattttggcactgtttttcatttttgatggcacttttgcaaaaacggaggatgaaattaagcaaacgcaactgctgaagatcttaagcacaaaaacaacgaaaaactcttctgtgcaaacggaggatattgaaggtgattcaatgagaaaaataaaaatttatactttttaatattcgtgagactcgtcaattaaaattaaaatttaacgagaaggcataatttaggataagttttaaaaattctgcccaaatttgaccgtttctttgaaagtgccattcttggccatagacacacaaatcatttttatatacgaaatatatcattggcgatttaagacgcaattgcgtacatgaaattgacaaacgaagaaggatacgaatcgcggatgacgaaaggcactggtgcaaaacaggtcaagaatttattacatcattaa

SEQ ID NO: 72798 - DNA, 843 bp, Heterodera glycines
gactcaaccctacagcattcaatcattgggactcaacccaccaacattccaatcaacaggactcaaccctacagcattcaatcagtgggactcaacccaccaacattccatcaacaggactcaaccctacagcattcaatcagtgggactcaacccaccaacattccatcaacaggactcaaccctacagcattcaatcagtgggactcaacccaccaacattccaatcaacaggactcaaccctatagcattcaatcagtgggactcaacccaccaacattccaatcaacaggactcaaccctacagcattcaatcagtgggactcaacccaccaacattccatcaacaggactcaaccctacagcattcaatcagtgggactcaacccaccaacattccaatcaacaggactcaaccctacagcattcaatcagtgggactcaacccaccaacattccaatcaacaggactcaaccctacagcattcaatcagtgggactcaacccaccaacattccatcaacaggactcaaccctacagcattcaatcagtgggactcaacccaccaacattccaatcaacaggactcaaccctccagcattcaatcagtgggactcaacccaccaacattccaatcaacaggactcaaccctacagcattcaatcagtgggactcaacccaccagcatgtcacagaacaaaccactaatgttttttcaaaagcattcttcattcatccacccggggggataaatagaatttttattttttcgaacaaataatttctttaaaaatttaattaaaaattaattaatttaaacgaaactcattaaatgttta

SEQ ID NO: 72799 - DNA, 443 bp, Heterodera glycines
cgatccaaattgggggccagggttggaataccagggttagaccgttgtcatgattgcggtttaaggggtaacggtcgaaatcgacgagacctgcattgtgcgcagaaaatacaacagagggcagttgagggggaatgtgaatgagtggctttttggaggcattgagcgcggggaaccaatggacaaagggctttcatggtgccagtcctccgcagacgagcccaagatctgctgccattgatagagcaatacattgcccctgggagtataattcatagcgatatgtgggcggcttatggggggattcccaatctgccacagaggtaccacatcatacagtaaaccataatgaaaatttccttaatcccaacgacccaaatgttcacacccaaaacatcgagggtatgtggtccacatacaaacgcaaattccgccccaatctg

SEQ ID NO: 72800 - DNA, 4572 bp, Heterodera glycines
  unsure (1)..(4572): unsure at all n locations
gacgaccccctccctcttttacagccgccccccttacgacgaacgagggggggggggggtgtccgaggcctcttatgacgagggggtgggtgtcgagacaccccttgtacatgtatgtttttgttatgttcgggatcgagcatttaaaattatattgacaatttcatcgattagcaatgaaatatttcgaaatttaagttttaattttgcatcggcattattaatggattagtaattaaaaagtttatagaatttatgggcaacaacttatcatcgcatgcaaaatgaaaaattttattttataatcaaacctacaaaatttcataaatttaaataaatttaattttttttaatttcaaaattaagtttttctaaaatcttggttaattttcaaaattcttatatgtaatagagtgattttattttatagatgaataaaatgatcagaggatagagcaatgattttgaatcccattatggaaaaatttaccgttgaaaattacaaatttcacccggatttaaatatcaagaatctcgctcatccaactactgatatttaatgattgaatgattacctttttaatggttggtgaccatgttttgctgccatttagctgctccatcacgagaagcagttcaacgacttgcaaaatcagggcgccgcgctgatcaaccaacgccacccggcgggcgaagtgatcgaggtgtacctgcgcaaaatgcagaaccaacgggattggatgctgaacctgagcaagtgcctggagggccacctgcgcgacgcgtgcaatgccaaggcttttgtggaggagtcggagcaggtggagcagcagatgcagcaacagttggtcagtttggctaatgtcagcactggggagggaatgctttccgaaaaatttcggaattccgaattattttaaaaaatttttaaatgttagaaaattttaaaaaaagatgttttttttttaattggaaaataagtttatacaaagtcttaatgcgtttttaaaacttgcacaatttccttagcgaaatctatacaaaattttaaaattttccccccctgtccccccaaaaagttttttaaaaaccacgccgcaaaaanaacgttttttttttttaaaaagtcgtagacttgccaaaacatcgcaaaatttggcccggaccaccccaaaaaaaggtttttttactttcttttttttctaagactttcgcttcgaaaaataatccatttaaaatgtgacatacctacacatcaaatagtgtagtggattatccaaactgactccattaggggtcgattaccgtctctgatccctgacaaatttttgccggtttctgggaaaaaatatatttaaataattcgtcttactcattccccaacgatttcgcttccccgtcctcatccccgttgtctcctccatcactgatgctttcggattttcagaaattcttgtcgcaaatcaaattcgcgacattccttggccgcaaaaaaagccgttttaagagaaaaaatttgttgatttacatgactggctccgacacccctccccccccccgacttattcttagattttgagaattttgtattgagttttattattttgcccaagaaggtgaaacctaagcgtcggattctgaaaaatttttgaaggttgatggtctttatggccgtgttaacaggagagctcatcttgaaaatctttttaggaaatttgaaataatttgttcaattttgaatttaatcatttttaaattttcctattagtcaaacaaatgagatagtgatcagatttcgaatttgatgcttttgaggtggtgtcaactccgggaacaagcggcgccacgggtgccaccgctgtgtcacaactcattgaaggtactaacgcttgtctttgacacttcataaaattaatcgtaattgtgaccaaattgaaatttagaagacgaggaaaaatgtgcccgttgtgccacagcatcagccactgtacgaaggattgcaacaagcgttgaatcggaagaattatttttattttcatttgtgcgtttgttttgatgtgttaagcataaaaatttttcaattttttcgtgcctatcaaagtgcctttttcacgatttttggcgcctaaaaatttttgaaattcttttttttaaagggagcccactttggcgattttttgaaaaatttggttttttacaaaaatgtcttttttggcactcaaattcggtaatagtatggtttacaggtcccacaaaaaaaaggcaaaaagggggttttatgcaattcttcaaagtcctttagggttctcgagggcgctgatcacgaatataatattcatttcgaccaatttcgaaccccgaacccgaattcgaacctgtaaaccatactatcactatgggtcaactccactgtgcagagaaaagcctagtactatctcgtcgtttctctttttctttgtaatttctctctctttggcgtactatctcttcattttaatggtgtaaaaaacaacatttgcttttctatgtctagctttttttctctatgttaaatccgcaccaaattttgcatagcgatagagaagaaaaatctgcatttttctatactgattttatttttgtttatactcccattcaaaaattataaataataataaaaacgtatttcttttttctctcgttttggcgtactattttcatgtctctaacacatgaaaaaacataaattcgaaaattctaataattttggttataagggtacaaaatcactttgaacatttagaatcaataggaaaaagaataaatttagcattttggttagaaagagtctgcctaggacttgagttataacatgataaaagtttgaaattcccacaacttttttctgagatgacaaattacttaacattcgcttagaaaaagattccccttttcaaaatctttttttagatgccaaatttgttcagtttgattgggtatgaatttacccttttcatttttgatccgatttcttaaatattttgataattttcaaattttatgccatcaaaaaatcagcatttggggttaaaaatcaggattgtgtgtatgttttattagtataacaaatgttttgattctgatttttcatttgttttttctatttgccaagaatggtgaaattttggattagtaaatgaaacggaaggaatttgtctttgggttagtgaaacaaaaagagttgcattgaaatagtttttaagaaatgaaatattctaattagttttggttttgtttatggattttgcttctctcaaaattagtcaatatggaaaattactgaatttgaatttattagtacgaatattttggggtaatagtagggtttgtcccccccccctccccaccttttttctaaaaaatgattttttttttgaaattcatcaaaacgtctttcctggggttttccatttcgaccaatttcgaacaaaaagtcaaaatttcatttttcaacaaaattcacatttatcttccaaaatcgattcaaatggatggaatggcaatacaaatgcgttgaagacatgagaaaagaagaaaacaaacattaccagattggggcggaatttgcgtttgtatgtggaccacataccctcgatgttttgggtgtgaacatttgggtcgttgggattaaggaaattttcattatggtttactgtatgatgtggtacctctgtggcagattgggaatccccccataagccgcccacatatcgctatgaattatactcccaggggcaatgtattgctctatcaatggcagcagatcttgggctcgtctgcggaggactggcaccatgaaagccctttgtccattggttccccgcgctcaatgcctccaaaaagccactcattcacattccccctcaactgccctctgttgtattttctgcgcacaatgcaggtctcgtcgatttcgaccgttaccccttaaaccgcaatcatgacaacggtctaaccctggtattccaaccctggcccccaatttggatcgggtgtcggacaaaatactcagcgcaaacatcgcggtaaaaattcagccaatcagtgatgacctgtctactgatcccggtatccttttcaatgtcatcaaatgtgccgaatttgcgggcccacaaatatgacagatgaataatttcttttgttgtcaatggtgaatacaaaaggcgttaaaaatgcagagcaatggacaaaagccagcacattttttaacgaagagacgaacgacggtcagttattggccattccatccatttgaatcgattttggaagattaaaaataatcattctgctcagattcgaacataaaatgaatttttcaaaattttgatttttcgactttttgttcgagttcgagtctggggttcgaaatagaccaaaataaatgccatattcgtgatcagagacccaaaaaacccttagaagcatgttttcacggctttttaaaacaaaaaatttttctgccgaaaaatgggggggggcaccacgtcgggaccacaattctgcattattacccaagaattcgaaccttttacg

SEQ ID NO: 72801 - DNA, 2071 bp, Heterodera glycines
cttggcctcagccagggagcacgctacgtcactgaacgatactcgaccgcatcgtccggcacgcgtggcaacgcttttcgtcgagttgaggatgccatccaatggattcgtgatcgaatggtgtgtttgatgcggatatactcaataattaaatgcttgttatgtgttgattaaacaaccgggttagggtttaggtttgaattgttttgattttttaacccaataaatatatcaactgatcattatcatttttcctatgagctgaacgtattataaaggctgtgatcacttcaactccgaggtttaacagacctaaaaaatggtctgatcaatttcttccttcggttttaactgatccccatattgaattgatcataaaaatagcagtgttttaatcatttacgtgaattaggactcctaattatatggtcgcaggcttaataaacccatttatttcagcataagctgaactcgatgcaattcagcgagacgctggaagtgttggagcaaatctttgaacagcacaagctggacaaccgggacattcaggactttcgacaaacggtggacgaatgcattgccagacaagtaaaaaaaattgccaaaaataatttaataaaacaattggagtgatcttacaatccattttttgatcgggggaaggtgagacaccaaatttatgtgataaaaatattttgaattgtttctggcctacaaaatgccaaattgttagagtcaaaatattggaatattttaaatctctgatattgaaccggtggttctaccgtatatttcatataataatctcgaccaagatgactatgatcaagaatcattcctcgttccttccaacgtctacgttctctgatcacttttcactttctcaggctgaagtatcagcagaagattcatacgattattgtgagctgttgaaaatgatggagtcggagtaccaacagttgcgcgaactgtctgccgggcgcatggtcgatttggtgggttgggctttataccatgcttaattaggtcctttaatagggcaattaaattatgcgttagccatttccttaatttttgccatggtctcttaatttgatcatattttctttcttgtttattactgatcaaccaaaatgctctctctctgatcacaggactcgctgatcgccttcatccgtgctgctcagcttgaactgtgtttgagccatcgtcgtcgtgaggcattggaagtgaagcgtaaccggagcgacttgggacgcctggacattccgatgctgaaaatttacttaaagcaggtagttgggcgggcgtgactaattgggcataattggccagaaaataaattgtgaaaaaagttgtttttgttcatacatgtacaaggggtgtctcagaccaagggccatacgcaggcccgtagccatggggggggggaagggagttcatgattaattactcactggttgaattttttattgctttattattcgccaaacagtctgttagtaattatgtttaatgagtttcaattaaatgaaattggttgaaaataattatatttatgtacagaaataagaattattattttttcattataaattcttttagggttttctttgtttgcataattgcctatgttaaaattgatttttgcttcacttttttatcgaaggaaatattttctttttaaatttttttataattgagatgatttgatcactttttgtcgccaataaaattaaacaatttatttttaatcccttgaatcattttaattatatatataatttttaaaatcatttatataaaatttttgcttttcttccacttttcctaacgatttaaaattgaaataccattcactcgttttaataatttacggccaacgttctgccacaaattggccaattaataaaaaaatataatatatttaatgatggtcccataaaaatccaatccattaaccaaacaaacatatttttaaaattcttcccaattttaaagaaataaaaatttttggcgcctaaacgacgtgaccgaggacgggggagaaaaatgatcatcatcaccagtg

SEQ ID NO: 72802 - DNA, 2263 bp, Heterodera glycines
atgccaatcaaacaaaagccatcatcccaaaccggacgcagcggctccaaaaacggaagcaccaaaaccggcagtgcctcgccccacagttggcccagcaaaaccggagcagccgagccgaaaggcccaattgcaaccggttaaattgccaacaccaaacaagcagcaccgatccaaaaagtgatcaaaccaaaaacggtgacgactagagaccggaaatttcaaatttgcggatcctgttgcaggattggagttcaaaattttttacaggacaggatccggcaggattaatcctgcaaatcctgcaatcctgcaaatcctgcatttaaaatctgcaggatcctgcgcaggattgcggatttttggaaattttgaaaaaattctgtattaataaaaaagtctttcaaagtataaaaaagtattcaaatatatttttaaaccaaaaaatgatgaagatgaaaattaataacgtttttttgcttacactccaagcaatcgactgaatcttctttaatgcgtttaaaaagaccgatttgccaaattgggtggctcataataatagcttaaattaaagtaaaataatttgtatttaaatttctttgcaaaaaagccataatccataatgtatagggatgggatttttaggcacaaaaaatcgcgaaataggcacttaaaaaggcagaaaaatcctaaaataggcacgaaaatagtaaaaaaaaattattaacgctttttaggtaacaaaacacataaaaaattcaattgtataaacttttttcgaataaggataagtttttaaacgaaaaatttttattaataaaaaaatttttgaaaaaagaaagtttctgaatatttggcattctatttttaagaattttcaaaaaatcaatgcatgatcctgctgaatcctgcataaaaatcaaatttgcgggtcctgttgcaggattggaattcaaaattttttacaggacaggatccggcaggattaatcctgcaaatcctgtaaatcctgtattttccaaaatatgcaggattgcggactgggatcctgcaaaatcctgcgcaggatcctgtcctgcgccggtctctagtgacgactacgctgaagtaccagccaccgaggccaacgacttctccaaaagctgaaccgccaaagccaatcgtcgtagccccaaaggtcacaagcccggtgaccacgcaaacggtacaaccaacctctccgccagaaggacaaccgaaaagtcggaaccgaggaagattccgaacgcgatacgttatgcacagaaaccaaagcgaacctgaaaaggtaagagtttacgacaattcgagacgaaagagagcgacggtccacacggagcaaaagtgggcactgttcccgtactacaacaccccaatacagggagcggaaagagccaacccgtggtgcgctatgaacgcgcaagacgagcgagactaaaaccagggctggagcaatcactggaggaagcaacgcggcagttggaagaatacggacgagtgacaatttcgaatccgagggcagtgtgttgaaagcaacaaggggaatgatcacaagggatcaatgatcaagggggaacgatcgggaaacgataagggattgaaccaagccaatcccgcccagagcggctcgattcagaattggagcgcattcttcaaggcaaaaaagagtaagcgcccagcagtctcgaggtcccgctacagcaatttgtcgaagcacgggcccaccaagccgaagaggtgaacaccaacgtgctcaacgtcaacacgacagagtcactggtcgtggtcgcagcttgcacatcagtagtgcagcagccgattgaacacctgaagtacaggtcgcagctactcaagcggaagatctcctggacttgggcaacgaagcgttatttcgttaacgacgccaagttcagcgagacaaaaaagacggagctggacgaagcactggaagctctgatcctgtcccaagtaccgccaccggaagaaagggagctgaagcagaagaccttcgatgccatcggacgcatttcgcgaaggaacctggaaggaattcgaaatttgcatcgctgggtccacgcgggcaaacactgccctaagaaatggggatttgcacatcgttctgaagcccaagtccagtgagccattgagccaagagcgaaggcttcgcgagctccaattcctggtcagggaattccgactgatgaagcgtgagtacatttactgccactgtgtcttcatcgccaaa

SEQ ID NO: 72803 - DNA, 351 bp, Heterodera glycines
attatgagccacccaatttggcaaatcggtctttttaaacgcattaaagaagattcagtcgattgcttggagtgtaagcaaaaaaacgttattaattttcatcttcatcattttttggtttaaaaatatatttgaatacttttttatactttgaaagacttttttattaatacagaattttttcaaaatttccaaaaatccgcaatcctgcgcaggatcctgcagattttaaatgcaggatttgcaggattgcaggatttgcaggattaatcctgccggatcctgtcctgtaaaaaattttgaactccaatcctgcaacaggatccgcaaatttgaaatttccggtctcta

SEQ ID NO: 72804 - DNA, 372 bp, Heterodera glycines
atgtcccatcgtcgttcacatgctgataatgtggaaacaatggtaagtacctaaaatgtatggtggcatttttgtgttaaaaaatctgccgaataaaaaaaattttttcctattttttggtcaaaaaattctttttcaaccattttgaaacttttaattgtcatttaggctctaaagtactttataaattgaaaattgccaattttccaggcccaactcatcgccggccttttgcccccgttggcgttggaagcgcggatcagtggagggaatgcgctcggcgaccaattggtcacgcagttgggactgtccgtccaagcggcacagaatgtggacatggccattttgggtagggccaaattaaaaatttga

SEQ ID NO: 72805 - DNA, 93 bp, Heterodera glycines
atggggagcaaaaatccaaagcagaattacagtacaggctatagggaagctattcccgaaggattcggcctctccataaatctgggcgcatcg

SEQ ID NO: 72806 - DNA, 150 bp, Heterodera glycines
  unsure (1)..(150): unsure at all n locations
atggcgcagggcggcgtgcaccacaaattggccgacaattattacttggaacgcgacggacgccgcgaagttcgtccaccgaagcccatttacaaagcgctgggagagacgccgttgtgggaaaagnccgagcggtgggcgatcgctgac

SEQ ID NO: 72807 - DNA, 751 bp, Heterodera glycines
  unsure (1)..(751): unsure at all n locations
atggagaaggcctgcaaaatttggagagattatatcgattttagtgcgctaggttcgatgaaactttttaaaatataagcctaaactttttggcctgtttaaaaaggaattaaaaatttttaaaaattttattcatctcccttttgatagtgaaagcatcagagagccttatttaacttttaattaacatttggtgcgtttcagagcagtttctgaaaaaatatttatgaattaattttgctaaaaaaataaaatagtgaagctttaaaaattaataaaaaattttaaattcagaattactggagttagcatcatagcagtgcttttccttgtctttttgatgctctcgcaaaatctggttcgcttctgatcagtttataaaaaaaaagttaagcctaaaatttttcgcatatttaaaaagcaattaaaaatttttagatttttattcatctccctttttgatagtgaaagcatctgagtgcctaaaataacttgtaaataaaatttggtgcgtttcagaagcagtttgtgaaaaaatatttatgaattaattttgctaaaaaaataaaantagtgaagctttaaaaattaataaaaaattttaaattcagaaattactggagttacaatcataagcagtgctttttcctntgtctttttgatgccctcgcaaaatctgggtcgcttctgatcagtttataaaaaaaaagttaagccctaaagtttttcgctcgttntaaaagcaattaaa

SEQ ID NO: 72808 - DNA, 138 bp, Heterodera glycines; identical to SEQ ID NO: 50950

SEQ ID NO: 72809 - DNA, 677 bp, Heterodera glycines; identical to SEQ ID NO: 63383

SEQ ID NO: 72810 - DNA, 2092 bp, Heterodera glycines
atgccaaccaataatgctgtggataggccagaatttggaagccttgttggcacaactgcaacaataggcgcagcagttggtgcaccaattggtgtactcgttggtggattcattggctcaacagcttttcctctccttggaacagcagctggtgcgtcaatcggttttgcagtcggtggggcaatcggtacacttgttggcgctgcagttggagtatttgttggaggaattattcaagcagccaaagacatcgtctgctatgtaagtagggatggcgaaaagtcgttctccaaaaggatcaaaaaatatgagaaaaaaattatcggttcatttcaaatgtaaaaattaaataatatattgatgtgaattatgtaggaatggagaggaatcagagataaaagagaagcattgtggattaaacaaaatgctttgggacagagtcgttatttaaacaaaaacccatcaatgtgaaaatgtaaaaagttgtggctagaggaactcaaaaggccttgtttttcgaacattcttggtcataactttcttgaatcttcgaatgtatcaatgataaaaatttagttgctttatagcaaaattataagaaaaaaatttttattttgggcttttttaaatacgacaaattttgatggattttaaataatgacatacagtatagacaccaaatgcttaatcttttttaatgagtttttgtgcatttttgagagagtgtttgtgaactgaaattgatatttcctttaaggacaaatgtccggcacgtaccgcatgcgtttactatgacagtcctgattcatacttatgctgtaagaagcgttacaaacgggaatgtgtcaaggattttgccgaggtaaaaaagtgttgacaaataatgaaaattgtttaaaattttaaatcaatgttaattgttaaaaaaatgaaaattatgtaaggaaaaagctgactgggcggttaaaacgcggaaagcggggttgataagatccataaaaggaagggcggatgagcctcggtagcttaatggtagaactgcccacggaaagggtgcatgagtgggttcgattcccacccgtggtttaacatttttcccatttcttattattattaacattttaaaatcaatgttaatttggggacgggaccaaattacgccgccgaaattttcaacgatttttcttgaaatttatgatgaattagtctaaaaaaaattttctaacatttttttagaaatttgaaatttttaaaaaaatttcttttgcgaaattatgtccccggcgaaatttcgacaggcaaatttcgggcggcggaattttggggtgcacccgttaatttatattttttgtttttgtggagtaatttttaaaaatttccaaagatcaatcaatcccatatgggtaattgaacaattgtgtatgtacaaaaaaggtggctaaatattgaattaatttggatattccttacaaagcacaaatttctcgggttttgggtctatctcgactctctatgaattctcggtctcgagaattacaatttgaattttctcatacgaaatttagtttcgagaaagagaattttacactcataattatttaaatgtataatattaattatctaattttttatcagttattttcttttaattcatttttatttttcataaattatatagataatatttgtttgaccctaaaacctgtttcggaagggatgttttcgcattgcttttttcctgcttttaattacccttttacgatgtattatttcaatttctgattttcagctattttttaaaatttttctgtacaatttgatgctgtgaatatttctttttcattgaaagttcgaccgcttaaaaaatgattaatttttgcgatttgagtaaatcccattaaaaatttcttcgcccagccctgctaacataagaacaaggcgaatttggggaaacctaaaaaatacaaaagttaaatgcttgtatctacaaaatttaaggttgaggcgatgttttcgaccacaacaacgacgacgacaaccacaaccacaacaacgacgactccaacgccggctcccagagagcctaaggcga

SEQ ID NO: 72811 - DNA, 822 bp, Heterodera glycines
atgctaggttttcgatccagtgattttccgatccagggattagtgattcatggatcatgtgtggttcgagggtccgattctcaacttctgatcaattggtgggaaattcataataatgatgaggaatgggaagcagacgaggagagctcggcgaagcgcaaccattttaaagcagtacaaagcagggggttcgatctgaaaagtttctaaatgagaatattaagttaaaaaaaactaacgatttcggtgataattagaagatttataaaaaatgattgcacttcaattggaaagaaatttgttaaaaaaaaattcgaaaaaattatattttttattttcagtatttggtcgtatcttattatttaacactacccaaaaataaccaaattcggaattagaaatgtgataaattagaaaatttttagcaattactcctaaaaggaatctttctgaaaaacctaaacatatccgaaccatagtataaagaatatgagctgtaaaagtaataagctgtttaaaaaaaaccgaataattaatatcgaaaaagtaaaaaaatataaaattatttaattggataaaaatgatgaaaatgtactcagtaaatcatattcaaaagggtgtgcttttgctatgttctgctgctgattgcttatggcttccaaggatgacggatccaaacaatttatttggatttcaaatggaactgctgaaaaaaaagtaaagctaatcatcactttccccggaaaacgtataagcactgctgctattccatatgtattaagatgaatcatcacaaaatgggaaaatttattcagcacaaaa

SEQ ID NO: 72812 - DNA, 304 bp, Heterodera glycines; identical to SEQ ID NO: 51570

SEQ ID NO: 72813 - DNA, 101 bp, Heterodera glycines
atttctcaaaaaaagagatagacatttttctgggatagagtataaatttaaaaattccctcaaaaataaaaggtctattgcgcaccgccctccctatcatg

SEQ ID NO: 72814 - DNA, 786 bp, Heterodera glycines
atggtcaaacgcttttgcggcgaattttccgacgaagaggacatggagaaggatgctgcggtcgatcaaaatggtgcagaactaaaccaacagaaggaggatgacgacgacgactcatttgtgcgcggatcggacgaggaaattccgggtaaacgaacatttaaaaaattgaattgaaaattctttcggcaaatttatcattgtacccgatctttttgctcggataaatcctatggacttacattatttttgttggcacagatgacgacgacatttcgatggatgaacagccgagtgggtgtccgcctccgtcccgttgggatgagaaaagggcgaagaagacgacgacgaccgccacaacaatcgctgcggtgccgggcgccgcaatgccacgctttgcccgtttcgttgaagagctgttggagggcaccatttacgcgctgtggcccgaggcatcgttgacgttgccccgctttttggccgaccggaaattcttcgacgcactgatggtggcaaatttttaaaaaaattgtaaaagtttgcctttttgtgcacagagttattgcacaatgagttcacgtccggtgctgccgcccgagctggcgcatgccttccgcttctttcaagcaattgcactgtccggcaagggggagccggagggcgcttggtgagaaatgagtattctgtccagtccctttaatctatgaaaaagaaagaaatgtaaaaaagtgagatttttttaaaaagacgggtaaattttcaaaaattctaataatttttaataaa

SEQ ID NO: 72815 - DNA, 625 bp, Heterodera glycines
atgcatcacaatgtcattatgatccaatcagctaacgggataagaatgaaaaaagtaaataaattaaaataataagggtagaaatgaccttatagtaaaaagttgtgtttaaatggatcatttttttaatttttcgatgatatgtgtctaaaaaattagcaacaccaaaaaagcgctgaaatttatttctgaaataaattcaaaaaattcaattatatgtggcgattttaactgtccttcaattaattggtctgaatgcaaaataacaaaaaaagataaactttcaaaacaataattgagttcacggcacaaaatcaacttttccagcatgttaaagaaccaacaagggaaaataatattttagatttggtttttagtcaacccaaggaactcatttataatgtaaaggttggctcccctttttctattctgatcataatactgtttggtttgatataaatcaaactattccaaaaacagatagtcaaaaaatttttatcagagatttacgccagaaaaattttactaaactcaaccaagaaattctttttaatgggccaaattcccttccaattacagtttcagacataaatgagaaatactgcatatttaccactgaattaaa

SEQ ID NO: 72816 - DNA, 1079 bp, Heterodera glycines; identical to SEQ ID NO: 45540

SEQ ID NO: 72817 - DNA, 499 bp, Heterodera glycines; identical to SEQ ID NO: 60789

SEQ ID NO: 72818 - DNA, 66 bp, Heterodera glycines; identical to SEQ ID NO: 53398

SEQ ID NO: 72819 - DNA, 93 bp, Heterodera glycines
acattgacgaaaatgccgacactttgatcgaatcggagggatttttgcaaattgaccaaaaaatgttgtgcgaaattttggaacgcgacgaat

SEQ ID NO: 72820 - DNA, 114 bp, Heterodera glycines
atggtgtttggatggacattctcctcttttgaccgtcctcaactcggcctcaaattggcactgtttcggcccgtttcgaagcgctggtggacaaacatttcaacggctgaaggc

SEQ ID NO: 72821 - DNA, 93 bp, Heterodera glycines; identical to SEQ ID NO: 72819

SEQ ID NO: 72822 - DNA, 93 bp, Heterodera glycines
acattgacgaaaatgccgacactttgatcgaatcggagggatttttgcaaattgaccaaaaaatgttgtgcgaaattttggaatgcgacgaat

SEQ ID NO: 72823 - DNA, 747 bp, Heterodera glycines
  unsure (1)..(747): unsure at all n locations
atggaagcgcaagaattgggaaattnggcgataattgaggagagcaatgaagaaaatgaagaagaggaagcagacgaaggaaacaagaatcgtgtgggatgtaaaaagcgagatgataatgatcgaagaggaccgaggggaggaggggcgggagcaggaggatctgggagcggagctagagggggagaaggattgggaggaggaacaaacgggggagggagagcagaaagaagagatgcgggaacgggagcgggaatttacgaaagaggcaaagaaggaagaaaaactgcaaataatgatgtcataattgatgagcagcgttgcagaacagttgaaaatgatgatgatgaggaagatggttgtgccgaagttgaccttccggaattggagtttgaaaaaaaggtgaacgagacggattgttgtgcagtcggacttctgattgccgatctggaaggatcggctttcggacttatgattgccgatctggaaggaacggctttcggacttctcgatcaaaagtcagaatggtatttgatctgaattattcatcttatgctgttcaaggcttctgcgaaaacattaaaacgaagactacaaagaaaaagaagaaatgcaaatgaaagaaccgatgagcataaaacaaaaaaaagatcaaacgaaaagcacagagaatgaacaacccaaatgttcatcatatatgttcgtaaaaatttgtcctaaatttatcaacaaaaagaaatggtgaaa

SEQ ID NO: 72824 - DNA, 835 bp, Heterodera glycines
atggcgatagaggcagaagcggagagaaaagcgcgggaagagaaggaaaacttggacagagaggagcagcggttgaaagtggccaacaacacattgcaagtgagtggagcagcgcggaaacgcacgtccattctataaggggcacgtattccatgatacgttcccaattgacatgttgaaattaaaaaaacatgacaacattttcatgaacgtaagtttggccattaaatccgcccctcctctttttcactcacacttttctttctcttcgctttttccttttccattgatgaaaagccctttctttccgtttttctttatttccttttcctttcactttgttttgtggtggttgtcttccttcacaatgtgttgtaaatcgttgcagaatgtcagcgaagagtttctggaactgttgactttgaagcggacaaaccgtgcctattccatggacatgcaaatttcgctgcaggacgaacgaattcagaagcaagtgcggaagcaccaggagaagcgacgtcgaagtgtatgtgcacggaatttggtggttggcccctcccaaagagttttttggtggtcgttctttctcttttacactttcatttcctttcacacttgcacttaatttttaaaagctgaaaatttaaaaaatcgctttttgtttcagattatccatcaacgacgacgcaaattctccaagggacttcgcgacgtcgattttgttggcttcgaggccactgaggacattcaggacatgcatgcggagaaggaggacgaggagatggagcagttgtcagacttggactcaggggacgacccatctggtcaaacataa

SEQ ID NO: 72825 - DNA, 323 bp, Heterodera glycines
atggtccaacagctgctgatggtgagttgcgcttcaacaatttttttgtgtgactcagataattttagctaaaataaattaaataaaaatgataatttgaacattttttacctcaacatgagaatctgtgctccgccagctgttgtcaaaattggaatacaagaaataaaagaaagtaaaaaataatttactaacagaacattttgagtatattcttgaatatccttaataaacaatatgaagtaattgatgaaacggttgcaattatacatccgatcaaaatgatggcgacatgaaactgatcgttacattcagcggattga

SEQ ID NO: 72826 - DNA, 1044 bp, Heterodera glycines
  unsure (1)..(1044): unsure at all n locations
atgatttatttattcattaaagatcagtcggacctgatcagctgctacaaatatntaatgagtgctggtcagccaatttcaaaaagtgatcaaaaattgctgatagtgaatgcgacatattacaaaatgaaagcactgataaacggagcattatcaaccacaaagcaaataaaaagtggaggacgcaaacacaacaacaaattgagacgaatggcaaatgatattgaaatgacagcacaaaaagcccatctgttggaaaaccccaaaaattttgatgagaaattggtgaaaatttgctatttatgcagtttttggacgcatgtcatatcaaatcgcaacttgtacaaagaaagcgaaatttggcgaacatttttagcttatcgctttggtggagaagtaattttaaatttgaaaataaatatttgcatttttattgcatgtagtggcacttttttaatttgtttatttgttgttaatcaaaagggactccattttaggcacaaaaaatcgcgaaataggcacctaaaaaggcagaaaaaaatcttaaaatagggattaaataggcacaaaaatcctcgaataggcatttttaaagaaaatttttatcaagaaaaaataccaaatttagaagattaatttttggaaaatttaaaaaattcttattggtgttttctgatgtttttttcaagtcatttcttagaggggttttttcgaaaatcccgaaaataggtgccaaaatggcgaaataggcacaaaaataggcacttaagcattaagcacaanaaaatccaaatagtaggcataataaatttgatctanatnncatccagcggaaaatcgtttttttttgtagaaatttagacatttgcataaattgagtccactattaaatcattactatattaggaaatgccaccttttgcacaagtcccatggaggagaagacataatgggacaatccattgtgagaaagtgaaaagttctgaagtttgcagcattgctgaagtcaccacatcggnaacacgcacgaattgtgctgcatga

SEQ ID NO: 72827 - DNA, 950 bp, Heterodera glycines
atgaaatttactaaaaaaggaaagaaagaaaatgtaccggatcgtaagagagtgagaaaatgttgtaggattggttcgtgtttatgatgtaatcacgactaaatgacaagaatatatgtgtgtaaatgccagcattcgttctttacttaggcaaacggaacaattcgccgccccatccgtcggtgcctaatgtccgtataattgggtctcctcttgcctgtggaatgattaattacctaattatacaagatataattaattcacacacagttatccaattggccaaaaagccgttctttatgtaattattgctgtctggggagcccattagcaattcactgtgcaggatggaatcagcctgaataaaaacaaaattacatatttaaaaatgttctaaaatgaattgccggattctcaagtcgccagtccaaggacgagtcccaaaacggaagacaaactgttgggtcgacagcacgaagagcaatttccaatctaacggacaaaagggcacaaaaataatcgtaatataattttatttctgtgccaccttttcaggtattccctgtgccaacaaatgaaagtcgggccgccatgggccccgggcattttgctggagtccgaatgtaaaaaggcaattcggtcgtactcataggaaccgtagccttgcttcagctgcagcagcgcattgtgctaaaaaaggtgcgccttttacgctaattactagggattccatttttatgtaaatacatatttgtttcctggattctccatagcctaattagtaggaaaaacactttcttttttgtgtttgtgaacaaaagttgggacttttatttccaatttttgaggattttttaaggaaaattttttagatgccccaaaaaagtcgaaaattttgcatttttttttcatattttgtaaatttagaaaaacatcttctaacaaataaa

SEQ ID NO: 72828 - DNA, 749 bp, Heterodera glycines
gctgattccatcctgcacagtgaattgctaatgggctccccagacagcaataattacataaagaacggctttttggccaattggataactgtgtgtgaattaattatatcttgtataattaggtaattaatcattccacaggcaagaggagacccaattatacggacattaggcaccgacggatggggcggcgaattgttccgtttgcctaagtaaagaacgaatgctggcatttacacacatatattcttgtcatttagtcgtgattacatcataaacacgaaccaatcctacaacattttctcactctcttacgatccggtacattttctttctttccttttttagtaaatttcatttttgaaattatttttaaatttcatttcaaattatctttttccagtcagatacccaatgcagtggtcaaaattatgacaatttgcttgagagtaaccacgacggtgtgcacgtttgggtgggcggacatatggtacgaatgggcggggggcggcagcagcagatagagcagggcacagggatttgttagtccaaaaagtgccatgaaacggagccaaattgccgaattcgcagtgcttttcatggcccgggtttcgggagtttatgagctcatctaaattaatgaccatcattatgctgccattgcgcatttatttatttttgttcagagtatgcttgagactgcgccaatggatccaatcttttttatgcaccattgcttcatggattat

SEQ ID NO: 72829 - DNA, 502 bp, Heterodera glycines
caagttttttacaaccacatattgccaatttaatttcttgcagttttaaagccatccattgcctgccggttctcggcacagcaaagcactaatagggtgtttgactcacttcaaaaaataattccatacccaaatttttttacaaccacatattgccaatctaatttcttgcagattgaaagccatccattgcctgccggttctcggcacagcaaagcactaatagggtgtttgacttacttcaaaaaataattccatacccaaaagttttttacaaccacatattgccaatctaatttcttgcagattgatagccatccattgcctgccggttctcggcacagcaaagcactaatagggtgtttgactcacttcaaaaaataattccatacccaaaagttttttacaaccacatattgccaatctaatttcttgcagattgaaagccatccattgcctgccggttctcggcacagcaaagcactaatagggtgtttgattc

SEQ ID NO: 72830 - DNA, 860 bp, Heterodera glycines
atggccggtgtttgtcaaagtaccggctatgtggtcgagccgtacaaagattacccggaactgctggacgcactgttgaagttgtttaagacggaactgtccagctcaatgcgtcgtcttacaatgaaagtgctcggtgtgattgggtgggttttatcaattaaagaaaattgtaacaaaaaccaaaaaaaatttttcagggcttttgatccgtacacacacaaagtttaccttggaaaagttcattcgcacagcaagtcaaggtcgttggcacttaccctgccaaattctggcgaaactgcggaacactgtaaacattttttcacttaacaaaattattgcatacattggtgtacaacagggatgggccgaggtttcgcatttcgcctttcgcattttttggcgtttcgcatttcgctttttggcgcgaaacgcgacttttacacccctaagaattggattaaattcccataaaatttttcaaaattttacctataaattggctaattttcagtgaaaacctgtttataaatgatcaaaatttccaatttttttccccggcggcgcctatcggcaccgccgcgcccccaaaactcctattttttcttagaaaatggcccaaaatcgcaaaatttggtaatttgatgaaaaactgttctcagcggcgccccaaaactcttatttctcattagaaaaatgataaaaatcacaaaatttgatcattttttagtgataatctgtcaacaaattttaatcaaattttcaaaaattttcccggcgccgcctgccccctcttcccaaaaagtttttttggaaaaagcgcgcctcaaaaaagcgttttattgatttttaaatttgga

SEQ ID NO: 72831 - DNA, 105 bp, Heterodera glycines
atggacttcatggaattgcatgtacaagcaaatggaagcagtcaaagtgttgatcaaagaaatcaaaaacacttgcaaaaaggtctaaaagtaaaggccaaaata

SEQ ID NO: 72832 - DNA, 605 bp, Heterodera glycines
atgaattgtgctctcgcttcatcgttttcgccagtcgggaaacatttcgctgcagtcgttgcggacaagaaaggaatgagggctgatttgtacgtcaatggcgaagaattggtagaacgtcttggttcatgcgttagaacacacagatcgaacttcaaaatttttttgtgaaagttgaaggtaattgtaattgtgtcggcattacctttggttttaatttgagttttcaagtttttttttattatcatagatgaatgccttcagctccattgcgagatttcatccgttaaaattggtgctgggcgcgttaatcttgaggcgattttgacgacaccaattaaacgtcgtagttcggaaactttggagccaattaagaagtcgcaaaaaaatgggtagtatttcgtttgttgtccgttgcttagatttgatttgtgactcataccttttcgattacgtattttatgtttgatttttgatattttgttcgttattgttatttaattatatttgtgatcctcacacattatcaaatacggatataatttccattttgtaattgcgctttaaaattgttgatttgtcagaaaaatgttgaatttattaaa

SEQ ID NO: 72833 - DNA, 358 bp, Heterodera glycines
atgcttacgactctggaagagctcaaagccacaccatgtggcactcagcttgcgtaagtgcttgaattagtaatttgttttaagtaaaattgttaaggtctttttgtgggcagattgtaagcattttaccgtctgagaagaagttgacggctttgttggcgtgtgcttctggggagaatgttgttctcgcagaatttaagagcgtgtcgtccaaattttcaaaaatttgttcccttggaattgtaagtttgctgtttctatttacagatgcttaccttactaaatacaggtcgtcaaattttacatgctgaaagctcaacgctttcaagagcgtttcgatggaaagattggtttgtaa

SEQ ID NO: 72834 - DNA, 422 bp, Heterodera glycines
  unsure (1)..(422): unsure at all n locations
atgaattttttttatgctcaactcaaaagttacagcattctaaaaaggtaaaacaaaattatccctagtcatattctattattttaccttttttaaggaattggtattccacgtctttgtctgcaatgtcctcaatttcgtgcagtatattgaccagtntaacatattgtttcgcctcccattgatttggaatgttgcattccatatttgcgacacggtttaaatactgtaacaagtttttcgaagttaaataagtactattgaattttttaagcttctaataatcttttaagtgcagcacagtggcatgcatttttcgttgacaaatgagaatccccatgaattcaatttgcgaaaacgagaagtcatgaatctatggaaaagccaaagaaattggagtgataaaactaatatatttttta

SEQ ID NO: 72835 - DNA, 494 bp, Heterodera glycines
atggagaaggcctgcaaaatttggagagattatatcgattttagtgcgctaggttcgatgaaactttttaaaatataagcctaaactttttggcctgtttaaaaaggaattaaaaatttttaaaaattttattcatctcccttttgatagaaaaagcatcagagagccttatttaacttttaattaacatttggtgcgtttcagagcagtttctgaaaaaatatttatgaattgattttgctaaaaaaataaaatagtgaagctttaaaaattaataaaaaattttaaattcagaattactggagttagcatcatagcagtgcttttccttgtctttttgatgccctcgcaaaatctggttcgcttctgatcagtttataaaaaaaaagttaagcctaaaatttttcgcatatttaaaaagcaattaaaaatttttagattttttattcatctccctttttgatagtgaaagcatcttgagtgcctaaaataaa

SEQ ID NO: 72836 - DNA, 614 bp, Heterodera glycines
atgagcatcaaaaccaaaaaagacttgttaattgtgggtaagttgattttgtaaggtaataaaggaaaagcatcttgaagcaccagaattagcttatgagtctttaaaaattttcatttgcttagaaagagtttcttttcatcaagagcttttgagtggccaactttatatatttttattgcgaaaattcattttaatttttttgaacaaaagaaataaaaaaacgatgctgtatagttttaagggctgccactgatcaatgtttcattttttacgggtgtatttaaaatgttcaggtcaattcatatatatttcctggactgtgggggacctgaaacgcacgaaaaacatgtttttagcttggtttgaagcttctaggatggatttctatatccatatttcgcgatttatgtccatattttggcatttttccaaaaacctattagaacggcccccaacagctaattggccgttttgacccctaaagacctacaatcaggtccaaaagttttacaccaaaaaatattttagtgaaaaacccgattttcttaaaaaaaggaatggtggcaataatgttttgtttatgccaaaagaaacgccaattagtgcactaa

SEQ ID NO: 72837 - DNA, 87 bp, Heterodera glycines
aaaggagactccaccttctgctgctggtgacggcgtggcggtgccatcggaacgcgtggttgatgagcagcaaaaggaggacgaggg

SEQ ID NO: 72838 - DNA, 587 bp, Heterodera glycines
gtttcaaatatcgtaagattgtttgatagggccagacaagagaaggcaactgttggtaccaattttgcgtttaaaaaatgagaaaaaagagatagccatttttggtcaagaattttttttgtttgcgtttcaaatatattgtttgatagggccagacaagagaaggcaactgttggtaccaagtttgcggtaaaaaaatgcgaaaaaagagatagccattttttggtcaagaattttttttgtttgcgtttcaaatatcgtaagattgtttgatagggccagacaagagaaggcaactgttggtaccaagtttgcggtaaaaaaatgagaaaaaagagatagccattttttggtcaagaattttttttgtttgcgtttcaaatatcgtaagattgtttgatagggccagacaagagaaggcaactgttggtaccaattttgcggtaaaaaatgagaaaaaagagataaccatttttggtcaagaattttttttgtttgcgtttcaaatatcgtaagattgtttgatagggccagacaagagaaggcaactgttggtaccaagtttgcggtaaaaaaatgcgaaaaaa

SEQ ID NO: 72839 - DNA, 225 bp, Heterodera glycines
atggttaaaatttcaagatattccattattgattccaacaatctgccgctcctcggctttccaacattggacgatataaatttgagatggcttttttcccaaaattctgaagagattctacaatttttggctcacaacggacttatccaaaacaaaatgatgtgcctaatttgttcaaacaatatggctctgacaaaacgtagccaaataaaggatggatttgaa

SEQ ID NO: 72840 - DNA, 1061 bp, Heterodera glycines
atggttaaaatttcaagatattccattattgattccaacaatctgccgctcctcggctttccaacattggacgatataaatttgagatggcttttttcccaaaattctgaagagattctacaatttttggctcacaacggacttatccaaaacaaaatgatgtgcctaaattgttcaaacaatatggctctgacaaaacgtagccgaaaaaaggatggatttgaagtaattataaaaaaattatcttttgttaatccttttttaagtggcgctgtcaacaatgtcaaagtttttttcacaatagtgctttgagtctcacgcaaatgttcaccatcatctacatgtggattgaagactatcgaaacaaaaacgctgtcaaagaattggacatggcaacatatactattgtcaattttttcaacttttgtcgtcaacaatgttcaaaacaggcaaaaattggaggaaaaaacaaagtggtcgaaattgacgagacatgttggacgaaaatgaagcatcatcgaggaaaaaccaaaaaggggagccaaatttggatgtttggcgccattgaacgtggtgaaggtgcaaaaaaacttccataaacttttaattttttaatttaaaggtggtcaagcattttgtgtgcaagtgaaaaaccgcaaaagaaggactcttttccgtcaaataaggaaatggattcgtccaggcacggtgatcatcagtgacgaatggccagcatatctgaaaatgtctctacatttgccgcaatatgaacatctactaattcgtcacaaaaaaacaactggtggtggtttctcaaaaatcatcacgcttccaaacgggactgaattcaatgttaatacgaacaaatgcgaaggaatgtgggcccaattgaagcagaagacgaaaagaattcatggcaccagcataaaattgacagaatcatatatgcatgaacaaattttccgattgaatgctagggctaaaggattgtctgtatttaaagcttttgttgatttgttgcattttaattataattttaatgattaatcttgttaaatcta

SEQ ID NO: 72841 - DNA, 2600 bp, Heterodera glycines
atggcgtatcctttctgtttagttggtgacatcgaagtgaaaaataatgaaattgttcaaaatggcaaccaattgagcaaagagagcgtttcaactgtaccatatgaacagcagcatggtcaggtgatcggacaagtgaagacggtcaaatacaaagcgctcttcgaattcaacgctcgctccggcgacgaattgagcatacaaccgggcgacttgatcctcgtattcgagggacaccaatccgagccgggttggcttggtttgtgttatgcttttttcgccgtcgtcttttcaagtgccgtttaagctggccaaattcgcgacaaagtcggctggttccctgcctcttttgcggagcccctttccgccgctgctgctggcccattactgaagaggggcggcagtttggccggctctccttccggcgaacctttggccatcattcgcgaggagtgtgagccgccgccgaccgggcaaattcaccccacggaacaaaggcgtggaaatgctttcgacaccgacttcactgctggtaagaatatagagcactaacaattagtgagataattccccatttagcatttacgaaaagtgtttcattcaccgattctgccacaattggaaaagcggcggcggcactgaccaaaggcaattcaatgagtgccagtccatcagtttctgctgctctgtacgatctcccgcctgcggacacagaaactgtggtgaaattgacaaatactactattccatcaccgaccgccactatcgaaccggtaatattcttttcttatctttgaaaaatttccaaattgcgtttcagtcatccgtgccattgtacgaattgccacccgacaatggtaaaatgccaccatcgaaagcgtcagttgctgacagtatggtgttgtctgtgggtgtagcgttatatcagtggaaagcgcgcaatgaacaggaaatgacatttggacgaggcgatgtaatcgaagtgttggagcagagcgaaatgaggtggagaggacgacttcagaaaaacaggtgggagaattcaaattacacccagtgattcggaaattgttgtgccatttgcttgtcttctaattttagacaaatcaccggatggttccctaaaagttatattaaaatttctgctccttcggagcagcaaaaggatgaaagcgcaacaacggacctttatcagacgggtcaaagtgcagcaaaaaatggaggcaaagcacgcgtgggtgaaagtggagaatggtttattgtgagttatacggacaataaatgcactgaaagctttagaattacctgaaacctaatgagacatgagttgacgacaaattattattctttttttttttgcaaaaggctctttaccaatttgatgctgtcgagtcaaccgatctctcattgaaacccggcgatcgaatttgggtgaccgaccaacgtgatcaatggtggcgagggacttgcgacgggaaaagtgggatttttccggcaaattatgtacaaaaggcaggcgaaattgcatcatcaatgcagagtaagctatctttattgttatcagcatagttaatccaaaaagacatttatatcttaaatagaagactcgaagatcgacgggcaaacaattggacgggcaattgcgaatttcactgcgacagcatccaatcaaatttcacttgttattggcgatactgtcaaaatctaccagacaacgccaggttcacaaagagagtggaatttaatttgggttttaaaggggatgttttaggcggttggtgggaaggcgaagttgataaagcaggcgtcaaacaaattgggtggttccccggcaattatgttcaggtgtgggaaacagcgcaatccaatactttcgctgtaatcacccggaattccaaatttagctgttgaatgcatccgatgagacggtaattgctgtggcagcattcgattatacggcgcaacatgaggacgagttgaccttcaaattgggcgacatcatcgaagtggtggaccattcggactcactttggtggaagggcaggaagaagggacagccagaacagagcccattactctttcctgcaaatttcgttcaattaaacaaataaccttctggatccattaaaatcttttcacatcagccaactttgaccaaattctttctttctaattcataatggattttttcaattgacccgatattcataacgcaactaataacttaaaatcaatttgtagaaattttgttaattaactcattattggtttactgtgttttttgtgacatattttcccgcaatatacattgtaattattataaattaaagctatagaagatttacttgtagtcaattccattgtttcaagggtgtgatgggtgctgctaccgcgtgacaaatcacatttaggcaatcttttccccgaatttttcacaattgtcacattttttccattttagttttgtaggcgatggtcggcgctagttacacaaagcaacctatattttgaaaattttttcaactttttggtcaaattttttttttgttttttttacacataatgatgaatattaagtattaacagcacaattatggtga

SEQ ID NO: 72842 - DNA, 805 bp, Heterodera glycines
atgagcgaccatgaaggggacttagcggcagtagccgaggctcgtgcagcggcaagagctcgtgaagctgctgccaatgcaaatgttttggtgagtttttaatgtgataaaaatcctaaaattttcggggccgttgatcacaatcctgtatccattttggcaaatacacatagccgatccgatttacgcacaaaaaattgcaagttctagttttaacattttcatctaaaaattgcttaaatacccgaaaacgaactgaaagccaccaattctgcaacaaaatttaatgaaaattttcggtttttgagagggtgcgaaaataaatattgtcgtggatttattgtttgcagttgggtgcagagcagggcgttggaggtgaacagcagcgagagcgtggggcgggcaacaacgacaaccagcaaagtaaagttttttgacaataaattttttaaataatttcccattggatccgattggcatttttaaaacttgaattttgaaaccagtttgttgctattcataaagagacatttttaagttcgttagagcttgggccaggctttgccaataggcatcactcagaaattttaatgaatgggataagaaaatagtgaaaaatttccgaaatacagattagtgaccccccccctttaattttatatagttcgagagaaattgtgaaaaactattgaactttggtgctctagtacaattttggatatcaatgagcatcatcagtttcttatttcagttgctgcacttcatgctcggatggacattcttgaacatcagcaaattcaaaacg

SEQ ID NO: 72843 - DNA, 697 bp, Heterodera glycines
atgcctggccaaagcttccaaaatcgaatcattcaattggtcgctgaggtaaaagcagaggcgagtctgaagcattttgacataaatatttttcaattaaaatattaattaccaaattccgaccaaacattggccgtgacataagcccaaagcacagttcggagtttaactgaagcggattttggctaatcaaagaaaaaatggcacaatcacttggtcatgggatgcgaaaaactccatcaaacgttgtttacagtcgcaggggagaagagaaaggtcggcatcgaacaccaaactgcgctggcaaacggaggccagacaaatgtcgaacaaagaacggaccatcgcaagaggaagtgatcactggttggttgaaggacaatcaattagtgatggacaacagcagcagaatggaagggaaacattcgcaggcgaattactcgcaaatggactgatcaattgatcagctgggcaccccaaatgattgccatcttttacacaaattaatttcaaaaatcttttctgtgctagaacggaagaaaaaatgatatctcggagatatttcagctaattttgatcagaaattcccctcacaccacttttttttctttcttcttgttcaattctctgccataaaattgttttattttgccttttctcatcaaatgtatttttaacaaaataattaactaataaa

SEQ ID NO: 72844 - DNA, 2231 bp, Heterodera glycines
atgcatttgccaatatcatttgtaaatatagatagcatcagttttcattactctttttaaagattgtccgtcaatttaaaatttgtattaagcaaaataatgtattaatttttaatcataaattattttttaattaattcttttatgattttttcaattcattccagggaattgtcagcgtcactctccgccagaataaactcgtctgcctcgagttagtcggaattccgctgctcacttccaatgcgctcaaggctgtgaattcgaaccgtctgagaagcgtcgatttgagtggatgccgaaaggtgattaattaagccaggcaaaacgcctaaaacacggacacgaacccccccccccctccccaaaaaccaggcaaatgcccgatttctttgataaaattgaaaacatttataaaaaaattttaaaaaatgatcacattttatattccattgacttatctcagatcgcttcagaaggcattttctacttggtgtttaataatccgtcaattgttagcctttgtttgaatggctgcaggggattggacgaggtgtttcttctttgttttcagcaaccattcgttaattaggccaattattcagcaagcactttacgacatcgcgcgatgcatcggcgaacgtttgttccgtttggagttggaccaattgcacaattcgaacatggccgagcacaccgaggccatcagcagtctctcgcgccactgtcctaacatttcccgactttcactttgccaatttttcccggttggcgccttttgttcccattttttgattccccccccccccctttcccttaagtcctttgaggaagatgaacagcaagaggagcagccgccatgtctcatcgaaggcaccggcctccgtgacgtggatttatacggtgggaatggcacaaaatgccacccaaaccaaacgaatggcatttcacttaaggcaacttcttctgccaacttccccgccttcccctcaccatttattcaattcgtttgtcggtgacgggccaagagaacgttcagactcttctcgactccctccgggagcagccgcatttagccaacattcacttgcagttgcattgtctcgaggaggacgcagtaaacaaattttgacgagaaatttgacaaattaatcataataaccaaaggaattgttttagaattccgttgaacgtgccaattccttcctttgccaatttcttccgttaatgggcaccaaaatcactcggcttcatgtgtgttttgcaatttatttagtgaattaaactgatcaatgacaaattacagtatcctgcctgtttttcaggttactgtccaacgcctcgtcgactcggcctttttggttcattgatttgatgtgatttgttcgttaattgtttctcgttcagctgatctctcaaattccttccctcagccatttggctttggatgtcgcctttttaaatgcccattttctccgccgtctcttcgccggcggcgttcattctccgggtgctggtctccgttccctcagactttgccgacttcgcatcacttaccgggcactgttttcgattggccgatgggtaagtggcgcggcagccaaagtgccctcatccttttaccttgataaataatgcggcattgtcaaacaaattcccatttgttttgaaggcccgttcgcttgtcgacttggaaacttcgcatatgccagcggtggacgaccgttttttggttttgttgggaaagaattgcaaatatttgcaaaatgtgagctccgtcattccaggaacattgctgttgtgtaccggcaattttaggttaatttcaacggatgcaaatgggtgacagacaaaggagtggcgagtttggccaggtaattgggaaacaattaaggcaatcccgagactaattgtaaatgacaacatattcaggaattgcaagcttcgagaagtgcggataaggtaaattaattaattagtggggctggcaataacaaatgtttctttctgcagaggcacttcctgcaccgataagtccgtctacgcatttgcacagtgcgtttttctgggatttaatgagtcttaaattagttaattagtccatcattactttaaggttctgtccaactctcgaatggatagcacatgccgatttcagtggaaggccaaatttcagtgacaaagcattgaaatgccttcgcgactcgtgcattcagagagtcatttgctga

SEQ ID NO: 72845 - DNA, 740 bp, Heterodera glycines
atgttcgccttcgtttgccgcttcgttctgccgcttttccttttcgcccttttggcacttcccccggccaatggcattggacttcccatgcagaaaatggagtgctgccaacaacagcaaatgtgttgtgccgcaccaatgcaatgcacgccatcgtgcggagggtgcggacggcgccggcggagagaggcgagcgattgagaagagagatgttttaacagttcgaatttttaggccgccgttcagccgctgctcagagggaaagaaacgccgtgcccacagacggagtggcaacagctgatggaaaatgtgggaaaaagtgctaaactcagcagttgctaacccgggacaatgttaaggcaattgtgccactcgacgacgtccaatcggtgaactccgtccaaaaggcgctcctccgacgctttccggacaacaaatttttggtgatgtgcgcaatggcgggggagggacgcgcggaaggcaaagagccgctgccaaatgaggtgagccgagaaatttggaggatttaaacaaacaattcattgccttttcgtctaaaatccgtcgcttatttctaccgtatgctcaggtccacctcagctccagtggccacgggtactgtaacgtggtcagcgaacgcatttggtgccaagcggccgcagtcgtcggctgatggcacttatttattacttgtttattgatgttcagccctttttttgctttcatatttattgttatta

SEQ ID NO: 72846 - DNA, 118 bp, Heterodera glycines
ttttggacgaatgccattgccatttaaccgccccgccaaccgaccgccgtctgacaattgatcactttttgagtgatttttgtccgtcgatcagtgcgaaatgaaaccgttgatgagc

SEQ ID NO: 72847 - DNA, 1579 bp, Heterodera glycines
atggctaataaatttttgcttgttccacaagaaatttaccgagggctaacctcagcgtcggatacgggagtcattaatttggatgcggtaaggcatgacctggagcgtgccaggcgtgaacggactaatccgacaacaaaaaatgtccggtacaatcaacagcttaggcgttatctgcaaatgagaagggagcttgccgatagacctaccaaagttgagttaaccaagggcttgagtgttttgctcaagcgagatgggggtgttgatgatgacgacggcgaagtcgtcaacactcagccacggcctcccgctccaccaccaccaccaccacctcctccacctcctcatcaataccaccgtcaccatcccagccctcccgatcagcagtcttcctcatctgacgatagtcatccgcctcgcccccctcgtccaccacgtcctcaaagaacaaagaaaaaccatcaatcttctataaaacatggtcggctgaatcaatggaagcaaaggcgtcgtgacttgcaacaacaaccggtagtacgtgatctactcgctgaggcagcagctgctcctttacctgaaagtgacgatgacgatgaacaaatgctggaaggtgggtatctgctgccaacaccatcacaaaattatggagacatgccaatattgcctgactatgcagatgaaattgaggaaatggacaccgcccaacaaagacttgcaagcagaagaaagattaaaggagaggagggaatagataaaaacaaaaaatacaaaatttactattctcctccaccatctcccacactaccacccgtgtacaaacgaccagaccatccccctcctccgcctcgttctatacccaaagttgaactgaaaagggatccacaaccaacaaagttgaaaaaatccgcctcgccaccgcctccaccattgcctccacatcgcgcaaagagagaaccaaaaatagagctcgcccctcctccacctcctcgcactgtctccaaaagggaaccgaaagttgaactagctcctcctcctcctcctccgcgtcacttcaccaaaaaggaaccaaaatttgaagttgacccacgaccatccacatcgaagcaagccgggtacttcccgcccccgaaaatcaaaaccgagccaaaacatgagttgcaacctacaaagaggccagtgccataccgtatcccgaaaaaagagccaaaaattgaagaaaagccattacagcagcagcaacaacaacctcctcctcctccagctgttgtcgtcgaagaaatgccctatattcctccgcctaggagggggaccaaacgcacctacccccagaatgatgatgatgaggtgcacataagaaaacgagtgaggcaaccgagaagggtaagagtacagtactcgcccgagccaggtccatcaacatctgcacaaagtgaagaagaacaacaacagcaacgtgagctgtttgctattccgtcaaatcaactgaccatgacacagagaatagaacgattatatctcaaatgtaaccattatgccgatcgtatgggtgttcgggtgaatacaattaacaccgcaaacg

SEQ ID NO: 72848 - DNA, 926 bp, Heterodera glycines
atggaaatggaggcattcgaatggaaatttgaagatgaaacaaaccaaattacaattgaattggccgatgacgacaccgaagaagggtgagaaaggaagtgaattttgggaattttgttaattaaaatttgaattgctcagcattttggaggacgaaccatccaccgccagttcaagtggccagcaacagcaaaagtgaatgaatgtggcggcaatttgtgttttatgttggaatttttcggatttgatgccgttttgttgtctgtcggactttggcactctctaaatggcggatcaaaccaatttatttttccgttttccccatattttgtgcatatactatatatttcaatgcttttcaaaccataaatcttttaatattcacttgttcactattgtcatgcttttcggcttatttgaatttaaattgcctaaaattcacaacatttaatgattaatttagtggcatactttatttggtcaattattcattgaacgaatatgttagagtgatttatgtgcaaaactcacggctaatcacaattcgggaaatttttggacccttggaatgacactgatgcctatgcttagagctctaaaaaattgccaaaaatgggagaggatggttattaatatcatttttatttttaaaaacccattttccgtggtaaatcactgcccaattaatcaacaattattaaacagcagcagcagaagtagcagcaagattaatgaccttccactacccggcacttaaataccctctcgtccgaagagtaattataattgcgctttttaaataactgttgcgcgctaccattggagcttttttaaatttggaggtgaggccgcatactcagggcttccatttgttcttatttataagaaatgttctgatttggagggtccaaatcttacaaaataaa

SEQ ID NO: 72849 - DNA, 490 bp, Heterodera glycines
atgacgctggacattatgacgcgggacattatgacgcgggacattatgactgcgggacattatgacgcgggacattttgacagcgcgccaaatcggtaggggtcaactccgtctggccaactccgtctcagcaatgttcaaaaagctataacttttttctttgttggccaaacttcacaatcatggtatcattcgaaagccctagatgtttagaagatatttataagctatttctcagtgattaagcagctctcaaaaaagttgtcagttgaaaaccgcaaaaaaggcagaattttcaaagttttttatttctatctttttttatagttcgaaattttctgtaatttttagtaggctaatagagcctgtgaagagctttcgaatgatatcaagattgtttgattcggtcaataacttcaagagttatattgactcaaagttggctcagacggagttggccagacggagttggcccgttccgcagtgttag

SEQ ID NO: 72850 - DNA, 973 bp, Heterodera glycines
atgtcggacaatccagaaaaagtggaaaaacagatggaaaagcaaatgtatgtgtaaataaataaatgtgccgtttttcagtaatagagaacccataaagaatatgcttgctttttccgctcaattcgtacaaaaagcggccctccttatggagactaattgagtaattaatacttaaatagggaaatccttaatgtgccaacccagtggcgtgacaattcgtacatgtcttaggctaggcgccgaagccttaggcctagacttaggcttcttgggcctaggcttaagcttatgctttcttttgtaaatttttttattgtacgagttgcctttgtatgtgtagccattaactcgctaatcctgaatttcgtctgttaaactggatgtttaatgacaaattttgccgaaactggggtactgaattcaaaaatccgtgcacagagacccctaaattgagcaaattccaaggcttttcggtgcctaatcttcaaagctctgcttggggtgcaaaatggcacttcatttgccatttatatgaacattttgttccgttttgaaaagaacttgtcgttatgtaagactgatgtaaaccgcaaaaggaggctttgagcttttttttttttgtgaaattggcattagggctatgattacgcgattaaaatctcggttttgccgagatttgaatctcgatcctgggattcaagtcctgccttgatgagatccagatcgcggcacttctttcacaaaaggcgggatcgggatcccgggaaaatccaggcgggatccagaccaggattatattatcgagattcaactcggttttactggggcataaatctcgacgctgggattcaaatcatgattgagatccggatcccggccctcttcacaaaagccgggattgggactccagggaaatcccggcaggatcccgaccacgtctggcgagccctctcccgctcgtctttacaaa

SEQ ID NO: 72851 - DNA, 696 bp, Heterodera glycines
atgagtgataagaaatgtgtctgtgaagcaaaaagatttgcaattttaaggaaacaaacttacagtaagctattcaaaatacgatattgcgtttgtgtaaaactgattaaatggaaatgaatttacaacatcgacctaatcacagtatgtctttgtcgcattttgtcaaactgatttaattagtatggagagaaacttacagtaatctatccaatgagtgatcaaaattttattaaaaactgatcaaaattgaataagtgtgattaattattattattattacagtcaacatcttaataattattataattgttatcatcatcattaggaaagggaatcaacatcatcactaagtgtaatgacgttccatttggtgtttaaattccattcaatcgcctccttttcccatttggcccatttgtgccgatcccgcgcaattggacagcggcgaatcatcaccacatagtattgcatactagcaccaggactttcaaaatgttgaagtgccaattgttcgccggtcaatgcgttggtcacgcaaaacggttcaattgcttgggcatctctaacactaaaggtccaattaaagcacgtgatgatgatgatgaagttggcacgagaagaagcattggcaaatgactgaaaagcatagcgccaaataatgaatgggtcacacattggatagagccaaataaa

SEQ ID NO: 72852 - DNA, 2020 bp, Heterodera glycines
atgattgagcagcagaataaaaaacaattggctggaaacgttttggattacataaatcatccgcttacaggacgtgttattggatttgaagaaattgaaatcaagtaaaatatttgaaaattttaattaatttatacaatttctgagggagggaggggggggggggggcttttacaattgggctcttcaacggctcccaaaaaattggtaataagaaatttgtagaccaaaaaatgggcactccactaattgatgctgaagctggaggggggggggagggccgaagtgtatcacgtataactaagagttacggtaatttttccttgaattttttcagatacatcagccaacaagttatggaatttttgaacaaatggaggaccacagttttcaatttatgtccactttatgtgagcatcccaaagggaagtgatcgcatgttggaatttgtttcgctcaatattttgccactattctcgcgcactaccaatggcttggcctttaacaatgacgtcattcgtgtcatcccgtccattctcaccgattgtccaccacttcattctgtgctttaggtgcacaaaaagttttccacggaaaccgctacttttgctgcgctgcaagcttttgtcaattggttgtgcccatcatcggcacttccgtacaacagcgatctgttgccattgaaaaaacttaagtttttatgcacgaagaaagttgctcttgcgtttattgcacaacttaaaaaagtaagcaattaatggatttaccataccttaaatagggggcgggggtgacgaccggagccccgacttttgcgcctctgtccaaaatcggagtcaaagttgattttatttaaagcactgatagcctaaacagcatttaaattatgaaaagatcactactgtcttttgatttttaagaacattaattatgttgtttgaaaattttattatttttcaaaaattcattgacgatcaaatgatcggatacaatcactttcaatcgcttatttaaagctgtttaggctgtcagtgatttgaaaaacttaatttgaacccgattttggacaaaggcacaaaaaaatgtgaagcgattaggggaaaagtcagagacgaaggggtaaaagaaaggcgacttcgtaagacacgaagaaattaacgcaaactcaaacaaaaaaaaatttaaaattcagatttttacgatttttttaaatttaggttaagaagtaggaattttttttaacttatatttccagaattcttttaaattttcttcctttttttgttttatttatagcagcgctattcgagaacggaaattacacgagaattgggacccttagacctttagattttgagatccattaatccgtgactcaagaccgataatttcctccccccgtcggtggtccgagacttcttcatttgatccccgtgacccgagaacatatccccgggttcgtcgcggtgcgattcgtgaccccgaacagccgacatttctcgagtcaagactctcgaacagcggcaccattggtttaggaattccattcggcgacaacatcccgcttccgcttcattgttgtgttttgtcttccgcataaacttgaaattccaacattttccatccgcaacacattcaccggcgaacatatgagcctcagacaaaatgacaatcaaacatacactttggtccggcaatgtcctcccaacttgatttcacttgaggcggaaattgaagcgtcaaatcggaaatttaaagatgaagaaaacaaaattattattagtttggcggatgacgacaccgaagaggggtaagaaaagaagtgaatttgtgggcatttttgttaattaaaatttgaattgctcagcattttgggggacgaaccatccaccgccagttcaagtggccagcaacagcaaaagtgatgaatgatgcggcgattagtgttggaatttcttcggatttaatgcccgtttatcgtctgtcggacactctccaaatggccaacaaaaccaattaa

SEQ ID NO: 72853 - DNA, 844 bp, Heterodera glycines
atgtcaagtcctcaaatgtcgggtcctcaaatgtcaaatcctcaaatgtcgggtcctcaaaagtcgggtcctcaaatgtcgggtcctcaaatgtcaagtcctcaaatgtcgggtcctcaaatgtcaagtcctcaaatgtcgggtcctcaaatgtcaagtcctcaaatgtcgggtagccatgaaatgcaatttcatttcttcaatagaatgcatgactaatttcgccctttttcgtccaaaccctcagcagattaaatcattaatgatggaattattttcattaaatcaaatattttgtgacgtataaactcttgaagcaatttaattcacaaaatggtaaaaggatgggttaaaatttcctttttttattcactttaattattttgttgaacagaattttcaaatgatcgaattaagttgaaaatgatcatgcaacatttgtaaataaattcgttttttattgcataatatgtcaaaccaattacctaattgtacatttttttgtttcaaatttcactcatcaagggcaagtgtatttttcatttccaaactgaacatcaattagatgaccataaaaaatgccccttggctgtttcttaaattaattaatttcagcaaattaataaactcaccatcaatgataaatatacaaaactatttaagcggcaagtcagtcagtataaatacccactgattaacctcattcgatattaaaaatacaataattatttctttaataatattaagattcaatgaatatcaacaatttgaaattgtgccttgctctgctgcttgtcggcttctgcctgcagttgttcatcggcggcactgatgccggcggagg

SEQ ID NO: 72854 - DNA, 382 bp, Heterodera glycines
atgtcgggtcctcaaatgtcaaatcctcaaatgtcgggtcctcaaaagtcgggtcctcaaatgtcgggtcctcaaatgtcaagtcctcaaatgtcgcaccacggaatcatttacccgaaatcggaatttgccctttttgtcgcatttttggtccgtcaattggtcgagcaagtccggccagctcagtcccgggtttgtcatcccgtttctgcacgtgctgctgcatgacgattccagcgacacattcgtgtcaacattgtagaacacttgacagcagttgagacctgtattattaattattaattatgaatattaggtacttttccgttttggggccacagattcaaatcggtgcgaattcctttggccagaggactgctaa

SEQ ID NO: 72855 - DNA, 905 bp, Heterodera glycines
atgaccgcactgaccgccccgttgtgtttggtggcaccgtgtctgatcgaaagttggggacggcgtccattgttcctgctgatcactgctctgtcaacgcttgagctaacgctgcttacggttgctcagctactgtatgacgtactcggtaagtctaacaaagcaaacgatctataaaaacagaattgattcaggaggcggtggcatttttgtctcgtcaatggcactgatcgggtgtacgatgggccaagcgagcgtcaacctggggctgtttaacatgacgcccattctcgtgggtgaattgttcccacacccggcacgcgctagagccactcaggtacggttatgataataattgtttggtggtatttatgaattccaaaattcgttatttttctcctactgtgccaataggtacagccggttaataaatcactccaaatttgatcaaaaatcctcaaaaaacaacagtagattcttttgggcaatatgttagaaaattacaccacaccaaatttcaaaattttccagcgacatttttttttcaaaccgtgacaattaaattcttaaagggcaccacagcaaaaaaaaaaaaaatagaaaaaaagttgtcacgcaacattggagaatatcgcgtcccatttgcacaggtggcactgcttttgcccaactttgtcgtcgttggcattgtgctcgcctacccgtcactgatcgtctccatcggtgcgctcttcttcctcccgttggccgcgttcagcagtttggtccttctgttgatgctcaaattgctgcccgagacaaagggtcgtccggtggacgacattttccgacgattggccgactcgcgcaccaattcggtgacggattacggcgccatcggcgacgacggagcgatgccaacgaaa

SEQ ID NO: 72856 - DNA, 277 bp, Heterodera glycines
atggtaaaacattgcggactgtttggcctcctccttggcaccgttgccgatgtacagttgcttgggcgactctgggaaatgggcggcgccgaacagatgaaacatggccatgaggagacagccggctggcagcaaccaccaggaccaactgttgccgaacaacgccggcaggcacaacggggaggccagcaacagcatgaggttggcaccggagccaattgcggtcgaggaccagcctaacaaatgagtggattaataggcaattaaaatttcaaaa

SEQ ID NO: 72857 - DNA, 1345 bp, Heterodera glycines
atgtttgatgtgttgattaattttgattttagaatcttcccgattttgaatcgtcaccgtcgggaatatttcaatttgccccctggcaaagccgcctcgaatagcccaacagttcaggaacatattttgagcggtattgaggaacagaaaattgaattggacggaaatgccgcaaaggaagagacggcggagagtggggacgaatttgaggaagtgaaacagcggaaaacggagacgacggccgaggagggcaacgaacacgagcaacttggtgggtttgaccacaaaaaatgaaattttaccgaatttgcagcaaaggagtgggcgagggacttcgaaacatttcatcactttttagacaaagttggtggccactctactccgaacacaattttggctcaattagtcgacatcgctcgaggcggtggtgacaagcgcagcacctctccaatcgtgcgccaatcttccgactccgtcggtttgattccgtcttcgtcggcctcccaagcgcatgacgaaggaggaaacaaagtgcagaattcgatcaaatgcggcaattgcggcgacttagtgatcaaccaggaatggattctgctgaaccacgtcaacaccaagttgttcggttgcgattcgtccacccgaatcttccttttcagacatttacatctccctctttacaaatgcgtcagttgtgacaaacccttcgagaattaccttcgcagttacgctggtgggcaaaactttcaaatttatttattttaaataaatttttgaatttcagttcgccatgccaaattttaccatgccggggatgagagtttgttgctcgatcagagggacttgttctggggaaagttgcgcgaggcttgctctcgacttttcaggatccacaaaaatgaagttgatcattgaacatgaattacgcatcaactctttcttatcggacttaattatttgttttccgtagattcagtttaattatgtttatgtctcaattcgtttccttaccacccttttcactacttaactttcttcagttggctgttcctacttttggcacattttttctcttattttctcccctgaaaatcctccattatttcaacggccttcacattttattagtggtggcacaatgaaaacaacaatgagaatatatgggtgaaagggacctgcaaatccaacggtcatttcagtccaatccctctcaaggccatccatcccttttttgattcatttgaagtgccgaactgttcgcctattttccctggaattgtcatgcgcccccaccacttattttttgtttaattatttttccattttatttttctaatacaaaaataaa

SEQ ID NO: 72858 - DNA, 1101 bp, Heterodera glycines
atgcatactgtactctatctaaagttgtcgtttgactcaagaaacgggaaaaaagcaaaacaaaactcaaatgcatttgctaattatcacattatttgtttgtttgtattcagcttaaacaaaatgtcactgacggcaaaatgttccctttgttctgatgagttctccagcatagacgatttggaggcgcacatttctgctgaccattttaacgtgcgttttgtgctgtgtataataaataagtgttgatgatatatgtacatatcagcagtggtcgtgtttattcattcattctttctttcctattcataacatttctcctttcatttccaataattccttttatcatttccctcccccccccccttttttttacctccaatgttttgttcttttttctcccaaccatcgaaagcgtgcatatttttcttcgtgacaacaatttcctttaataacaattattctttcagtgtcttcctttcgaatgcgaaaagtgcaaatttgccaaattcccaacagaatttgcaataaaacgccactacgaagaggaccatggcttatccgaatacttcgtgagtttttcaatttttaatttggactatctttttggtcagtaatacgaacataagaaatatttctatttgaaaaattgtattattgaaatttagcgttaatgggaaaatattatacctattttgatttttctttttatttacataaacggacataatattaagataatattttggcaaaacaaatcaataaattgttccaaatttttgcattccatctttttttgataagtccattatagattaaaaatagcagattttcgatcaatttattttgtattaatacaacaaaaaataaaaataaaaattgaagaaattttaaggccaaaaactttttctttgctgaattttgggcaaataaatgattatgcaaaatgcatttgtatacaaattatctttagaaataactttttacttaattttaattctccaaaataatattttgctgaatgtttttttatttttttttcaggttcggaatagggtctgtcgcgaaatttacgaagaagaagcaaaaggtccgcgaatg

SEQ ID NO: 72859 - DNA, 538 bp, Heterodera glycines
atgcgggccctgacaccaacggatcccagtttttcattaccacggttatttgtttttgctagttttttaatttttgttttgtctttgctcaggtccatactccatggttggatggacggtgaaattttacttttctaagttttaattctaaattgtttttctttaagccacgttgttttcggtaaagtgctcgagggcatgaacattgttagagaaatcgaagacggcgaaactgctggcggagaccgtcccaaaaaagacgtcgtgatcgttgacagtggaggcaattcacaaatgttttctgacttaaaaagcattaaatttttcagagctaacagtcagtgaaccgttcaaagttgcacgtgaacctgtggtttgataaattattgtgatgatgagaagcataatcgcaaaaatgcatttcattgatatttaagcattcgttgtgttgttttttctgtttcttattttgcatttatggcgtaaaactgtgattgataccggcagtttatttggtcaaatgtttcttttaattaaa

SEQ ID NO: 72860 - DNA, 141 bp, Heterodera glycines
atgccatggaaattgggggattttcatggaaaatatgggcagaaatcaaaagcaaacatgaaagaaatcagaaatggttgggcttttacctttacaacaatgaccataaaaatggtaaacaaaaaaacgctgatgcttttc

SEQ ID NO: 72861 - DNA, 2111 bp, Heterodera glycines
atggcacagactgatccaccgcagacatctcgcagcccccgaggggaaattgagtggacttatatactggcacaattgggatggacattggataggatgtggggtatgacggcataaacacaaagaataagagagaaagggatggcatatgcaacagaggtgaatgggatagaaacggcacgataacattggaaatgagagggataggactggcttgggatgggatgaacattatgaatattaaaacttagcttattaaaatatttaaaaagtttattatatttcaggcgaaaaattaacttttacgcgcacttgaaaaaacttgctagcaaaattctcacattttttcaatttcaattttaaatgtcccaatggataaaattaattttgtcgttttccatcttcaaaagcaatgatggtcttcattattttgccataatttatttatgtcctcccttcctgcggtagccaataaaaaaatttaaaaattgaatttaaatcataataaattaattttaaatatgatcaaattcattttagaacgaatcaggtgcaaaattaatcaaatcaaatcaatcaaattattaactgttccacttcttttttttgggtcgtcgttttgccgttatattttatgccagaaaatttttcattttatcagcagtttctatacatacaaatttgaattagggcatttttaatagagtttgaattgttaggaaaaattccgaaaaaatcataaggggattttttttttttgaaaattgactaggcctaaaacaattattatttattataaaatatagatgaattccattaattattttctgatcttttcctccagcagaaaatactttacctagtaatttttttattgtgttcgaaccgagtctcatattttcattttaatatctggacgcaacttttgcattggactgtacataatccaaaaaactgtttttaaattaaaattacataaacagtagggaaataaattaaaaataaaaaatagctccaaaaagatgcttattcagtgagatttttcccaaaactttgttgcttatttaatatttatgctctgtttttgctcattttacattcaaatcatctatgcgttcttataaatttatttgggatttcctaattgttggaatttatttttagtttaaatttttaaataatccgatagattctatcaactaaactccgttcataacttgacaaacttttttccattggtcaatggagatgaattttttttcccaaattatccttctcacctacatcgaaaagaagagcctgggcattcgcaaaaaaaaaaacattacgcaattttgagattggaattagcaaagaggggccggcattaattatggtaattagcaaagactaattgatacttaattatgatgataaattgctggaaaaattaacggagattctactaagattcaaaaaaaaactttcttagtctccataaaaatttgcaaaaatagaaaattttctaacaatttaagttccattaaaagtggtctaattggaataatcaacatatatacatagcatgtataaaacatatattgaatagttatagccagtatgtaatacaaatattaatactttgggtacttaactttgaaaaattatggctaattttgtatgaaaatgctcctggcgatttgggagttgaggaattcccttctctcgccctccccaagtcagagataaaattaatagaatacaatggaatttatacaattctccgtccattttgtcccaaattacagtattatggccaaatagtatcgtatctcaaatgttacgtaaatttccctttattacacaaaattagccccacttcggggttttaaacgaacaaagccaaattgataagaccaggaaaaaaataaaattaattttacatattttcttcataaatttgttaataaattaatatttttcagtttatgcgagttttcttattcttcaatttcatccatttgggttcatcgataaacaaatccaaattctttgttatctgtgttccttgattccaatctctctcttgtttttgtcatcgatctgacaaaaataattttctttttcgataa

SEQ ID NO: 72862 - DNA, 508 bp, Heterodera glycines
acgacctcgatctttggcgcgaattggatctgttgttcgccgaaacggagaaggaggagccggaggaggctgacgacaacattttgcaacaatttccgcccaaatcagtcgagtgtaagaacgaaaatttttgatataataattcaaaaatttttgcttaatatttaggaaataatttataattgaattctgaagggatttttttgacttatattcataaaattatttatttaaaaaataattgaataatataaagttaaataatcattttgtcagtttgcaagcaattttaggctggtttgaagcatcgtacaaacgtccttcttggaccgtaatcgaggaggctgcggacgcagaaattcaggctaacggagtgcaattgtcatttggtaagtattttacacatcctataaaattctaaaatttttattgtttgtaatcttttaggtcccacaaaaaatactgtatacgtttagtgaatttgtgcgcatttttttggtttttgaaa

SEQ ID NO: 72863 - DNA, 4719 bp, Heterodera glycines
tctgaagaaaattgcatatttttcaagattttcccgatttttacctgctttacagtagtccgcaatgacctcacggaggtcaaagggcgtgttgcggttctcctcgtaccactgctccaacttcttgcgctcctcagggaagtgcccgccagggtagtagtcctcaagcggcggaagagtgtccagcacaacaccataatttgcagccttaattattgattatttttggttttatttattgattttttttactttgttgaacttgtgcgggaagtatttcttgttgtccactccctctatttccaagccgaacgtcttcacaaaggaggccagcttgatggggatcagtttgtaactgaaaaataatcgattatttatgttattttacactttttacctgtcccggaagatggtggtagtgattgctcctctcttgcgggccttcatctccagcaggtgattcccctggcgcacgagttcgggacgcacacccatgcgcagcatctcgccgtagatcagcacgtgatcgtaacgtgacccttaaagttgttttctgcatcgttgtcatcgctgtcgtcgtcttccgcttccatgtcgatgaaggcatttgcagcaggattccgggccttgttgttgttgtctccattcgcacgcttccgtttgcggcgcttctccgcagggtcaaggccgaggacatcagcttcaaagtgcaggagccacttggtgaaggccgtcagggggtcgtccacaacgtaggcggtctccacttcggtgttgtagaactcgaacggtgcccatgcgaaggtcctcgtcagcccacagattccacagcttcggtccagtggctggtcccagatgccctttgcaatgcattccgtgcaagtgacgtgcgcgtagcagaagttcacctgaaagaaatacctaattttcgtatattttgtgttttatttacctgatgcttgaagcgcaggagttcagggtcgggcttgaagtccgtagtgcattcaaaatcgaagaagatgatgcgcttttcggtcttcttctttggccggtacgggatgtagcattcccgtggcacatggaatccgaggcacactttgcaaaacttctgaccgcattcgtgagccttttgtttgtggtgcttaaaagcattttgttttcaatttaaaatatcaaatgctacccgaatttggtaaataactccacagtcgatgcactttttcgagcttttgcagatcgatttttcgattgttgccacttcggtgccacgcttgactttgcattttgtcacttttgtatggtgatcatagcactctcggcttttgaatgtctaaaaaaatatattaaaaataacaattcattctgtggtactttggagcattcaaggcatgagtgaaaaaagtcgtcatcggcatcgacgcagtttccacggaaggcacccccgacgcgttggcagttatgacatttccatttgcaagtgttgtaaaacgaaagaaacatacccaaggtttggtagtggcgtaatacagccaaattcacgagcaacttcctcaaggattggcacacattcgatgagtcggaattcggtgttggatgtgacggtcatttttttcaataaaaatcgtaaaataagattgaggaaaattaaagtatgaaatatttgtacagtaaacagtacgcgaaataattgaacatttcaaagcactttatgaatcaacactgaagaaacacatgacattgttacggaggaagttatagaattcatcaattcccttttctttgtcgaagtagatagtctcaacgcttaggacgtatccaaactgcttgacaattcccttgaactcaatttggtctccttcttcgctgatgtagatgaaacgcggcttgtcctggtgctcgaaaacgtaacgcttctgctcctcctcgtacggcaccggaattttgcagtcgaacataaccgcaaccagatcaaatgctgtgcaacattcggcgagagtgaacggctcctcctttttgttcagttcttcgtccattttctaaaatattatttctatttgatgatattaataaaggttaacctcaacagatcgtagctcgtttgatggttcatccaaagacaggctttcaatcattgtttgttcatcaatcggcgtagtcaaattgttgaaattcatagttggtttggctaaacagcattgtaaaagacagaaacagaaaatattcatgttaataaataatgaaagaagataagaatgattttgaaaaaagggtaggattaaggatagaaacaaaaaaaaacgactccaagccacttttcccgccaaattttgaatttgaatctaatgcgaaaggttttcgtctcaataaattatggcgttatgtatatattgtggtgttttgtcttgttttgcgtattttcaaagtttttccaccggactacagtacccctcgcagtgatgacgtcatcatctttgctgcatatagttgataattatcctttttctggcaagtggtttcgtggcagagtggtaatgtgttgggttggtggcagaccaaaagttcgagtccacttgcctgcgactaatttattgcgatttttcaccggactacagtacccctcgcagtggtgacgtcatcatctttgcagcatatagtggacaattatccttattctggcaactggtcttgtggcagagtggttgtgtgttgggtggcaaagcaaaagttcgaggccgcttgactgtggcagaatttttcgaataaaaattttaaaaaattcaaaattaaaaattataaataattttagaaaaaattttacaaaaaaagtcgcgcacccctgcaataggtttaggcttgcagaaaaaaagtcgcgcacccccctgcaataggtttgggtttccaaaaaaagtcgcgcaataggttttggtttcagtactgaaaattttggcgctcagttggcccgcgctcacttggcggcgctcacctggctggcgctcagttggccgtgcacccctcccataggtatgggaggctaccgtaatccggtggaatttactgccctaactacttagaaacctttcagaaatggaggacatcaattgagtttccggtgtgtcttttccctaacgagcacacccccgtttggtatcggatggaatttgtcaacacgatgaccctcagacacgaggatggtaattcctatcaaattgatttgagtaaagaacagaaaaatgatccagaaatattggcattcattgaatttttagcaaatggcaatatgccaccagacttttcggaaaatgaaaaagaccgattttcagccctgtgtttaaatatagtctacgaatcagaggtactttattttaaaataccctcatcaagtacacgaatttttgtaccaacttcgttaagggccttaattttcgaatcgttccatacatctccattgggaggaggtcacatgaacataaaaaagacactacggaaatgcaaaaatatttttggcccaaaatgcattctgatatcgtctcatggacacgtcaatgtattacatgccaacttaggcataatcccacccctgcatatcgtgctgaaatgcaactcgcacctagcaataccctttttgcgaaagtcggcttagatttggcaggtccatttccaaccacatcgcgtggaaacaaacatattttgaatataatttgttggttttcaaaatatgtaatatctgttccaattccggatgccaaagcaaagactattgcaaaagcttttctttcaaattgttacttaaaatttggaggttgtactgagctcattagtgacaatgccactgcttttacctcagaattttttaaggaattttgtagtatgttatacataaacaaaacttatgcaattccccactggtcacagggcaatgcggtaacagagaggtcatttcgtacatttcataatattttatcaaaatacataacgaaagaggaccccgattttgacgaatttttagatttcgcctcattttgttataacacttcttgtcactcatccacatccgaatccccatttttccttgtttttggtcgggacccaattttctgtgtagaccaaatattggatgctcgcattcacagtcaagtccaacaagcggaggaaaccgatttcaaacaaaagttagtcagctcattaagaaaagcatggaaaagtgcagccgatgccaatgaagcagctcagcagaaaattaaagagcaatatgaccgaacagttagacaacctcaaatttgtgtaggagaccgagttttattaagaaattatgcaggtaaagttggaacttctaagaaatttcatctgccttggaagggcatttttagagtgatagaaattgatggcatatatgccactatcgttagctgcatttcgccgcaacaaaacccgaaaagagttcacttaaatcaaattaaaaaatgttttgaaaactttggtcctaattgcaccttgccaaaattaccaatcgatgaggaagagagtcttgataaaatgcatgcaacaaatttggacaatttccctggtcacaatcattttcccaggactaacagacaacctagtaaagaaaatcctgaacaggaaaatgattcgcaaaatttggccgaaaaaacagattgtcaagaagaagatggaaataattcattagacgaatcaattaagcccaaaaagggaccggag

SEQ ID NO: 72864 - DNA, 1091 bp, Heterodera glycines
atgaccgtcacatccaacaccgaattccgactcatcgaatgtgtgccaatccttgaggaagttgctcgtgaatttggctgtattacgccactaccaaaccttgggtatgtttctttcgttttacaacacttgcaaatggaaatgtcataactgccaacgcgtcgggggtgccttccgtggaaactgcgtcgatgccgatgacgacttttttcactcatgccttgaatgctccaaagtaccacagaatgaattgttatttttaatatatttttttagacattcaaaagccgagagtgctatgatcaccatacaaaagtgacaaaatgcaaagtcaagcgtggcaccgaagtggcaacaatcgaaaaatcgatctgcaaaagctcgaaaaagtgcatcgactgtggagttatttaccaaattcgggtagcatttgatattttaaattgaaaacaaaatgcttttaagcaccacaaacaaaaggctcacgaatgcggtcagaagttttgcaaagtgtgcctcggattccatgtgccacgggaatgctacatcccgtaccggccaaagaagaagaccgaaaagcgcatcatcttcttcgattttgaatgcactacggacttcaagcccgaccctgaactcctgcgcttcaagcatcaggtaaataaaacacaaaatatacgaaaattaggtatttctttcaggtgaacttctgctacgcgcacgtcacttgcacggaatgcattgcaaagggcatctgggaccagccactggaccgaagctgtggaatctgtgggctgacgaggaccttcgcatgggcaccgttcgagttctacaacaccgaagtggagaccgcctacgttgtggacgaccccctgacggccttcaccaagtggctcctgcactttgaagctgatgtcctcggccttgaccctgcggagaagcgccgcaaacggaagcgtgcgaatggagacaacaacaacaaggcccggaatcctgctgcaaatgccttcatcgacatggaagcggaagacgacgacagcgatgacaacgatgcagaaaacaactttaagggtcacgttacgatcacgtgctga

SEQ ID NO: 72865 - DNA, 327 bp, Heterodera glycines; identical to SEQ ID NO: 64469

SEQ ID NO: 72866 - DNA, 809 bp, Heterodera glycines
atgctgaaaaaggaagaacaagtaagtttcaaattaatttttttggttatcatttaaattatgggtctctgatttatagatagataaaaaattcgaccatccatccttttttgaagtttaccgacttttttcattttttgacaactttagccatttgagatagccgatagaagataaggatatgtttacaataataaactcctaaactatggcagattcataaactagtagaattagattactccaaataaactaaaaatgccaaaaattctccccaatgagctaattctggaagtgaataacttcaccaaatttaatcgaaaatggacaaattgccgtgtttcatttgcattcgacaaatttttactcgaaaaaatgggcgcttggttaattcaattgaaaaaaatggtcactaaaataaataaattagttattttttgattttaaatgtttttacaggcccaactttgcgcacaatcgatcgatgagttgtgcattacgatcaattcggtggctgatgatcagtcaaaattggcggcagctactggtgcttataatggcaagttttacaaaaattagcttcaacaaatttgatattttttaatatgcagcttgaattgaattcatttttctatatttatgttcgatcccactttaggactgaaaaatttcatcgaccaactgcccaatttgcccccggcgccggcattggctgacctcagtcttgatgaggaggaggattatgtaagtttcacttggaatttttctaaattcaatgcttatgatttctttcattttgcgtttttaaa

SEQ ID NO: 72867 - DNA, 248 bp, Heterodera glycines
atgaatatttattccgattgtatgccgaaggtttgttttttgttttatattaatttgaaattttaataattaaacataattttattaagctaaaatccgaattgtcgaaacaattgccaccattggtgaagccaatattttataattcagcagaaagtatatcggaaagtttaatcgaagtagtcaaaaaactgaatgattattccaaatatttttggcaaagatgaagaaatcctttatggaataaa

SEQ ID NO: 72868 - DNA, 775 bp, Heterodera glycines
atgctaattgcctttgtgagaaatgatcagaaaatgcaaatcagtgaatttacaaagcaaaaatatgaggcacaccttggcatttactgttttatgagaatgaattggcaatcgaagtggattaatgggccaataatttatgtggtgaattgcctcgtcgaaatttcagaattttattttattgaatgggtcggacaagaaaatataaaataaaataaatttattcattatttgaaattacaaccaaaattgttgaatgagaagagattgaattatggaataaaattgaaaaatgaacaaaaattgccattaatcaaatgattttgcaattggcaattgaaacaacgaatgaatgccaaacaaatgaaagtttaaaatgaataattcaacaaaatttaaacaaaaaatttgaagaaaagttagggaaaatgtttcaaaaagcgaaaaataaggaaaaaaagtataaaccatggaaaatcaatcaatcaaaagataatatgcataaatagtttttatattctaaattcgatgataaattggcatgggtgagagagagtaaacattcaatgaaaattaaatatgtaattcaaaatttagaacgaagatgctctatttttggaatttatcaaaggattagcaacaatttagagaaattttttaagaaggctaaagaatattcaaattctattaccaaggggaagtgaattttcagcaaaaatatgagactcatcttggcattatgcatttgatgcgaaaaaattggcaatgtaataaa

SEQ ID NO: 72869 - DNA, 871 bp, Heterodera glycines
atgagcggcccattgacgaagttgcaagttcggctcggattccttctgggattgcgcctctggcaatgtcaactgcatgacgagttggcgctgggttttcagcttgagcagaagctcttaaattcgtttgagccgttcgaatcgattggtgagaagcggatggttatgattggcatttttgaccggcgttaaccgtggttaaaaatccttaaccggtatgctcgtccttccctttttaaccgtggttaagactaaaccacggttgagttaaccgtggtttactccctccttaaccacagttaacgcaggttaaccgtggtttatttccaaccggtatgctcatctaaccgtggtttaatctttcttaaggaatcttaaccacaactcgagttgtggttaacgtaaatttatttaataaatttaaatagtaaaataaataaataaattttttctagggtaattttacaggcagaaaaagaatctgactttttttttttgtctatgatataaattattgacggattagtgttatttcatcaaaaaaatttgcacacgcccaaaccgctaaaatagctttttaaaaaaggtgacaaaattgctgctgtttgtagcatgttgcataacaacgtaattgtttgtaatgcactattaccaagaaattttggctccattgcagttcacacggccataaaaaaataatttgacaattttaatgcagcaacaggtcaataagtcgtacggtgtatgcagcgataaatttcaatgcctatgatcaaaacgcggcgctactgcattttactggccaaatgcacggactaaccatctgcaattcggcttagagcttcaaagcaatactcgaaaccgtcggcca

SEQ ID NO: 72870 - DNA, 249 bp, Heterodera glycines
ggatttggaataagtaaaattgtaaaaaatgagcgaatgttaattaaacctaacttataccaattggcgagggatccctaaggcttagtttttagaatcttaatttttaaaaaagcacatttttctatttttgggttggggcccaaacgaccccggggcccaaaaaagggggcccaaacgaccccggggcccaaaaacgggggcccaaacgcgggggcccaaaaacgggggcccaaacgctctggtccc

SEQ ID NO: 72871 - DNA, 1354 bp, Heterodera glycines
aaaatccatccgacaattgatgaggggcaagcagttgagcacaacagagaaacggaaggccaaagagagcatcaacagcagcagacgcagcagccgaagaaccgacgcttttcgagagggttaaaaaacgaaatgaaaaaagaaatttaaaaggaaatgccaatttaaggggcacaattttggaacatccgccgaacattgaattttaccgcaacactttggagaaggaggagaacggcacggtacggccgacaatgttcgacttggtggagggggacaaacagcagcaaccgcagcaacagagaagggaaagtgggaaggccgtggagatgttcagggtgatcagaagcaaaaggggggagggaaagacaaacgaaaatgaaaacggaaatgacaggaaaaaaatgcgcaaattttggagggccaacagcggacaatgggagccaaattgacatggcgaaaccaaccgaaacgcagcgaaagtgacgcgtccaaggtgaaaagcattaagcatcgccaaaagcgcacaaatggtgccaattcgttggacagaagtctctgcaagtgacgccgcgccgcgtcgtccgtccgagcggcgccgacggagccaaagcgaagctgaccaaattcggatgggtcgagggcgtgctgatccgctgcatggcttccatcttcggcgtgatgctttacctgcgcctcagttgggtgtccggccaggccggcatctgtttgttcttcccccccccccttccgttgactatcccttctcttttcccccatttttgtgctcggttcgtgcattgttctcctcgccactttgatcaccataatcaccactttgtccacctcagcaatttgcactaatggcctcgtaaagggcggcggtgcttattttctggtcactttgtgttgctatgccaacaattttcagctgatggcacccttttcagatcagccgatcgttgggccctgaatttggtggttccattggcattattttttccattgccaatgccgtcggtgcggcgatgtatttggtcggtgaaatcatttatccaatttgtgaatcggcatctcatctttaggttggatttgcagagacggtccgcgacttgctgaaacaccacggaatttttctggcatggaattcaaattttgaaatatttttttttacaaattttagttggacggcgacataaacgacattcgcatcatcgcattggtcgcatgtgcagttcttgtcgtgattattttggtggggctaagctttgaaagcaaaatgcaggtgaacactctcaacgcggaagaggagggagaggggcataattggccattaattagcgttaattactga

SEQ ID NO: 72872 - DNA, 960 bp, Heterodera glycines
ttgctcccgcctttgcccctcccttccgacgcccttcgctttcaaacccgcgtcaaacacggcaccatcgacgtttggtggctgtacgatgacgggggactgactctgctgataccgtatctgctaacacagcaaaaatcctaccttgaggttatacatattcatcccccaagggtttcccgtccatctgatttatgcttttttccaaagaatgccaaattgcgcgtctttacgctcgctgggcagggcaaaaacctgcagcaggaacaccacggattggtcacaatgctgaagaagttcagaataacggcagatcaggtgatgaaaaagggaattgaagggaatcctttggactttcaggtcaatgtcattcccgactttaccagcaaacgcccggacccaaaaaggtgggccaatggacgaatgaatggcaaatgtttggtcaattcactatttgagtttggcaaagtttgaggcgcttatcaagccgtttatgagcccaagcagccgaacggaatcgaatgtgacggtccaattggagtcggacaatgaaaatgaagagacaaatgttggacaagccgagggattgattacggagactgagctgaatgcccagcaggcaatcaaccaatcattcgttagcatttcacaaatatgtcttaaatttctccaggcacgcacttggcgccatttgcgcatcgccgaattgttgcgtcgttatagctccgactccgaccttgtcgtcgtgtgagaattggccattggaattaattaattaattgattgatgctctctttgggtcattcatccgtttcccgacacttcagtactttgcctgtgccacgtcgcggactgataaatgcggcgctttacttggcgtggcttgaagcgatgagcgccgaattgccgcccacgctgatgctgcggggcaaccagcaatctgtgctcactttttattca

SEQ ID NO: 72873 - DNA, 1477 bp, Heterodera glycines
gcgcgccaatgatgagcaggaaaccgaatcatcagacgttgatgaagacgaatatgtggtcgaaagcgatgacgacatcccggcggttgaggtgggaataaatttgaaagggagggagggggtcaaacaaaaattttgcaactatgaaaattatatatttaaaaataaaagttacctaaaaaatttttcagcccaaagagcgtgaagagcgatgggtggacccattaccagaaaagttgcaatttcagcagcaggtgaacaaaattgccgagctgaaatgcaaatactcgcgggccaatgccaaaggtgaaaagccatggatttaatttataaaatttacaaaaattatttttgaaaaattgttcagttttcactattttaaaaattgagaaaaacacttatttttaaaaagcgattgtttactgattttactaataatttaaatgccaaaaaaatttaaaaaaaaaattttagctaattttttttcaagtatttctttccaaaattattattttttcagtgcactggtacaaggaccgaaagaagctgttctcggacggtctcaagtacaaaattttgatcgacaaacagtccgtcacgctgatcatcaacaacccggacccggacgacagcggcaagtacacatgcgaagcgaacggagtgcccaccaattcatttgtcactgtggagggtatgttttggacggggcggacaaaacatggaaaattaattttgatttgcttcatgtgtttattattgtattattggcctataattttattaagctctcaagaaaaatttgaatttttaccacttataaacagattttcacgaaaaaaattactaaatttgcagttttttttttttgaaaatttgggtgcgagagatcttggagaggtttcgattcgtttttttttataatttttaattgattaaaaaagtagttaaacattttccacggacatttttggttttttatttaataataatttaattttaaaatttacttttttatcaaattaatactttcattttatttaaaatatatatttttttaattgtatataaaatttataaaaatgttttaattttttttaaataattatttcatattaaagaaaataaattattgctttttttcaaattagataattattatatttttcacataattttatatagaatatgttttattaaaagaatgcattttgtttcagactcaccagaccaacaaccattgtcctccaccgctcgtcgccgcgactcgcgcagaccaaaaagtgccagaaaggaagccactgcattgacccccttggacgccatgcagtggttggtttaacaaacaaaaaacgaaaaagaaagtttaattcattcattttattttttagttgcagcagccatttgacgccgccacgtcccaaaaacatggtgagcaaattcgggttttttaaaattatgtattgggaattttgagaaa

SEQ ID NO: 72874 - DNA, 2388 bp, Heterodera glycines
gtggccggcgtcaaaccgcagcacacctacgagttccgcgtggctgcagtgaacgtggcgggccgaggcgagtggagcaagaactctgtgccaattgctgccacatggtccccctgtaagccgttgatcaccatgggaccgttggcatgcgacatgactgtgctggtgggtgaacaggccaagctgctggtgccctacgcagcgaaaccacgtccgaaattcgagtggagcaagaatggcgaagcgatggatccgcgtgacgacccacgcgttaaggaggaaaaaagcggtaagtgagcgcgcaatcctggcattaacagggtggaggcgcagagccatacaataaaaaaaagggagggggattaaccaaaatttttgctaaaatggtctggaaggagggggtcgacgggaggggggtcagcggccaattttgcgaaatggtccagccatgaatttgacgttctttcaaacagatttttttttgggtgcgctttttaaaaaaaaatattttttggggaggacggtggtgcggctaggcgccgccggaaaatttttgaaaattcagtgcaatttgttaacatattttcactaaaaactaccaaattgcgattctttagcaaggcgatggctttttttttgtgtttaaaaaacctttttttcgcggtacacttttttaaacaactttttttttgcaatttgttagaagattttgtctaaaaaatggccaaattttaaaattttggctaaatgatctttttaaatttttttaattaaattttattttttatcatattttttattttcacgtttttttctcccatttttagacattctcatccagctgtgctaccagaaatgcgaacaatcggacaccggcaactattccattcgcattgtgaacgacttcggctcggattcggtggacttgcgcctgaaagtggtcgatcgccctgcaccgcccgaggggtcattgaaggtgcaaaacattggtaatatttttgtaaacagaaaatgatatgagagtgacatatttgtaaaacaattaggagtggatttttttaagtttttttttagaaatcaatttttaacggagtattttcgtttttactgtattttatttttacaaaatatttttataaaaaattgatgaaaaattgttaaaagcatttttgtaaatattttatttatgaaataaattgtacaaaaattgatatttaaaataaaaattttaatttcctcgcttaaaacaggtattatgatgcatatttttgaatattttataaaaattttttaccaaatatatatttttttgttttttctcaagaatttcgcttctgctgatcatgttccagacaaagcatccacattcaaaaattttttttaaattgatcattttttctttgtaaaaattttggtttaaattgtccccttattcaaaacgaaaactttaaatatttaatgcataaaaaatcatgaacaggagcggaccgcgtccggtggcggaaggcgacgcgttggcagcaccgcggcggaccggtcggcaaaggcggcagcagcggcttgcgctgcgggcgaagaggcaacggacgaggaggaagtggccgacagtgaggaggagcagcagctgctcgacatgacgacggttgaggtgggaataattttgaggcgggagggggtggggccaaattttgcttcttgccactttttttctctgtgtttttttttttaaatttttttttggggatgggtggtgagatccaatggtgccaataggcagacgcgccgtggaaattttgctaaagtgaatgcaatttgctaattgattttatttaaaatttatttagtttttataattaaaatttttgtatttttttttatttaaaaaatttattaaataagatttaattaatcaactttaattgatttaatattaataaaacatgcataattatcattaattaacgaatttatgataacaaatattatgatttttatccgttttatttataaaatccaaagcttttttagactcaaattttttgtgtttaattttttattacaaaaaacccagaaattaaaatttctgctctttgttgaaataatgaattaatattttccaatttttaggtgcgctgtgcggacgaacggctgctggccaaggcgccattgaatgtgccagtgcggcccggcccgccgaagccactgtacaccaccgacaaatcaatcatgctccaatggacacgaccgttgcgggacagaggcacgccgatcactgactacgagctggagatacgcgagcgtggcaccaagctgtgggggaaggccaccaccaacgcggagctgtgggagaaagacgcatttggcaatgtaccggacacacgattcaag

SEQ ID NO: 72875 - DNA, 399 bp, Heterodera glycines
atgcgtcccgtctcaaaatgccaatgtgcagagagagatatgggcaaaaagcacacttataaggaacaaatggcacgcaaagatgtgaataattatgacgaattcgatgaagctctactaccaatgtttcgcatgatttttgatgaaattaaaaaattaagcatggcgatgatggcagcgaaaaaaagcaaattttttttaatgaggaacaatactgttagtcctttcaagagagcaaataaattttttcaattcattaaaaaattaattcattaatataaattttggttattaaagcaaatttcaatttgttttacatttcatttgcagagaatatatgcctaattttcaattgcttcaatttgcaagaaactattcagaggtaaagaatataataaa

SEQ ID NO: 72876 - DNA, 636 bp, Heterodera glycines
gtgcctatgctttcgagtttttcgaatttttagaaatcaattaaaattggtgcacttctgagcacacaccattcggagaatatcagtgaacaaaattttaagaaattcagaaatcgtaagtaattcaccagaatcaaaattttgaggcttaaaaaaaattcgaaaccggaattccgatgataaaaaaaagtcggaaaccaaaattctgacatgtccaacaaaatcggagattgcgctattctcatgccttaaaatttccgcggcgcaaaaaattttcagaaacccccctaaaaatgccagaattcgtactcccagcagccataaaatattcatggccatcctcctccacctgttgatgaagtaatggcacaatggttggtccatgtcctggtaccgctcgttccaggacaggaacaccggggcattttcgtcggacaacagaaagcgcaggaagccgtccccggacatttttccctgcgcaatgtacgactcgtccgactcgtacttggcgatcagctgctgcacccgctcctggtcaaagtgggggaacaggatttcgttcagccgcgggtcgcgctgctcctcgttgagaaactggagcagccgctcgcgcgtcagatactccttttgacccga

SEQ ID NO: 72877 - DNA, 4644 bp, Heterodera glycines
gaacgtgaagatttggatgccactttgttcacgtttgaaaagttcttgcgcctctaccataaaatttgtccacgcacagaagtgcaggaactgttcgttcgactgtgagtttcttttgttggcacactcttttgtcggcatttttgaattttttcctgatccttaaaagcaaattaatgtgtctctggcacttggcaccagttaagcaaatcccaatatattgcttttttttttgcccagaaatcctcgtgaatcaaggacaaccaaacatatatgcaagaattaattttggcccaaagaaccatcaacaaatcaaggacaaaaactaattcctatatacaggaattaattttggcccagagaataccttgaaatcaagtgcaactagttctatatcccggaaattaattttagcctagagaattctcgaaaattaaggacagacagacatttcagatgcccaggaaccgattattaatttttcgggctaaaattttcaaggacaaaccgccacccttttttcaggtcgggtcaaaaggagtatctgacgcgcgagcggctgctccagtttctcaacgaggagcagcgcgacccgcggctgaacgaaatcctgttcccccactttgaccaggagcgggtgcagcagctgatcgccaagtacgagtcggacgagtcgtacattgcgcagggaaaaatgtccggggacggcttcctgcgctttctgttgtccgacgaaaatgccccggtgttcctgtcctggaacgagcggtaccaggacatggaccaaccattgtgccattacttcatcaacaggtggaggaggatggccatgaatattttatggctgctgggagtacgaattctggcatttttaggggggtttctgaaaattttttgcgccgcggaaattttaaggcatgagaatagcgcaatctccgattttgttggacatgtcagaattttggtttccgacttttttttatcatcggaattccggtttcgaattttttttaagcctcaaaattttgattctggtgaattacttacgatttctgaatttcttaaaattttgttcactgatattctccgaatggtgtgtgctcagaagtgcaccaattttaattgatttctaaaaattcgaaaaactcgaaagcataggcactttcccttttgataattagctttcttttttgccaaatagacaaagtctattaaaatttggtgcggtttgatcatttggaagagttaggggctcctaaattagcatttttgattttttaaatattatgttctaatccatatttttaatcggataagattgtcatgtcatgatgattaaatgatcttaattaaaatcacgctctttacagttcccacaacacatatttgacgggtcgtcagtacggtggcaaaagttccaccgaaatttatcgccaagttttgttgtccggctgtcgttgcatcgagttggactgttgggacggcaccggggagaacaaaggcgagccgatcatcacacatggtgagttaattgcttaacgaaatgaagagacactccaaatttccaaaaaaaaaatggctaattgattgccccgagtattcaatcgaagtaaaaattatcgttccgtttctagctgatcagttggaaccaacaaaagtgatctatggaatatccaactgatcagttaaagccaaaagacaatcaatccgatatccaactgatcagttaaaagtcaaaaacgattgatcggaagtcaaactgatcttgagaaattgaaagtggtcgatcgatcggatatccaactgaagttaaaacccaaaaacggtcgatcgcttacccaactgatcagttaaaagccaacaaatggttgatagagcaattggtcactaatcgggctttttccaatttccactccccccccccccccctcaattcccaattcaaaagccattacattggcataatgccaaaaattgataaatttgtttgtaataattccccgcttccttcagggaaggccatgtgcacagacgtatttttcaaggcaattttgctttcgatcaacaagctgcttgcttgatcaccgatcgcctcattaactaattaattacatttaggaagtgctctatcaaatcaaagagaccgcctttacgcgcaccgatttccccgtcattctgtccttcgaaaaccattgctccaaatccaatcagttgaagatggccaagtactgcttggagatctttggtgacatgctgctcagcaaaccgttggacgaatatccggtcggtcttgatccattttttttgcattttaatcgaataatgaccggatttccgaaatccgcactaattttatttaccgttaaatttcaataatttttgtgcttgtaaaataataaatatttcagttggagccgggcgtgccgttgccgtcgcccaaccgattgcggcggaagattctgatcaaaaacaagcggttaaagaaggaagaagagcggcgacaaatggaggcattaaggtggggcttaattaattaaattattgttaggcattaattaaattaattaattaggcgaatcaataaatttatcttttggattttcgggtgggaagataggcctaactaattataagcgaatctggcacacatttaataattggctgagtaacctagtgatcgcaaggcttaaaattataaaactgggtttttgatcaggaggatttggagttgtcattgactctttgtctttgctatgcaaaaatttccgggaccttgatcccggcttttttgaaaaggccgggattgggatcccgacaaatggggatttgaatcccggggtcggaaggatttaaatttcgacaaaatccttgctcccccatttgacttggatgtcacaatttgccacaaatcttgatcaaaattcaatgtttttttatttattttagccagggccgtctgcttgacgaggaagaagcgcaggaggagcaacaaccggtggcacagccggcggcgatgccatccaccgccgccgccacaacggcacaaccaccagcagcagcagtaggggacaacaacaatgctgttgttgtggaggaatgttgctgtaacggtggtgaaccaccacaacagcagcaacaagggacgacgacggcggtggcaccgcgtgagtttggcaccgtttcttttctcgggttgtgccattggcgcattgactgttcggatctcgagtaactaattgggtggactattagtgccacgctcgagactgaaaatccgagtctctagcttatcatctcataattacaaatttattattttcttctgatgctaattgtttatcaatcagtaatcctacttatctcattttattgtttaccaaatttttaatttcttatatttatcattatgccaaaaaatgccaatattgttttttaactatatttggcatttgtgtcctttacaaacaccaaattttggtggcattagcccgccatcaaattttggcataatgtgctgtgtcgggcaccataaaaacccatcttcgccatttttggcaccaataggcgcctctccgttcggcacgccgccggcaaacagcgccgaattggcacggtcttttgacttggccgaatgccgttgctcaccaccggtggcacccgggtcggccaccagcaaccgttgtagcaggcacacgttgtctaccgcctcttcgtcgtcgccgagcagacgcgccagcatggaaccgatgttgtcccatgttgtgtcgccccccatgatggtgttgggcatcgagtcgtcattttggtacatatgtacaataagtactaattaccttagcgcccgctagcgtaaacaaaattgatgccccgagacttggcacgaaaccgaaaatgttttcgaaaacgaaatcaaaaattttcaaaaaccgaaacgaaacgtaaaagaaacaattttttttaaattttggaaaccctaacaaaaacgaaatgaaaatttaaattttgaaaaccaaaaacgaaatttttaaggacgaaaacacgatcagaaaaaactcagaaagtgccaaaaaagtgggggacgaaagtttctacccctccggcgctttgtgtccgtgtttgatgccctcatcattcatttcaccccatattgggctcttgcgcagttcgtcccgcaactgttcccagcgtaactcgttcatcttctcgccgtccgccccaggcggttcggccaacgccgccgcctctgccgaaccgcgtctctcctttctcttttccgcttttcatcccgcggaattgcgccggtccgccaggcgtcgccgggagcagcagcaacaacaacaagcggcggcggcggcggctgaccgtatgccaacggtcgccactggcggtaaggaatcgttgcgtcgaaccgcgttgcactcgcacagcggtggcggcggcagtggcgacgcggaagcgactgctactgctgggtcgccgcgctcgcggccgccgtcgcaggttggcgacgcgggggcgacaacggcacgctcgccgtcaccggcgagcgccaagtgcccgtatcaccagcagcagcaacgacgggagtcaaagaaagccaggtagatttttttatgcatttaatggtggaaaatggtttactat

SEQ ID NO: 72878 - DNA, 563 bp, Heterodera glycines
atgtaccaaaatgacgactcgatgcccaacaccatcatggggggcgacacaacatgggacaacatcggttccatgctggcgcgtctgctcggcgacgacgaagaggcggtagacaacgtgtgcctgctacaacggttgctggtggccgacccgggtgccaccggtggtgagcaacggcattcggccaagtcaaaagaccgtgccaattcggcgctgtttgccggcggcgtgccgaacggagaggcgcctattggtgccaaaaatggcgaagatgggtttttatggtgcccgacacagcacattatgccaaaatttgatggcgggctaatgccaccaaaatttggtgtttgtaaaggacacaaatgccaaatatagttaaaaaacaatattggcattttttggcataatgataaatataagaaattaaaaatttggtaaacaataaaatgagataagtaggattactgattgataaacaattagcatcagaagaaaataataaatttgtaattatgagatgataagctagagactcggattttcagtctcgagcgtggcactaa

SEQ ID NO: 72879 - DNA, 595 bp, Heterodera glycines
acatacggataaagtgaagtgaaatcaaagtacgagatcttctctccatctcgtgcttcatggtaaagcgttagcggtcccgtgcgcccgcccatgaatgcatctctgatcaacagtggtccatcatcaacgtattccgcaaacttttgccgcatctctttgcttctgctcagcatacactgaatttcgcattcccaatacacatccacgtgtgccacttgggagtgaatgaattccaggcgctttgcgtcccgctcgcgcacttctcctgccgactttccatttggtagcagcatgttatcacttggataacactttttgcacccgtgccacgcacaaccttatttttcaaatgaaacgcataatccaaaaaaaaaatcaattaccattcacttcgatggccctccgctcggcctggatccatccatcaaggctgtactggccaatcctcttttctccttccggtgagtgagcggtttgaaccaccacaccgtgttcctctgcaaaccacttgaagaagcgaagtgccaaaaggctttggttctgggcattgtcgtagccccgctccggcacaatggccagatgatccgctgga

SEQ ID NO: 72880 - DNA, 1061 bp, Heterodera glycines
atgtctcctatcaagagaaagcaagacttaattgttgtgagcaagaagccaagactttgcaggcccttgacacgtcaaatgcttgacgaaattatcaattggattccttttatgttcttatttggcggtaatattttaaatatttaaaattatgtttaaaaaatttttagtggcattgtgcaagccgaagcctaagaaattgaaggctcgaagacgccttccagccgagctcgtttacgaaatgttcaatttcgtgcctgttatgcagttgtatggtggaacgacacccgttacaagtttgtttaaaaaatacaatttaaaatttattacatttttaaatttaagacggatttctccctccttgcggaattgggctcattaattggtcattcgaaaatcttcgaacaaaacgctgcagtcttttcgtccaattggtgcataaaaaatttttaatgaaaatattttttcgcattttagaaacggctgtcacttgattttgaaaccatctgtgcaaaactctggcttccaactggtcagctccatattcaatttaagtttgcgttccagctgctggaccctttctacttcaacgatttcacccgttatttgctctactctcgttcgggccgaatcgcaacaacgcgcattttagtccacctgccttcggatgcggtaaatatgagaaaaattaaaaaatatatatttttaatatgttatagtcagctgtgactggagcattgtgtggcatactgctacaattcgttttgaacagtccaacaccgaccacactgaaacagcacattgcagtctcattcttgcgccgttcggactttccgacaattctcaactctacggctcgcatgatgtcgtcgcagggcattcaccaggtcgcgcacaccgacaaagaacaaatgttttttctaaaaaacagtcattatgggcattatgtggggtttctcatgattgattcccgaaccagtaatcctgaccttcattatatgattttctcagtttactgatcaaataacacatgcaagcatttaaccattgggcgtaataaa

SEQ ID NO: 72881 - DNA, 2613 bp, Heterodera glycines
atgtccaatcgccaataccccaaattctttatcagcaacattttggggccatcacagccgaagaagccacgccaaggctttctcatcaaccaattgcttggtattgtgcagcagcagggagaaggggtctcttcctcatcatctgctcaaaagaaagcaaatgaatacgtcaaaaagttggacaacagccttgaacatctgccagggttcaactattcaaaagtcaaatcgcggttcagcatcgaggatgttcctgaaaatcctgaaacattgttgaccgccatttttacgcattgtattgatgaggcaaagacggacagcagcgatcgcggaattgtgcccacacatctcggatgtgtcatcagcagtcagctactgacggcaggcgacctctttatcccgatcaggcagataacagacaacacagtcgacacaattctcaacctttttttaaaagtatcgcagagcaaaaagactgaaggggtcacgctgtggggcgaaccctttacagtcacagtgactactgttaaccgcgacgggcttcctgccaaacggcagctcaaagggggagcacgtcggagaatagctgctgtacaccatcgcattcatgaccagtctttgataaaggttttcgaatagctgatggagaaatataaattgcagtttaagatccgtaaccccgatgatcgaaactactgtttgttctattctttgcaagcaaccatggtggccaagacgcgtggatggccccgctggaagttttacgattatttgcacagccagcatggacagcgagacaaatttctcagtgacactttgtcgttaatgcgcacagttggcatccaaatggatttgaatggttacgatgctgatacgtttgtgccgcgcataatcaaccactggaacaacacacagcaaaatcaccgatttgccgttttcatctttggttcaaatggacaatatagaccgctgtacaagtacaatgacaacacatacgacacaccgctacttctttacttcaatgacaaccatttcgatggtgtgcaggctcaaggagggttgtttggccgtaaatattgtctcgagtgtgaacggccgtatcgaagagacagcgagcacaacaaatcatgcaaagcacgctgtctgctttgctctcgggttggaccagcatttccatgccctgccgccgccggcttcttcaaaaaatgtgatggctgcaacaaaaaattccggaacaacaattgctacactcatcatctgcgcacaaatttctgcaacaagtcaaaattatgcaagcattgcggcgtaatttgggatgtaaagcctaacaacacaaatgaacgaaaaggtcatgtatgcggtgaacagttttgcacattgtgtaacaactaccacaacacggaaagaggatgcttcatcaaaactcttgagcccaaagaacaggacccataccgcattgtggcgttcgatctggagaccatgcagcatcaaccagttaatccacaacagctcgatcggcgaagtcatcagccaaattttatcagtgccaaggtcatttgccctgattgcattgaaaacgacacatggaagaggggtacagcaggatgtgcggtgtgtgggccacacaggacagtcgcattttgtcagcggccctttaacaacaccgtcgttgaccaacaagtggtgaccgacaacccattggaagcatttgttgagtggctgatcttccagctgcccaagcaatacgacacttttgcttattcgcactttggcggccgctttgatatggtcattgtgtttcgggagctgttccggcgaggatttaatcccgaaatgttgaaaaaagtgaaaaattaatttaattttttgtaaaaattaaattaattttagggaaacaaaatgtaccagatgaaggtgcgaaagcaaaagaagcgcaatccgaacgtggtcttcagagactcgttcaacctgatgccaatggcacttgcgtctcttgtgccgtcgtttggtcttgatgttgaggacaagccatatttcccgcacttgtcaaatcgaccagaaaactacggtcaacagatattccccacgtccgacgactatctggcaaatggaatgatgccagataagcgacgcaaattcgacatgtggtatgagcaacatcgcgatgtcccctttttgctggatgaggagctcgccagctattgcaccaacgacgtggaaattttgacagctgctctcgttgcttttcgccaagagttttttgaaatctcccaacgacaggagggtgttgttgcagaacgggccgcatcagatgagcatcatgatggcattgacgtcttgagggagtgcatgaccattgcgggggcatgtatgcgtcacttccgcacaaatcaccttccagcggatcatctggccattgtgccggagcggggctacgacaatgcccagaaccaaagccttttggcacttcgcttcttcaagtggtttgcagaggaacacggtgtggtggttcaaaccgctcactcaccggaaggagaaaagaggattggccagtacagccttgatggatggatccaggccgagcggagggccatcgaagtgaatggtaattga

SEQ ID NO: 72882 - DNA, 1418 bp, Heterodera glycines
atgctgctaccaaatggaaagtcggcaggagaagtgcgcgagcgggacgcaaagcgcctggaattcattcactcccaagtggcacacgtggatgtgtattgggaatgcgaaattcagtgtatgctgagcagaagcaaagagatgcggcaaaagtttgcggaatacgttgatgatggaccactgttgatcagagatgcattcatgggcgggcgcacgggaccgctaacgctttaccatgaagcacgagatggagagaagatctcgtactttgatttcacttcactttatccgtatgtaaagtgagttttgatccaaaaatgggattcaaaaattaacgttacatttcagctttgtcacgcggtatccggttggtcatccaaaagttcacgtgttcaacgaggatgtcacatggacacattccggggacaacccttacccccttgccttgctcaaagtctttgtggtgccgccaaaaaagtgtgatgtgccagtgctgccagtcaggatcaatgagcggctatgttttccgttgtgccaccgttgcgctcaagactatcccatgggggacgtggacccggactaccactgcgagcacaccgatcaacagcgcggatgggtgagcacgtgtacatcgattgaacttaacgccgcgctggatgaaggctaccgggttaccaagctcttccgcgtgcttgagtatgagcagagcgacgacaaactcttccgtggctacatcgctgaatttatggcccaaaaaatacaagcatccgactttgcggccaacatcaaaggcaacaatgagctggaggagcagtttgtcaatgagtgccatgagatgttcggcatcaccatcgacccggagcagatggcagtgaacaaaggaaagcgttcaatcgccaagctatgcttgaataacctttgtgagtgtcttaatcggcttatgcctagtttgagctcattattttaagggggccgtttttctttgcggaactttggcctggcccaaacggtgatcacagatgaccctgcagttttggctgagtacttggacaacaaatccatcgatgtgatgtccatcgacgaactgaatgagacaacgattctgatcagttacatgcagaaaaaggaatgggttgaagaacatgaatgttcaaatattggtgagagacaattaaattgaaattttaattgaaatttaaaattttcagttatttctctttggacaacatctgcagctcggcttctccttttgagagcgatgcaaatggttgttcgaacaccaggctgcagacttttgtatacggacacggactcgctcatatttgctcatctcattgccaattgccctcttcaaacgggtccacacctcggtcaattcacggacgaatatccggaccatgaaattgttgagtactgca

SEQ ID NO: 72883 - DNA, 530 bp, Heterodera glycines
atggtcttggtcagcgaatattgcgcgcaattttttggttgttctcctaaaacacttcgcgatcgtctaaaccatcctgaggatcgggaacgcgcactgaaagagttgaccggcaaaaaagttcaaacaacctacaaagaccgaaatggcatgcgcaagactttctttattgatgggataacagaaaagggagcggcattcgtgccagcctacggccgtcttcgccagccgtttaatataaatgtggcggcacatttttatgcccgacaccgtgtgaaactgcatcacccctacattccgtgcattgttgaacgctttgagtgtggggagaaccgtaactacccgatggaactgctcgaaattgtgaaagaaggacaacaaccgatcgggcaatggctgggcaacttgttcaaggagagggatgacatttgcagcagctcgtcaaccctgtcggacaaaactttagttttgcgtgatgaagaagacactggacgcgatcaatgtagccagaaatctcctgagttttattg

SEQ ID NO: 72884 - DNA, 488 bp, Heterodera glycines
atgctctcgacccaatcttcccgcaatgaaagaaaggaaatggagggtcaagaagagcagtgtgaaaattcgcccacaaagaagcaaaaattggacaagccaaaggtgtatgacagtatgctgtggaagatcctcaagggcaaatacatgatcagcatgtatctttgtgcaggtaataaacattaaaatatttttcacatttttttattttgcagatgattggcgaaaactgttcgagaaccgcgaaaaagtgcagcgttccgcgaatgaccgagtgcgcattagctttgacatgtgtgaagagtgcgcgcgtgtcaattgccgtatgactgacctgattgcaccaccaaaaaagaatttaattttgtaaattcatatttaaattgtaattgcttggataaatttaattctttggccttttggtttattaccatttttgagggagggagggggaagggtctcattgcgtttccctaaattattaagaa

SEQ ID NO: 72885 - DNA, 374 bp, Heterodera glycines
atgactacatgggcatcattggagctcaagtggaacaggtaatacaagtcaacaattaattaataatcataaataattaatcacattttggcgcctgttgtaaaatagtttattggcccgtacaaaatttcaaaaaagtctaaattggaacatgtcaaattttgggaaattttcgatttcgagaaggcaataatttaaaaaatgcacaaaattctcactcggcttttgttttgtcaaatatttttggattaatatttttataaaataatttgcaataaattaacattggtaaaaaaaaatttagcctgagaatgaaatcagctccacgagaagaaacgcacgcaataaaaagactacttttttgtttcgcgtaa

SEQ ID NO: 72886 - DNA, 1885 bp, Heterodera glycines
  unsure (1)..(1885): unsure at all n locations
atttgaaatatattatcataaaagggtgtgttgttcaatgcgctgttntgaaccttttccgacgcaaaaaattttcattcaccgaccaaatttgtgctttcttatggaggacttcgtggtgcaattgcatttggacttgtcatgtcaacaaataattcagctgatcaattccctgtaatttttttaaatttaaattaaaaattaaatttgtaaaatttttaaggcccgttcaatgtttatctcaacaacattggctgtgattttcttcaccgtttttgtgcaaggcatttccattcggccattattattctggttaaaagtggagaaatcgggcctcgatggccttgagacaatgatgagcaacaaaatttttgagagggtaattaatatcattaaaattttaaaaaattttaggatgcacaaaattttaaattgtggctaaaatattgtaaatttttttaaaaactaggttaataaaacaaataaagaaatttttcattttttaaatggtttaatgattttcgcatgcaaaaaaattacttaacttaattttttataatttttaagctcatttttgttgttaaaataagttaaaaaatgtttttgttttctttctttatttaagaaatactaaagttttaaaaacttgggcatttttctgattttcagctcataaaaactcattaattcatgtaccaatattttatgctaatccttaatgaactgaatcagttaaaaatttttaatgaattgaaataccattttattaaaattaaatattctttaattttctttttcatttttagtacactgatcacacaatgagcgggttggaagcaatcattggacataaagggactcattcattacgcgatgcgtaagttgtttttgtttttgatcaagacaaatcaaggacgttcttgtaaattgatattggcagcaatgttaaagaattttcaaagaaaattttattaaaactttaaaaagacaaattaaacgaaattaaaaaaattagtcagttcgccacaattataattgaaaaaaaaattcgtttagatttgaacgtttcaacaacaccgtgttgaccccatttctgatgcgatctggtgaacagcagcgcaaaacatacgaagcgtcaccaattgttcgggcatatcacaaaatcacgctacaagaagcgcttcagcttgcgcagagcggttcaaaaatttcaaagttggaaataattttaaaatttgaattaaaaataaatcaaataatattttttgcttaaatatcaaattcaaataaacaatttgttttatctttagaaaaacaaaaaaaattacacgttgccaaagtcaaagcgaaagtttaccaccaacttcaacaattttgcgcagtgttagtcgagttggagcgcagcaaatgacagacattgatcaggtaattaactatatatatatatatatatatatatatatatatttaatttttaataaaaataaataaaaattccaattacaaagaacaaattaaaataaaaacatgtaatttaaaacaaatataaataataataacatatagtgcattaaaacaaaaactaaaataaattctaattaataacgaccaggagcggtgtggtgtaatacggaaacccggaaactcaaaaaaattctccagaatttcggacaaaaaccccataatcggtagtttggaaccaccctgatttatatgtttctatgaagcaaaaattgttctaagttaaaaatataatttattttcaatgccaaacaaatacctatacaattgtttgagtcaccattattatattatttaattgatttacagtttctttcaaatcgtgaaaatgtggaactgctttatctcatgttttctcgaatgt

SEQ ID NO: 72887 - DNA, 829 bp, Heterodera glycines
atgtttgtcacgacaacattggctgtgattttcttcaccgtttttgtccaaggcatttccattcggcctctattgttttggctaaaagttgaacgtgatgatgatacggcacgaccagcagctgaagaaaaaaaggatgataatccagacgaaaaattggacagagtcagtatgccaaaaataaataaataatttaaaataatttaattttcagtacacagattatgcaatggctggcctggagacaattacgagcggagcgggcaaacatttcttacgaaaagcgtaattttttttattttaatggagaagacaaaggctattataatattaattgatttaaagaataattagtgatttatgaatcaaagttacataacccaattataattattttaattaattttgagaaattctttattaagaaattaataactaaaatgctgtaattaataattgaatgtttaagtttggcacggcatttgcataacatgccaactcgaagtcgaacggaaagtgaagagggccgaccattgttaacatgatgaaacatgataatggatgacaatgacacttcttgttaatctcaatataaactttcattttattgtaaatccaaattggattttagtaaaaatttgatttccacaatttaaaaattttgaataatcaaatgggcaaatttgatggcatttgtatcaaagaatttaaagttatttatgtgccactctatgcaaatatttatgggctatattttgtatattttgctttgatatatatttgctcatctataaatgggtatgggatatatttgcttattgtaaataaa

SEQ ID NO: 72888 - DNA, 1108 bp, Heterodera glycines
atgaatcgcagtggcattgcttcttcgattgatgtcaaagtgcgccaatgccttcaaatgtcttattatctggtcttcgttctgtttctcaccttctgtgtttaccctttgatcaaattggctcgagaacgcttggctctgtacattctgatcagcaaagtgcgaaggcgaacatggggaaattaaccaaaaattgaacacttaattaatcaattagccaattcagtctaattaaacagttaattattgttgtaagttaagtgatttccttccccatttagctttttcctgccttcatcatgatatgctccttctttttgggcattgattcggtcgttcgtttcgtcagtattggccaaatggtgcgccaaagtctgatcattttcggattggttaactatcgtttgcatatcatggcattggccgtaaacagagcacacgcactgttctttccatttcattacaacgaaaaagtcacaaaaaggtaattaattaattagtttaaaccctttttgcgtaataaaatagccttcgccccccattttgatgatttttttacggttcattaagggttgttctgttccaatgtgcgctctttcatttgttgtccatcctcttcactgttttggcatatttctaccctggtaagtgaatgttttactgtaatgattggttactgtattttctacagtatcaattccgcttctcttctcttttagttatttcactttacacttggccttatctgatcgtttcttcctcactttatgtggcaattgcaattcgtttggcgtggataaaaggtaaaataaataattaatttttcgaaattcccaatttatccacttttaaagcgcataatcgcagttggaactccgaaggggcgtccgcccaatcgtcggacaaagacagcggacgaatcactgcgacatgctttgccattcatatccaagcttgggcttatgtgggggccaattcagcggccaattacaagtggtactccgactttatcaactgtcatccaatcggacaaattgcttttttccccatccaacttttcgtgtgcatttatgtgatagcggacgaggcaatcaaaattaaaatttaa

SEQ ID NO: 72889 - DNA, 627 bp, Heterodera glycines
  unsure (1)..(627): unsure at all n locations
atgtgcggtatgcttgaattgagttcaatgcatgaaaatgcagcattttcctttggtgggattggcatttttgtctgcgaatttatttgctatttgtccatttgggcaatcatttggtgtcgggaagaacaaagtgccaatttattaacaaatttttttaatttattaatttattttttaatttagtgccacaaaatatgaagaaaataatcttttcactaagcataattatggtcaataatctcatctgttttattggagtttgtttgcttttgtttttgttgtataacttttttaaaaattctttattttagaccaccattttttctacgttaattatacccaatttcgaaattaatatatttgctttggaatatgtttttgtgccaatttgcaacgcattttaaaaataataaataaccataaaaaactaccgaatgttgcgtgaataatgtaaatatgttcatcttaaatattgaattcttctatttaaaaatcaatttaataatcaaaaaaaggcccaattaagccgatgtaatcaattttacctgtctcttttctacagatttttgagtcaaataataaaatttttcanattatgaattanatatatttgttcacaactaa

SEQ ID NO: 72890 - DNA, 414 bp, Heterodera glycines
atgacgtcaaacaagcaacgacaattggtccataaggacgttaaactacgtcaccaattcaagcaaaagcactcgagcatgcagctgacagcacgtttccggaagcaaattcacatgtcctcaacgattgaggaggttcagcagcgaatgaaccacaacagaccgcaaccgcggaggtcacaacagaggggactaaggccaactcaagcgcctaaaatatgccaatccgggatggcacagtacaagcagggtcgagggatccgccttcacactgcgtcttctgcaatggcactcactggaccacgacgacgactcagcgaacaacccttgcaacaagagcaaggacacgaatccagtacgtcaccagggcgagaacgcagaccacgaaaaagccaacgacacgccccagatcgc

SEQ ID NO: 72891 - DNA, 719 bp, Heterodera glycines
atgtctgggccaatacaaaaagggatcatcaatgcactcaaagctctggacaacgccaaaagcgccacctcactcattctacaccccgacccggacctatcaaactgggaaaatgccgtcaacttggaggctcaatttgatcgcgtcgtcaaggaaatccgtacaatggaaatgcagatggacagtctacgagactcatccaacgcttggattgaacttctcgcccgcctgaccggagacgacaaagacaacggcgaaaaagaatacatcaaattcgacaaaaatgaaaaaatcgccgaccgatacgacgcagcaacaaccaaacttcgggatttgcgagatctcgaagcaacacttagtgccgcagccaaactgcacagaggcagagccgacagagaagcaaaggcggatcaattggccaatccgcagcaacaaccgcccatgccaccagcaatggcagcaccaatgacaatgccaacattcacagcaccgctctaccaattccagccaattcaactggataaatttttcggccaaaagcgaaaatggcccgaattctacgaatccttcaaatcggcaatcggcagtcaatcaatcagcaaagcgcagaagctgaacttactccgcaatctgctgggtggagaagcgcgagaactcatagcgggcttccggctagaggacgcaaactacgagacggtccttcagctgtcacataaagg

SEQ ID NO: 72892 - DNA, 422 bp, Heterodera glycines
atgactctttgtatgtataatgagagtatgaacattttattggtatgccttttttaatatccaaaaaattctgcttttctgtttaacataccactaaaaattttggatatgtgtccaaacaatttaataaaaattcactaaattacgcgatagttttctgggctttttattgacaataataactccaaataaattgtaattatagcattttatgactctttgtataatgtatccaaagagtcagaaaatgggcagattacaatttatttggagttattattgcctttaaaaacccgcagaaattattttggaattttctggaattttattaaactgttttgaaatatacccgaatttttgtggatgcgatgttaatgagaaaaagcaattttgcttttttaaatattaaaaaaggcataaca

SEQ ID NO: 72893 - DNA, 1181 bp, Heterodera glycines
gcttatagagaaaaagcttggctaccgaatgaaactaagcacgcaaaatttggttgcttgtaagcaaagttatgccatgctcatgcttaatgaacaaaattactggcaacggaaaacggtaattatttcgggacaaatgccaaatttgtcgtttgtaattgtatatttttggaagttcagcctgtagaaatcttccgctgagctctcattcaccatacactcaatgccactaaaaatgaaaaaaatattttaaaattggtaagaaattcatgaaaaatgtatgcctctcaaaatttttttccatcttttacgatttgtttatttatattaaataatgttaatttcatttaaaatcaatattgaataaatattattctacgcaaatattctttctctgaacatttaggtatatgatcattttcccaactttaaaaaaatcttcttttttttcattttcttactacaatgatttctaggccctagattttttggcacttaaaaacgccaaagtgcgagaggtttaagcacaaaaaaaaattgccaaacaaggtcgaggctcagatttttaggcacttggagaagtttaagcccaaaaaaattgccaaaaaggccttgccccaaaaccgaaaaataggcactaaaaaggttaagtatttaaggggtgtaaatcaggggtagtcgctgaattcgattattattttttctattttttttatacgtttttctttcgaagctatttagggaagtgtattatgcgaaaaatttttagttaattctccgaactgctttggaatggtggttttacgacgcatctgcgaagtcaagcgggagtgcattcctgaatattctttttccagccttagcggagaggaattttaataattagaattattaacttaattgcattatttggggtgttatatatacgtcattttgccaaattatatattttttttttcttaaaagtgattggaatgactggcgatttcctgatctgatttgatacaattattatttcaactcaaatcaaacgtatcatatttttattcgaatgatgattctataactaggaatcactattttggtgcttcgccactaaaaaaaaactatttcggaagttggccactaaaataattttttgccaatattttggcatttttggaaaacttcccaaaattgca

SEQ ID NO: 72894 - DNA, 1195 bp, Heterodera glycines
  unsure (1)..(1195): unsure at all n locations
atggccaaggattcgtacncacggtttctgaagtcggagcagtacctggaattgctgaacaacaacaacaataacaacggcaataacaataatgagaatgatgggggagagcacatgcaacagcctaagggactgttaaggtacggtaaatataattaattattaattagtggtacggtataaaaataaaacgggaaaatgtaaataatatgtatgtgtatgtttttaatagagatcggaccggtcggtttttttcggtatttttcggtttcggtttttttcggtttttataccgaaaccgaccgaccgaccctcttgtccggtctctagtttttaattactttttttaatcggaattttaactttcttctggaaaatgttaaaattattgtttgatttagtgcattttttcataatataaatataatttaaaaaagccattcgtttaaattttgtaaatcaaatttatgcgcatttatttttgaattttaacacgcaaccgggttctgatataagcagacaaaaaaagaagcatttaaaatcattttccaagaattttagcatcaaaaaattatttttgtaaaaaatcgaatttaaaaaaatcgctaaaatatgtgacaaaaatctcaaaaatcagccaaaattccaacatattatgtgctcaaaactcacggaacaaatgctttatttttgggcttttcatgcgataatatattcgaaaaaaatctgtaaaggcataaaaatccttcccttataattagattaattaaatattgtatttaagagaattaaaaaatcaaaccaaatattgtgaggtttcatactaaaatttgaaaatttgaggtctcaaattttccatagcgacaaagctaatggatattaattaattaattatttataattgctctttgcagggttgccagtgcccgtgagggatgtgccgtcacaaccaagtcactgtcatcactgtccggcgccagttgcagccgaagtccgtcattgtcgccgcgcagcggcggcgctggcgccgggcgttggcacacgcgccggaacacttgcgcaccgaccacaacgccaatgccaatgttggccggcgcccacacaaaaaagggcgccaccggcgctggcaataatggcacaatatccaccaacattctgtccggcagcagtggcgtcggcggtccgacaccgctga

SEQ ID NO: 72895 - DNA, 482 bp, Heterodera glycines
gcctcactgcagcatcactactcgccgatgcgtgtgcatcgcggaggcggcggcggcaccaacggtggcaaccgttcgtcgccccaaaaagttgggcccacatcaccgctcaagcagcagcaggcgtcgtccgccgagctggtcgacccgtacaacaacaccaacgccctgcagcaacaacaacaacagtcgccgacaacaaagcgacgaggcggcggcggtcgcctgcgcagcgcgctggccgcaaccacagacaacacgatggtgcgccgtgttgcgtcgttcactttttcaccgccgctacgggccggctcgctgcaacacaaccagcttcagcaccagctgcagcagcaaaattttttgtcagcactggacaagcactgcagcagcaacagtgcggcgggcgcgttgcggttggacaagcgcaactcggttgcaaccggcggcggcggcactgacaagctgcagcgacgcatggcact

SEQ ID NO: 72896 - DNA, 646 bp, Heterodera glycines
atgccaaagactagagaccgagaccctcataaattagacatttttctcgagtggcgccgaagtccgtttttgggcacctgggtcggagataaccccgaaaaatggccaaatcccggaaaaggtctaacaatgccggttactctcgagcatcactagccatgctcattttgtgtattaagtataatgtcaacatttctgaattgcctatttataccacggataaatgataaatataccgtatattgtattcaactataacaacaactgcaattttcagctgactcgaccacctccgatttcacatcaagcggctttacctcctcgtccccaacaaattgtggcactgttcaaatgctcatcggacaccagcaccaccaacagcttccaacaatggcaccgggccccatcgaaacatcgtcgtcattggccaacagtttcagcagcggttgtgccgaggtcggtgccggcggcgcggacgctggcggcggttcgtcgtcgtcggatgagtcatcatcctcttcctcatccgcgtcgtcctcaccggttgtggtcgaattgtccacaaatattgttggccaagcagtcccagcagcatcagcagatggacaacaacaacagttccgaaaagtgtggtggaatggaataa

SEQ ID NO: 72897 - DNA, 2175 bp, Heterodera glycines
atggccgtcggcccagggccaaatcccatcaaagaattgacggacaaattccaccaaaaagcattttataacactgaaagaagcgatgccggcgcaagtagcagcagagcactgataacgaacacggtggtaattagtgtaattatataaatttaattaactaatcatattttaaatagaacagaatttggaagaagcgaaatcggaaaagccatcgccacgaaggattgcggaagcactcaggaaagcacaagtgccaacgcgactaatgccggaatggttgtcaagcggaaaccaaaaagcagcgaaaaaggcgcaagaagcaaatcggggtaaaagtggcacatgccaattggcccagattagcagctgacattcccaacttttataatcggttcaattcctttgacgaattgcattttaatttccccttttgtctccctcctcattttgcggcttttccctatgctcaattcattaagcaaattacccgctgattgggtcgcgttgggcttccacaaattcatttgaaacctttcaaataattccctccccgtcggtccaccgcggcacaaacgacaaaaagcagcagacaaacaaccaattggactcacaaactcttcagttcatcaagctgataaagacagtaagcatttgctaatggcaacagaaaatggccaatgaatgattttggcaaaattaaaattcggggataaatgggagatgagtaaaagaagcgatttcggaatggagacgtgcaattttgttgcaattatttaaaaaatctcatcattacagaaacaacggtctccgtcgtcgcagtcgccctcagagaattttgtcgttggcactttgcccatggacagggatttttcgccaatactaaacccaaccattgggcaaagctcgctaatgcggaggcgtcaacatccgggaagagaggagaagcagctaaatcaatcgggagaagcatcgacagaaaaaaccggcgaaacaactgacgaattggtggtccgtgcgattgccacaagcattcgcgcagtcggaaagcccacgcgccaattgcgcttcggctttgtcgcctccggcagcggaccctttccctacgcgttggatgccgacgtgaaaagcatagtcaaattgattagtgatcgcaaaatggagtcagcattgaaagcggaacatttaatgggccaaatgaaagagatggcaaatgaacggattgacaaaatattagtgcaaattggggacgaaagcagcgaattccacgcgaaaattaggaggaaaagccaaaaacagagggaattgagcgttctgttcttttttgttagactttggcgcaaattgggcacacttttggtattggaaaatttggacattaattcgacagaatttcacgagcaaattttgggctgtctaaacgcactaagagcagagatttggaaggaattcgcttcttcatgtgaagcagcaaaaaatggaaaggttatgaaaaatagagttttctaacatataagtttcattaatttttgtttttttaatcgtaaaatacatttttatatttttatattttttaattttttgtttattgtaaaataaaaataatataagtttaggccgaaaaaattatttaattatttttttatgcattggtttttattagctttttaaataggcttttttaaatgcatttttctttagttcatttattattgataaaaagtattaaccaaaaaaagaaaacatggtcactttcgataaatgaaaaatattgtttaagtaattttgttttcatttcttttttaggcatttcaatgggttgaatcattaaatcgctttgacgatgcaattgaactgactaattttggtattttgttgctttttacaccgccaattgtccaagcggctgaaatggtaaatcggccaaccacacaaaacgaattcttcaacacacatagtccccaatttattgttcaagaaggaaccgatgacaattattcgacggaattggcagatcaaatgacatggaaacaattaagtaattagccaattgattaattaatcatgcaattatatcaattaattagctaattggttaattaatcaagtatttttttcaacatttgtatatattaaaattgcatagcataaagaattaaaaattggtttatttaa

SEQ ID NO: 72898 - DNA, 2999 bp, Heterodera glycines
cataccccgaattgattgacggcttcaacacttttctccctcatggctacgaagtgcgagttcatggcagccacatattcattttcgaaccgaacggaagcagcagtatgatcaataattgttagttattgtgggagacggacctaacaaatcgggagaatgaccaattcagaaaaacggacagaaagcattatcttggggattggacaatatcttgccgaggcaaaatctagcctcagaaatttttaaaaatttttccaacaaattttttgagaatttttttttttagtttcaatgattttttgaatttttatgataaattactgtttttttttgaaattttcttataaaaagtgtctaattttaaaaatttgtttgaaaaaatttctaattttgaaacttttaaatttctgcggcgaaatttggggtgcacaccgttatctttcgttattcaccgacactaatttgtaaggaaattgatttaatgtttggaaattaggactatgttatgttctttcatttttttatttgtttttttagcttttgcaatcggtggcgatctgatcgaagatgggatggaacttgctgttgctgctgcttctccacaaattcctttgccttcctcgtcatctgttcctacaattcaaagtcattcagtctcgaaaccgaatacggccatcagcgagtcccccacaggaattggccaatctgtccgatatgtacacgtccatcaccaaatagaaaatgtatttaatttttactttttcgattcattgtttttttaatatagcctcttacgacaattccaatggaagttgaaaatgaaatggttcgcccttcaattgatggaggttctcaaaggataagtcaagagggcactcaaacccagcaaaaggttttatcttgcgaatcggagcataatattcaaaatcagcaatcgcaacaacaaactaccaaaacaggacaactcatccatttcagcgaggcattgggctacctaaaccgaataaaggtgagaaatgggggctttggctgatcgttcgatggaaatttcgcttttaggggagatttgcggacagaccggatgtttatcgtgaattccttaacattttgggaaactatcaacagtgtgagggcgatcaggtggttttttggtgaattttctttcgaattgccactttgttcagaaatggagtgaggcggaggtttaccaacgcgtttctcggctctttcacaacgaattggatttgatgcgcgacttcaaatcgtttttgcctgacgccaaattggactttattgagcaccaaagtgagcagcaaaagccaaagttggaagaagagggaaaaagggaagtgatggagcagaaacagaagcagcagaaagaacaacaacaaccaatgcaaacggcacaaaacgcaaagccaacggcggcgaagagtgcggacattgttcataaaaggcaattcggaaaggagcaggcgaatttgaatgcaaaagttggtaaaaaacattatggagagaaacagggacacattatttcaatcggataattattttttacagaaggctaaggcttctgttaacaagatcacttacgatgtgggagttgcggaaattttggaggaaattccgctgagagactttgtgattttcgagaaggtattttattgggcttttgctttttgcatcatggcactgcctttagatccatcgggcattgcaaagcgaaacgatttttgagaatttcatgcgtactttggtgatgtacaacaaaagtttggtttcgcgttcggaactcgtcgatttgatcacaccttttttggcgtaataccaattgtttatattcaattagcctaaaaatgccattcaagagaacatccagaactgctcaagcagttcaaagacattttgggaggacaaacggcgattggggcgcattcgcggaagcagcgaccattggaggaacgtctcccacaggaccttgccgaacacattggtctaacaattaccattttcatccctattattgccataaattgtggcaaaatcctaataaataagtgtctttgtttcagactacaacacttgcaaacagcacggcgtcagctaccgttgcctacccgaggacggcattcgttctgtttgttcgggacgcagtgctctctgcaaccaagtgctcaacgattcgtacgtctcatttcccaaatggtaagccctatcattttacggaaatgatcatgttattttggctcaagtttcatacatgaaaagagtgggtcgacagaaattttagcgacggattttgtccaaaaatgaccaaaatcactaatggaaaaaacaaaacaaaaatgttatttatgacattaaaaattctcgtaggattggcaaccttcatatttgcgtttaaatgcgatcatttgttaaggtcctcggaagattctgctccgatctcttcgaaaaagtaattgctgtgagatatggaatcatctgctgttccctttatttcacacttttcaagagtcaaatccattacaaatgatttgcatggctggcctatcaaatgaaatccctttaccatttcccacattttgttcaggtctccctatgaggatttaatgtatcggacggaggacgaacgctttgaggtgttctgacaattaaccttctgaaattcaaaattctccaggttgacattttcatcgaagtcaattcggccgccatcacagcgttggaatgcgcgcgtcgcaaaatcgagtcgatgggacacgaagacgcgaagaagttcatgagcgaggaggacttgggctgttcccccacctttttgacgagggcggtgaagaaactctacgggttcggccatttccagcctcaaattcgtcgtcggccatgcttttcagtgaacacggaggcaaaattttgttcgccctgaaggagaatccgctggtggccgtgccgatggtgctgaggcgtctccgggagaaggacgtggagtgtcgcgg

SEQ ID NO: 72899 - DNA, 2391 bp, Heterodera glycines
atgaatatttgctcaaggaattgggcctttggtgaaccgtacgacgaagcaaatgggcgagaacgttgcgcaatgttgaacatcaaattggatgccaacattgatgatattgactgtgacatgagtgccggccccgaactcagttaccgattcgtgtgcgaacgaactcatgaaaagcatattgaggtaattagttctaaaaaattttagacttttataaataattatttttaattaattaattgtctaatttgttcaaagttggaagaaatgtccgaaaattagtttggaataagcttgggagctaaattctataattaaaaaaacaaaattttgtcaaaaaaaacaaccattttttttttggtaattaattcttattttatatagatgaaatttttgatttgtcaatggtaagaacaaaaaaatttggaaagattgaaatgatcacaatttatgcataaaatcatgtttaaatttttattaatgaaaataattataatttaaataattaaagcgctttcttctatgcttttatgttaatttatatattatagtttcaaatcaaattttaatgtttttaattcagaaaattagtagaaatgattcagaatttctgtcaaaaatatataaaattcatgaaaaatatttttatttttagaaaaaacaattttctttaaaatctcggcttttttattgtttaaaataaatattttaattcaaatttttaaaatttttaactcagcatgaatccctgaacaacccattatggaaaaagttggaagacattctcaactttttcggcattcgtggagcacaacaggacgacacaaatcgtacaagcggacttgaggaggaaggctattgggacagagtgttgggcaaaagcgatgctttcaagaagcgaaatagtgctgaactgcaggagaggtctgagaagcagataaatgccaaagcatcagagcctgaaaatcaacaacaaaatgccaatgcgcaacaaagtgccaaatcatctgagcctgaacaacaaagtgccaaagcttcagagcttgctcaacaaagtgccaaggcttcagagcctgttcaacaaaatgccaaagcatcagaagctgcaatccagcaacaaaaggccaatgcgcaacaaaatgccaaagcatcagaagatgtacaacaaaatgccaaagcatcagagcctgcaatccaacaacaaaatgccaaagcatcagaagatgtacaacaaaatgccaaagcatccgaagctgcagaacaaaatgccaaagcatcagagcctgcaatccagcaacaaaatgccaaagcatcagaagatgtacaacaaaatgccaaagcatccgaagctgcagaacaaaatgccaaagcatcagagcctgcaatccagcaacaaaatgccaaagcatccgaagctgcagaacaaaatgccaaagcttcagagcctgttcaacaaaatgccaaagcatcagagcctgcaatccagcaacaaaatgccaatgcacaacaaaatgccaaaatggagaacataacttcaaaagatgcgccaaatgccaaaagtgataccagcattaacaaacagtctatgaatggctctgatacaaatgagaaaaatgccatggaaacaaattttgttgtgccaagctctattgagtcacgggttattgagcctgttcgagaaaaggtcggtcaaaaatttttgaatatttacagaaatttttatttatttttttagcacccggtggaccatgctaaaagcttaatgctagataatacaccaaattcactgattgctgcttcaacagacactgttggcacatcagtggaaggcgttcaaagaatggacggtaaaatttttaataatttaattttaattttcttaattatctttcatttattaaattagttattaaaacgtttaaaaattggaaatcagcgaaaaattttaagtttggacattttgtaattatttaaaaataaaataaaatttttgattaaaaatatttgtccaaaattatttgtgataattgttaaaaatagtattttgtaaagtgaaaatttttttaaatacatttagaaaattagtgggtgttaaacatttatttaaaaaaattaatttcagatttggacggtcaaaatggaaccaacaaatttagagcatttcgaacacagtttaatgaaaaccgcttaacaggtaataaaaaagtattgagaaattatacaaaaaaaaaaataatatttacagaaaaaacgaaaaacgatggcaaaaaggaagtgaaaaaagaggtaaaagaaaaagcagaggagaaagaagaagaaaagagtaaaaatgaggagagaaaagaggaacaaaagccagcagaagaaaagagagaggaaggaaaagaa

SEQ ID NO: 72900 - DNA, 3512 bp, Heterodera glycines
atttcagttgtctcctgctgctgggaaaatgaaaatgcgaagaatgacagcttcaataaacacaattgatcataagtcaaaagacaaggacaaaagcaagaagatccgtaacaatggacgcgttcatgttgaccagcaggacaatggagaagtagaataagtgttaattaacaattgatggtgatcatttttaagggaggagcttgttgttgatcgatttgggcggaatgacgaggagagtgaaaaccaatgcagaaaatgggagaacggcagaactttcggattttctttgggtggataaattttatctttttctttccgtagattagctttttttccttcgctttttacctatcgataaatttattttgaaatcatttcgttgttttaattatttaccaattttttctgaaaataattttctcggataaatccttaaaaattgttgggacgacattttaaatgttattcttttggcattttatttatatccacttcagtccctcacacaattgtttatccccattgacccagtaaattctttctgtcttttgcactcatcttctcctccgctttttgtcctcctcttaaaatgttgttgttccccaaatattgatttgaccctttgctgtttctttaatttgtttcaccaatttccactgacaataaattgttcaacggcacaacagtggcgacgcccgtcctagttcgaacaaattcaacaaatttgtgcaaattcgaacaaagtcagcggtgaaataaattcgggcgaaatgtcgaacaaaaaaaattgtgtcgaaatcattcttcatcgccgccattatttcgtacaccaattgtgtcgaaataaattgaaggttaagtgtcaacaaaagccaacactgttagccaagtgctacagattaacttgtcagcaacaagtttggctcatcgatttaagcccaactgatagcaggtgctacagacgactttgtcagtaacaagtcgggcaattatcatttctgtggacaattcaagacaaaatggacaacaaaaatttggaaagcattttgactcaattgacaaacatcgtcaagcagcaacaaaacacggcaaaccaaccagtgcagagcaacatcacactgccggacattctgccattcttaaatgcggcgaatacaagcgctcatgcttgccggatggaattacggcattcaatttcaatgagacgaaaacccgtcttatgaaattgtttgctcgtccgccgtcattggctatcgatcggtatgagtgcctaaaggcaacacgtaaggaaggcgaggaattcagcgtttttgtcaaccgactcaaatcgcttttccgaaaatttcggtactcggaactaaacgaggaccaattcaagtgcttagtgcttttgacttcattgaagtcatcgagtgaagcaaagctacgacagcacatcctcagccgactcactaccgaagaaacaaaggcaactccaacgccgaaatttttcaaaacatttcagaggaaatcatgacaatgctgaaaacggaggcagaagtcaaaattctcgaacaggcaaagcccaaaataaatgctttcagccaaaataaaccgattcgcaaaaaggaaaattcgggtaagccaagccaaaatatcggaaacaaaggcaaaacccctcctaataattgctttcggtgtggtgaaatgaattgggcacaaaactgtcctaaattaaattatgtttgcaaaaagtgcaaccaaaagagacacatcgagaagtaatgcgaccgaatccaggcctacaataaaaccgaaaggccaagaatccgaagttgaacacgatagtaatttctgtcgctcgcatcaacaaaaatggtacttcaaaaataattcggatttccataatcatgaacggcaaaacgatcaaattcattgccgacagtgggtcagacatcaatattattgatgaaatcgcatacaaatgcatcggatccccgccgctggaagaaagcgacgaagagggcattcttttcgatggacgccgctgccaattcatcggcaaaggatgtgctaccttcaaattcaaaggatcaaagtcaaacaaccattttatgttgccaaagcgggagcacttaatttgcatggcgcagcaacaatggataagtttgggttccttgaaggaatcaaaaatgcaatccgcgtaaatcccaattccatcaatcagatcacttccaaaaataatgagacaaaaattcggtaagcaatcaaagaattgcaatcaaaatttgagcaagtcttcttagaaggccttggtctttgcaccaaaatgaaagcctctctgatgcttaagtcggacactaaacctgtgttccgacgagcccgtccagtgccatactcatctcttccaatcgtaaacaacgaattggaccgattggagaaaatcaatgtcatcagaccagtggaacacaccgagtgggccgccccaattttggtggtgaaaaaggccaatggatcaacgaggttgtgtgccgatttttcaaatggtctaaacgactgtctccagctgaacaagcatccattgccacttccgtccgacatttttccaactttaaatggcggaaaattcttttcaacaatcaataatggataatatgctttctgattatccatttgcaatcgcatatttggatgatatcatcacagtcagcaaatccatggaagaacactgcgaacatctcgacaaattattcgcccgtcttcaagaatggggtttgaaagttcacatagaaaaatgctcatttttccaaaaggaaatcaaatatttgggagtcacgatcaaccaaaatggcagaaatcccgattacaacaaaatcgctgcaattgctgaaatgccggctccttcaaatttaaataaactgcgttcataccttgggatggtaaattattaccaggaatttgtcaaaaatttccgtttcattcgccaacccttggatgatctgctcaagaaggacaaaatttgggattgcacatcggcttgtcaaaaagcatttgacaaaatcatcaacatgcttcaatttgttgcagctgatgcttcacaatcaggaatcggtggagttctttcacatgaacccccgatggcaccatcaaagccgtgagccattctttgttgtgattcctatattatttgtatgtattgtatgtggagtaaaagcccattaattatataaacaatatttctaacaacttcatcttcatgcgcacctttttaaataattcgacggttaggcatccaaattagtaagctcaccggtacttatcccgtttacagaccataaaaaaatagtttttatcaatcatacatataaaacatttctaggtggttctcgggatcactgatcacgaatctgacatcgatttcgaccgatttcgaatcccggacctgaattcaaacaaaagtcgaaaattcatttttcacctaaattcactttatgttagaatctgaacagaattcaggtccggggttcgga

SEQ ID NO: 72901 - DNA, 378 bp, Heterodera glycines
atgtcggacggaagtggcaatggatgcttgttcagctggagacagtcgtttagaccatttgaaaaatcggcacacaacctcgttgatccattggcctttttcaccaccaaaattggggcggcccactcggtgtgttccactggtctgatgacattgattttctccaatcggtccaattcgttgtttacgattggaagagatgagtatggcactggacgggctcgtcggaacacaggtttagtgtccgacttaagcatcagagaggctttcattttggtgcaaagaccaaggccttctaagaagacttgctcaaattttgattgcaattctttgattgcttaccgaatttttgtctcattatttttggaagtgatctga

SEQ ID NO: 72902 - DNA, 1471 bp, Heterodera glycines
atgtccgtctttctgttcgtcctcatccaagcgcatcggcagcagctgatccgcgaagtgttggagctgatccccatctttgtgcgctttgtgaacatcgccgtgccgcggcacatccgcgggcacaagctgtacaacaaagagttggtggaggagttccactgggcacaagtgcgagcgctttccttcattgcctacatttcacgacaagctcaagtccattttttatttcatcatttttgtggtctttctatattttttcaattaaaaggtttttgttataatatgcaaattgttatttttatgggcctttttaaaaaggcatctaatttaaaaaatggctccaaatcttggtcattttttggacaaaattgttaaatttttcccgctgacacctatcggcaccccccccccccccctccggttccccaaagtttttttttggaaaaatcgcgctgcaaaactaacgataaacatcccccttttttaaatgtatgaaagttattttaatacaattatcacatacgcagtgatcagactaaaactctcccccccctgtagatggccccggtgatcagtgagaatgacaaggtgttgtcggatgtcattgtcagccttttcgacagtttccatgacgaagtgatcacccaacgccgtgaccttttggtggccatcaaatactttttttaatgcgaagcacgcgctctgttcattggcatcattcccaaaatgtgcgacgattgttcactgctgggccgctcgttcacttcacaggaccatctgaggtgggcaaaaatgtgccgaaataaatagccccgttaaaaacatacaattttccaggaaccaggcctattcatttttggccgacattttacaccatgttcggatgagcttggactacaaacttctcaagcagtatttgctttatcttcagttcttaaattttatttttccgggaatttaactaacgctttttgatttactatgtaattcaatttcttaccatttttaaaaaaattcagcatttttttcattgcgtcccgcaatttgcacgacgcccaactgctgccttatgtgcaaacgatgtacggcaaactgatgatgaacttgatcgaagccgttttggtgcagcccaaagagcacagcaaaatggttggtttttatagggaattgaaaaaattggatttttaaaaaactgattatttgttttggaatacccttcaaaatttacacttttttactgaaaatctgtttgcccaaagtaccaggaagtgctttgcgcatcggtcgattcgctggtgcgaaaggccaaatttgttgccgagtaccatttgccattgattgtggagaagcagcgcgcccaacaaacagaagccaaacaaccacagcaagtgccatcatcatcatcatcgacggcagcagcaacggctgaggaaaacaaaagcacgggacgaagtgatgaggcttcaaa

SEQ ID NO: 72903 - DNA, 817 bp, Heterodera glycines
atgctggagaacagggatttgagcttctacatttctgatgatgatgatgcgcaagcaatttgtctgatgtcacggagaattgctgacaaatacaacccgggccttaagtacaccattttcacaaaacgagttcctgccccgtttgagacgatcagtttctcaaatcgacagattatcgaggtttgtcctttatggacagacgttttcacgtattgttcttttgtttagcaagtcgtaaagggtcgcttcaagcagcagaccaactctctcgacttgagcagctttcagaacgacccgctcttcgaacggagtcaactttcttatggactttttcacaaccacgtggtggtcgccgttgccaatttaatcgcgcaaaattttccctcaattcgtggcattcgtttaaatgtaattaaattgttactttgatgggatgtttttctttgtcttctttagaacaacagtctacgcactttggacttcctgagttgtctcgtctacgccgcaccaaatgttgttgaattggatttggcaaacaatgcggtgagtgagtgagtgtgtccgttgcgagatagtcgtaattatgtattccatttaccacagatttcacgcgttaatgaattggacaaattgaaaagttggtccttggaaagtgtccactttgaaaacaacgaatttgtcgcgagttatcagggcaatttcgtcgcatattcacagttcgtcttcctgtgacattcatttaattgttaaacaatttttagagcaattcatcagtttttccctcgtgtcacatatttggtactttacaaataaataa

SEQ ID NO: 72904 - DNA, 390 bp, Heterodera glycines
agtcggtaggggtcaactccgtctggccaactccgtctcagcaaggttcaaaaagctataacttttttctttgttggccaaacttcacaatcatggtatcgttcgaaagccctagatgttagaagatatttataagctatttctcagtgattaatcagctctcaaaaaagttgtcagtttaaaaccgcaaaaaaggcagaattttcaaagttttttatttctatctttttttatagttcgaaattttctgtaatttttagtaggctaatagagcctgtgaagagctttcgattgatatcaagattgtttgattcggtcaataacttcaagagttatattgactcaaagttggctcagacggagttagccagacggagttggcccgttccg

SEQ ID NO: 72905 - DNA, 838 bp, Heterodera glycines
atgaaccgacggtaagcacaaattcgtcatttatttacctaacaaaacttttttcagttggatttgcaacgatgtttggatggacattttcccatcctttgaccgtgctcaactcggcctcaaattggcacttctttcgccacgtttcgatgcgttggtggacaaacatttcgatggcaaaagcgaattgactatttggagaccaatcgaaattcgtcgcaaggacaaaggaccagaaccgaagctgtctgtacgaatcgattacgaatttgtgccatttccattgccggaccgtccgttgcccagcaaaattcgctttaagaaccttcggattgagtaattaaaaatcagagagctatgacaataaaagcattccttccattttcacagttacatcgatcacttcgtcatcgcttttcttcgtttaaatcaccaaatttttgagaaaagaggcaccgatttatatttgtggatttcatcatcacactctacgaatggccagccgatttgggatgtttttgttcgtgaaatttggcccattttttcgacaaacattcgctgtttgggctttaccggtggtgatcatttggaccatttgcgtcgtcgcacttcgccaacaattctcaccgatctcaaccaattgaattcaatctgttcctgtgatttgtcgcccgctgcgtttggtgatgattttgatgggccaaattcaataatttctgctggccaagcattgtccaaatggttgcactctccgagaaaagatggacaacccaagcgattgcgttgcgaagactttaaaggacaaacggacttcgattgggccaacaatttcaaggag

SEQ ID NO: 72906 - DNA, 104 bp, Heterodera glycines
atgtctggtgacaattcggcacttattgcagcggagcaagcggcgtatggcccattttttggctcacttggcgtcactgcggcgatgattttcaccgcggccgg

SEQ ID NO: 72907 - DNA, 1150 bp, Heterodera glycines
atggggttatacccaaaaaccgggctggctggcgtggcctcagtcggtcggtgctcagtcgtcccaattcgtttcgaaactgttgggtaaatttatttgaattttctttttgctctgttcaggtgctcggtctctacggaatgattgtctcactgctgctaagttcctcctgaacaatggaaggaagaaagaaggaaagaatggcacgtctgctgaacattgtgccgaccgtcgtgttttgatgatcaaaatgaccagccaccgtatataatagataaataccgtattttccatccattcttttttactgtgcccccttttctcattttttactattacattttaaaacgtccaaaaatttggaaaatgagtgcggtgagcgggacaccattaaggcttgggctactgtacatattttgctgaaaatctatatgtaaataccgcattaaaataccgtatttgctctaattatcccccaatctccattaatcccccaatctccaattatcccccagtctaggaggggtttgaaaaataatcccccagtctccatttatcccccagggggataaatagaatttggtcgtaacatttttaggggatgcataataacggaaaagtacctccaatttgtgaaaattttggcctaggaattccgttttttgttaatttgaataaattaggtataatatttcttctgtagcaattggtgaaaattagcagcaattcgccgtgttcatgtgtgacatcatcgtttggaagcaataaaattttttggaaaattcgattcggaatttaattttatttccattttcaattttttttgtaatttgtccataattttatcagttggatttgcaacgacgtttggatggacattttcccatcccttgaccatgctcaactcggcctcaaattggcacttctttcgccacgtttcaatgcgttggtggacaaacattttgatggcaaaagcgaattgacaatttggagaactatcgaaattagcaaggacaaaggaccagaaccgaaactatctgtgcggatggatgacaaatttgtgccatttccattgcccgaccgtccgttgcccagcaaaatcctttttaagcgccttcggattgagtaattaaaaatcagagttatggca

SEQ ID NO: 72908 - DNA, 449 bp, Heterodera glycines
gttcatggacaattacaccgggagaccgtggttcaggtgctttgacagtgcctcggtttgcaccggaagaatggagtgtgcacaaaagaacgttggatggaggagacagaaccaacaattacgcagaagccttccatcgaaaacttcaacgggcatttgattgtacccatcctactgtcttccacttcatcaacacaattcgatgtgagcaaaagtcaattgatgcagacatctcacgatgcatcgctggtgaagtccctcctctaaagaagcccaaatattgtgccgccgatgaaagaattcttcgacttttgcagggctacaatgccatcaacaataacccggctatccaaaatgatcacaattaccatgccaatgtcaatgttaatcccgataacatcaatcatttgctcgttggtgtttctcgcaattatgaaatgcgcccgtaa

SEQ ID NO: 72909 - DNA, 269 bp, Heterodera glycines
agtcaattttactttttgttttttggttgcaattgggttagccatttctgaaaaatgtccaaatcagaatgtacatcaaattggttaactattaaaaaataataggatttggaataagtaaaattgtaaaaaatgagcgaatgtaattaaacctaacttatgccaagtggcgagggatccctcaggcttagtttttagaatcttaatttttaaaaaagcacatttttctatttttgggttggggcccaaacgaccccggggcccaaaaa

SEQ ID NO: 72910 - DNA, 1011 bp, Heterodera glycines
atgctgaacgaagcgaggaaaaattctgatgaagaaagaatgagaagtaaaatttggtacgattcccagccgaaagtgacggctaacaaatttgaagcggggcaacgcgtaatggttgcctttcccggactgaatcgccgatctcggcacaagaaattgttgtggtctcatttcgggccttatcttatcctagaaattaacgaatcgtcggcatttttagtcccaattgacaacagaaatgctgagcccataaaagttccgattgagcgtctaattcgaattcctccaggaatcccggacatttcaacacttccaaaggggaaaaacccatttaaaaatgcgttaaaatcattaattgtcagcattttatcgagttttgaagtctgtgaatcagatggacaaatggcccattatgagcaattaggggcaattgctaatttaaagggtggcgaaggaatgattagaaaaatggaaaaggcggcgcaatcaagagaaattcccttttcagagatggaaattgacaacgaagatgaagcagaggacacgttcggttggaatgccaagtgtgacgtcggtcaaggcgaacatgaattttgtgccattctccgtgtcgcagaactcgatccagcgcttggaaatgctgaattgggctcaatcacagtgaagacaccactgcaggcacttttggcggtgttccttttgaaggccgggactgtcaaatcaatgacagccgcaagaagttttgtcaaatcgataattgaaggagcgccaaaagaggagctcagtctgttcgtgaccaaaaagggagactatgtggcgacaggacaatgcccaactgaagaagaccaaatgaaggcgctggagtgttggttcgaaaagtgctccgtggcaaagcatgctttggaagagagcggattcaaaaaaatcggcatggacgaacccgtcggactcaatcatttggccgattctgagaagaagaaatgggaagaagcgatgggagagacaccgtga

SEQ ID NO: 72911 - DNA, 978 bp, Heterodera glycines
atggacgaacccgtcggactcaatcatttggccgattctgagaagaagaaatgggaagaagcgatgggagagacaccgtgggtgctggagaaattgagggccaaaatcattcacaaggccacaaaactgatcgccttgccacgtgtcataatcggagattcgacagcccaccaattggccgaaatcttggatcaaacggcggtgatcgggccaaaaaatggaacattggcggagacagtgcgaagcctgaagcccgtggtgctctccagcaaagtgaaggccgcactgatcattgtcggacgagattcactcttgggcggagaaaccattgaagtgatgatggagcaatacgagatgattgccaatttgtgccgccgattcccgcaagtgaagttcttttggacatgcccaccgtacgtgcacgacaaacacgacgagtacgaagaactgatcgaaagcttggtgccgatgatgagccaaaaaccttttcttcctgtttgggtgacagaaaaagggcgatcgcttcacgaagtgttccgattcgccaattcattcgacaaccaaagagtgacaacggatggactgatgcaagaggccggtttgcgagcgctgaaggcatggctgttcacccaatccgacttcccgggcgatcagaagctgaaaattcggtcaattcgatcgaccgttcgtgccgttgctacgataggtctgggggaccatcgccaagcaagcacttcgtctttggccgtaaatgactcgataggtctgggggaccgtcgacgtcacacaattggatcagttggacatcgcgatcgtgatcagcgacgtcagagcttgggctcgattggtctgggggaccatcggcgccacacattcggagaagtgcccagccgtgaacgccatcatccatacagccgttggaacaaccgcgccgtgatgccgtaccgtggtcgtggcccgtcgcactctcgtcgttag

SEQ ID NO: 72912 - DNA, 1530 bp, Heterodera glycines
  unsure (1)..(1530): unsure at all n locations
ggagccgtgccgcccttggattattacctcggccaaacctcgttgaacagcactcagcgggaactgttcgtctcctgggggctttaccaagtgttggtccgatttccaagtttttcctcaatttactttagtgccaattgtccctttaccacagaattgtctcaaattcctgcataacgaggcaaaaatttcgcacaacaacctaagaaatgccatttttatcactgagtcgggcgattggaagttggcttccttccacctcagcggcactttcaggtccaacaaaaacaaatcattgcccacccccataaatctgtttcatttccttcagttcaccgcaatgcgacctcactgatttggcggatactctcaacagaatttttcgaccaaattcttccgcagattcgacgcaacttccgaagagagtccaaccgttgtttcgccgtttcaatgctcgcggaaggtccgtcatggcagtcgcggacattctaaacggtgattcactaacaataaaatgttctcaattatgatttccatctttcgtccctcccctttttattggtgtcttttttcagagtgtcggtccgtcggcggttttatgaagaacaaattcgttgatactcttttattcctcgacgaatttcaacttcgggacgctgcagaaaggcagtcctttttcatgcagttgaattcgaatttagaccttttccccgacgatatttcttgcaacaaaattttgccaaagctaattcatgtccgtttttggctcatttttgttttattaacaaatcacttaccaattagacgtacgaattcggagacgcgggtgcccacattttggtgccaatgttcaaattgggcagacttcttgacgagaatgaggtgacaatgactcttttcaactgggttttaaccttttggtttagtaccagcagagaatcgtcccatgccttgtcaaattgttcagttcgacggatcgaacgacacggtgatgcaccatttgcatgggtttttaaatatttttcttattaaagggtcaaactgttggagagaatcgatgaattttccagccatttaaggccacaagtggttaatgaaaaaatctacgggtattgcacaaaattaaaaaaatagttttatttgaatttttaaaggaatttaattacgggtttcatggattccaattctgccgttcgggaaagcactgtgaaggcaatcgtttcgtttgccgacaaattaaaccacagcaatttgaacactgatctgatgaagcatttggcacgactccaaggcaaacgaaatgggaggggggggggggaagccaaatcttnttaattagactttgccaagggtttcaggttccgatcccgagcccagcattcggacaaacacaaccattgtacattttcagtagtaataattcatccccaactacgcctttcttttttagtgtctcggcaaaatcggctgtttcatttgaccgtccnatcgnncacgcattntaatctctgctttcactcgcgccctcaa

SEQ ID NO: 72913 - DNA, 2317 bp, Heterodera glycines
atgactcagactggcgaccacggcggggacagtcccgccgaaataactacggcacttttggtctatgcaaaggggctgaatattttgacaaatttgtccgacattttgaccgttcaccaggtcatttccctttttcagttggtcatctctttttgaccccttttcaggtcgacatcgtcccgacattgtcccttttgttgggtgtgcccattcccttttcgagcattggacttgcaattgactcgcttttgccgcagaattcgctgcatgaacttcgcctgaactcttttcagctgattcgttatgctcagcaatactttcaccactacccgccaatgcaagtcagttaatgaataaatgcatcgattaccccccccctccttttttcgtttgattttacttttttaattctttaaattctccaggttaagcttcgttacatcattcgccaatacgaaactgctgcggatgatttccattccaatttgttcgtcataaaatccattcaaaagttgctccgtctctccctcgaccaattccatttctccgtttgcgtcgttggccttatttcgctgctcgagtcggtccttttcaatggttttttgttgttggacaatgccgacgaatggatttcgatccgtctttgggtcttccgttctgctctcttgtttttgcaggtggatttttgtttaaattaaaaaaactatgctcgatggatcatctcgttattccgttgcttttgagttacgttcaaatttatggctgtgtttattaagttggatatgatttatgggtcgactaaatattttaattcttgtttttttatttttttcatttaccgtcgctttgttttaaaatctgccaaaaataattcccgctttcagctcagtttggtttttgctgctgaaccgagtgttgacactgtctttttctctgtgacgagcctcgccgtgtctctgtgttcccagacggtggtcctttcctacaaaatatttgctgccgtcactaacaaatattcgccgtttccgtcctctccgtgcctaacccttttcgccaatttcgtcctttctctgctccctttgtctaacagtttcgtcatttacgaatccgacgtccttcgcttttcactccaaagtgtcatctgtgttcttttgctgtacagtttgaacaccaaaaggtcaatgaaacattttgttgctttttgtttcatgttttttttattttaggtcatttaatcttcgaaatgtcagtgctgaggtgagacttgctttgctgcttctattcattacgcgctttttaaaagcatttgagaattgccgtgaagaacaggttctctgtctttgccgttgtttctgtttggttattctacggtgtttccctaaggtcggatgtgttcctgtcaaattcgctagtcattcggcctttcttctgtccgttctgttcgtcatgggcgtcctttgggctctttttgagcgtttttctccccgcgcgcactctctgaccaaagcctttgtctggtcgatggccgtctttctcattttgcattgggccttcgagctcagcgcactcagttttgttgagtcaggtaatgtttatccgggtaatattttggtcctaattgcagcctaacgacctgctggttcactaatgctcttagacataatggtcggctcgctatgtctttgtccattaactttttcggctatccaaagcaaatatctattcgaaattatttattttttttgcatttaaggactcattgaaagtgcttcaactgattttgtcgtttcgctcgggaacattcggctcatcgaatcggtctctcttcgcttggctcaattcgtttacttcgctttcttcgtccacctcctcgccttccgttggctgtccgtttcggcctccgcttgggtttggccccatttccatgcgttggctgttccgctggtgatgttgtccggctattcgtacggacaaataatttcggtgattgtcttcgctttcgctgtctccgaccctttgacttcgtcaggtgggaggacaatgaccgtttgtttcaacttttcccctttcccagagagtgtttggaccggtgcctttctcctccatctcatcgcattgctttccttttatgccaccggccatcaccaaacgctcaattcgattccgtggcacgccgcctttgtcggtcttccgggcaatttccccttcaaatggttgtccgcacttctcatcttctttaacatgttctccgggaaaatgttggcttctttgttggcattcacaagggaaagagaggacacaatcaaagggccgctct

SEQ ID NO: 72914 - DNA, 2205 bp, Heterodera glycines
  unsure (1)..(2205): unsure at all n locations
caagcaaatggactggttgttcgcaaacggcccgaatatttgctcatgtacaaccccaaatacggactaagcatactgttgcccaagtacgccaatgtgcagaggtccgaacgttaatctttttatttcatattgatatacatatatattttgtagcgcgtgcgaattcgatgaaaaattttcacttggcgaattctattcatgcgcatttattcgtgtggccgagcgagaggcgcgtcgtttgacctacgaatggatgtgtaagggtgactttaaattgcatgaaccaatgctgaaaacgcggctgatcatggaccgatttgtgcatgtaagaaattatacttccctttaaaaaacttttttttttgggttcaaattgatattttcccggtacctaatcgtgtcaattgctataacttcctttttcaggttcatgtcaattgcgaatttaccaaggaaaaaataacgaagcttcatggcgatcattatgttcttaagacaggtatttttgcaatttttattttttgctaatttaaaccctttttgagacttgggaaatgttcgattcggcaaggaatttctaactcacaatggttggtcgaataaaaatatctaactcattttcgtcccattgctttttaatttagacttgtacgacaaatcagcgaatgtttgggtgacttttgtcaaagaaactgaaggctgtcactgggaaattgtgcaggactcgtggggctcactgctggtgcggttttgaaatttataaactgacaaggacaaaaagtggacgaaacttttttttgcaaaatttggtttttattgattaatatttcccatgccaccaggttatatatttatactaaacggtgctttaatattctcatttttcatattatccacattttaggtgttgttttgtgtaaaaatttaaaaaaataataaagaatgcttgtttaaaaaagccgtttcaatagtcaaagtagtttttcattttacaaaacctatttcgaaatccctctctttttatgactcatttccgatttttaggttgtcttggtgcttccgatgacatttgaagcggcttttaaagaatgggagtctatgcttttcctacccatttttactcatttctttttcaacttacttttttaaaactatgttattttattgttttactgctcaatattntgttaagttctctcacctatctctctgctgctgatttctgctttttcncagtaatctatgagataaattcatttttattgccgataaatgcaccaagcaccataaattatattgataaagcattttttgccaccatgtttatacgtatataggcaattcttttgcaaaatgaagatgtcactaatgttttggtacttaaaatgtcaagttggtcggttttgaaattttggatgaaaaaagccccagggattttggttctaggtcgggaaatccctcatagaaatggtggaggggcattagttatgcaggtctcggttaattctaatgtaaattaatcacatcttcccgttattgcgcaggatgacgagccgccgccacaaatgttgaccacaagtcagccggaacaatctgttgttgctcaacaacaaaacctgcaaaatcagttggtggaacagttgcgcagcaaattgtactgtcaagtgggttttttaaatgcatttggttttgtaatccaaatcccgaatgcaaattttataatagaattgtatgtaggccggctatgttgactttttgttcggttccgaggtgtgcgacggattggggggtgaacgaaccgcagcgcaacgttatggcatggcaaatgactcggacggagacggggagtcggactctgacgattttcggcaagtagacaattgggatgacagcgcctcgacaacggacgatggcattgacgccgatttgaacaagttggtgctaacaataggcattcattttggcatcatctgttatgaaattggagggattcggaacttctgcaaaaatgctttgttttgttttttgatttcattgaactttacaagttaatcaaaaataaccgttttttaaagaattgggccatgtgtggggaaaagagaaccaatttttcagcgattccgaatatgattccgacgcagaggagaaaagaatgcgcatcattggcggtgcttcgccgccacgtccgcggcattttcaggg

SEQ ID NO: 72915 - DNA, 1558 bp, Heterodera glycines
atgtccattttcaccgacgaatacaagtgccgttggatggcatttgcgatggagaagcaaaacgatgtttaccaaaaggtttgtatttgattcacatgttttgcagcaaaaaatgtataattttttgctgcttcaaaaaaaatttttgttgagaggtgacattttgtcggttccgacaggcgtgttgcctgacaaagagtaatttactggatcaattaatagtttttcccaaaatctgtctatttaaacctatttttaatgtttcattatttttttatattcatgtgtttaagttggacgaacttcccgcagtgatcgatgccaaagttcagccgtttttcaatcgaatcggcggcagaagaatgcagcaagcagacgaacagatgcatttggtgaatgttggtgcacgttttcaggttgtacggaacggacaattttaagacaaatactggcaataatttatacaaacaccgaaactcattgttttataatttagccaccgctggactggaagggcccaagagaatgtggaaacactgtaaatttttttacattttcatcaccaactcatcgtcattcaacattattttaggtggtcaatgtgctcggagtgaccattggcaacgagcaggacgagaaagtgtcagtcatcgccacttcgtatggcattgcgcgacagccgaagcgcttggagctgggcacttgggtggaggcgaccattcaggtggagagtgacgagcaagcggtgcgcacgcttgcctacgacagcttcatgcacgagcacacgtaccgtgtgctgtactcaaagaagatttcaccgcccatgtcaacacgggtggtcaacaaaagtggggccgaaaaattgctggtgagatggacttcggtcaactgggtcatgtctgtcgaggggattcgcatatttgttttgccgtatttgtgcccagtttcttgagagttaaaaatattgggaacataacaaaacgtcgttgcccgtaacgtcgtcggatgaaaggtcgccggaacataatattgccgcaatgggggtgtatccgaaaatcttttgggattcattggcgatcgtcctccaatttgtttaccaatttaatgcataattatgatatctattccgtcaatttttttaaaatttttttgacagttcattacccctccccctcctttttttagttatgtggtgatgtgaaatgcgtcgttaactgtttgcgaaacgattatttggggcgagtggaggacacaaaacaacatatcagaacaaaacctggtgaaagctatttggtcgaaattggcatcaatcgtcagccggagaatcgacgcaattgtttctggaatgtgctgaaatctcatggcaaatcggtgaaaagtgtgcataaagttccactccaggtcatcacatttttcgtttttggattttctcaattccatttattttacccatttaagttgtcaatttattccgtagaggatggtaagacttgtgacgatgcacaccggattttaattgaccaagtttttgatgcaagagacaacacatgggacacca

SEQ ID NO: 72916 - DNA, 414 bp, Heterodera glycines
atgtctcttttcggccgtttggctgagttcgctttgtcctccaattctgacgcaattaaacgcccaccattagcaaatgcttccgatctgctaaacagcccaactacgtcatcatcgtcagttgatggtcataagtgtcaaattatgaataataaaaagagcacaatcagttggccaatgccaaacggtgccgtcgtcgatcaaaatgtgccgtcagtgcccgccacagttatcagtccgtccaaaataagcaaaaggtacagacagctgaagagacaatgcgcaaacacgggcaaattgttcatcgacacggaattcccacccgacaacacgacactgttcataactgacgaaaatggagacggaagtgccgaaagagcggccgaattggaaattgagtggaaaaggcccggg

SEQ ID NO: 72917 - DNA, 101 bp, Heterodera glycines
aagtcagcgaagggaatgaatgggagaaaggtgttcgattttcggaattcctacatttatggagaatttctaagcatttccttagtttcatattttctctc

SEQ ID NO: 72918 - DNA, 932 bp, Heterodera glycines
atggaagacaaaagcgaagggacaccgtacagtaagacgatttggaattacggtaatctacaatccatgatccatgattggaccaccccggtggaaatagacactaaaaaatgccattacagtctcacttttgccgcacgcttttttaaaaaaaaacttgaagaaaaattttttaattgatttaatgggacaaatgccgttttcaaagggcatcttcgaaaaaaggatgttcaattaattttcgaaggatcaaagaaagtacagatacaaacctgtttttacacatttcttgtttttccttttaaaattgtgttcatatttttatcatttgttcatttgtctgtccctcattaatttttcgtgtccaatcgatgctcaaaggaaacgattctcggcccaaccgattgtcatccatccaattaattaataatgattcatccattcattcatgcattattcaaactcatcacttcacgtatgctccgaattgtctttttcattttttgtggaaagtttttaattgataatttttccaagcgataatttgttaatttgtcaaactttgtgtcgttggcatttccgtgatcgatttaaaatgcacaaaatatgcactaaattattttaaagaatctcatggttcttatttatatctaatggtcccttcttctgctttgaaattgaaatgtccggggatttcaatttgacacgaaaataaaaagcaaagataacaattgagggacacgacacagctgttcaaaatcaaatcaaaaacgatccaatttattttattcagaggcgaataattcaattaaatttaggagacgacaattaaagatggacagcaacacaaaaatatcataaaattagaaagaatgtcaacaggaaaaatatttgattgtaaatgaatattcgtctgatttcgcacaaatcga

SEQ ID NO: 72919 - DNA, 1415 bp, Heterodera glycines
atgcatcggatgtatcggagaagacggaacaggacaacaaaagttggagaaaaaactttgaaagagaagaaagttggtaagtgttacgttttgcaattattatttattgattgacctaattgcaattgttaattgatgtgagtcactaaattatttaaatgagcgtgtgtaaaaagttattgcttattgccgggccaaaaaaataataatatgaccgtaaaatgcattatgaacaggcccaggcccggatttatacatgccaaaaaatccacaaatatttgttaaaaaccacaaaaaggccaaaaataataagtttttatgatccaaaagtccaaaatatttttatgcactaaaaaatcgcgctgattgataagaaacccggataaaatgctctttttaagcttttctgcaatagaatattcgcaaaaaaaaaatggtgtaaaacatataaagccgggccctgatgattaagtatgctttagttttatgaatttggtaatcttcaagttttattatatttttaatgcttccaaaaagtgaattaagacacttcagaatctgctttttttatatgtacaatcatttgaagcaaactctgatcatgatcataattagggaacggatttttaagcgcgaaaaagtccaaaataagtgcttaaataagggcgaaaaaagcgcgaaataagtgcgaaaataagcatgaaaaaattccaaatgtagaggtgaaatttgttaaaattgctgttttctctatgtaaattagttaaaattaagtcaaacaattttatttactgattgcagttagaaatgaagtacatttagaaattttcaggatttaagggtcgattctcaggggcgtatttttccgaaattttttgggtggattcttaggagtgtattttttgaaaatttttaggtcaattctcaggggtgtatttttccgaaatttttttggccgattcttaggggtgtatttatcatttttattgcatttttgttaataagtttcccaaaaatcgcgaaataagaacgaaaataagcataaaacgctaaaataagtacaaaaacttattttaagggcgaacctctaaaataagcatttttaagcacgaaacgccaaaataagcatttctaagttcgaataagtgcgttaaaacacaaaattttcgaacaaaaaatgtgtttttcgtgcatttctcgtcgaattaaagccgcagaaaaaataagcaaaaattttgaagcatggcttgggtcatttgaggatgaacttacagcacatttaattttttgaaaaagcgcgtcgcgaaaaaaagtggtataaaagtaaaagaaaaagttgtcggagaatggaaaaacacaaaaaattcaaaagaaatctcacggcaaaacgaatcttttagaattttcaaaataaa

SEQ ID NO: 72920 - DNA, 1596 bp, Heterodera glycines
atggaaaaagtcaattatttgccctgtcccaaaaattcaaaatccggtaaacccagtcgactttcgtccgatttccctgctatgttctgtttccaaaatttggaagaaaatatagcaggaaaaataaaaaattttgttgaaaaaaataatttgttaccaaattgtcaacatggttttcgtaaagcacattctgttactactcaacttcttgaagtggtggatgatttcagttttgctttagaaaataaaaaatcaattgatgtaatttattttgatttggctaaagcattcgacacggttccacataaccggctaatatctaagctaaaaagcattggtataaataattccttattaaaatggattcaaaattacttagaaaatcgaaagtttttcgtcaaaagcgggtctgatttctctgatgaatatccctgtctcagtggtgtgccgcaaggctcaatattgggaccacttttatttcttatttacatttacgatttaccaaaattctgcgaaactgaaaatgttaaaattaaactatttgccgatgatcttaaggcctatcatgttctttcaaatatttccttttctccactccaaaattttattaacaaatttaatcaatactgtaaatttaacggccttaaaatcgcttcaaataaatgtttaactttacatttaggacacaaaaatcaaaaaataaattattttattgatgactttcaaattcctaaaaatcccggaaacgaaccagtcagagaccttggcatttattttactaatgatttgaaatgggcacaacatattgacattatctcgaaaaaagcattacgatctgctttcgctatactaaagtcaatcaaaactcgtgatacgaaaatacttgtaaatttgtttaatatttattgcagaccaattttagaatttggatctccaattttcaatccttatttaaaaaaggatattgaaaaactggagaatgttcaaaaaacttttttgagagtaatatttagacgtaacaattatactgttgatttacctaattatgctgaattgttaaacatttatgatcaaaagtcgcttgagagtcgtaggttaaaaatagacttaaaactttttcatgaaataattttaggtaaaataaatttacaaaataacgaatccttttctttttccaaaaaccctgtaaaaaatgaattcattataagaacagcttattgctcaaccaatgctagatacaactcgttctttattcgaacctctcgtctctttagacttttacctaaagagacgagattactaaatccaaatgagtttgccaaacttcttgaaagatctgatcttaatttgttgatttctttgccaccccaactccaaaagtgaccaattgattgttttgacattattatttctttatttttcggcgtcacgcttctgcgtacttttcgccgccataattaaaaaatcccgaaaaatttttgcaattatagttaaaaaaccgctaaattatggtacgattgctgaatttgttttgagtcttcgtataactgattatttttgaagctgatgtcggccatacttgtgcatcttagatta

SEQ ID NO: 72921 - DNA, 1491 bp, Heterodera glycines
gcgacttcgaacggcgaatgttacgcgccttttctggccaatcccttcgtgaacatgggcatgtatttggcctattactggaccacactcgtggccatgttaattctttacaaggcaaaactttttcatttattttggtccaagttgctttaagggcattcacaaagcggcaaaaaagttggagaagcgaagccgagcccgagagcatcggcacattgcacttctgttaacgcaacgattgggcacacaggtgatcagagaaaaacaaactgatgatcagaggaaaagagactgataaagggaaaggggcgactgataagggaaaagaaaaggggactgataaaactgatcagaggaaaaaagagaaacgggggaaaagagaggatgatcagactgacataacagaggtgaagggaccgacaaaagcattactgatcagcttttcagtgacaaaagttttggggaagaggcagtgacatgagaaggaaaaagcaatgagtgtgaaaatgaaaaacggaggcattccatgacgggaaaagtcagtgagtgagtgattttgcattggttgaggtcggagtcggtttgatgcttcacgcgaaacgataccaagaggaggcgaggcacgagcagagcaaacagcagaaactgacaatgcgatttgaagcgaaggacagcggatacataacagcgaatacggtgggagtgtcctctctctgtttctctcctccatctcactctctttctcccgctctttctctctctttcctttctttctctctctttctcccgctttctctctctctgtttctctcctccatctcactctctttctcccgctctttctctctctttcctttctttctctctctttctcccgctttctctctctctgtttctctcctccatctcactctctttctcccgctctctctctctctttcctttctttctctctctttctcccgctttctctctctctgtttctctcctccatctcactctctttctcccgctctttctctctctttcctttctttctctctctttctcccgctttctctctctctgtttctctcctccatctcactctctttctcccgctctctctctctctttcctttctttctctctctttctcccgctttctctctctctgtttctctcctccatctcactctctttctcccgctctttctctctctttctcccgctttctctctttctctgttattttttctccctcttttctttttaattgttcgtcgaccattttcagctttccaccaccgattccgctgaacggcggcgcagttccttctcaactttggccaaagccgttcaaagcactcagagattggcacgatttcgccgctatggcgcgacttttgcatttcgcagcaaatcagccgctttggaagaaaaaggcacgacggaaaagaaaatgaaacaataggaaaatggggcacagcaggtgacagaagagaacagaaa

SEQ ID NO: 72922 - DNA, 1313 bp, Heterodera glycines
atgttgctgctcagttttgggttgatcgttctgctgtttgcgtgtgccaattgttccacggaaggtggcacaaccgaacatccgtcgagttcaccgccgccggcgactgatcggaatggagacaaaccatcgccagtacatccggtactgaaaaagtttactaatgcgcgtgatgcagttaagaagcacgtggaggctgctcagtaattttatttaaaatttattttttaagtaatttggggttattttgcatatggacgaaactgtcccagagatttactttttcggcaataatcccaccaatggactatggcaccacctttctcggcacaagggcagtccataggtgtcgggttggcttagacggggaccacatccccagattgtcttacggtggccaaaatttttttttctagggcttagtatagatttcataaaaattacaatttaaaaaactacaaccgaattttgctgtttttgactatatgcttttattattaataaattattaatttttcaactgaattcattagttattaaattaatttttgatagaatttcttatttaccaaaatagaggaaaaattattgaattctgaaatatattaaaatttaattttaacagcaaagttgtagtgccagcagtgaacaaatactttgacaaatatttgctaccaaatgccaaaaaggttggcgaaacggcaacacgtggcttcagaaattttcgccgaaaatttttgcgtccaactgtcaacaatgttgttgaacggagccattcattgggagaacgattggcatcaatgaagaaatgggaatcgtcggacgatgaggagacggaaaagcagaaagataaaggaggggaaaaagaggatgaagagaaaaagaagatgaacggcaaaaatgataaaaaggaagagagaatgaaggagaacgaacatgcgaagagacatggtgagaaaaaagagcatcatgcagagaaagaggggaaggaagtgaagaagcacgaagagaaagaggagaaagaagagaagaagcacgaagcgaaaaaagagcatcatgcagagaaggatggaaaacctaagaatgaagttgggttgggagaagagaaaaagcatgaaactaaaaatgagtttgaggaggaaaaggtgcataaggagaaaagggagcacgaagagaaaaaggagcaagaagagagaaaggatgaagaaaagaagaaggagtgcgaagaaaatagggagcaggagcatgataaccatgaagcgaaaaaagagtcaaaaagcgacgagatcaactcaattgaggaaaagcttaat

SEQ ID NO: 72923 - DNA, 73 bp, Heterodera glycines
cgacgcggcgaagccgcgtccctgagcgcgaagcgctttccccacagcaacagaactcaattgataatgtttt

SEQ ID NO: 72924 - DNA, 208 bp, Heterodera glycines
cgcccgtcctgaggctgcgatgaattgctaaattacatcaatttctagcgacgcggcgaagccgcgtccctgagcgcgaagcgctttccccacagcaacagaactcaattgataatgttttgtatgttttaaaataacaaatgagggccatatattaccaagccacgcatgcacaccatagccaactgggcaccctagtttatatact

SEQ ID NO: 72925 - DNA, 709 bp, Heterodera glycines
atgattgaagaacgtccgctgatcgaatgcgctgtgatcggtccgacgaattcggggggagccgagaaaaacgcagcggtaaggcgaaaatggccttacagtattattagttcattatcgtaacccatttcagattttcgagttccgtacgaaagaagggtgtacggtacttaaaacattgacggaattggaacaactctttgaacactttcgcaatttgttgcctcagggaaccgaaaagatgccgaagaagaaattccttgtgccagaacaaaaattgatggaaaaacgaaagaattgggccgaagcattggtcacgcatttggtggcgaatcattcggaaaagtgggaaaaaggaggagggaaagaaaagggaccgatcagaaaaggaggggaaatttaggattgatcaggaaaggagggggaaatcttcaattcacatttcagttgtgatgtccaatcgcttttcggtcctttgttgacccaatcggacgaggaccacgtgattttgggaccatcggaaaagaaaacgtgcgaatgatcacgaataaccaaatttggcttttttagagtgaagccggcgaattttgattatttgaaaacggttggccagggaagttttgggaaagtgtacatggtacggtaccatggagacggtaaaatttatgcgatgaaagtgctgggaaaagtaagaaaaattggaaataaa

SEQ ID NO: 72926 - DNA, 555 bp, Heterodera glycines
tttaaaaattgtttttaggcggaaacggaggagaccaaagcgattgactctttggggacacaaagcaattttaattgcttgaaatgtcaatttatgagcatttatttaggcttttgcgggcccaaaattccgtcgaatgagcttcggtcgccctccaaacagcagagaatgctttcgccgttgaaattgctcttcgccaattctcagccggtgctttccttcgcttcgcttttcccataatttcccattttctcagcaccccgacgccgtctcctcaaattccgtgggccccggcggcgttttcttcccgcccccgggcgattctttcctttcgttggaccccccttttgaggagaatgacccgtactgtccgctcttcatgaacgaccaaaacacttcactgaattcgctgttcggctgatcattcgctgcggcggagaaacgaaaggaaaaggcaaaagaaataacggaaagtgccaaaaaaaagagagaaaagtgcacacatttaacattttctcatcagatgttctacttgcttctcataataaacgtttt

SEQ ID NO: 72927 - DNA, 2565 bp, Heterodera glycines
ccccttggtccatccgagccaagctggtcccgggccaacatgacctcctccgcctcgtcgcttcctctcgccccacttccaccggtgacgaattgggcggtggcccttccacttcttcacagccggaagaagtgccgtcgtcctcgtcgttttccgtcttcgctgatggcgcccagcagtcctccccattgaagaaggacaacacgggtcagtttagccttgcaattttaaattcaaattagatcattttataaatttgacaaaaatggaatatagcccccccccatcgaaaatttaagattactttaccttttttgtcctgaattttcatattttcaattttagctgacccggtgccgagcagttcaccatccgtaaaagagacggcggcggcatcgaaaaatggcgaaaatagctcaaggatggcaaaaatttcagccattttcgaccgccaatggacggaatggaagcgtctgtaccacagcctggccgacccaccgccgtccggccaagcccaaacgaccgactcagtgccacattcggcggcaccgtcgccacaaacgaacgcacaggcgacaacagcaaggagtacagcaacaacgacaaacgcatccgggctaacaggttcatcccagaaaagtgtggatttttaaggcattccctaaaaatgggactgtcccagccaaatcgtctttcatggctaattagtgcgcttaatgtttttgcatttaaggccggaacagcggcgggggggacggcgcatgggacgccgcgggtcaacaccaaaagcaacagcaagcgttgccacgacttgtgatggtcgaagtgaacgggcaccgaatgctgtacccgagccaattcgttgctgtgttggcggacgaattgttgccaatcgtacggcgggaaagggcaccgtcggaacaaacgacgaaagaggaggaggaacaggcggatggggaaacggaagcagcagctggtgggtggcaaaagccaggaaacagaacataatttcgccgacgaaattttaaaaaatttaaaacttagaaatttaaaaaaatcatagataattttttcatataaaatttcaaaaaaaaatcatagaaatttttcaagaacccttcaaattttttataaatttcaaaaacgttagatttttaaattttttccctaggcttacttttgaaaaaaaaattacggcggcgaaattttcgggtgcacctcaaaagccaagcggaaaacggttaaaaaaattggattgaattttaaatttttaggtttttgggctcacaatcagtcccccgaaagcaattgtatgggattgaaaatatacaattttaggcatgtccaattctgcttcaacatctacggattcctgtggccaaaccgtgccgaaaagtggccacaacaatgctttgccatcctcctcctccgtaacgcaacgaccgttgtttctgcaccgaatgcgtcgccgttcggccgcagcgattggccaatgcgcggcacggtgcagctttgaggacgcgcttttacgcgcgaggggcagcggcgtggcgacagctgtgaaaagagagctgcaacagcagcaacaacaacaatttcaaaatgtacaacaacaacaacacattacggggacaacaacagtacggacgctggacgagttcaactacgactacgcgaggcgcgagttttgctactgtcgcatttgtcatggtgggagacggaatggaggaggattgggttggggtgcaccccgaaatttcgccgaggcataatttcgtcgccgaattttttttaaatttttggctgctaaattatgtcctgttccttgttttgtgtcatcgggagcaacaaccaagcaaagcgggatatgaatgaatgctcagtccccgctttttcagccccgtcctcaaccgccactactccattagccaccacaaccgccgttgggttgaattcgccttcgtccaccgcttcgacaaccgttgtagcggccggcggcccgctgacaccaacggcagcaaccactgcaattgcggcgcctgccacagccgctacggtgttacactcgccatgcagctgtgctgctcaccctgcggcaccgttccatcatcggcacggcaacgatggcaattatgacccttattcgtccccagctacgcaacaatatattcaagccgttcatgacgaaccccaacatgcgcataaaacttcgtcctcctcactgaaaaaggctgtgccttcattggccactggaaaaagagcatcctccaaattcaatggcacaacaaaaagcggaactgacgatgccgcacataacacccatcagcagcactcttccagccaacagcagcagcagcagaacagatgggcacgtggttgcgcaacaaacgcggcaacttcgagcagttcaacaacgagtgccaccgaatggccaactgtgccggagtgggacctgctcaagacgggctccgtgttggcaaatcgaagaaaaacgcagcagcaattgcttgccctaagcaagacaaaagaggggggacaacaacatgaaattgctgcaacgacggg

SEQ ID NO: 72928 - DNA, 2071 bp, Heterodera glycines
atgtgcagtttgggagtcaaaaggggcagtatcaacggatgttcggagcaaaataagtcggccggagagagcgattccgagaggcatttggaggtgagctgtggagagttagaaaccaacaaccaattgggaagtgtgaaaccaaatggcaacaaaaattacatatagttttggtcaagttggttgaccctgcaaaacctccgagaaatattttcaaacatgaccaacgagggggagggggtgttgtgccgtgccgggcatcccatgttcacatcagtttgattgcgtcttctgctgcttcagttgcctttctctgccaacccttcctcttctgttctgtccaatttctctgctcaaaatccatcgtcctcttatgttccccagcaaatctcttcttggcttggccgtcagaagttcagcggtcgtctgaagaaacatttctcaacttctcagtccaatttggccggtccaatggcaattgaaccattcgcagtcggagaaagtgatcagcagacaaaggacgaactcatcggatcagcttcgaatttttccaaaagttgcaatgatccatccatcaaaagtgagttaatacttaaaatcggttattctttgtccgaattgttcagcgaattcttccgctggtcttctgaagcgctaccaaaaaggcaaagggctgaaacggtcgatgggcgacttgacagcaatcggcaaatcggaactgtacggtattggtggatcatttatcagaactttgaatttttgtaagagcgccaatatcttcgttggatcaaacagaaaaagaactggtgaatgaagctgagcaatgctaatgaatgttattactttctttcagcagaaagtgctcgaccctttggaagtgttcggccctccgccgcccctcccctccaccgaaccgccgccacttaatgacgagttggtcagcgcgttcaatcgcttctcggctgaccatgttggcacatcgtcgacaacaaaagcaaaagagcaacaaccgattcttcagtctgtgtcttttgtatcgatggcgagtgggggaacattgggcgatggacgaccgaatcggcgaagtgcgagcagtagcagcagcacaacttcgggtaggttccggtttattattagcatttaataaattccctccagatgaagaggacatttgcctcgcagcccaacggtcaaagatcagacaaatgcaaattcgcccacttaatgactctcaacaaccaaaattaaacgcatcggtcgatgagttgagaacggcaattggtcagatttctctgcccaaatgcaaaggaagtgaaagtgtaagggtaactattttaaaaagtaagaataataaacatatttttatgttaaaggacccctggggaggtggcccaactcaaagtgtgacgacgcaactcccttccggctttttctcaaatagtcaccaggagggaccaatccgagcggcactgaccggagacgaacatttgcgtcgcaaataccacggtgattctctccataatgcactttttcgaaaatgtttctcttttactgtcagaacttccgctctccgacttcagccaatctgtcgcgtctttgtccggtgcaacaatcgcgcgcgctcggccccgttctcacacgccgttggtttcgaatcccttagggacgcccgcctctttctcaccttttgttggcagtgaaccgaaagaggtggcgaaattcaaatgaaaagatttaatgtttgttaatataagaacgaccgctttttgtcttatatttcacaagtttaagagaaaaaatcaaggccttggcaaaccttaaataagctttttcattttaggcattttcaaaaaaaatttaattgcggttgaaccagctctgaataaatccatcgaatattatattgcaaaggaattggttagaatcggcattcgcacccacacccaagtgggcaccgggactgggcattgaaccaggcagtcaaatgggcgaagtgtcctccatgactgcacattgagcaagtggccacaatacctttaaaaatgcgacattttttaattattcaaataaa

SEQ ID NO: 72929 - DNA, 1217 bp, Heterodera glycines
caaatgaatgcctagggggacaagcacattggatacagcgtgctttatgaaaacatgaagaagggcgaggagtcggttcacgaacttctgacctttctcaaagaacgcgtaaatatggaggacgatttattcaaatcgcttgggaagagtctgcacagagtggcgattaaatatttttgaaacattggattttgatttttaggttaacggatacatttcaaacaagagcggttttgtggacgcgtggaaattggcgaaggaaaccttggaattatggactggtacggctaaatataagcggtgcaattaaataataatttcatttttatgtacccaaataaaagttgaatttagcattgttttataatcatttcttttcagaaatccaatcgtcgacacttcgaaatttaaatgatcttctgaaagaagtcgctcgttatcaagaagaattggctcggatgcgaaaacgtgccaaagacgcggacactttggaaacgatcaatttgatgcaaacaacgaccacctgtctgcaaaaagtgttaaaaaggaaaattaaaatattataattaattgacacaatggcatgtgagaacgtgctcaattaggcctaaggacttcaagataattggggatttgaggacccaaacccttaaggaaattcaaaatcttaaatggaaaataattttgaataatgcttcggcaaattaatactaattgagctttttcttacaatacatttattaacaaaggcaagggacacgttcaaccagcgaagcactgaggtggtcagtctgaaacagagcaacaaagaatggacggctgccagcacaaaagaataccttcgagtgctcacttaacttaagattcatttaaccaaatgttcctcaaagtacttgtaaactaaggcacgcaacaaattgaacaaggctcacgaggagtacaagcagtacatggacaagtacagccaaatacgcgacactttcgaagaacgcgtcaaccaagccgcacgctctttccaagaacatgaccgactccatttgctacaaatgaaaagttggttggaagatgccaactttaattattattttcaattactttttgaaggtttttttacgcaaatggcgaaatgtttggaaaatgcccacggcgcaaatgcacaagtgagcgcaactcttcgccagagagtcgagcagaacattaacgtggagcagatgatg

SEQ ID NO: 72930 - DNA, 1068 bp, Heterodera glycines
ttttcgtggatatttccgatgggattttggtcgaattcagggcaaatacatttacgagcacgggtctaagtttgggaaaagagttcagtcgaatatgggcgctaagaatcacggagtcatccttcctgacgcgaaccgagaacacacgttgaatcaggcactttcgtctccgagtttagtcgaactttgcgtgccttctcttctcccattttcaggtcgctgccgcggcattcggtgctgcggggcaacgatgtatggcactctctacggccatttttgtgggtgatgcgcgcggatgggtttctgatttggtggaacgagcccggaaattgcgcgtcggcccgggatgggaggcggggacggacattgggccggtgatttcacaaaaagcgaaggagcgcatttgcgagttggtcgaatcggcgctggaagaaggagccgatgtgccattggatggcaccaatgtgacagtgaaaggcttcgagaagggaaactttgtcggaccgacggtgagattaatgcacaacacttcgccaatttatagctgtttttgtttgggttaaaattgcccttttcaggtgatcactggagtaaagcccgaaatgctctgttataaggtccgtccgatattttttctgaatttaattttcgtttttattgttaggaagaaatctttgggcccgttttgtgtgtgctcgaaacggaaacacttgacgaagcgatggatttgataaacaaaaatccctacggaaatggcactgcccttttcactcggtcgggaattgccgcgcaccgtttcgtctcggagattgatgtgggccaagtgggcataaatgtgccaatccctgtgccacttccgatgttctctttcaccggttcgcgtggaaggtgagtgacacttctctcatgttgtgtttttaatgcgttttaagttttcttggcgatgcaaatttctatggaaaggctggtcttaatttctacacccaaattcgaactgtgacccagttgtggcgttctgaggatgcctcgacagaagccaaaccacaactatcttttccacaattcaaa

SEQ ID NO: 72931 - DNA, 2696 bp, Heterodera glycines
atggaaccgccagccgtcacctcgtgcggtgtcggtggacattctgcttcaggcctaaacgatggcaccggtggattgcaaaagtatttcctttaatttaaaaatcattgcctttggctaattttctttacctttaaatttaggcgagatttgtctaccgttgctggttttattcaaatcgacccacaaataagttttaatacgactagtcgacacttcgaggaactgcctgagaatttcctggaaaccataagtcctcaacagggtcacagctctgttggtcatcatcagctaatagctggattgggtggacttcatcatgaaagtggtggaaatgtgtcacatgtaaccactactccacaacttgcatcattgacaacagttagcatggctggtacagctgatgggaacaggttttcgaaagtttcaataaattattgggtcacatcagacgaacatcactcaaagcgtttaaattgactgcgagaatcctaattttcctatgttatcttttaagaagccaaacaaataccaccatatttttacgattcttgtattaactttaataaaacagtggttatgctggtctggtgtcgatgcctagctcctcgcattacatttctgcgctcaaaatggaatcgatggaacaacaccttggccaccatcaacagctccattcaaaccaacttgaaaaaacaaagtacttaacattcataatttcttattgaataattcctcgtgcattgcttattcactcgacgaaatttttttaagttttggtaatggccccgccggattgctttcgccgttgcacttggaagggacgaggagaggagacccagaaggctcactcggacttttgagtagtgtttccgtttcgcatttgcatcgtccaaatggcggaagtcgaacgagcgatttactcaatggtattagacgcagcagcaacaatgttgcgtacattaaagtaagattttgtgcaatggttaaagatatacctttaaattcttgatcaactttacgctttcggatcttattattgaaaattaaggaagaaattaatccatcgaacgaacttggagggtatcactcggcagcatctgtttcccatcatcatgaggcctacggggatgccggaccttataccctccaggggcctactgcccaggaattggaacggatggcaaatgctgagacgccaccagcacttagcaatgtcgagatcacttcatccattcttgcgtcactttcacgcgaatcggtaagctgaaaacatagaatttaatgtgtgattggcatcaattttctttttaagccttcacccaacatacagcagcaaagtcctcaccaaccaacccatttcattgtccaccaaatgtctcgtcaacctcagcaacttgaacatcaaatagttcagcgccacccaatcacatccactccctcaacaacggcacgtcgttcaaaggtgtaatatatataatcagacaaaacatcaatttcaaaattacaggttaagcaacaatctctcagccaaaaccttggtcaaaactcgcagaattcggatcagcaaattattttagcttcgaatggtagtggaacacagtctggatacgggccgatgggacctggagctggttagatctacaaagcttcttggacttaaatacgatttaaaggaattcctcgtaccacttactcaacgacagacacaacagacccattgaatgccgaaattgatgacgaaatttacattgacacaaaggacttgtgcaaacgtgttgcgtatgaactaaaggtcgacccatttagccccctttttatttttaatacaatagcatttaataaaactttcagcaacattccatcccacaagctatttttgctgagcggatcttatgccgtagccaggggacattgtcggacttgttacgtaaccctaagccctggaatcgccttaaatccggccgtgaaacatttcgccggatgttcaattggctgcaacaaccattgcacatccgtttgagcattttggatatgtacaaaggttataataacagctctttccatcttttgaacgtttcttttgcaggtccaatggcttccggtgttattccaccacctacgccagcacaaaattctcgtcatcaccatcgaaatcgtaggaccagtgacacaaatgaggagggaaaccctccacaaaagcggcctcgtcttgttttcactgacatacaaaaacggacgctccaggtttcgagttcttgtgtggtattttaatcaccttaacaaattcaggcgattttcaaagagacccaacggcccagtcgtgagatgcaacaaaccatcgccgaacatcttcgcctagacatgtccaccgtatcaaattttttcatgaatgcccgtcgtcggtcgcgcaacggaaatgggatgggcgatgagccggcgccttatcagcaggtaaattgtgattttatcaaagaaaagctgccaaacaatttgaaggatgaaatcacccaacaatttcctagtatggaaaatggtccaatgcttgacctgacaatgggtggaaataacaacgcttttggttattttccgactaatggagttttcaatcacaatatcaatgaaaacaatgaccagttgttggcatcaatttatgggcagcatgccataaacatggcatcgcaatatgggcaata

SEQ ID NO: 72932 - DNA, 469 bp, Heterodera glycines
agggccttgattatgcgtttagccatttctccgtccataaagttaaatatagttgggaaaacagtagtacccttctttggctcagttgtccactgtccttcttggagtgtcagatttgtttcgacggtgccgaattggattcatggacaaagggtcgaatccaaaacgaaagaatggattgaactaacaaatccagtgaggaggaggaaggggttgtgtatttcttttgtactgtgttttaaatacatattaaaaaagttatgggtcctaaatcaaaacaggaaagtaccgtcaatttgaagtgggggggggggagaggtgcataaaatcgactaaaattgacgcagtgtttaggctacaaatgaagtggtctgccttgtgcccgagtcgacgttggacgaaatgcaattgtccgtccattcctgcaaaaaggcatttctaacttggcgccattcatctgttgtcactc

SEQ ID NO: 72933 - DNA, 187 bp, Heterodera glycines
atgcctgcctttttggctcaacagctcgtccgtctctccgaccaaaccatcgcaggtcttcgcctttttccggtagacgaacggcacgtctcagtgaacagcgaggaaagcaacgcgggaacactgcttcgcctgttaccggacaaattccgagaaaatgtgctctcgattcaaccagatgacagtg

SEQ ID NO: 72934 - DNA, 123 bp, Heterodera glycines
aaaattcttgtggataatgataaaacatatccgccatgcctcatccgcccaaatcgaccaattcaatggtttttggatgaagaagcggtcaaagaaatggcagctgcaatgaacgtggcatga

SEQ ID NO: 72935 - DNA, 816 bp, Heterodera glycines
atgacttttactttcattaagttcttctatgctcgtccgcgacctcactctcaaaccggacgtatcaaaaccacgctgggatcagtcgacttatcaaggccgggcgcgacactttttcggtaatttggtctttaaacttggattctttctttcccacagtattttctgcaaattattctccctttagctgtgttgaatcctcttaatttgtttacctccaatcaaggattggaagaaagtcgcaacattgtcttagattatcggtgttttatcattttgcattctatatccctatactattttagaaaaggcattttttccccagaattaacagttgagcgtctatggaaggccaaacatctgtatggtaatttatttatgtattttctttataggactttaggattactgaagattatcatgcattctttcagaatcagcttatcatccgatgtctgaccaaaaaatgttgccttttggtcgaatgtgcgcccaagtgccatgcaatatggttttgatcggtggcatgctcagtttttataagtaaatctacaaaaaacaaaaaaaaattaaattaatttttcaggtctccgttggccgtcgttttttggcaatggaccaaccaatcattcaacgccgtcgtcaattacaccaatcggtctggtgactctgtgagcactgaccaattgctgaaggcatacgcatgcgcaacgggtaagtctgaattttaaagtggatataaatttaaaatttacctgcttttaaggcggggcattaaccgcggctttgggattgaatgccgcggccaaagtgtga

SEQ ID NO: 72936 - DNA, 1265 bp, Heterodera glycines
atggcttatatttctgtggttggtggaggacttttccgctttttctgttcggttcgtaataatttgtgctcgtctcgttcaggctgtgcttttttgactttggtttctcgttcctgtgcccaacaagcgattcgaaaaatgcaccattcgcagattttcgaggtattttcgtcccctcccttttctgttggcctttcaatttttctttgtccgttttctgcactttttcaatttataatttttgcaattatttaagttttgctgggcttgttttagaaatgattcctttgttcaattccttagggctgttccaaaccgttggtcgtcaaattcgccgattcctgtcgagaaaaaaacgcaaaaaaagctccagatgtcaaaaatgaagagggtccgaagccgaacggtgggaaaccgaccagtaataatcaggtgctcgcctggctttgatttcattatgaaggattctaaaacattttgcagaattcgcaattgctcactgcctcaggcaccgaaacattggccaatttggtcactttacttcagcagccaaatgtcatttctctgcttgaggccggtacggaacaaaaaaaaacataatcgcaaaaaagaaaatattttgatttccattttcagcacgtgtcatacaatcggcacagaatgtgacttcgtccgctggtaattctcaattaaatattggtccgtccgtctttttgtcttccattttcttagatttactactcaaaatggaccaaaatcgtcaacagaatcttttcaaaatgcccacgctgctcccaccgaatttgaatcagggcgcactgctcggcctgtcacagggattgctcctccaacagtccgcggtcggaggtaacgaaaatgacatccaaaacttagggggatgagcttcccacacaatgaacccgataaaagggttggccatgtctgatttgggaatgtttttgccaattctttttgtttttcccaagtttcgtttccccccccccctaaaattgtctacggttgggttaattaaattcagcctcaccactcggtcactctgcgctgaatctctctgtgcccagtgcaattcattctgtgctgccaacgactccaccgaatttgccaattatttcgccttcttgctcaattgtttcaaggatgacgccggcaaatccttcatatcccatcgacaaatacaaccggggaccggacgggtgcaatttgttcatctaccatttgccacaagactttgccgacacagattt

SEQ ID NO: 72937 - DNA, 1069 bp, Heterodera glycines
atggcatatctcagctggacgacgacgacgttgaagacaacgacaatgctgctcaacctgacacttttttgccagtgcgttcattcgttggtcatccatccgcgactctgttcaacttcggctgcggttgctgcacgacaaattggagcagggccagaaagaactgctgttgaagacgaacaactgcaacatttgcttgacatcagcaatagccgaaatagtaacaccaaaaggatgcgctggtacggagcagaagccaagcaaatgctcaggtgagggcagcttttaggggaaggcaatgtgccattcatgagggcaccgaatatgccgatattgaggacggagattgtgccgttcattctttggggcagacaagatggccgtgccgtactcacatttggcataataccaaaataaacatttttaaacggccactgaaccaacctccccccgcccttcctcccacttgcttgaacaaagattttattattttttcaatttttttagacaccttgacgagatccggcttcgaacggagacggcacaacagcggaaggcggtggccaaggttggcaaagtgtcgttgctggataaactgttcgcgctgttcacggacaagccggacgacgaggggcccaagcatgactgcttcttctccgccttcaactgtccagtgaatccggcacggaacatcccgggcgttcgccgggtgcgcatcacggcggatgagcgtcagaaactgttggcggcaaaacaacgtgccgctacaatcggcagcagtggtggtggcatcaccgaacggcactggagaaggccacggcatcaccaccaccagtaaggttttgaaacagtgccattgaagccgaacggcacggcataaccatcgattctttgttcactcactcatcaatgctttctctgcttttgcttgccattaattttgttcaaatgtcaaacttttgctgatgacccaaagtctccccaatattttgtacaaaatgaaatgaaattttattgtttgctttgcatttgtatgttattatattatatatttttcgtttctcaaaaa

SEQ ID NO: 72938 - DNA, 1658 bp, Heterodera glycines; identical to SEQ ID NO: 9909
  unsure (1)..(1658): unsure at all n locations

SEQ ID NO: 72939 - DNA, 1391 bp, Heterodera glycines
  unsure (1)..(1391): unsure at all n locations
atgaaaattggagttaaaggaaaanaanttagaaattatcataaatatattctttcaaagtaacactgccaagtgtgcgaatggcctaattgctactctccttgacatttccttcttctttcccctggttcaatccctctacagaaattaaaatattttgaaaattttcttttttttttaaatttccccgctaggtccgggaccaacaagaatagggtcagggtcaaattgttaaccaaatgcatgagtgggttcaattcccacccgaggcttaacattttgcctatttcttattgtatttttagtacagtaaaagcatttttataaaattattttgaaagaaaaaatataaaaatttttcagtaccgggttttaccgggtacccagagccggtttaaaatttggcccgttttcagaacccggcgacaaagggtactgtaggggctaccagaaaaaaaagatgggtgcctattgtaaacattttccactgacgatcaaattcaatggcggggagttggaagctttttgcgccacaactgatcaaagtaaaaatttcatggctgatgcatacgccttagggctcagacgcgtacgctcactcccttaaaacagcttgtgtaacaatttaatcaattaatgtaatatcaaatttcgttttttttgcctcctatgatcatttaaaatagagttgagcgggaccgggacctggacacggacaactgagtaccaaggtcccggttttgaccagttttgaccgggaccgggaaattcccggcttttttcccggttttcctagccaaaaagtcccggtcccgttcttgcccaaatttcccggtcccgctcaactctaattttaaacaattttggtgaggaaataagcaaatcgtacatttaaattagagaccggacgggatcgggatcccgcgggatttcttcgggatcccgcgggatttcttcgggatcccgacctcgggatccgtcccgagcgattttttaaattcatcgggattgattgggatcgggatttcatcgggatcccgaacctggatccctcccgaccattttaccaatcccgcgggatcccgcgggattgaagtcacgataatttttcaaaaaatctccattttttaaattaagatcttgaattttaaattaaaaaatattgtcatttgctaatttttcttaaaaaatcccttaaaaatcccaaaaaattttacaggtctccaaaattccactaaaattttcaaaatttgacgcaaaagttggccattttgtgacttttatttcttcataaaaagaattattttttttaatttctaaaacattagtctaaatcttattaggtagttttatggcacaacgatttctaagaattttgtccaataatcaga

SEQ ID NO: 72940 - DNA, 1058 bp, Heterodera glycines
atgttcgagattgatcgggatcgggattcagtcgggattcagtcgggatccagactcgggatccctccgaccccagttgtccggtctctaatttgccctatgcccaaaaattcattaatcatttttttgagtatcaacaactcattaaagattaggtaagtaccgggtgtaatcacttcctgtcacttatttaatgctgattatgctaaacatgaatttgaaccaatttttggtataggcgcaaatgtctgcacacggaaagatggcatcggacaattaggaaattgtaattatacacgaccattagagttagcagttttttagccttagtcattttttttattcattttcgtatataatctaaaaatttttcttcggtttggtttcttcaaattccacttcgatttaaattttggaatttattttcggcttttcaatttcagcaaatttttgcgcctcttctcgacatttgcactttgtcctcatcatcaaacacaacgacccaacaacaacaattctctgagaatgctttgcgtcgtaagcttcaactttgtgccaattgtcttgccgatttgctgcacacttggcctggctttttcgttgggttttcggtggacaattttcggcacagcacgtgccaaaggtgagaagtgaaagaggaggattttatgaatttttatttgcccaaattttggaattattttagttttttaattaaaaatcttatattttttagtgttattgctttcctcaaaaacccttcttatttggcgcagcagcacgagaagaaattgctgggggttgagctgttcagccgaatgctttgccttccgtacgcaaacaaagaattggccacatgggacgaagcgatgcgattttatggtcgaacgcaatttggaaaattaattgctaatttaattactattttgatagaaagagctcatggccccgaccctttccaaatttcgctcagtgaacattttgttttggccgaactcccattcattcgcccattaataaaagtaaagaactcgtgaaaaacaattaaatctgtataa

SEQ ID NO: 72941 - DNA, 617 bp, Heterodera glycines
atggtaatttttagccttaaaatttataaattgcatatttttggcgcaaaacggtggatgttcacaaatctctaatttttagattaaaattggacctaaaaagctagaaattatttcggattaaaattttttaatctcagttctatttcatatttttgtttttagtttcattaatttttgaattattcctgctcacaccaggacttccgttcaaaattgaccggatttttcgggaatcccggcaatgctcgcggaaaagttttggactcccgtcccggcttgcgcatattttttacgggtctctaattaaagaaaaaattagaaaaaaaaaactttgcctcgggaagacccgaatgaaaaagcgcaaagacatggacagattggcaaatgatgaacaggtccgccttttcggtcttaattgtgaaagtgaaacaattaaaggcatttgtaatatttgtctcttggccgttttcgcctcagcggactccggccaggtttttctgggtcctcaaatccgggttttgagggttttcctgatatttgctgaattccgagtttttcctaattatcccataaatcatgtcgttaaaaacggaaatgaaggttttgtgaaataa

SEQ ID NO: 72942 - DNA, 408 bp, Heterodera glycines
atggcatatgcaacagaggtgaataggaagaaatggcacgataacattggaaatgagagggataggattggtttgggtgggatgaacggatggataagtttatgacggggtcggatcggggaaagtagggcaatttacattatgcacaaatatgaaatttaacagcggacacagcaacatctctggccattaattaattggtgcttttcagccagtttcggcccgcttcgctgaccatgcagcaatacttggactttggccgcaagggcagtgcgtttacctcctaccactttctgaagacggaactgctggtccgcatggcgaacattatgcaggagttcgacctgctgcccgccaaactgttgcagacgcccagcgcacgccatgtgggctcgtggtacaaacaaa

SEQ ID NO: 72943 - DNA, 1520 bp, Heterodera glycines
atgctcgacttgcgctgcttcaacacccgaattcccgaccagcaaattagcgtcccgctggttccgctccatttgtactacattgtattcgaattgttgaaggtgtgcagtcaatgcctgtactgaaatggcagggatgggaagggaccggcgggtgctgagaccttataaaataccatcatatccataacttttctcaaatccccattaacttttaatttttggtatctttcgatgccctagctgttctctattagtctgcaaaattttaaaaaattccgtcaattttgagcaatttatagccgaaagtacacaagaaacaggttttcaaacttttttgaccataactttttgaaacaacgaaattttttgaattttcaggctaataaaaaagacctagggctgtcaaatgataaatagaaaataaaaaataaaaataatttaataaaataaaatgaatctttttgtttagaattcgatgcgtgccaccattgagcatcaccatcgggtcaaaggctttgatgccgactcttccgatgatttggcagaagtgcgtgcctgcattgtgctcggcgcggaaaacctttcaattaaggcatgtgctttcgattttttggcactttatttttgtccgtttttattttcactctgaccactcacatttctcatctttctcagatcagtgatcgcggtggtggcgtgccgagtgccaagctggccaatctgttccattatctgtattcaactgcgccaaagccgtcacgcgatgactccaacacgccatttgtaggcaccaaccaatgaataaaaactctgatcacgctttcccgtcaataaatatctgatcatttttttttgccataggctggttacgggtacggtctgcccatttcacgcctttactcgcgctattttcttggcgatctgtcactgacttccatggacggttatgggacggatgcggtcatttcattgaaggtagataattcgatcaattagagttgtttaactgggaaattcgctcctctcttcctctcgagaatggcacgggaaattcgagtaaactcactttacaaacgacggcctttagtctcttttcgggatgcgccccaaaaaccttgaagttttcttatgaaaatatctgtttgaaaattttttttaacatacacggcgagattttttcccgtgccttcttttcgtcttttcggcactcatttaccagtgcaacaatcatttttggcacatcttttaaggccgtgccgtcccaggcctgtgagctgttgccggtgtacggcgcttcgtcacgtcgcttcatcacaatggcacgcgaggcgcccgactattgtttccagaagccgaccgcaatcacagcaccggcattggactctacgaccagtgccgacatttcagcagtgccagtgaaagcagtgaagccgaaattggtaccggaaacaacgacgactaagacgaaaagcataagcagcagcagcagtggaaaagccgaacgggtggccatatga

SEQ ID NO: 72944 - DNA, 468 bp, Heterodera glycines
atgcgattggcacggttacgccaaagtcagctggcagcaaagcgcgaatttgaacggaacatgcaaatgaaaggtcagtgttgtaaattcgagaccaatgattttaaaaggaatatggttggacttgaggaatatatttttggtttttcttcggctaaatacactgtgtcttgaatttttaaccaattaaaatttttcctattagggttgtgcattgtcggtgattaactggggagggtactggtttcggttaggccttgttcccgaaccccggctctcgtttttggcccaaaaagccgggtttcggttcggttaaacgattttacacaattctattagacaaacatacaaaaatgcccaacattattggtcaatttaatcacgactatgtgtgctaagttaacattttcagcaaataatgccgcccaatcaccggcatcgaattgcttcgacagagctccatggtaa

SEQ ID NO: 72945 - DNA, 1264 bp, Heterodera glycines
atgccacaaatctttgagaatttgtgtcattgttgtgtttctattgtgaacaaaacaatcccaagttttgtgtcttattgtccaactttgtccaagaaatatttggcattctttcccccccaaattaacatttaaaacaattaattaataattattttgaagagcatgatccatcgaagtcagcagctaaagcaccgaaatatgagcccaaaattgaccggaataatacgcccgtcgattatgacggaaaggagaaaaagtgtaaagtggaggtgggcaaaaacaaacaaattaaatttattgaattgaaattgtacaggctaaaataaaatttgaaaaattaatgaaactatttttcgatgttcatttaaaaaagaatcaaaagaataaagtgttagtaaaatttaaacaggcaaatttgatcaaattatgacaatttacacattttattcaatattaatttaattttctgtttttttttatattttaaaaatatttttgaatgcttgcaggctaacattgatgttatgtctgaggaattgaagaacatattaaaagagaaaggagcagacaaacgtgacatcaatgccgctgaagatggatgcggactgaaggaatatgcgtacgtttttatttttatggcaccaaattttccaggccaaaaaattgggggatttagcattgaaaaatgataaataaatccaaatttgtcaatggattcaatttgttttaaatcgttgatttgtgagttaagtcttccctaaggcgaaatgtccaatagacgcaatgtccgatttgttttcttaattaatatttgcatttaaattgtgccccattttcagtgaatggtcccgctgcgcgaaggttaaattgcttcttctttatacatatgactttcttgttgatttgatcactttttgttcaggtggcattctacggtcgtggtggctataatgcttccaaaaagtacggcatcgaaaaagcgaagccaaccaaaaacttcaacgacatggacgagttcgacaagtatggcttcatgcacggtgagttttgttggcatttgaaaatagcttttaaatcatgaatttattatagaaaagcataaaatgaaatttttagcacaatgtggaaaaaacggggattgttggccattttcgccaacttttggccattttcagaccaaattttggcaacgttttaagacaatagggacccggcggtgccatgaaaatttagcaaattaaaggtcaattttgttaagaaa

SEQ ID NO: 72946 - DNA, 1814 bp, Heterodera glycines
atgaaaaaagccaataaaaatgttttttgcggcgtgtttttccaaaaaaactttttgaaacagtttttggattttgagttaattttaagaaaaaagtaagttttgggggctggcggtgccgataggctctgccgggggaaagttggaaattttcatcatttccgacttttatgccggaatttgcggtgcataacgattttgatatttacgccgtttaagtcataaaagggcaaaaagcaaagggttctcccatttagttaaaggcgtacagaaatacggcgcaaatgtcgctaatcttaatgagaaaatggtaatgccgagaaggaaaataattcgatgggattgtcggcaccaatcaaagggagagaagcgcaaaaagttatctaattgcagatatattcacattatttgtgcttttcgaaaactaatcatggccatatcaatgttcggtacattaaaagagaacagtttcgttttgaatgtcacgcaattcaaagtggcattttttctctatcatttgtaaatttttaaaatatttaaaaatgtttgacaaattttcaagcagcagcagtgttttagcgccggaagtaatttttattcacataattagctttttattttaaatgaaatttttgtttaatttgcaggtcaattcactgattttcaaaaatcatttttaaaattggaaaagcaagctgttcttccttttcccatcagatcatttcgtggctccgtgaatattttgttggcattttattccctcagcgaaatgcttaatttgagtggcaatttcatctcggtttacaccgttttttctggccattactttatgccctttcaaatgctttatcgtctgtcacttatcccttttattggcgccagttgcgcaatgattttgatgtttttcacgggggttgagcgactttttattgtgcttttcccgctaaagtaggaacaattagacaaacaataattaatattatagagcaataattaataattaacattgtaaattttaccattttatttatttgaagaaaatttaatcaaaaattgttcttgggaattgcacttacatttaatttaattgctatttttgtgattgcctcctcaacaaaatattttgaccaaaaaacaaattcacttgaagtttttgccaattattacgaaattggcagcttaatttgtaaattggtgcgttttttttcattttcaatcgaatatttttgttttttaggagcaaagtttcattctcagtctctccggtttaatcacagtgataatttctgtgtctgtttacgcactaattgcagtcgcattgcaatgccaaaaaggtatttattcattcaaattcgattttatggcaactgaaaaatgttttataattagttccgtccatctctaactcaacccaattaaccaatcaaagaattttccgatcgctttttacgatcgttgttgtgaatattggcggttatctaattgtatttttaaataatttggtaattgtacctatctttggcaacaatttattggcatggcacgcaactcaaattggtggcattttgatgcacatcagtgcctcatcaaatggccccattctttattggaggaagtaaattgaaaaatatatttaaattttttttattttttgttttttagtttggaatatcgtaaggcatttcacaaagaatttgcatttgtattgaaaatattctgcaaaagaagttctgctgttgttcctcagtaataaaagcgattcattaaatttgcaactattttttgttttattattttggttaaaaattaataaa

SEQ ID NO: 72947 - DNA, 731 bp, Heterodera glycines
gctctgtgggacagatatcgagcaatgtttgcgcttagaaatttgaacaacgaccgagcaacaaaggcattggcggacggtaaatttggcactcaaaaaggggggggggtgaaatattaaagtaatttaggttttacattttcctttcggtaattaccattgaaaattgaattgtgtgcccatgaaaaaacgcattgtattgtaagaaaacttaaagaaaatttttttttgaaaactatattattataaaattttgaaaaatcgcggaaaatttttcaatttttttttgttaaattttattaaaaaggtttctatgcttttttgagaaatttttaattttgtttacaattactcgcctctttcccaaggtttgctttgtgatgacagcagtgcgctgttccgtcatgaggttgcctatgtgcttggccaaattcaatcgcccgtcgccatcccggcattgtccgctcgactgcaaatgcacggagagaatggcatggttaggcacgaatgtgccgaggcactcggctcaattgcaaccgacgaatgccaacggttgctgaggcaattcgttggggatgaagaggtaatttgccgggaaagatggagatgaacaagggattttgattaatgcagtgggtagaattctccataaatttgccttccagagagttgtgcgcgaaagttgtgaggtggcgttggacatcgccgagcttaatcggacggacgaatga

SEQ ID NO: 72948 - DNA, 1037 bp, Heterodera glycines
tccgaatttacggcggacgatgtcggaaaattgtacaaagtgcccagcaatctgatgaacgtattgaatgtcagaaggaaaatgccggagttcttcgtaagacaattggacacgttgcgcgaatgcgtttggctttaccgtcagcaaacgcaagaagtgagaaaatggacatttgggagaaaatgccattggcattttcaaaaaatatcaaattaaaagtccattcgctagtgtttaggctttccattgtcttcacgaggtcgacttggctcatcggcccgcccttcgcctcgtcctttggggccattttggcaccggaaagacaatcactttgagtcaactgaaccacttggcaattaacaaaggatacatcattttcggcgtaaaagatggtaatcaattatctcatatattaatatttctttttttatggatgggttttcccgtcttttaaaatttcgaataaaattcttttagcgttgcgttggtctcgtgacaattaccgtcctgtacaattgtccacgtataaacccggtcggttggacagtccatggtgggccgtccgtttgctgaccgccttcaaagttgagaatggccacgcgtggaaaaaactcgcggttaaacacaacaaattttccgtttttcactaaaattttttgtaggaattgaaaacaacgaaagattacgaatggacaaaggtggaaaagacgccgaagagaaagcctttgacggacattgtcgaaatggtaaacaaacgaacgacggaattcacttctaaaatttagcgatggattttattttttaattacttaagtaaacttttcaaaaaagcggagttcgcattggttattcgtcgattggtgagaccgtttagcactcgttcatttttgatttgttaactcagaaacattcgcaacaaaaattaagacaatccgctgattgactcgctttttcagggtctgaccgcccccgctttgtccaccgattgtgtgggcgcactttgtcgcgaattgcgcgcgcacgcctccgccggctca

SEQ ID NO: 72949 - DNA, 125 bp, Heterodera glycines
gattgcacgtaattgccgaaaaaattcgagaccaatttccgaatgttgaccgactaattgcaaaacgaaagccgtctttgtcaaagcgccttaccgagtcaaaaaattggaaatgtatctcatat

SEQ ID NO: 72950 - DNA, 200 bp, Heterodera glycines
atggagactgaacccatagaatcaacagcggaaaccgctgaaccgaacgtcgttgacactgatcaacatggcaacgcagaacttcgagagcgctttcttcgtttccttcagttgttgccgggcagatcagtggatgtaaaattgtatggcgacattcaagttggtggcaaatttgttgcggcggagccaagcagtttcga

SEQ ID NO: 72951 - DNA, 588 bp, Heterodera glycines
tttaggtcgtacatttatttttgttgcttcgatgtcgccaaaatcgtctcatgtcaattacgatcttctgccggaaatttctcacaccttccgcagccctgaaccccgaccatctgttctagtttctgacatgttttctgttttgtgtgcttcgccgcttatcatccttttccttttggtaaatgtttaaatttggatgttttttctacataatttttactttttagtggcttcgtattggcatcaattttggaaaattcaagttttcgctcagtgctcttggtaaataccactttttaaattctctgtcatattattattgttttatatttgtccatttttagggtttcatcttggtctgtgtgctgtttttgggctctacgttttcttctggctcgagttgaacatgttccagacgttgaaatggctggctgttattggcgtgcccactttgttccttggaagtcgtctttccttttaaaaccaatgctttaaagcttaacacaccgttttttgggatatattgtatttcttaatttatatgttggtaaataatattatggttttttaaattccatttataataaa

SEQ ID NO: 72952 - DNA, 3663 bp, Heterodera glycines
atgacgacgaattgctatgcaaatgcaatcattttgcgacctgcggtaaggtaacaattttttttttgcttgttttatttttattttccttaaatttctttttcttgttgtcaggaaggtgtggcgagttatgttggtgaacagtacatggacgtgtgccggcctggtcgaggcggatactgtagtcgggtagtgtttttgaacgcggatggcacaattcgggaagtcatcacatcgtgagtttctaaaaagtttttcatataggtattttggtgagcgattgaaaatttaacaccaagttttcacagtttattatgacgaaaaatttacagaaaaaggaatcaactccaatttttcgtgggcccaaaacaacttaaatttaattttttattgaaaccaatatagattgactatttttagtgttgcagttgtttgtgattcggttttgcgttttaaatttgaattttcggcactttttgttcgaatttgcaattcgaaagaggccaaaatgaatatgttatagtacaatataatccttaaattgcggccttatacatgcgtaatttttcattcatttttcactttgtttagctgtttgaaacgggaacaactcgtgcccagggaattgccattcgtctgccaaaattcgaccactccgcaatggaacaaattggtgaactgttgcaagtctgaatcattttgcaacgacatccaagtaaataaattaaattcattttttatgttagtttgattaactttgaattttacaaaaaatatatagagcaagcaaattttcagtttcccattgaacttggtcttcgcaatggctttttgcctgaatccttcgatggtttgccatccgtttttctgacccttctcatttcgcttgtccttgtgctgttgtttgcattgagcatttgtgttgccatttcctgttgctgttttcctcgaaaaagggctgttgttgaccgatgcattggttggttggtgcagtgccgttccccaacattgaacaggtttttttgcgattgaaaaaattgtgaaattttaaattttgattttttaaaaatttagttctaaggctgattgtgaaatggacagtgaaagtttatgtggcgcaccgatgggccaattggcggaggcggcaacattctcaaccggatcgggtatatttataggacattcagaaaggttcctctttctcaaaaaaaaatcagaggttattgatagggggtgttcgttcccctccccggatcagttttaagaaaatttcaagaaaaattttggaaaaattttttagcgattttttcaaagattcaaacgctgaatttttttttactaaaattttctttttaaaaaattgaggctgggaaacgactcctaattgatggataaacatacgccctttcgcttttacgatgttttgattttgtgctccgtttcgctatattctggaaatacaatacaattttatttaggtatttaataggatgcccccaaactccccccccccccctccttcccttattatgcctaaataaattaaaaagattaaataaaaattgtttgtttggatcaaggttccggcgttccaatgttggcaccgcgcacaatctcttaccaaatttcgctgcaaacagtgattggtaaaggacgttttggcgaagttacattgggcgaatggcgtggcgaaaaagtggcagtcaaagtgggttggattaattgaatgaataggaccaaattttttgtgtaaaacacattttttttgtgaatttttaagttatttctcggccatgtcgtcccatattaaattcttatttaacgccttttttattacatttttttaaatgcatgagtgcaataattgtgttcattgtcagattttcgagtctcgtgaagtggcttcgtttgatcgcgagacaacaatttaccgggacaatatgctacggcaccaaaatcttcttcgctggatttcaagtgacactgtcggtgggttcatttgataattttcaaatgggggtactacattcccactgtctcgtattgttacccccaccctcccgaaatttcaaaaattaaatttttttttttaaaaaattcaagaaaattttttttctatacgggttgcttcgtgatcatataaaatttggaaaaaatcgccagaaaaaccttacaaaaaatttttctttaaaatattcaatgttaaaactaaaaaaacatttcattgacagatacgggagaaggaataatgcattggttggtcaccgattattgtcccaacggttcactgttggaccatcttgaaaacaacacgctcaacacacaacaatgcctccaattcattcgctcaattgctcacggaattgactatttgcacacttcattgactggcaacaaaaatttttgtaaatttttttaaataaatttttaaaaagtaagagtttcaacatcatcaacaaaaaacaaaaaaaaaattttcagttaaaccgtcaattgctcatcgtgatctcaagccggggaatattctcatcaaaaatgattggacctgttgcattgcggatttggggatgtgcgttcggttgaaaagcgacggaattattgacaggcccgagggtggcgacagagggggaacggcggtgagaatttttggggttttttcgcataattttactacatcaactattgtattattgtaataactaactgtatggtggacctagagcacctgtttgttttttaataatcttttgaaagatttctagcgcttttttcctaaatttaatttccatttttcaaaatttcagcgctatttggcacccgaatttttggacaaatcatacagcaatgactcaattacctcttacattcgcatggacatttacgccctggcactggtcatttgggagatttgtcgcgttggtggaagtgaacaatttggtgggaaaacattgggcggcacattaggggtgaaatttttttttccatttttaaggtttccgcattggactatcaggtgccctaccaagagtatgaattgacgagcactcatccgagtccggacgcaatgaaacaaattgtttgtgtggaaggactgcggccaaccattcccaaagaatggtcgaaaacaaaggtatgtgcttttttttacaatttttttttattcttttaaaatcaaagtatgccatggaaaaatagttcgggtttcggtacgggagaaatgtctgatttcgggcggtaaccccctgtaaaattaaaaatatcttttatagattctcgaaaaatgtatattcttcattcattccctgaaaagttttcaaaaaaaattgaaattggttaaaacattaaaaaatctttttaaatatgaaattcagggttaaaaaataattctaatataaaaatgattgtgaaaattaaaatttttctctcttcggcacatataaaatcattttcagatactcaccgaattcactcgggtcatcaaagagtgttggaatgccatgccgcagtcgcggctcactgctttgagcattcggtgcacaattgacagaatttgcacggaggagaacatcataatcaccaccacataggcacaaatgccaacaaattcctatcccttttttcttttctttttctttcatttcatttctcactcagagagactga

SEQ ID NO: 72953 - DNA, 873 bp, Heterodera glycines
atggtgagtgacatttttatggcgccttggtgatcaaaaaaaaaacaatttcccataaataatggcaccaattttctgtttgccaggtcgaaacggtcatccaacagcagttcgatgatcaggcaaaattggaaaagcgacgggagaagcggcgaagacagcgcaaacggaagcgaatggaacaacaggaaaaggaaggggacgacaaaaaggaaggagaaaaggaggaggagcaaacagaggacgaagcggacccatttgacgatgagaattacaccgtcaaacagtttgaggaggaggtttggctgtcttaatttatcaaacaaaaaaattgggatttacgactcaacggacgcgacatcattttgttttttggggttgaaacatgaaaattcttgtcagatcggcgaaattttagagattttttggtcattcaattaaggagtgcttttgagattcgttttcaaactgtttaactgtatttctttaatttttgttaatttaattaaacgacatcaaaagtatttctgaatctctaagtttcgccgatttgacatttattttttcgtttcaacccaaacaacgagctggaatagaacaaagagttgacactgaatcaaacacgagacgatacaaaaactgcaatgttattcaaaaaattcaggctgaacggatgcgcaaaaagcggatgggaaccgaattagatgaggacgagcgcgaaattaggcatttggaagcaaaactgaggaagaaagggcgcaagaagggcaagaaagagttggaggaggacggagatgaacttgatgagttggagaaggccattttggggggtggggaaaatgattgatcactgatcaccctttttaaaagcca

SEQ ID NO: 72954 - DNA, 444 bp, Heterodera glycines
atgttcaagaaattcgattcggcagatgatgtggtcggttcccagcagctcaaaggatctgtgcaggttagtcaatctgataaaacactgatttttctaccagtgtgatgatgtcgaaaacagcaattggtttttaattatggggcctatccgaattttttttaacgatgcgcgaaataatttgtaggtgtgcccgtgctgaaaaagtgtaaccaaatacatattccccgttacaattactgagttaactcttaatttaattgacagaagtcaatccgggccaagctggttgagcagtatccgagcattgagccgtacatggacgccattctgccgaagaaggagaacttcaagttggtcaagtgcaaggaccacctggagctgatcgcggacgccaacggcactgtccacttcgttaaagtgggcattttcaatttaaaataa

SEQ ID NO: 72955 - DNA, 785 bp, Heterodera glycines
tgatttggcaaattatttcccaactctgagactgctgcacaaatacccgttcatgcttccacaccaacaggtgaaaaatggtgggggagggattcaatttaaatgtgcatttaatttgactgactctctaatgcaattgaaatttgaaatttctgtcaagggcatagtcaaaccccttggcttcggcttttcttttttttcaatacgttttttcaaaaaaagcattttcgaaatttatttgacctccccccttccccccgcaaaaggtagacaaaggtgccatcaaatttgtgttaaacggttcgcatataatgtgccctgggctgaccagcgcgggcggccgacttttggacgattgcaacgaaggggcattggtcagttttacaataagaattaattatttatcaaaattataataataattattatttttttgcatattattgcataggttgccattatggcggaaggaaagcagcacgcaatgggaattggacaaatgaaggtaaatttggattggttttctcataaaataattgatttgcttacatttaattgtaatataattttcatccttcattcattccggtttaatttaattaattaatggacgaataaattatttcatccattaaaatattcaatttaaaatttaaaaaaatgaagctaaaaaatgccctcttttttagctttcgtcggcgaatgtgcggtcacaaaatgttggcattgccattgacaatgtccacttcatgaacgacgggctgtggcgattaaccactgttcaa

SEQ ID NO: 72956 - DNA, 1808 bp, Heterodera glycines
atggcaatggttggcacaacaacaacaaattcatcttctgattgttcgtccacagcgacacggccttttgtacacatcaacgtgaatacggtaggtattttaacatgagtacgatagttgttttacggtggttcatcattggttgcaaatatgatacagttgtttcaacatggatatggtaggtttattagtttcgtggcacaattaattgtctaaatatgtctaattgcgatggaaaagtgcttaatcttcgttacattttcaaataattggcactaataatatttttgattaccaaagtttgttttgcccaacttctattgggtccgtcattttccaagaatcagtagtgccaaaactttctaattagtgtttgccaatgccaattaattggtctgatgttcgggcttttacaaaaatccgtgccaattaattggtctgatgatccggcattttaaaaactcgtgccacatgccactttttcacagtgccaactttctcattagcatttgccaatgccaattaattgtcatctttttcaaacaaccgtaaatggataaatgcaatacaataattagtgccgcttaattgcacggcacgtaataaaaactaatccggttgcttcccaacttccctaattgccaaacattggcacggttttcgacatttttgctgcttggatggcattattcaaaaaatgtggcgcctttttcaggtggaatatgccgtgccatcggagtaccaatttgtggactatttgggcggtggtaactacggcaacgtgatgtgagttgagcacatcctcacattccacagcagacaacaccaaaaggcatttaaaaccaacaaattttatttccagcacaatttatttaattagggttttgtcgatcaaattgtttaaaaattcaaatcctggcacgggtttctggattttgatcgtaaatgggtgccattttactggttggtcatcgacccagaaaattcatagcttattgttataaacgtaaaatgaaaaaactccgcggcatttttttgcctttcagtgtgccattggccaaaaaatcggagaaaaaaaattcccaaattaaatccggcattttttggccgttcattgtgccattggccaaaaaatcggagaaaaaaaaacacattcccaaaattgaatttggcagcaaagtgcgagcagcgcaaggcgtcgaattggcggtgaagaaaatgtacgagccattcagcagcgcgatcaaagcgcgccgcgtgttccgcgagttgaaactgttgcagctgatcagccatgagaacatcatccaatttgtggacatgtacacgcctgacatggacgacaaatgcttcaaaaatgtgtaaatataatggaaaatactctcattatttaaaaaatcatcaatatgatttgatgaaaaattattgataactttcctaaaaagcaaccaaatttttaattcttgatatcattcgatagccctaagtgttctctatcattctacaaatttcaaaaaatttcatcaagtttcaaaaaaattatggctagaggaactcaaaaaacctgtacgaattggggacatttttcttttttcaggatgacaattggattggattttttgacatactttttttttcatattatggcacttcgattgggtttttctcggcatttctctttctcattcgatggcatttgtgccacacttttctgttggcagttacattgtgtccggatacgctggcgtcagcctaaagcaggtgttggaccgacaaaaacagttgggccaatcgctgatcaaccatga

SEQ ID NO: 72957 - DNA, 747 bp, Heterodera glycines
atgaattttgatgaacacgggcaaatcaacgtaatgagcagcgagcacgcctactttatgctgaaggcggcgcatttcggcgacatggcctcgttccatcacatccgccatgagccaacgccggcggcggcaaaacggcttggccgtcacatcatgccgtttgtcgagcaaaaatggcacgtcgtccgcttcgaattgatgtgccgtgcgctgcgtgccaagttcgccgttgagcccttgcgcagtgcccttcgaacgacgggctacggccaattggtggaggcgtccagagatgagtattgggccgctggacgcgagatgcacgacgtcggtttaacggctacggccaattggctcgggcagaacgctcttggtgaagccctcatgataatccgagaggaggtgcgcacgcacccaccgacaccgaacaacttggtgcggcattatgtcgtcgcgcaagcttcggctgaggattacgtcattgtggcggcagcctttgatcatgagcccttctttgttcgcgttggaaacgacatgctgcaaggcctgggtttgcagcgcaatctcgccgttggagacacgctggttctggttggctactactggagagcagctttcgaacaagtagcgcagattggtcatcctacgttgccaggctggctccatcaaggccaattgtgcgtcaagcggaggcgcagtcggtgcagaatgtcgtcttggtgccatctttcgtcatgccaggagtga

SEQ ID NO: 72958 - DNA, 2898 bp, Heterodera glycines
cgtccgctcctcccaggtgataaggttttggtcaacgggtacgagtacatctcgggcaaggaattcttggataagtccaaatggatttatgccggtttaatccaatgtcaggcagtcgtgacgaaagtgacaaaagttcgttttgcaaaacaccatgagcaatatggcatcgtcgttgatctcacacgccgtggcagagcgtctgaagcaaccattgggtcaatttcagtcactgcatatggtatggtcagagctatggctctttatgagcgtcagcctctcccggacactcacatggcaagtttgaaaaaggctcagatcattaaattgaatttggcaaaagttcctgaggcctggtacgttggtccgaattatgtcttgccaccaaaaagtccggtaaggtctgggatggaattgtttgcggactttgggactatgattccggctacggccgacctctttgaccgggattggttgcgcatggattccatgggaattcctgtaatttttccctttgtgccggagtacacggacgaagaagtgaaaattgccgaacgtattgtggcagcagccttagtagcagcttctgagtatgaggaaatgctgaaacttgtcactcaattcgttggagttgttcggccgcaatgggaccaaaacgctgacgcggatggaaatgaagaattcccgaaatacttctggctgaagttccagacgaaggacagaaagcttgtcaaacaacttgtcaaacaatggacaacggactcccccgtcacggcaaaaatggaatttgatgctaaggcatttgcatacgggcaagttattctgattaagaagtcgtcggaaaagactgaagaaggcagtgacatattttttgttagtgttaaagttcgccttggacaccatgaaagtgatggtcaaataagcaacttcagaaagatggtgaatggtgaagaaaccatcattcaatcggttggtgcttctgttggtttctcagaccatgctgattgcttcggcacaaatgaaccgtctcgactggccgaagaggattcaccgcgaggagagatcatgaaagcactcctcgccaggcctggaagaagtggactgaaagtgaccactcaaaaactgattgattatggtcttggccaaaagacggcaatgccatcagtagcgcgacttaacgaggaacaacaacaaactttggcactcattgcatgtgaccttcctttggttgtgttgcagcaagccccgccaggcacaggtaagacactaacattggctacggccatcgaccttcttttgtcggagaaaaatgaggaaacggtcattgtggcgacagctacgtctaacctttctgtcaccaaaatggtggaagaaactcgggcagttggagtttcggaggaacacttggcactcttcagtggaacggccagagtgcgctacggcgagcaaattcaaccgttggaaagaagtctgctacggccaagactcacgcagacattcttggaagaagtcaaagacaaaaaggacgtaaagcaatttgaggactacaaaaagcacgtgtttaacacacctctgcgggtccgagaagcgaaagtggctgaaagttatctgaaatacgacaaaaggaaagtcattttcctcacgactcacatggctggtcgcgtcaagggtacgataaattgtgcaacccatcttcttttggatgaagcaacgcaggcaagtttcaccaccgtagtgagtttggcatgcggggcaccgaatctcaagaaaatgatggtcaccggggacgtccgtcagcttggcgtccacttaagtgaactgcaagaagtactctggtcaggcttcggcctcgaatcgatcacggatcaactgctgaaatcgccacgaatggaggaaactgtactgaaaagatgctacagatcacacggaagtttggttgaatgcgtctccttcgcatcatacgtgccacacggagaagttctgttgccagtggaagcagtgaccaaagcgaggacatcactcacaacttcggcaatcaatttgccaatggctggaattccccttgtgctaattcattccgaaggtcggattcagatggatgaaacctccttttcgctctcaaatgttgagcacagaaggattgcgcaggaagtcgttatgattttggatgcaaatttgccaaaatcgaacacaatcgtcatcatctgcctttatctctatgagaaggaacaattggcttcggccatgagggaagcacgtgaaaagaagatgctttcacggaccatcgaagtccacactgtggattcgtatcaggcgaaagaagctgatttggtgatcgttgtgacgacgaaaacggcggctacggccgatcaaaacccgtttggctcttcaagaatttcaggattctttcaagacagccatagagctacagtcgcgctttcacgtgcaagagaaggcatgttcttgattgcggactttaacacactgatggggtgcaaagtttggggccgttttgttgagaaagccaaggaaatggtgccaattttcaatgaagaatatttgcgaatgatggaaagcaccaaaattaagcgcgtggatggaattttggctaatttaaatggttattccccaattccctccagcggcaaatttacgaatccaacagacgctcgtaacccggctgggggaccggtcagagggcgctcggttggctggcgtgcatttgctccatcacagatacgagcatcacactctgaaaggccacggccgtcaaatcgcggtcaaaacagttttgaccaaggcatcttcagtaggcaaggaacccaaaacattaccaggggagcctgcttcaactgtaagaaaagtggtcattggtcccgtgaatgcccgtcaaaatga

SEQ ID NO: 72959 - DNA, 1678 bp, Heterodera glycines
atgcaaacacccgcagacacaacaaccacaatcgtacttcgcgaaatgttggttgatcaacaacagtccgacgacaactcctccgctccatggccgtccattgtcaccaccactgaccatgcccacccgtctttgttggtgttcccaatgggtgtcctcactgtgctggcacttttggccaacactgcgctgaccgtttacattgtgtggcgccgtctctaccacaactatgtgtcctcccaattcattttgcacttgtgtttgactaacattgtcgggctcagtgtgctcgtcccactgttttgtgtcaacctgtggtcgggcaacaacctttgggagaacaaccatttgatgtgccgaatgcaggtggtggaggatttgatttcgatgcaaaaaaacagggcacaaattacatggcattctttctggatgggcaaaaagtgccaacaacaacaccaccaccacaacacttggcattatttgccttttagacatttatgatgtgctcagtgtggaccgtaatccacttcatgacactgtgcatcgccggcgttcatctgttgacttttgcgcgcattcactacgcccaactgtttggacttccgccagggtcattttaaaaaaaatgatttgaaaatggatttaaagtggaggtttctcgctggtctaaagaatcgagagtctcgaaaacgtcactgtattcgcgcaacaactcaacattcagatcgctgtgcgcactggcgtggatcgccgcgttcgcggtcgcactgcccagcctgaccaactcgcacatcgttgtctacgacccggcactgcgccactgcgtgtggggcagcaccgactacagctacaagttcttggcctacatgctgatcctgtgcgtgctcatcccctccattctgtcctacttctgctacatcaaagtgttgaaaattctctaccactctccaatcgtgttccagtccatcggactgtacaagagtcgctttttggtctacgcctttctgatggggtaaggcactaatccgtcacattccatagatttgattagaattctctaaattttccctgcttatcggcacaatcgagccatcaacttcttaaaaatttgatccgaaatcctttgcttaattttttagaccaatttttttaaaaacggctaaaatccaattccgtcgatggcatccccagactcacaatcatcatagaaaatgacataaaaaaattcaaattatgcattttaatcaaatcgccgataaaatcccaaaaattggtccttcactacgcatcgcaatgatcagaaaatcagattttctcatcgatcaatccaattgcttggcactcatttgtcagtcacagtcaccaattgttcaggccgctctaccaggcgcccttctacataatcacaatgagcggcacgtggcgctttggccacggctcggtgatgcccgttttggccatgttcctcggctacgcgccatcaatggtggccccgtttgtgtacggcctgtcactgttccaaatgaaggaggaggacatggcaatgaccgcaagggcacacaaaacaatgaacacggccacttatcaccaccaacatcagcacaaccaacaacaacagttgaacaactgcagcaacaaccgcggggcaacacaggaggcaagggcacaacttttgtag

SEQ ID NO: 72960 - DNA, 897 bp, Heterodera glycines
atgtcaccggttcacctctatttgcttggtgttctgagcaaaatgcaatcatccaacagacttggtgagaaaaaatagtttttaaaatttattctattatatatttattagaaattttataattcaataagataattattgtcatattttaaatataaaaattccataaaaaagaatatattaatatgaatattttagtaaaaaacaatatgtatttataatttttcattatttgaaaaaattaatataaaaaaattaaataaaaatataaaaaattcagcctctgtcggcgaaccaacattgcatctaccgcctgatagtgaagagcgtcgcaaactgattggcacccgtgtgggggaccaccggaatgaacaattgaaaaaacggggccccgaaattgggagcattgcatatatcgtacaatgagtaaaattaggcaatacatcacagagggtggttagacacattcttaggaatacttttggaaaattcttagattgtaatttttccacagggaaattggtgtgttctttaatgacaaagacatcctttgaaatatagccaaaaaataatgtaatgtatagatatgtcaacaaaaagctcgattttatttaaataggatttcgataaatttttatagacgacatttactgatcgactttttcatataatttttaaaaaaagagaaatatgcatcggattccggacaaatgagcgcatagggaccctaagtggtgatacagaccgaatctcggtcccaatcaatcccagatgaatgtaaaaaaatattcgggacagatcccaggtggggatcccgagtttaatcccgatagactcagagaaaaaccaagggacgcccggtcccgtgcggtctctcatatgaaagcagacaataaa

SEQ ID NO: 72961 - DNA, 936 bp, Heterodera glycines
atgtttcaatcgttggcatttttcatttgcctcaatgaactcacaaacattggttcttcattggccctcaaaattttgtttgcccatccggcatttccgcctttcaatagtcactttgcgtttggtctctcattggccaaatcattagcaaatgatggtcacgatgttgtaagttttgataaaaagataataataatattcattattaaaattattaattttttttttcatctagaaaagctaaatattaaagatgaaaaagtttttatttaaatgaatgttttttaattatctttaataactttaatacatgcatatttgtattaaatttaaaatgaatttaaaaaattatcataaaatttattaatttttgtttatcattaacaaaattgtaagagaattttgtttttattaaaagtttctttttaattatctttcattgcttaaatgcatgtacattagcaaggaataattataattacttgactttattcatttctttgaataaataattaattttttaattaatttaaaattgtttatcatcaacacttttttattggctgtttgtgctgtcctgaaatattcgtaaatccatcaccactggcagatttatgaacattaatttagttttaaaaaatgaattttttaatttaaaaaaaaagattgaattataaaaaaaaatatttttctcgcaattaacttttttgtgattgaaaagaattcctagcaataattctgattgaaactgtgaattaattttagcacatgttagcaacaattagagcggaaggccaaaagctcagcaatgaaagtgctgataaattgacaatgcattataaaatgacgaaatcgaaaccattagaaatgggcagtggaaaattggagaatgacaccacaaatattggtaaaataaagttaaaaatcggaaattag

SEQ ID NO: 72962 - DNA, 1394 bp, Heterodera glycines
atgcaaaccatcagagaactggagaatcaaaggcagaagattactgccatgatcacagacagtagtgatttgaaaatgggattagtgatttcaattttggattgggtgggacgattgttgctgttgctgcgatcagttctgatcactgagccataaaaattaattattatttttttctaattgattaaaattttaatttttaccaatcagcataaattcccatgattatattagaagcaaccaaaactaattcgtcttgaattatcatcaggcccaccataaacaattcttttaatttgaaaatttttaattaattcgacaattaaataattcattaattacttttctggatgtttagagcaaatataaatgacagataaataatataaaaaacgattgacaaggaaaagacatttgcaattatcacatattttccagcgaaccttgagatgttgcgaaagcttaattaaaataagtagattaaattttttgagtttttaagaatttaaaaaattacaaaacggggaatgccattgccacaaatgatcaacgcttatccaaaacagattgataaaagaattaatatttccagtgactgcaaagaattgggcataaccacaagtcaaatgaggaatccggacgcggagaaaaacaaggaataaaagcaattaaaaattgattaaaaaaatgcaataaattttattatttttactggtagctaatggagtggccaattgcgtcactcagcgaacatatggccaaccgaaagctgaaattcactaattctttcttaaatcgcttaaaaatttctaaaattttcatttattttccttcatgcatttaaataaaaaaattttttttaaagtcaatcaattggcaatatttaagtgctggcaaattcgtcaataaaaatgacttatacaagccatatcaattaaaatttatataaatatgcatgcatatgaatgaaaatattaatattattatagtttccaataaaatattttcagaaatatatacattttatattttttgcttatactttttacattaaaagaattgcttaattttatacaatcaaaaatattttattaaattcttttttttcattatttaatatatagggattttctaatacataataagattaaattttgtttaaaaaaaacaaaaagccttcacttaacgccaaaaaacgaatgttggcataccgttgccttgcttcaaattatgttgtaattaaagcggagaattgtcgatttttatagtttttttaaaattttttattagttctcattatgcacctattccttcactaattctttagtaaatctcttaaacattttcgtaaaaatttcattttttctttaatgcattttttatattataataaa

SEQ ID NO: 72963 - DNA, 68 bp, Heterodera glycines
atgatggtctatcccccatccgaactgatcgacatccttctggccaacagccgaggcggattggaacg

SEQ ID NO: 72964 - DNA, 752 bp, Heterodera glycines
atgaaaatggagcaaaaggaacaaaaggagcaaaatgataattcagcagcagttgatcaaatgggtgaagaaatgggaaatgacccaaatgatcaacgaaaaagagaaatcataaaaaaatttgatgcaattaaagaaaaattgagagaaaaaggaaaatatcaattgaaaaatgacacaaaaattgagcagaaaattggaaaattattagggacaaatcgcagtaaaatatacaaatggaaaaacgaattaaatttaaataaaattaaaaggatggaaaagagtttttatgaacaaaaaaagaaagaattcattggacgatttgctgaatttaaaagtttatatggccaacgcaaacagaaagaatttgtgaaggaattgggcatttctgaatttacattttggaaatggaaaaaggaattggtgccaaaatacaataaaagtaacagatttttataattatatcatttataaattttcattttaagcaccatattccaatgaggagaaatttaaaaagatgaaacaatatttcaaattaaaaaaaagaaatccaaaaattatcgacaaaaaaattgcaaaaaaattggaaattggctatgaaacgctaagaaagtggaaaaagaaatttgcatcaatttctgagatgtgattttgagggtattaatcggctcaaaaatttttttaaaaaacctaaaaaaagttttaatgcgttgattaaaattccctaaagaattctttcacccaataaa

SEQ ID NO: 72965 - DNA, 2423 bp, Heterodera glycines
atggcagctgctgcagccaaacaaagtgcagcacaaatggaacagaatgccacaacaaaatcggacaatgccaaaacggagcagcagcaacagcagcagcagcagaaactgatcggagaggaggcggaaatgatcaaacagttgaaattggccgacttgaagtttgaggatttgaaggtgcatactgttagggcgacattttaaaataaactttgaactgatcagaatccccaatcggcgctgatgaaactgatcagaggcgaacggcgccaaattcaggcacatttggcaatttgcatggatttttagctttggtgtatttttaaaggatgaattggaaaatcgggttctatcggacatttcggaggaaagttcgattcggtccacgatggccaatgaacaccggcaagaagaagaagaggagggggagaaggacagtgacggatcaacgccaaagggaattggaggaaaacaggcaaaaacaaaagcaaacaaaaaccaattagggagattataatgctaattagctaattcgagagattgacctgctgggcttgggttttcctgtggatttatatcaatgctcttttaaaaagttaaacggtttagtaaagccttaaaaattgattttctaaatttttaaattgaaatttgaccctttggcaaacaaacactgccagtgcttttctttgacttccaattgaattttttattgacactgaacatttcacaaaatacagcgcccctgcaaattggaagcgctcggcgcctcgcgcgaggaggaaatgagcacgacgacaaccgctgaacacgagggcccctcctccagcaccgcgactccgctcgcctcgccggcattcactgccgaatcgccacaacagaaacagccggggcaacaccaacagcacttcttcggcgatcacgaagagagtgctgaccaatcggagagatcgaaaaagcgctgggggagggcatttgggacaaaaatcttgaaaattgagcccaatcaaagctgaccattcttagtttaagcgaagaaaactgtggttgagaaatgcattgatcacttaaaagccgatcagtgtaattaaattttatttaaaatgcttttcctatttaaatgagttttttaggctttgcctcctgaagtgttggatgagagtgagcatcagttcagcagtgaaaatttgccgctgaatgtgtccgcttttcgcgaagtgccgccctttgccaacggcgccgcgttggacccgcccgaagtggcaaaagccgcgcttggcctcaagtcgggcaaatgctcaccgtgcgaagaacacacaatcagcgtgaagatcagcggcgggcgagtgccgtcgctgcagcgacaggaggaactgacggagagcgcagagccccctaaaacggtggatggcactgatcagcaacagtgggcacattgactgatcaacacattgatttttaaacttgcccacctttcagtgagccaactacgccgattgctgacgaacagcagccaatcgcagcggccaatggtctgatgaacccgctggagccgccgaacggagtgccgctgccgaagacggccgaggagcgcaagcagtacaagccgatgccggacacggagtttgaactgttgatggacgcggtggagcgaatcaaacgcgacaatttggccaagcagcaaaaggtgcgcgtgggatcgaattgactgcgcattcaaatgatttacagaagagcccgcacctgggtgaagagttggacgaattggagaagtaccggccgcaggacagcgcctgccgcgagttcgagctggaggtgcagcgtcagaagccgctgtacgacgcggacttcgcgtgggagtctcgctaccaaattgggcccgacactctgctgatcccaacgcgtggggcgcgcttcaatgcgcgtgtgcgcgactaccggcgtgagttgtggggcgacagcgcgccgttcgtctcgttcggcgtgctcggcgcgcgcaaccaggagatcacggtgcgcgagcgacgtcgctacaccgacctgatcagaggtgaccgatcagcaagcagaacataaaaggataatgtgtttttttaattaattttatattacagtgtatcagggttcggtttcgtccttgaatggcaaggacatcttggaaattaggccgtctcatttgtgaatttgaaaatatccttgaattcaagacggcttgaaaatgaaaatattgataaaatttattctggcgaaaaatataaaccatttggataaaatttaatcatttttcatcgcatatgataaaatttttaagtgtccttgaatttaatggaatttccccttatgtccttggaaaccggtatacccgtccttggaaagggaagtttattcgatccgaaccctgcagtatctgatcaaaagatcaa

SEQ ID NO: 72966 - DNA, 1011 bp, Heterodera glycines
atgcatttattggcactttgcagggacgacccctccaaacggtggatgctttgcctccaattgttgccaagtgcgacgataaaatggcaaacagtcagccaacaacaacagagcccggccaaaggtgggtgaaaaatatgaaacccaggcaaaaggggaagttaacagcgacatttctgggaaaataaaccgatgtatttttgaacctattactttctcccccccccccccaatcgtaaagtgttgattttataggtttgaatggatatcattttgtttcagttgaatttcccgaagtcagttataagcaaagtgcgtcgactagaatttattggacggatcagcacggcattcagtcggatgtgcagagattgcaacgattacttaaaaggaccgacagatcggaacagttcaggcaggtaattccaacagtttatttcaatgacattcgcaaaatcccaggaattgagaagaattgcgacttatgcaaccgcgttgggttaccataattttgcgagtgtttttgcggaagtgatcgaacgaagggtcggaggtatccccgaagagaaccgagtgacgctgcagacggcggccaaagtgctcaggtggggcggggaggagatgctttggtggtcggttacatggcttggtacttatttggtttagggggacttttaacacacatttttaaattgcctataaattcaatcatggaaattttaactaatattcatgacttatttattcttctgcaaaatcctgacggtgaatttgaagaaattttttttgttaaaaatgtatgttctaagtaccccctaaactaaataagtacccatggcttttgtggcccgaacttttttgcctaattgtaagccaaattgtttttaaaaaataatttttcagtcccatatatggcataaaaaccattaaagccgagaatgaaaaatttgaacaatgctattgggttgaaacattaattgggactggttttggacatcataaatgtgcaag

SEQ ID NO: 72967 - DNA, 1120 bp, Heterodera glycines
gttttgtccattttctgttttcaattgccctttgccaccgctgttcgtaataaagaaatcgacgatgagtatcaacgactgattcccctacggaatattccccaggggtgcgaccacgccaaaggcgtacttccggggacgggggacccggcaaaaggttcaacccgagaaacacgtttggttggctttgacatttctcgatttatagaatacggttttgttggcggtgggcttgagaaatgccaagtttggcttgagggcgacgagcaaagtgccagtgaagaggaaagccattacgagcgatacaaatgcaaacacctcaagggttggtcgggagatggtctgattataatacccaaaggctttttgaagtacatggacatttcaacgaggaaaagggcaaatgcgagtgtaaagagcattggaaggggccgatttgcaacggtgggcagacaaaggcgcgcagagatcagcgattgtcctttcagattacatcggctgtccagccaaccattccttttatatgggcgtgtgagtccctccccccccccccctcccgtgccgaacaattgcccctttcccatcagttgcacccccaacaattgccaacacgagggagaattggcactcggctccaaacatatcgaatgcatttgcaaggcgccatgggacggtcgcttctgcgaacgattggcatgttggagaatggcagagagaggcgagtgattaaatccattgaaacaaaacaaaacaaacattctctcccccgtccctctcttttgcctaattttggactcattcgcagagaatgaaagacggtggcgcaattcgggggagcactgtcgctgtgctgacaattacgagggcaccaactgcgagacggtggtgtcctgccaaaatggagaattggtggggggaaggtcagaggaagggacagatctgattggtcagaccgatcgaaaggaacgctctttcagatgccaatgtgcggagggatggaaaggcgaggtgtgcgaccggaaatgcattccgaaccaaacgtaaggggcgaacatttttgaattgataacgaatcattcgattaaaagacaaagaaattatagtaatactcttctcactt

SEQ ID NO: 72968 - DNA, 614 bp, Heterodera glycines
atgaacaaaatttactttcactatttcaaattaacagttcgtaaattagtccgttcggttttacacattttaaacttgaagtgccaattttgaccaattgtaacatgggggtcaaaaaatgtgcttttccccactttggcacctatatttaacaacaatgtctttgttaaaaaaagacaaatattttttctgaaacaaaatgcattcgatagaagaaagaaagggctaaaaattgatataaatgaacccaataattgtcgtattttagagaaataatcccggagtactcatttttatcaatttggaggtccatattcaaaaatcaatagctgcacgaaatcccgatttccaacatcagattcccgtaatttttgtgccatggaatttcggttttcctttccgaaaatttttggggtctcgaaatgctatccaattgatcacgagagcaagagttatctatggttcttcccctactatttgggaaaaaaagtcggggaactggtatcaaattccccgagaattatctataaggctaaaaaaattttaaatgttggggggggggggggtcaaaaacttggtcgtcaaatagaaaaaaatatttttctaaaaataaa

SEQ ID NO: 72969 - DNA, 303 bp, Heterodera glycines
atgataaacaaaatatggagaacctcagtgccaacattgtcagcagttccgataacgtataaaattttcttaagaattcgcgaaacttcgaatttttttcagagttccgaaagcgattatgaaacagcaaatgaaagcggttttgcaatttatttaattatatttattatatttttttgtttatagattcgaatgaatcagtagaggtcgatgaatcccaatcagcacaagatgagtattcattgaatattggaggtagtcatggggttacacgggtccctgggggagaacaaccgggtccgg

SEQ ID NO: 72970 - DNA, 1281 bp, Heterodera glycines
atgggaaaaagtcgcggtcagtgagaattttgtgtaaatagaaatcaaaatatgaattcattagttgcttctatatgaattagcttttttttttgcaaaaaaattccttgatttacaaaaaatgccacaataaaattataatacaaaaaaaggatgaaatatgtctcatttttatgacacatttattcagtgaaaacaacaacttaaattggatagatattttttgaaatcgaaaaattaaacttcgtacacttcattatttaattggttttcagatgtgcttatgcacttagcactgaagccttcatttttacttttgaacaacacttcagtttttaatcatactagttcaaacttgaaagagattaaaattattttattaaaagcttatatgcgctttaaccaacaacataaaactgcagaagctggacataacagtgatggtgatgaagaaattttgaacaattttgcaaatagagaaaattgtgagaaagtgatgaaattggctgaggaatacaaaaaaagcaaaacattaaaggggtattttttttaatttcataattattaggaatgggtcgcgacattgacaaatccggaatttttttttaccgagactaattcaggttcccggtttatacataaaaatttggcattttttccccaaaataattaccatatctttgctaaaaatcacaaaaacttatattcttagtatcattcgatagctacaaaatttctcaattagtgtctagtccagactttatatcgggacatgtcccggatttctaatgggtttcccaattttttcgatttgtttgccgattttctggtcaaaagtgagatccaggttccagcttggccaaaattttgtctcaacctgcttttaatttattatacttttgctcttaaggaaaggaaaaaaatggcgtaaagctttgaaagaaattcaaaatttgatggaaaacaatggagattattgtacatcatgtgaaattcctacaattgatcaaattcagaagagtaaaaggcagattttcatgaacattccttcgtcaattgttgatgaaacgaaaaaaatgaaacaaaaaattgttaaaaaactcggtagaaataattcaatttttttttcaaaaaagttgatcattttctcataaatagcatatatagattggtatgaattaggttttacgaattaatttataaagcttataaattaagatgagaagattcacaaaactcgaaaaggtataaaaaatatatttgaaaaaaattaaatttaaa

SEQ ID NO: 72971 - DNA, 70 bp, Heterodera glycines
atgtcatcgaatggagaaagtgacgtgactctaccgtcgaagggagcgttttgtcacgtgatggaaaaag

SEQ ID NO: 72972 - DNA, 947 bp, Heterodera glycines
aatttaagagaaaaataaataaaatatgtccattgtaagatacgaccgctctttgcattccgcaacttccaacgctgtgtttgaccacaatccagctgcttttcaaagtcaacctccgcgaccaactcaacagtttaatgtttcgtagaaatagtaagtaaaattttcaaaaaaaagttagcgtaagattgtgcctaaagcattcttgaccatcatccaaattcggatttgccgcccatgttgttggaactgatctcttttttgcgcgttcatggacttaaaactgaaggtatttttcggcgttatgctcccgtgaccaatatcaaagaattgcagcatcgtataaatatgggtcagtggcatagaaatctatttgttttttagctttttatttgagttttcttaggtgagtcaattgacttttccaacgatttaatgttccacggagacatccaaagcagcgttacccatgctgccgttctttttaaaacattccttcgttcactcggcgagccattaatcacaaacaaattgtacccggaactcacattgttgaacggtgggcacaatttagccagaaacaactgaatttagtctaaacaatttaatatttcttatctaattaggaatcgaaaaaatcaaccgcactgatgaaattcgtcgttttgtgcataaattgccaccagaaaattatttactactgttaaaagttatcgaatttctcgtggaagtggcgcagcacagtcaccaaaatttaatggatgccaataatttgagtgtcgtttttggtccaaatttgacatggccgactgatcaacaggttaaaagagaatggttcaaatagtgatacattatttttttacatttaggttccgatggtccaattgaacaatttgaacagcttctgttattcgttaataaaagattttgacgagatttttgtagat

SEQ ID NO: 72973 - DNA, 235 bp, Heterodera glycines
cttaattttgtcagtttcggcaaacgatcgcttggtccgtcaacggatgccattggccttccgtcgtcggattccttttcgaactcggcggaccctaacaatttgatgtccggacatttcaattggaactgatgaccgaacgaacagaccgatctcatcatcatcatcaatcacatccatttattaagcattcttccaacgataaacttcgagaaaattatttatttcaacaaaa

SEQ ID NO: 72974 - DNA, 1612 bp, Heterodera glycines
atgcagaatttgggccaacgtgccagtgccctcttctccgacgccaccaccgaacaattgctgagtgccggcgacggggctttggtccgcgacgcccttcaccgccttggccttaaagacattccacaaaaagcattgccatcggacgaaattgggctgcctctactttcgtccggttatttggttgctgcaagagacttgaccattttggacattccggtgggaaattttaaagtatttttatccaaatttcgagaaaaacttcgacgatttttctcccttcgaaatcgcttattttgtctgtcatttcagtgtcgcgcctttactcgttgacaatttttcagggaatgacttacggcaaagtgttgggttatgcagggccatcactcatttttcatcgatctgatcaccaaccatcgcttaaccaagacaacaacaatgacgatcaaaatgtcccttctgaccaattgctaccggtcgaagtgcgccgaagacgggacggactcccggagacaacgcaacagcatcggttcgaagttgaaccgttcttccaacagttggccacaaaaagacttggccaagtgttgctttatgtgcccgtttgtggtacaacgatggaagtggcaaaaaggttctaattttgttggttctattttgaattaactctttaattaacgggtcctagcctttcgcatgcttttccactctttgacggcattttggttgttgcgggcattcaattggctggtaaaggtgagtgtttttacttttttatcgaaagcctgcttcaattatatttttaaggacgtgctgggaatgactggattagccccgcgggctgtgcttcgttctccttcaactttaacatcccttgcgactcgaatttgggccgttccatttgttttttgcagcatatcaccgccgtttccgtggccagcgctgtttcaaaattattaaaggatgaaattccggttaattatcattagaatgattgaattggttcaccgaatcacaacttttaggattttcctatccgattgaaatggcccaacgacatttactacgaacgttcgtacaaattgggcggtttggttgtgcaagtgtctcactgtggccccaattattgctgcaccgtcggtgtcggactgaacgtggcgaatgcgaagccgaccatttgcatcaacgacatgttgccgatgcactcaaatcgacagctaacggtggaagaagtgttggcagggacaatgaacgaattcgaatgtgagagattcacaaaccaatccccttgcaattgttttttttatttgcagattttgtcaatgttttcgagaaaaaagggagggccgagtttttgaagtcgtactaccgattttggatgcattcgcacgaggaggtgcaggttttgcacactgaaaacggcggacgccgtgaaaaggtcgttatccgagggttggacgagtacggctatttggaagtgcggagcaaagagacaggccaaataatgaacgtgatggacgatggtaatggaaatccgtgaaacttcaacaccaaaatttgccctttttcaggaaacactttcgatttattccacgggctaatagtgccaaagtga

SEQ ID NO: 72975 - DNA, 473 bp, Heterodera glycines
atggtcaatttggcactgctgatgcttctgtttcggcaaagatcgcttagcattccttccgggggttacggcgcatcggcggcattctcttgtcaggacacggcatggaattgttgtgagctgccccttttttatatgtccttggtttataaaaggtttaaagccgtttttgcgcctccccctttaaatttggccattcttttttctcttaacctcccctttttccagttcagttcgcccccatgtgcgcctattctttgcgtatggtttacttatgcccccgcacttgcggcttatgcccatcgctcggcttcggcacggcaatgttcggcaacggaatgcaaacgcaaattgcactagcaaatgcattgggaagcagcgcaattggaaagaaatgatcagagaaaaggaaggaaaagccaaagccaaacacaacgccaaaaagcacccattagccgatgaaataatttaaa

SEQ ID NO: 72976 - DNA, 512 bp, Heterodera glycines
cttcctctctcttttctcctcctcccttctccctctttctgtggcacttccctttgcccctccggccaatttcgtttcggccgtatgtttttttttcattttttaattactcattctctccttcgcctttttcagcttgcatcggtgaccaatgtcctccgacttgtcccggcgtttgcacatgcgtcggcagaagggactgctgcacagatcgaaacgccggcggaggcggcgatggcattgccgtcgacttaatatccggcggagggtttgagtttgtttttggcactcttttttccctttggcattttccctttggcattctcttttttgcatttaattttggcacttatttatttttggcattcttttttccagcgcctctctgccccgtcttctgttggcacttctgctcggcaccggtcggcccggccttccctccctccaattggctttgtgccgtgacaatgccctcaactgtccgttgtttttgtcctactgccaacttccgc

SEQ ID NO: 72977 - DNA, 216 bp, Heterodera glycines
atgccaaagggaaaatgccaaagggaaaaaagagtgccaaaaacaaactcaaaccctccgccggatattaagtcgacggcaatgccatcgccgcctccgccggcgtttcgatctgtgcagcagtcccttctgccgacgcatgtgcaaacgccgggacaagtcggaggacattggtcaccgatgcaagctgaaaaaggcgaaggagagaatgagtaa

SEQ ID NO: 72978 - DNA, 444 bp, Heterodera glycines
atgccatcctcccactttgtacattttgctcagagtgttgtgccgtccaatgtcgaaaagtccaagcggcggctgcagcagcaggcggagcagcagttcggcactttctataatgtcatttgcggcaccggcttcttcagttatattgcgcacactgacgaattttggtgagttttaatttgcgctgactctgccaattttggtcatcttttgtgccaaaatttggccataattttcagtctgatggctgtccatgacatgaattgctatgtgttttcgcccgtctgcgcctcggggcaaatgccaacggaggaaaaagaaaaaaggaaaagcgcgagggtattcaacgctaacagcagcagaaggaggagacggagaaggagcacatgaacagcgaaacgaagctcaaaatgaagacgcaatttatgaatattattaaataaa

SEQ ID NO: 72979 - DNA, 1452 bp, Heterodera glycines
gcatcggaggaagaggcgcagaagaagaccacgacgactacatccgattcgacgaaaggaaagaaggaagagaagcccaccagaacatccgagacggacacggcagcgcagaagaagccaactgtgacgtcatcaaaggcatcggaggaagaggcgcagaaagaagaccacgacgactacatccgatccgacgaaaggaaagaaggaagagaagccggccaaaacatccgagacggacaaggcagcgcagaagaagaccacgacgactacatccgatgcgatgaaaggaaagaaggaagagaagccggccaaaacatccgaaagaaggacaaggcagcgcagaagaagaccacgacgactacatccgatccgacgaaaggaaagaaggaagagaagccggccaaaacatccgagacggacaaggcagcgcagaagaagccaactgtgacgtcaacaaaggcatcggaggaagaggcgcagaagaagaccacgacgactacatccgatccgacgaaaggaaagaaggaagagaagccggccaaaacatccgagacggacaaggcagcgcagaagaagccaactgtgacgtcaacaaaggcatcggaggaagaggcgcagaagaagaccacgacgactacatccgaagcgacgaaaggaaagaaggaagagaagcccgccaaaacatccgagacggacaaggcagcgcagaagaagaccacgacgactacatccgatccgacgaaaggaaagaaggaagagaagccggccaaaacatccgagacggacaaggcagcgcagaagaagaccacgacgactacatccgatccgacgaaaggaaagaaggaagagaagccggccaaaacatccgagacggacaaggcagcgcagaagaagccaactgtgacgtcaacaaaggcatcggaggaagaggcgcagaagaagaccacgacgactacatccgatccgacgaaaggaaagaaggaagagaagccggccaaaacatccgagacggacgcggcagcgcagaagaagccaactgtgacgtcaacaaaggcatcggaggaagaggcgcagaagaagaccacgacgactacatccgatccgacgaaaggaaagaaggaagagaagcccgccaaaacatccgagacggacgcggcagcgcagaagaagccaactgtgacgtcaacaaaggcatcggaggaagaggcgcagaagaagaccacgacgactacatccgatccgacgaaaggaaagaaggaagagaagccggccaaaacatccgagacggacaaggcagcgcagaagaagccaactgtgacgtcaacaaaggcatcggaggaagaggcgcagaagaagaccacgacgactacatccgatccgacgaaaggaaagaaggaagagaagcccgccaaaacatccgagacggacgaggcagcgcagaagaagacaact

SEQ ID NO: 72980 - DNA, 1513 bp, Heterodera glycines
atggtggctttcaccattattcctcatctgctgctcttcactgtcttcatgtccatcatcctggtgatcctctctcaatgttgcggctgtacgccttcaaagaagaagcaaactgcgacgtcaacgaaggcagcgaaggacgaagcgcataagaagaccacgacgactacatccgaagcgatgaaaggaaagaaggaagagaagccggccaaaacatccgagacggacaaggcagcgcagaagaagaccacgacgactacatccgaagcgatgaaaggaaagaaggaagagaagccggccaaaacatccgagacggacaaggcagcgcagaagaagaccacgacgactacatccgaagcgatgaaaggaaagaaggaagagaagccggccaaaacatccgagacggacaaggcagcgcagaagaagccaactgtgacgtcaacaaaggcatcggaggaagaggcgcagaagaagaccacgacgactacatccgatccgacgaaaggaaagaaggaagagaagcccgccaaaacatccgagacggacgcggcagtggagacggacgaacggagcaaatactttaagaagatgtgataaacccaccgtatatgtgatccgtattgtatatatattgtgttgtattgtacataattccaccgtaatgtgatcccatgtatattgtattataccaagataatcccatcggtatgtgatcagtattgtatatatattgtgttgtattgtacagaattccatcgtaatgtgatcccttgtatatgtgttgtattgtacagtaaacaaattaaaccaaatctgtttttcatttcttagggttgtatttttctgaggtttgtaagcttaaaaaaataagcactaaaatattcttaaaattagaaaaataagtaataattaaggctcgaaattatacggactaaaaaacatcaaatatggacaaaaaactttttggaaaattttgcctttcggttggctcgtccagcaaatgttgagttgagctaaacacacaaacaacaaattgaaaacatatttatttatctcaattaattaattaaaattgagagatttcgcactttaactttttgtaccatttgaaagctcttgacgagatttttgtatgaagtcgaaccgcgccatctaaaaaccgacaggcataaaccggtttttaaccgattcaaatcttatagtaccaattcagtaccaaacgtaattcctgatttttagattaagctcgtcaagagctttcaattggtaccaaatttgtctggactcagtcgtttaaaaaacagttcgagtgcgaaatctcttatttcgagtgccgataggcgccgccgggaaaatttttgaaaataagcactaaaatattcttaaaattggaaataagtaataattaaggctcgaaattatatagactaaaaaacatcattaggccccgccaattggtatttttgacagattttttacataacagatttcactcaaaaatcataattttaaa

SEQ ID NO: 72981 - DNA, 1153 bp, Heterodera glycines
atggacgaaaaaataaacaaaatatacaccgacccggccaatcccggtgggtttgcgggtgcgagtgcactctatgcagcggtcaagaagaagcacccaaaactgaagaggaccgactttgatgactttttgcagcggaacaccacctacacgctgtttaagccaaagagggagaagttccgacgccttcgcacagtccccggagggttcatgaccggtgagtttgtccacgttattttcacgtgatcggctcagacgttcaggcggacttggcagacttccaagccctttcgcgaaagaacagcggctatcggtacctgctgttggcggtggatgtgttgtcgcggcgtatgttcggctcacccgtaaagagtaagaggccggcggacgttaaaagggcatttgaggaggtgtttggccaaatgccaaaacttccggaaacactgtacacggaccgtgggctggagtttgtggccaaacccatgcaggagttcttcgctgaaaatggcattaagaaatacgagaccagctcaaagaagaaggcagccgtcgcagagagagccattcgtacgctgaagacccggctgtacaaatatttctctgccaaaaacacctctgcgtgggtggatgtgttgcccaagtttctgtctgcgataaacaattctgtgtgccgcgcaacgggacttaggccaaacgaaatcagtgacgtcaatgcgagagaggtgtggaagagggtctatggcgaaggacttgtaccagcggacaagagcccaaagatcaaagcgggggagactgtcagaatccccgagcccaagcacatattcgagaagggtaaagttactcctccattttttctgtattttttttttgtgtttaaggctatattcccaactattctgaccatgtgtacaccgttgatgcggctcgcgcaaccaaaccccagcactatttgctcaaggactattatggcacaaaaatgaatagaaagttttatttgccagagctaacaaaagtacaagtggacgaaaacacaatgtataggatcgagaaaaaatacaaagaacgaatgagggatggaaaaaaggaaatattggtgaaatttatcggatttccggaaaaatattgggtcacagatgaggattttgaaaaataa

SEQ ID NO: 72982 - DNA, 1608 bp, Heterodera glycines
atgttcaccaactaccccgtcggtcatccaaaggtcatccaaatggacaaggacgtcaactggactgcgaaggaacacattgtggacgacgacggcgtgaaaatggagggcatcatcaagtgcttcgttgtcccgcctcggcactgcctctacgacattccggtcatcccaatgcggcgtaacaacaggaccctcttcccactctgccggaaatgcgcggagatgtacccaaagggtctggtcgaccctgggtacaactgccctcactttgaggacgctgagaggggtaaccaatggctttattttccaatgattttatttttccttcgcaggattctcaacgaccatcccacacatcgagctcgaggcggcgctgcgatccggctacagagttacccatgtctaccgggcgtacgtctggccgctgtattgtgactggagtaacggcctcttcctctcctacctcaacaaattcctgcgcataaaatttgagggtagttttatcagcaatcaaaattaaattaatcaataatcatttagccaacggtttccctgctgactgtgccgcagatgacattgacgaggaggagagggagcgcagaaagcagcaatacatcaacaacccatggaagggctgtacggtgcggctcgacgccaacaacatcaagccaaatcccggcatgcggtacctttcgaagctgtgcctcaactcgctgtggggccgctttgcgttgcggaatcggctgacgaagacggaaatcatcgactgccacgccgaccttgcgaagcttctgaacgacgtcaaaatcgacatcagcagcatcgaccaactgacggagaaattctggatggtgtgctacaaggcgaaagatgagcacgtggtggagcacgacaccagcaacgtcgccattgccctatggactacggcagcggcccgtgtgcacttgctcaactcactgcaattggtctacaggcaggaaaatctggttcagcgctacgacacgcgcattttatacatggtaagagtgtgcaattaaaatgttcataataaaatattcgtttttcaggacaccgacagtatcttctatgacttcaagactgcactgggagacccgctgaagggtggcaaccagcttggggagctcgcggacgagtaccccaaccataccatcgtcgagttcatctgtggtaaggactttgtccaaaataatttgaataaatttctaatcgttttcagctggacccaaggcctacgccctttggcttcggaacaacgcaaccggcgaggacgagtacaagctgaagctgcgaggcatcacgctggactcgaacgcctgcacccgcatcaactttgagaagatgaaagaaatggtgctggagaagtggggcacgcccggcaaccatgtgcggttcgactaccctacgaagaacttccgcatcacgaagcagggcgacattctaactgtgccaatcaccaagcagttcaaccccaccgtgaataagggggtgctccgggaccgtggacttaaggttgtcccctttgggtatagctcatgggattactgtaaggcccataacccctacgattgtctctgtaagcgcgaataa

SEQ ID NO: 72983 - DNA, 543 bp, Heterodera glycines
atgaacaggttagtgttaagccacagattcactgacgacggctcaggaacaaagccactgaaagcccgccaacagccacagagatcaaacggatggtaacatcgcgtttgtcaaccatggagagccaacggatggtaacatcgcgattgtccatttctttggtcacagggaattcggagtacactggaaaaaaaaaatatttcatttttgttgtgtttgatgagactacacctttgtccgaagagatgttggcaaatcctccgccggagctgtccaaagatgctgctgatgactcgctgctgctggacgaagggcctgcaattatgaaaaaatcattttttgaattactttttaatttattctgttaattaggtaatttttttctaatatttaggcattttgcagtacgatcggaggcagaaatgtcctcgttgggagttgaggtgcgcactggcgtaccgcagtctgccattaataatgatttgattagttttagttagctatattataattaaaatataagaccaaataagagggaataaa

SEQ ID NO: 72984 - DNA, 697 bp, Heterodera glycines
  unsure (1)..(697): unsure at all n locations
atgccggtttccggaccggtttggcattttcaaaatgaccgttttccgggcccggcctctgaaaaaccggtcaaaccggaattttccctaaaaccgccggaccggtttccgggcccggtaaaaatcggtaccggatccggtccggctcggtctctacttttaaccataatttgaagctcaattgaaaatctagagaaaaatagcctattttgaacaattttggacattttcgtccattttattagcacaccgatgtgaattacgcagtaaaacgagtataaaaagcggtgaaaaagtgaaaaccgtccatttccatttcttctcctgtactgtgcagcgcagaacactgttcttgttccttcattcacactatgaggaaattctattatttcaagctgttccaagcggtcttggcatttgtcattgtttggcaaatcctttcgattgagaagctttgcgggaaatttgctgagccaaaggtgcacacattcatcatcagaccatcgcgaaccttacatttaattttgtactgatttactctccatgctttcagtgtttctatccaacggaagcttgcgacaacttcactatcttcaaacaaaacgcagaaaccactgaactcaacgcggacaatgaaacaaaatggatccagctgaacgacctcncgaccggcgagggctgtctcccatcaatgtga

SEQ ID NO: 72985 - DNA, 471 bp, Heterodera glycines
atggaagaagagataggtggtcctcagcgcagttcgactccaaaccaaaacagtgacggtgccatattaaaaaataataaaacagcataatgatgctttaacaatttcagacgcgccgtccctttctctcaatgacgacacaactccgagcttgaatggttcggggtcgttcctggatattacggccgacgaaagtaattagccagaatgaacttttacaaaaataaggaatttgccctttcagacttcaatcgcttgatcccggcgagcagccaattggagaagagagacattgccatcggcgttttgagcagccaattggacgttttgaacagccaactggagaaaaaagacatcgccatcggcgttttgaacagccaactggagaaaaaagacatcgccatcggcgttttgtcaattgctgtcgtcgggatgggcgctacaatcatttatctgttgaaccgtcgctga

SEQ ID NO: 72986 - DNA, 1812 bp, Heterodera glycines
atggaaatgcagcagttgcgaagccctccctcggcatttgtcagtggtggacaattcgagcacattcaccacgttcagtcatcctcttcaacctcttacgacttgtactatgatgatcaaggtttgatttgttgttgtgtatagccataaattaattagaatcgatgttagtggatacatttggcatttatagtgccgtaaatttgcgttttttgggctgtttgtgaggagccccgacttttgcgcctatgtccaaaatcgaattcaaatttgaattttttgaagccctgatagcctaaacagcattaaaattaagaaaatactgtcttctagttttttaggaacatcaattttgttgtttgaaaattttattatttttcaaaaattcattacatatcaaagatcggctacaatcacttttaatcccttttttatgctgtttaagtgatcatggactgaaaaaaactcaatttgaacccgattttggacaaaggtgcaaatgtcgggccgcataattggggggaccgcaaatgtcgggacacggtttgggatagagggaatacaaattaaaaacacaaatatccgaaactccaaaaatcgattttttgaatttattttttgcaaagaaatcaagtccgcccatttacagcagcaactcaacaatattcgatggtttctcggccaatgcattcgtcggcaatgaatttgggcggtgatggccaacccattcagcaacaactggaccaccaccaacaacaacaacaaatgtaccatcaacatggacacgcatcagccgaaacgcgaggatttgttagacgagtgacggcaccgacggcgaaaaccccatttgaagaagaggaggaggaggaggaagatgaggacgaagaggaggaggaaaaggaggtgcaaatgggaggaaatgaaaccaaagaggagatgggaggaggaggcggaagcattggacgacgcgcatccgcgggcagtgggagcggccgtgggagacggacaattctgctggacgacagtgcaccgcttcccctcccgccaacgatgacaaaagggggcaaaattgtgccggacaacaaacatccgcttcagcaggtttattattgtcaatgtcaaaggatatatgttgggagtggtcaaaatcggggaacattttgatgaattttcgttttttaaaatcctgagttaggtggtgcattataaaattgtttatccattttcaccaaaaaattactatttttggcatcttggtctccatttttaaaaatatgataaaatgggagtccggagatgccattaagcgccggcgtgaaatttttgagaattttaatgcaattttaagataattgcttaaaatttcaaaaactctacgcccttgtgttaaaagaagttcgactttgaaaaatttccagtcgcattacttctttcaatttttgttatttcaagtcgtcgaatcgtggtgccgcccttgacgaggagaacaagcagaaggtccgacgtcgtaagcaggaatttgaaaaatcgacaacagccaacaaaccaatcgttggcgaatcgccttcaaaaaccagcactgccacagcggtctttggaagtgccggaggagtgaaagtggaagtgaaatatgacgacggaacgactggcaacaaaaagggcacaaaaacgaaacagcagcagcaccaaagtgatgggacagcgccagtgattgaggagacatcgccaacaaccaaaaatttgatgcacgagcaattaattaatttaacaatccataattattcatttttgcatggcacattaaaggcttga

SEQ ID NO: 72987 - DNA, 306 bp, Heterodera glycines
atgcctcacattcgaaagctgggtgagaagttgtttcagcttggtcatgtcagactgtttcatggcacttttaagccacccattcatccgacgccatccctcaatggtgccaaggcgttgtgccgtttgagccacaatgaggcctttatcactgaaaagtgtgggcattattattattattgttcgatcatcagtcgaaaatttttgtttacagggaattttaacaaaagtgtgacggatctaaacaaatttttcgtcaatgtaatgccaaattttgactcggatataataataacatttttttga

SEQ ID NO: 72988 - DNA, 1114 bp, Heterodera glycines
atgcctcccggacacatgcagcggccgacgccacaaattccgctgcatcagcagcaaagtcagtaccgcggtggaatgatgggctcttccggcggtgcacaaatgggcaaattcggtagaggaatggaaaaccttttccgagtaagctaacggaaaaaataattgcataaatatggcttaattaatgttttaaaaaattttgagtggaaattggtgcccgttgacgacgtcatcactttggttgtttcgggcagcaaaagtcagtcgaagaacgtcgaagcgacgcgcattcgcggagtgatggaggccatttgtctgccagaaatgtgagttttgggtgaaacagtgattttatgccgaacatttgtgggaaaaccgtcgcagagaaaagcattggctgaattagtttttttatgtatttcgatgagctttacggggctttaaacttagaaatttttcaagaaaaaaacttcgaaagttttttcataggaaaattctatgaaaaaactttttcgaaaaatttaatggttaattactgttttttcaaaaaaaaatttccataaaatcgctcaaaatttcccgaaaaaacaataagaagaaaatgtctaagattttttcttgaaaaacttctatttgtaaatttaaaaaaaaattttcgacgggaaacgatgcggggaaatgaaccatacaaccgcggacaattatttatttgaaccaaaaaatagaatattgaaactaaaagttgaggaatttactctttttttattttctgtaaagacaaacgaaaactttttgaaatttcagcagtttaccaatatcggacattgacgagaatgactacaagcagcaccaaaatgagacgactgatcacatgccgaaaatcatcccccacgaaatgatcactggtcagtcgatttccactttgtttttgctgggaaaacagcccgttttcgccgacgcactttttagacatcggactctgaaattataagttgggtcccgagtgtccaaattggtgattttgtgaatttttggaaaatttttagtgcgagaactcttggacacggcgagtcaattttgggctccaagtataaatttcaattttttaaagcaa

SEQ ID NO: 72989 - DNA, 931 bp, Heterodera glycines
gcgaaaacgggctgttttcccagcaaaaacaaagtggaaatcgactgaccagtgatcatttcgtgggggatgattttcggcatgtgatcagtcgtctcattttggtgctgcttgtagtcattctcgtcaatgtccgatattggtaaactgctgaaatttcaaaaagttttcgtttgtctttacagaaaataaaaaaagagtaaattcctcaacttttagtttcaatattctattttttggttcaaataaataattgtccgcggttgtatggttcatttccccgcatcgtttcccgtcgaaaatttttttttaaatttacaaatagaagtttttcaagaaaaaatcttagacattttcttcttattgttttttcgggaaattttgagcgattttatggaaatttttttttgaaaaaacagtaattaaccattaaatttttcgaaaaagttttttcatagaattttcctatgaaaaaactttcgaagtttttttcttgaaaaatttctaagtttaaagccccgtaaagctcatcgaaatacataaaaaaactaattcagccaatgcttttctctgcgacggttttcccacaaatgttcggcataaaatcactgtttcacccaaaactcacatttctggcagacaaatggcctccatcactccgcgaatgcgcgtcgcttcgacgttcttcgactgacttttgctgcccgaaacaaccaaagtgatgacgtcgtcaacgggcaccaatttccactcaaaattttttaaaacattaattaagccatatttatgcaattattttttccgttagcttactcggaaaaggttttccattcctctaccgaatttgcccatttgtgcaccgccggaagagcccatcattccaccgcggtactgactttgctgctgatgcagcggaatttgtggcgtcggc

SEQ ID NO: 72990 - DNA, 1381 bp, Heterodera glycines
atgtcgagcagtttggtggatcggatgaagctgatgttgagcacgggcgaaggggcggacgttcactttttggttgggaaagaaaaggaggtgagttgaacccacaaaagttgattaatccagggttccgttctaaaattttcagcgcacggaggaaaagcagggattgtattcgtttttgccaaaaaaaaaccaaattttttgccattttctggtcaaattttagtaaaatgagtagggagtccaattatatggaaatccatatttttttcctggactgtgggaggcctgaaacgcacgaaaaacatgtttttagcttggtttgaagcttctaggaaggatttctatatcaatattttccatatttcgcgatttatgtccatattttggcattttggtccatattttggcatttttaaaaaaaaacctctattagaacggcccccagcagctaaattagcctttttgagcccaaaacccgaaaaatttttcaaaaaatcattttttcgccaaaatttctcgagaatatagaataaatttaaattttcttaaaaattaataaattatgtcaaaaataagcaaaaaagcgaaaatttcgcttttgttattgattttgcgctaaaaaaattaataaattttagcttttatgttttttttcttttaaaatgattgcacgtaattgccgaaaaaattcgagaccaatttccgaacgaaagccgtctttgtcaaagcgtcttaccgagtcaaaaaatttggaaatgtatctcatatgcaatttcaaccaataaatttgaagaaattttacattcaattttgaaaaatttatgtccatatttcgcgatttttgccattttatgtccatattttgcgatttttggtccatattttatggccatatttcgcgattttatatccatatttttggactccctaaaaatgagggtcagacggtgcttcgccgccagggaaatgtttataatttaattgaatctttatcctcattttttttttatttttgaactagttccatttctattccgagtttttttagctttttaaagcacacaaatgcgtgatgatgttcgcttctgctgtgtttgggtcgatgttccgttttgatgacaaaaactcaaagactaaaagtaaacaaaaaaaaataccgaaaatatttctaaaaataatttttcattattttttagcctctgccgactgtcctcacgtaattgaagtgaccgatgttgaagcagaagcgttcaaagtgatgttgagcttcatttatgcggaagatttaagcgaattgaacggacaaaatgccatggcagtgctttacgccggtgaaaatgtttaaaaaatattaatttttatttattaagcaaataaa

SEQ ID NO: 72991 - DNA, 2363 bp, Heterodera glycines
atgttgagcacagctgaggacgcggatgtgtactttttggtgggagaggaaaaggaggcgagttttgaaatttaaaacatttaattttcaaaaacctcaaaataaatcagggatatcggcctaataatgcgtaaatttgttatttttgatgcaaaatacaaatcgtataaattaaaaaaaatttcccatcgaccgctattatctttcaacaccatcgaccaaatcacctcctaaaattctcaaaaaaatattattctctgcttaccgcctgaggcttcaaacaaatttaattttaattgtttctctttttaagcttttgcctgcccataaacggattttggcagtgcgcttccgacgtatttgaggcaatgttccgttttgactcccaaaacggaaaagcggaaaatggtatgaaaaacggataataaaataataaataattatttttatttaatcttttaaacattagcctctgccgttagtcccattgttgtccctgatattgaagaagcagtgttccgagtgatgttcaacttcatttatgcgcaagactcaagcggactaaacggacacaacgcaatggcattgctttacgctggtgggataattaatttttttaatgggattattaatttcctttttgtgattaaattaaataaaatttcatgcattttttgtttagccaaaaagtacaacatttctggtctgatcaaagcttgcttggattatccaattggtcaattgtccaatgttttccttgccattgaccatgctcgttttctcagcgaacatgtaaagtttggcactgattttgaagaatttttttttgtaaatgaatttaatcccaatttaatttttttttaaattgccttttaaggattttgctcttcgctgcttggatttcattgaccgaaacgcgaaaattttattgcaatcggaggaatttgcacaaattgatcagaatttattgtgtgaaatactcgaaagtgatcagttgagaatcagcgatgagctcacaatttggaataatgtaataattaatgtttaaaaatagaataaaaattattgttcaaatcatttgactcatttaaggcactccgttgggccgacgaaaagtgccgtcaaaatgccatcgaatgttccgctgagaatcgccgttctgcgcttgggccggcacttttcaaaattcgtttccctctcatcacatatgaggaatttacacaaaatattggtaaatatggaagaatttaatttaatattatcgataattcatccaaaccttggtcaaaaaggccgctttaataagggggcgttttaaaatatttttttgttgttggaaaatgcccaaataagcaccaaaacgcacataaatcgcgaaatatgcatatggaaaacgtcctagaatcttcctaacaagctacgtttcatatgcctttcacagttcatgaagaaaatgcctgtgcatataattgaacgctctattcataatttaaaaaagtttttaattttttttggcagttccttctggcgttttaacatcagaggaatctgtcggcatttgtcagttccatttgcctgggcttttatctccggtggcatttccaaaccatgcacggatttccacgtggaataatacccccaagggaaacgcagggactctcgcgttggaaattacgaaattttctcgatttgcgcgaagggacgagggaaagtgccgacttagcaatggcaaagtgcacataaaggcacttccgtggaaaatatgtgccaaaataaatacgacgaaaaacgaaaatggcaccaccgaaaagtgtttgggctttttccttcagtgcaccgcgccaagggcaggtgggataatgataattaatggtgttttaattctaattaattattttttattttattaagacccgaaatggagttgcaaatgttcagcgacatttcgaatcatttctcaaaagcgcggcacggagcatttaattggaaaacgcaatgatcacatttttaacaacaaaatgaacattttgggtttctcaaattttattactttttctgtaagaaacaattaagagatgtctttttttataattgaccataattaaggaattgatggacccgagcagaggattttatgacaaagacggggacaaagtgacattggccatcgatgtcattgtgaaggaagaaaaagcggataaattggattattcaaatccaaacaaaacaaacgggaaaattgtgatggaaattggcaaattgactgagttttcgcgagagatttgtttgagtgaacggagcagcgaaatcaaacaaataaagggactttcgtggaagattggcactgataattaatcagaata

SEQ ID NO: 72992 - DNA, 730 bp, Heterodera glycines
atgctcaccgattgcccagcccttcgccatgttcatttctgtggcactttgttgcccgaatttccgcccgacgacagtgccaatgcgtcggatggccaagtggtgaccaaatggctgttcacgcctcatttcgacaatttgccgaaggcatttaacattgtgaagttaactgtggaccaatggacgacaattgtggaacaaatcaaagcggtgatttttgtccaattaattcgctttttaaatgttttgtcttttttaggccttttcttctgcttcttctcctgttaatttcggcatttctgttctgtttccgccgtcctcttcactttctgtcgttgtgccatttgaattgatcaacgaatttactcaagagaaattgacactgtccaaagaagacgaagatgaagaagaagcagaagatccaaaatatttttatctcatccgttctccaattgtgccggaagatcagaaaaagcagaagatcaatgaaatggggggccaatggaacaaaattgacatagtagccacagacgacgaattcatcaatcgatgaacaattgcatttaaatgttgttgtatttgatttttgcttacaaattcataaaagatgttaggctttaccacgcttagtaaattttaaaaaacgtacaggaaattgtttatttaattttttccttatcaagtcatacatatttttatgtttttgtgtgttttgatacctaaagactca

SEQ ID NO: 72993 - DNA, 228 bp, Heterodera glycines
atgtcttccgcctcctctttttcgccgacaaattccgctagtgaaaatagcacaattcgctttgccttgcccatcaatcaggcgaaacaactgctgcattgccttgaacagctccaaattgatggtggcagcgacggaggctgtgccggcaattcggatccattgaatgtgcatcagcaaagattgtccggcccattgttcggcttcaaaaagagcgcattttatttg

SEQ ID NO: 72994 - DNA, 3822 bp, Heterodera glycines
  unsure (1)..(3822): unsure at all n locations
acgcgtttcggtcgcgttccgacacttgggtaaacagaaganatatatatttaaccctgcggcgtttgnagaacatttcaaaaagtcccaaaatcaaaaccgataattgggaattggttagtctgaattcaaagaccgatcgctgactgaaattattggccaagactcttgggctcgggtaaaacattttggagaaacgtttctggggaacaatcatcaatcgatcggcgcccgggggaatgcgatttgttagaattttccgatgcgaattttaaaatttcattttcttttttaaacttaaggtggcactcgtccaaattgctcaggtctctctttctcctctccactcgcttttctcggccatttcctttcttttttctttgccttagggtctcgtccaagggttggcctatccggcaatgcatggtaataatatgttatcacttatcactaaatgtttttctcattttcttttgaggagtttggtgccattgggcgcctccgttggaacgctcaaagttggccaccacggctttcaccgggtacgaagtgaaactgaccgaaattcgaaatccccccacgggcttttcaggtcgtacgccggggctgtgtttgggctgccgttgagtgccttgttggtttcctacgtgcattggtaaggcattttttggcattcccaatcattgctaacaatatgcacttttttatttgccgttcccgcaggtcaatgcccttttacatttacggagttgccggcgtcatttggtccgttttttggttctcgatgactttcgaaaagccggcctttcacccaacgatcacagtgcaggaaaagcaatacattgaagcacaaattgggcccgtcaatcagtcacatccgacggtacattcacattcattttttaggtgggggggggaatggccaaaacgaagccgaaaggaccaccctcaagcacagattgaaaaaaagtagagagataccggacaagagagttggttgatattgtcaaaatgaccgagtgtgccaatctctaataattaaccaatcaaaagtgccaataatttggggtcagtgcggcacccacccgctgttcgactcgtctctgataaccgttcattttccgactttcccatgtcccccgacttgtccccgcttctgtttgccgctcccctaaaaatgcttctgacgtccctctcgccccgttcagttcggcaccataccatggcgtgccattctcacttccaagcccgtctgggccattatcgtggccaacttcgcgcgcagttggaacttctatttgttgctgcagaatcagctcacttacatgcgcgacgtgcttggcctgcgaatttcggacgtaaacaattacggattttaaggcttactgtacaggaattacgatttttgggtctcataatgacgattgtgatttgggttttttactcttgctaccatactcaccaagttgatactgtacttacttctcctttacaccattctaattttgcttggtttaaaaatgaatttctgttgatttttctgaagttgtcttcctcattttgtacttttcagagcggtctcatcgctgcgctgccccacgccgtgatggtctgttataaaaagaccaaaatcatcattaattgctattaaccaaattgattatgcattatgtaaccgtacttttctccctaattgtccacatttcccctcaagggctgtgtggttttaattggcggccgattggcggattatttgcgttccaacaaaatcctttccacaaccgccgtccgcaagctgttcaattgtgggggtaagcaaaaacatcttctgccgtggattctctacatagaattttggcttaggtttcggctgtgaagcgttgtttttgctgttcgtcgcttacaccaaaagtgagaggacagcgatgatcggtaagtgattgattggccagggtcaatcaacaacaaatttgcgtgaatatcttctgttttctcgctttcagcgatgatcatcgcggttggatgcaggtaaaaaatatgccgattgatcagggccaccggtccaattaggtatccggtccattcttataactaaaacctgatcaaacaaagtaaaatccgatctccgatttggccagtacaatttatcaatcgattgattgaagtggcaaatctgatttgaacatttcgagtaaacccaatcgactgattgtgcagacccatcggcctaaccaaatgattgtttaaagtcgattcgattgatcattgcccttgccattttgtgtgatcggtagcccctcggaattgggcaaattaattgcattcattttccatttcattttcagtggtttcgccatctccggtcggttgccgttctcgcttctgcatttatctttgtttgtccacaaaaactaaaaaatttctatgataggtttcaatgtcaatcatttggacattgcgccgcgttatgccgccattttaatgggcttttcgaacggaattggcactttggccggcctcacctgcccatttgtggtcgaatcactcacttccaaagggaatgccaacggatgggtcggttatcactaattaattacccaattaacgccatttgtttctctaaaattggcactttcatttcttcgtctatttacttctcccccctctttttaaaggtgactgtatttttgctggcctcactaatccacttcactggcatcactttttacgcggtgtacgcctcgggggaattgcaggtgggcgaaggggcggcgagggcaaatcgaatcgaagaacccggcaaaaggggaaatgctaatttgtccgggttttaccgttattgtttctggaaaagcacatttgtcactctccaaccaaaagtcaaacattggggcgtcgaggaaaacaattacaattaattagggcaaaaataggccgaaactgtccagacactttcgactacgtccaacattgagttaaatttaagttttcaatttttcttaattttaaagctatttaggccatcaaggcttgaaaaatttaaggtttgaacccaattttggactttggcacaaatgtcgagtaaccgcagtttttttgctagcgcattatttgctattttttataattaattagtcattttatcaattaggaatgggcggaaccaaagccaaatgaggaggaacaaacgctgcaatgggacgcgcaaaaggcggccgaagcgcgcgcattggaagcggcggcaaaacggggcgacacttacggcacaaacgaagcgacggcatttgcgccattgccccatctgacgacggggcaacaaccaccaatgaacagtgagtttcaagcaaaaggcactcactcactgatcagatcagcgaatgccatccaaaacataggacaaaacgtatgatcaacgaaggccggaattttgagaaattcggcgcgatcagactttctaaatcgggccgggacgaaatgccgtacattcacaattagaagcgttgagaaaatgaaattttagcaaaattctctgccgagttcatccccagtctctcccggcagaattccatttgttggtattgtgccaatgccaaagtccgaaaaggatagacaaaattcttgctttttgcctcctccacagattttcatcaatcgacggcacaaaaccaaaatggcggcaccgctgcaaccaatcccttcatgaccaattggggcgacgactttcaccacgctgggtgcagcagcggcaacaaaagtttcggcactgcttacggaggccagccgcagcagcacgcggtggacgacgactattaccagcagcaa

SEQ ID NO: 72995 - DNA, 1211 bp, Heterodera glycines
atgccaagcataattctctctttttgtggcattccgcaattcttcttcccttttgcaacttatccaatcaaggtcaaaggtgtggtggtgctgcgttttcggcaagtgcttccgtcgtccgctaggcactaaattatatttaataaagcagcgcttttgaggcctggaaaattcattaggtaattaaaatagcgaaatttcgaaacttaaggtattttttagttggcttaagaaagctaattactcgttaagaaaattattaatttttttctacctttcccttcgttgaaattttctgcttttcttttgatcaatcctctaaaaatgggcttaaaattactaaaaaaaattcgcttaaaacccaaaatttcgccattttaggcaaaacatctttctattaacaaattgaaacaaaatttaccaatttaatagtccaatggatgtatatgttctgggttcgccaatttggcactattatgacaaatcagcaccttctgctgatcattagttttgcccgaggcaaacgcggaccaatgaccaatcgatcgatcgatgcgtgcgatttgtgggcggagccaacagacgcccgcccccaaaaagcacagcagcagcgaaaagcacgagcacagaacagagcagagatacactaattgatgattagtgagtgagtgtgttagcaaaggagagagagagagaaagcacaacgaatgctaattgctaatgctaatgatgattgtccaatttgtccccatccttccctaatttactatcatcaatctatcagctcctctgagttttttgtctttaattatgaaaaatttaatttttttttatgaacttatcccttttctttaattatgtaaaacaacaattgtacgttttttttattggtcgacttttaaaataacttctaaattaattgattaaacaaatatattaaatttgtatttttaaaatttcttttccatagatattaattttttgcccatttttaatgcatttctttattcctttgttaatgattttttattttatgattcaatatcaaaacagcaaaactattaaaaaaaagaagaaagcccttttttcaaaagtgtagaattgttgatttgaattcctaaaattgccaaaattaattaattaatttttttttgaaaaaaaacaaatatacttccatgaatataatttcaaaaattatcaactataataaa

SEQ ID NO: 72996 - DNA, 853 bp, Heterodera glycines
atgacgggtgaaagcgcatatgaacttgttttgttggttaaaccagaagtatttatttacaaaattcctccactaacgggcaacaagggctacaagtttgtttgtttatttgtttttttccagtttaattttttgtagggcagccgattggaaattggacagtcccgactgggtgggaaggctcaggctaatttcaatcggcgacaagctcgagattcgacttgaggacaaaacttcaggtttttatcgatactgacaatgagcatcttttatgacccctggtataaggcattttatttgttaaggtgaactgtttgcgaaagcgccgattggtcagctgaactctgtcgactatgaatcggtatccgactcatcccgctattttgttgtccgactgcgcaacgacaacgcccagaccgcatttgttggcatcggcttcgctgaccgagctgactcatttgacttgaatgtggcgatccaagatcatttcaaagcggtgaaaaagtgcgacgattcggcggaggataacgcagaaactgtgcccaagttggacttgagcttcaaagagggacagaccatcacggtcaacattggggtcagttgaagtcggacaacgcatttaaatcttgcaaaattttgggattcgttttatcttaaaaaaaataatttaagaaatatgtaggtattccgaattggtttttcaccacaatcccctcaatttaagaagaaaacgatcacttccaacaacaacagtagcagtgctgtgcccaaccttcggacatcgctcggcggtagcagtgccgtgccgcttttgccaccaccgcctgcctctgggaataaaattcgaaaatga

SEQ ID NO: 72997 - DNA, 1420 bp, Heterodera glycines
  unsure (1)..(1420): unsure at all n locations
gatttntattgttctctgtggcaatgggcggagcaactgtcaccgcggtgacgaggctgaagaaggactaccaaaagctggtcagggacccagtcccttacgcaattgcagcaccgcttccgtccaacattttggagtggtacgtggcggacgtgaagtttaaaatgcaataatttgaacgagttttaggcattatgtcgtcaccggtgctcccgacacgccttacgaaggtaggcgcgaaaagacctgataaagaggtcgcggaatgtgtttctaaaatagaatttcaggtggttactaccatggcaagcttattttcccgcaggactttccctttcgcccgccggcaatttgtcagtttcggattttcgttattgtcatttgatgattcatttcatcatttttagacatgatcaccccgagcggtcgcttccaaactaacaccagactgtgcctttccatctcagactttcacccggtgagttcagcaggcgtgaaattaattgggtagaaaagcgacagggaattttgaaaatttaatagttttatatcccgtttataatattgcattaaagtaaccaccatcaccctgtcgtaaagtaggacatcttttgttataggacacgtggaatccgtcctggtccgtttccaccattattatgggtctgatctcattcatgaacgagaactcaccaacacttggcgcattggtcagcactgacgaggagaagcgcgtttttgccttgtaagactttcacaaaataattcttcaattgtcgtgtcaaataaatattaaaacattttctggcgttcccgtgagctcaaccttaaaaatgcccagttttgcgagctgttcgtcggcctggccgaccaaattcgggccgaattggaggcggaaagggccgccgcatcggacaacgccgaggggcaaactgcttccggagagtcgacgaccaaaaagtgaaataatcagtaaaaatgtagtttcttcttcattctcaaaaaagggaagagaccttcggtgatccccttacaaatgaatttttatctcgtttttaccagattttggccaacaaatttcatggtgacaatgaggatgtttgggcccaaattttaaaattttcaacgatcattagtgatctttcagtgcataacccagaagatttttagcgtaaattctaaaaaatgcattccgagggaaagttaaactgcaatattaccaaataaacatttaattgaaaaaaggttaaaacggaatttcaggaactctcgacacgactcttcctcactgactgccaatttgttaatggtacgttcgattcaatttataatttcgctcattttcattgttaaggtcgcgggtgttgtcatccttttcttcgccgttcgctacgttattctcaacgcgacgactgtatga

SEQ ID NO: 72998 - DNA, 1209 bp, Heterodera glycines
atggagcaatgccagagggactttcatgacgaaggtaaggaattctacgaaataacgtcacttcggctgtacgacatctgtagctgtattagatgcgaaaaacagtgccatttttggaaaattgggttccaaggggaatccgagtatttattggaacggatgtactcgagcatgtaattttattaatcttattttgaaaaaattgacataacattaaggctggcgagtcacttcttttactcctcgaagaaataaacaagcgcaccagaaatgaaggacacatagacatcactctggcacgaaaaatgtaatttttaaagttataaattattaaaatttctttcttaacattgggttataaatatataaatccttgttttaatgaaaaaataattaattatagtatgcttcgaaatacaaatggagctctaaaaatacatggttttgatgagaccacaaattgccgtgtcaacattgtaaggacatatatgtcttaaccctttttgtaacttgttttttattttaggatgacatttttccttagcgcctattgcaaaacgcaaaaagacaatggcattcgcgcaaaatgaacaatttggtctacaaacggccgagacattgcgacaaacggacgcccaactcttgacaacaaaacacgcattcagccccacagaaacttctgcagattcgctttttaaatctgtcgttgctgctgtaactgcgcaagcaccatcacatcaaccgtcaacctcgtcatcacagcaccaacaacatcaatcgcaactaccaacacaacaaaatttggcatctgcatcaataccacaaccaccgcaacaacaacagtcaatatcgataatacatccccaacaacaacttcaatcacaactactaacacaacaaagtttggtatctacatcaccgccatcaccaccaccacaacagccatcacatcagcatcatcaatgtcgcaacagcaaccatcacaaatacgccaacatcaaccgcggcaatttatcgatagtgaaggaaggctaacagcccatgtattcatagatgaggacgaagagacggaaacacagcaacaccaaaaccaacaatattcgcctatatctgacagtccattagagggtgtgccaccacccgacaacgataaccaaatcacaggcctaatgacttctattttaaatgtgttttttaaaaatcaataaa

SEQ ID NO: 72999 - DNA, 1725 bp, Heterodera glycines
atgccaaaaaagcagatggccattcgctccggtggtccgccaaagcaccgtagggttaaaaacgcacagaatttaaattaatttcattttaaaattattttcataaagttaaaaataaaatttatatttaagccttatttccaccaccagtagcagcagctgtgcaattggaagttggattggaaacaccacctccaccaccagcagcagcagcagcatcaacttttacaccgccgacaccaccaccatttcctactccatttcacaaacacttctcatttttaacaccgtcaccaccaccacctgcaacagttgatttggatcagattccacttcccccaacaccaccagcaacattttcattggatttttggctaccacccgcaccaccaccaccaccagcagcaacagttcatttggatatgaatcccacatcatcatcaaaggcggcagcagcagacgaaattgaacgtgaaaataggaaaaagcggcgaggcaatcggtggaacagcacacaggtcagattgggaatttattttttaaatttcaattcgattaaatttacttttttttatttttaactttgtattaggaattataaatttgtttttttttaaattgtaatgaaattatagaagcgccagactgtgcgcgtaaagaagggtggtgtgccggcaaaggtagtgccgcgccaccctgagccggacctctcggacgacgagtacgtcgtcaaggctattttggcctactgcgaggtcaaaagccgaggggtcaccagtaaatgctactacatagactgggccggtgagtcttccccccccccactgccctccaactgttttgattaaaaatttttaaagaccagcgtggtcaggagagctggattctgtccacatgcaacgacgcattagaaattaccggcgaacatctcgaggattcggctgtggatgccgcatacgacgcggtgtacggcgagccggtcgctgaccatctagcgagaaaaatcgtaatgagacccaaataccacgatcgtgagttttttttctcgacaaatttttaaaataatttaaattgtgaaattcagtccggcgtcgaatggtcggagtcaatgctgcaccgatttgccgtcagcactttgctttccacacttgtgtcacaaaggaccaatttgataaggtgggttgggggtctgctgctgtttgcctttgtctctctcgctctttcttatatttttctgggcattggttagcaggcatctcttggtatttgcccccttaccaatgctcttttctgtaaagtggagagcataaggcaggcatctcctggtatttgccccccttttgtttttcatttttcatcatttctctctctctctcatttttctgtgtattggtgtgcaggcatctcttggtatttgccccctcatcaatgctcgtttctggaaggtggagagcataaggcaggcatctcctggtatttgcccccttttgtttttcatcttttatttagtttttttgtctcgaaagtctgttgttttcaaagaaaatcattctaaaacttttataaaattaaggcggagcgcctttacaaagaattacttgtcagggaggggctcatcgaggatcccccctcccacggagctcaataaattggaggaaaggcgccttggaagcaacgtgcccacagtggccataattattaattattttcacctttacaatttta

SEQ ID NO: 73000 - DNA, 1498 bp, Heterodera glycines
atgctgaaagtgaaaccaacaattgtcagtctctgggacgacttggtcagtgtcgagcgcaaattgctcagtgtgttggaggtggcatttgtggagcggcaggaacgcatccgctcactgtgcacttcggcctccgatttgacgcctgggaatccgaacggcgtgcagcagcagcaattgtgggcaacgttggcatcacaacagacaatgggacaagggcaaatgccgaacaacggcagcaaccaccagcagcagggagcagggggaggcactcacttcgcttctcctctcctttccgtcgatgacagtggcattgacatggagagactgaggtgagacgagagcaggggtccatcatctgttctgagaatatctgatgaccgaacgataggcgaagagagagagagagagagagagaagcatagaacggaaaataggacccagacaagagaatggagacaaagggagagattattccccctccccgaaatttttcagaaaaaaaacctgatatatggggaggaggtggggaacagatatgggggggtaaaaaacccagtaaataaccgtttaccggtcgacttatgttaccgcctatttccggttttccggtaaaattttttaatgatttttgtaacaattttttattttagtattttcatttaaatttcatcacacacacttattttttctttattttaaaattttctacaaaaattattatttcataactttttgtatccaaatttataattcaatttacggatgtacatctttctcattaagtgatgatgatgaacccttacgtgaatggcttttgcgcatcggttgtgacgattattcgattgagctcttggagagagagcggtacacaaaaagggacattttggagtttgtcaccagagaggagctgatgaagttgggcattcggtaggtgactgtccgctaaacattctaatcgtttcaaaaacccaaatttgaatccctttgtcagtggtggcatcgcttgccgaatttggcgccacattctcagggctcggctggagagctcacaaaaggtgtgcaaattgaagttgtgttttgagaggatccaacgaattttcagttcaacggggacacagcgaacagaaaacagccgcgacaaaattacagcacgaattttgattggaagaacgactgatcagtttttgcattgtattcacacaaatccatttgtaattggtccccccaaatccatttgtaattggtccccccaaatccatttgtaagccggtgatctccgccccattcttttcattcattccatttccatttgttaatgtgatttattgggtttcaccactcactgatcttccctgttcaatcattccgttattctgtgattcgtcagtcaatttactcccatttttgtccatatcattttatcattcattattattctaagggatgtaaattataagtgagacatgtgtgtaaagcccacaaatatgtaaataaa

SEQ ID NO: 73001 - DNA, 2730 bp, Heterodera glycines
aggtgggcaggcagaggaggggagggggacactcggatgcaatggccaacaaagaaattcagttcgaatacgaagtcgacagcaacagggaacgcattgtgttgggccgtggcacttacggcaccgtaattactcatgatttgaatataaattagagactaatcgggtccaatactcgcaaatcagtcttgaaaaggaactccccaacaattacatacaataatgttccggcttttctcggttttcttccatgccgctgactcggcctccttttatgccattcaaatttggttactttggcattgtgccttttcaggtgtattcggcccgggacatcaccacacagcggtcgattgtggtgaaggaagtcgaagtgaagaatgaggaggaggttcagccgctgatggaggagattcagctgcactcgacgctctcccacgacaacatcgtcaaatacctcggctcgaaggtggagaaacgcgaggcgggctctttcttcctcattttcatggagcatgtgccggggggtgagaaaagcaaaatgccaaaatcaaaggcatttggactgaattggaacaaaatgacaggcagtttgagttcgctgatccgttccaaatggggtccgttggacaatgagcagacgatggcattttacgctcgtcaaattctggagggtctcaaatatttggtgggccattgcgcccgtccctttccatttgccacttttagcattctcaaaagattgttcaccgggacattaaaggggaaaatgttctggtcaaccaatactcggggctgtgcaaaatatccgactttggcacttgcaaacggcttgccggccttaacccggtcaccgacacgttcaaaggtcaattgaaaaagggtcagccattggacggaattactaccattttaattaattcaggcactctccaatacatggcaccggaagtgatcaccggcgggcaaagggtgcagcgaatttgatttgaccctttaccattttcacccaatttcagggatatggcccaccagctgacatttggagctttggtgctaattacaaaagtgacaatacttaattgattatcatttaggcgccactttgatcgaaatggtcacgggaaagccgccttttatcgaggtaattaattgctcattaatgaccaaagcactcgtttatcaacagcttggtcttccagaagcggctgtgtttaaaggtcagtcacttttgggtcatttcgccactctgaaattttaaatggttcatacggttgtccaccgttcagtcggaatgcaccgtattcacccgccaattccgacccatctcagtgagtcggcttccaatttcatcaaaaggtcattcctctgtctgtcttttttgtccaatcagttctttcttcagctgcttcaaccccgatcccgctgatcgttcgagtgctgccgaattgctgggcgaccctttcatccaacagtactacagtaatgcgtaagtcactccctttacagtatgcccagcccacaccttttgcatttcagcagccgaaatgcaaacacgaagaagagaattgaaagctcaacgacgggaggaggcggaaaacacacgagcagtgagtgcatgagagagtcaaaaggccaaatgggacggaggagggaccaccgatttggacattttgaaattccaatatttgctggcattcgaatgtgtgggattggtcctacccccccccccctccctatggcaatttgtctgatcaatgcgacttttgccttttccgatgccattgtcatgcccaagtgctgtttttctgttctctctttcgtgactgcgcgtttctttcagagttttttcgttctgcttctcatatgagtggcatgactgtctcttccgccttggccatcccttcggcgtgttcgtcttcttccatggccatcggtgagtgctccacggcacttctcttctcccattcattgtccattcagtggatttgccaaattcttctctggccactccgtccctctcctccgtccctcagcaaatacacgtcactccttccgtgtcaatgcgaaatcgaccgcccatggaacggtcggaccgtcggatgggcaatgagcgtaatttgaagttgcgcattgaaccttgtttgtcgatgccgtcctattgctgtcagtcgatggcatcggccgctgcgcgtaagtgaattcgctatttatttaagttcacaaatccctttcagtgattaatcccactgccacgtcctttgccccctcccccccgtgcccccaggggccgttctccgcttccccaaaagtccccacggttggctcctccattttgggctttgcttctgaccaaaatgtcggcgttgtgcatcagtgtgccaccgcacatcagctgagagccccgaaaccgtcaagtccactggcaatccctgtgcaattttcacaaccgaacaggtcgagcgaatggaaaagctaataatcatgtatttacacgataattacgtcactttttaactgtgtcatttccgcctcgttttctctaatttttatttccattttcaaatgccttaagtcccattcgcgaccaccaaacgccccacactgccagcccttccttcggctccgacaacgccccttttctcggcgtttccccctccacggctttgagcattcccgaagagaattcattctccaactttttcttcactctacagaaggagggcgagc

SEQ ID NO: 73002 - DNA, 965 bp, Heterodera glycines
aaacacgacgcatacaaagtggagacggtgagcaaagaatgtaataattaataaatgcccttttgttagccaatgatggataatcaaggaaaactctcggttcgactcttgaattgataaaccgaaacttttggattcgatttgcgtttctcgaggccattctcggccctgtaaattcattgaaatgtaaccgataccataacagatcggcgatgcttacatgatcgtcagcggagtgccgcgcgagaatggcaatgcgcacgtgcaacacattgccgaaattgcactcaaaatgcgaatggcaagtgatagtaaagcaaaaacattaggaaaagcatgctttatttaatacagaagcaaatcattatttaactcagtttgtgaccaatttcaaacttgcgcacaaaccggaagagattatgatggttcgcatcggttttcacagcggaccggtggccgcgggagtcgtaagagcattttcactggattttaaatgaccaacggcggcattttgacattaaaaacggaaaattccgtcggactttatttatttttaagcaagggacatattaacttcctaaaatttggcatgaataattgtcccatttcaaaggtcggtttggctgcgcctcgctactgtctgttcggtgacactgtaaatatggcgtcgagaatggtttttctccccacaaaaaaataaatttaaattataactaaaattatttttcttaggaatcgacgggaatggcaaataaaatacaggcatttttattttaaattttatacatttatttattatttgttttacattttatagatcagcgaaaattcgtacaatttgctcaagtgtttctacatccaattcgttgtggtcgaaaggggaaaagttgaaataaaagtgggtgagaagagaagacgagcgaaatgcgacgatggcattttaaaagcatttaattaaattaatt

SEQ ID NO: 73003 - DNA, 1286 bp, Heterodera glycines
atgaatcgcgcctttgggccgcttttccttctctttccgattcttttcacttcatttcccatttgcaattgtatgaatcgcgaaaatacacaaacagcagcaaaatcaaagaatatgaatgcaggcggaacgggttccgaacaatcggcacaaaaagagcttttgcgactgttaatgacaagcactgattacctccaattaacgcccggccaacaattttcaactttcaaatggcttacggacgacatcgcttcccggggtggcggcattacggaccaaaaacagttgtgtgctatgcttcatttgttacgacaatatgagcaaaacattcgatgggatgccgagcgagtagcattgttggaacggatgttagccgagccagaatattcggaactgtcacaggaagcacaatggcacatatacaaatcgctaaaggatggggcaccggcagtgccaaaccgtgccgaaaatggaggccaatctcaacagaggcagcagccatcactcagtggccaacccacaggttatggcaatggcattactaagtgattaattggaaagactaacaaaaggcaaattcagaaatcacaccgatggcaacaagtggagctgaatggttggcgcaaaatcaaaagacgaagaaacgggcaaagacatcgcaaccgaatttcgctagccaaaaacactcatctgacaaaggttggacaaacaattcaatcaatcaatacttacgatatgatcaattacaaagtaattagaatcagcagcagcaaatggtcctcaaaatgaaacggcaaacgatggaaagagaatcgaattaatgggacagctcatggctaacagggagttcttgcgcatgtcgccagacgagcagtggaccatttacagacagatgatagagaatagcaaaacggcagctgagggatggcattgaattaaatagggttcgagccccgtgggcgggggtggcttttcgcgggggcgggggtcagagtcgcgggggtgagaaatttctcgcccccggggacgggggtgggggtttgtttttaattagctccaaaaaacatcacaaaaaaatttttttttttttgaatgatgtgtttggctccacattcctttattcgatgtatcgcctcgattcaattcctttttggtataattgcacagatattgtctaaaaatgaccaaatttaaggattataaattatgccagaatagtcaatttttatgggtgtttttgtctaaatccagggtttctatttcaaaattttcaaaataagaataaa

SEQ ID NO: 73004 - DNA, 682 bp, Heterodera glycines
atgggcccttcgccgcctctccgatttgtgcgacggtccttctttacactgctcgttgtcctggtgctccttcagttgtttgtgttcgccgattgggttgacgatgtgatcgaagtaagtgcccgggagcttttctcgggtataaactcgagaccaatgagactttcaaaagtgttggcacttttctccattttaatcaccaaaaatccaatcccttgggatgtaaaaatctctgtttcgagaccaagactctcgagctgcagaagtgggccgatcttgtcaagtcttgctgtgtttctttagattgtaaaccaaaaaatggccccatggcacgccctgttagagaaatatgagcgcgcattggccacaatggaatccgaggaacgcgaactgagccgaattaagcaggcaaatggaggggggaagtaaagcttacaatgatgaaggcattcacaggtctgaggcctatgtgagcccaatatggcatttccactcaaacacaaaaatttatccctaaaaaaaaagttttggccaaatgaccccggagcatttaattgtaatgcaattggatttaaagttgcagataattgagaagaaaattgagatgcatcaaaagaagttgaagaagctgatgctgaaggtggtcggaaacgcaacttttgtgagcaaaaagcgcaattag

SEQ ID NO: 73005 - DNA, 2402 bp, Heterodera glycines
atgagacaatggaatgtcgaacatattgagggtcaatcaaatccggcagacgttgcctctcgtggcacaagtccggaagatttacaaaccaatgaattatggtggaaaggaccgccgtttataagtctaaaaaatacacagtggccacaaacaatcagagaatttgatccaaatgtatgggcagatcaaaatcaagaggtcactgtttgtgaactggcgaatccggcaagggaaagaaaccaaaggaaattgggttcctttctcacagtttatgtgaaccacttctcaaagtggaagaggattagaaatacagtggcgtatattaggcgaatttacaaggggcctcttcaatttgtacaacaaattgagccaattcaggaacgcaaattgctcaaggcaagaagtgaaactataaaaagaattaagcctctcacggcgattgaattaagagaggctgaggaagtaattatcaaagagatgcaagagaattttcctccagatgaaaataccaggaggaatttacaaatgttcacagacgataatggtatattgaggtgtaaaggaagaattgaagaaggagggtttgattatgatacagtaaatcctatttatctgtctcatcagataccgattcttgatttgcttatttctgacgcacatttggaaacagaacatggtcgaaaatctcagactctcaattatctgaggaagaaattctggattccaaaatgcagaagaatgattacgatggtcattaagaaaaatccatatacaaaatgtgggatttgtgcaaaattagaagccaaggctttcagttatccaaatcctccccccttaccaattcatcgagttaaagggtcaagtgcctttgaaacaattggcttagactattttggtccaataacaataaaggtcaatgaagaaacgcaaaaggtttggggagcaatatttgtgtgtacagtcacacgtgccatacatttagagatagtgacagattgtacggcacaaaaattcttattggctttagagagattcatgaggcgtagaagagtaccaaaaatgataatttctgacaatgctagccaatttgttctttctcataagatattggctaaaattactgaagcacattggagaaaaaataaggtttggggtcaaattcagaccagacaaagggaattagaagaaaagagaaatggtcaatgatcatgaacgaaagagaggtacaagaacttacagcaaataagggtatcacatggcaatttgcctctccattagcgccttggcgctcgggattttttgagcgactaatcggtctagtcaaacaccatttatacagagggttaggtaaaaaattattggattatgaagaattattgacttatcttatccaagtagaaaggatagtcaatgagagaccaattacatacattgagaatgatgaaattatggagcccttgtgcccaatacatattctcaatgcatcagaaggagaaccatttgagtatcagagtgacactaatgaaacagagaatacagacgatttagattcacaaattaaccaaacaaaaagggatgaactcctcgaagttcacaagaaaacaatgtataagagtaccaaattttgggaagtctttagggatgactatttattggcattaagggaacaagaaaaggccaaaaatgtggatgaacaaaggtttccaaaaataggacaagtggtactaatcaatgaccaaaaaccgtgtccccggaataaatggaaattagataaaatagaaagtataatcaataaccgaactgccaaattaaaaatgcccgacggaaaaataatggaaaggtcaacgattttattatacccactggaaatagagaccctcgagtctgaccctaatcccattaatgaaatttcagcgttaacaatggaagacacggttagcctagccagcatggaggaagagtggtacgaaattgatgaagtacaaccgaccgaacaacccagttcaacaacgacaccaacggcactgtttgaggacgacatttaccatgacgacgaaccggcggtgaaggtcatcaaagccccaattttgatattggggcaaggggaagaggacggtggtgtgctccgtaattgtctcatcaacgcggatgcacggcaattttgtcattttcccgaagaatgggacgcacaccttttctcgaaagaattgcaaattgaaagcgtgcagtcgatcattgtgtggcgaaagggagcaactttggatgatttgggattcttgcaaacccttctcactgcccaacagctgtacaacgacagattgttgttttggattttggatgctaaagtttcaactcaaaggggatctctcaagatccaagttggagttggaaacagggatgca

SEQ ID NO: 73006 - DNA, 1324 bp, Heterodera glycines
atgaaaattgcaccttataaaaatattcgttgcgaacaaactggcaatggagcgaacgaagaactcgaaaattttatggacacaatttcggatatcgttgttggtgagaacatcacaatcgattcggtaagtcaactaccagtttttgtgaaagtgcaattcgttttttggcaaactcaacaagggaaaattctacagtaatattaaaatattatttaaaaattggccttcaaaaaaggcgaattcttcaattttagcaaaattttatagaaaattagattttgggatggaaaaaatataatttgttaatagattgtcactaaaaatagttaaaaatttttgtgatttttaagtcaggcggtgatttttaattatttaaaaaatcatcttttgcgaagcattttttcacaaatctttatgaacagtgttgtgccgccgcgagaaaaactttaattctttacattaaactccatttttaggcaaataccaacggagaacaccaggaaagtgaaatggaccatgcctggagaccaaaccaaaacatcgttctgcacgacgaattccaaaatgctttggcattaaacatggacgtggaaaacaataaccttgaggaagaaaattcggaaaggtaacctcagttaaattaaaatatctggcgaatgattttttatttgggtctggattcaaaaatttttcaaatccaaaaattagattttgtggtcaaaaatttaacattttttgcgattttttctttgatcaaaaaatgatcaattgttattttttttttcacatgcaaaagtaatagtaattcttatttacacgccgccattttttacttaaaaatgatattaatcaccaattttagcatgggtgatcatcactcattcgctaattctgtccaaaatggtcagcaaggtgcatttcgattgccaccaattgaaatatttattgacggatcacttccggaaaaaacggtaaagatgcgcgaaaacatttcaagtcttggggcttaagtttttgcttttcggatgaaaataagggttattttaatcaaagtgccgtttttaagccgcgcattggcagcattcaaggcatcaataatccggccattcgcagtttggatcattgtgggggcgtcaagcgcatttccggcctgatctacgaagagaatcgcacagtgccaattgtcagggagaatgagccgacatttaatgaagaaatagggccacaagatggcaatgtgtccgagttatccgtatgtgcgacggacaaaagcagccacgggagggcacctcggttagaactgattggttctgacgtttaa

SEQ ID NO: 73007 - DNA, 626 bp, Heterodera glycines
atgtggaagctgccaaacgcgaaagaaaacaaatcggaattgcaaaaattttttgggggtgggcataacggaccaacagtgaggaaacgatgcacggcaatggcatgaattcaatgcatttttcgtggcacattcgatgacagagtcggcactttgatgctcagcgatggcattggtgctgccaaacacgaccacatcaacgcttaactgaccagaaatggtggcatttgcgcgaagacatgcttttacctgaaattgaccgaaatttacaacttttatcaacttctaatcagcaaactgtttttgcaccaaaattcttcaaaatttccaaaaacaaagcatcaaatattcgaaaataaaacttccgatcttgctgtaatgatttaagttcaatcattccagtctgtccaatgtgctgtcgtcttggctccatggtccggccgtttccatttgacattttatgaggacatggacgatcgggagtagagaatcaagcgacgtgactcttttaaaattcggagatgaattatttttgataaaattccatttcataggggtgtatttttctgaaaatttttggatcgattcttaggagtgtatttttcgtttttattacatttttgtta

SEQ ID NO: 73008 - DNA, 1275 bp, Heterodera glycines
atggtcaaccgatttggttttgtgcccgccggcggacgcatttattacaacaaacggtcgcagccgccattcctcaccccgtagggcaaatttgaatgaaatttggttgaaatttccaactttcagtttggtctatgaatactttggtgcaactggtgacattgaatttcttaaggaaataatgccaacgcttgaaaaggtgttcccattcattagcataatttatcaattaattaactgataattaataaataattttaaaaaacaaaaaaatgttttctttatcaataaactaaaaataaataaattattaaagaagttataagtaatgaaataaattagagacaattatcagggtttcgaggtttttatattttatgcgttatgcaaaaccgaccgaaataataaaaaattgcctacctttgttcaaaagcaaccaaatttttaattcttcatatctttcggtagtccaaaatgttttctattagcctaccaaattttaaaataaaattcattatgtttcaaaacttatggccaataatgttcgaaaaaattgtttttgagttctattgactttttttggaaaactaaagtaaattttttgaaatttttcaggctaatagaaacacttagagagagctattgtatgacatcaagaattaaaaatatgattacttttgggcaaacttatgaataatttgaatatttttttcaaaaattttatttggtagttttttgagtaatggaccaagcgcccaagataacttaccattaattaattaactaattcattaaaccacctaaagcaattaattataattaattagttcattaaaaaaaattaattacgtataattttaaggaattattattttggcaaacaaagcgatcggttaaagtaaaagtgaagggaacgatgaaaatgttctatcagtacagagcggacacaaaagtttgtagcgtaaacaaaaatgaaatttttaaaatttttacaataaatttaaagttaccacgccctgaggcattttgccaagacgtgggcctcgtgaaaaacatttctgatccgatggaaaaggcgaagatttggcacgaaattgcgtcggcatccgaatcgggatgggatttcagttgtgagaaggaaaagaggggcaaaatgaatacaatttatttattattttaaaacccgttttaatagtaagaaattaatttaaataatttttattcgttttttaaaaagcgatttttatcttttacgaaaattatcaaaaatttaaa

SEQ ID NO: 73009 - DNA, 691 bp, Heterodera glycines
atgttcccgggcgaacatttcccaccgtttttgtacggtggctgctatttgacaactccaagcaccatcaaagccgtcttggaacaagctcacaaaaccaacagcttttatttggaggacgtgctgtacacgggcattttggccgagttggccaatgtcaccgtatcggaccaattgagccatttttatgggaatggattgcaggtaattaataatcattgggcataataaacaattaataaaaattcttgaaatgttgatagccccttggtttttcaaaatttaaaaatgtttgtcatatattgaatatccatttcttaattattaaatttaaaaaatataactaaattgtaaaatttaaagttatttatataataagtagggttcaaagttgtatgccctaaaaaaagcaaaatatgcgcataaaatatgcgctaaaaatcccccaaatatgccctaaaaacccgaaaaatgcccaaatatgcactaaaatatgccttaaaaaactgcaaaaaatggcttttaaccttaaaaaacgccaaaaattgtgtataattaagaattgatttttaaaacaccaaaacaagggataaggagcattttattttacttacaattgcaaaaatgtgaatttacaaatttataaatttttatatattctaaaacaaatttacatttctatataaataaa

SEQ ID NO: 73010 - DNA, 708 bp, Heterodera glycines
atggtccgcttcattcgattggagctgaacctgacagaacttgtccgacgaatgaatctgatcggctatggacgggacgaaattatgctgatcactctgcactcggctgatcagcttaacgcgccggacggatacacgcagacatgcttcaaccaaaaaaaggcagtgcccacaaaacatttgacgaggttcgcattctcatttggatccctcacagtctcgaaaaaaatgcttaacatgaccccattaccaagctttcaggcagactttgtgggctccggatacttcctgtccctctgcccattttcggcatggcatttgcatttttggcgtcgaagatttggcccgactcgccgcattccctcattttttcttcaacagattttggcccgcattcgattttggcgctttgttgtgtgtgtacgaacggttgttcaacatgacccatttgcacacctgcggggaacaattggccaaaatggcactggtggtgaacaaatcgtttgttcaacaactgcccaatgtccgttaattggcaaaatattaaaggaaactcaaaaaggataatttcataattttttagcttttttttaaatccacaaaattaaaattgttgttgtccttttttaattaagtaatttatttaaccaatccgttgaactttttaaggttcgatttcaaagttttaagaggaaaatactgaataaa

SEQ ID NO: 73011 - DNA, 240 bp, Heterodera glycines
atttgccaatacttagagcatggtcatctcttgcatttggcaaatgtttgccctgctcattccaatggcacacatcgtcaacagtggacaaattagctacaacttccaaattcatttccggcactttggcctggatgcatgggctcagtttgaaaagccttgcgctaatggcaccaagttgctcatattgacaatgtcgcgccgggaaggcttcgacagcagaaagggcatccgaaactt

SEQ ID NO: 73012 - DNA, 1346 bp, Heterodera glycines
atgccggcactgacaacgccaatgaatggcactgctaaaggacaacaacgaaacttttggcttcctaatgagctcatctatgagctgctcctatgggtccggcccagctatttttggcgcgttcggcaaatgcttacaaccagtctcattctgtgtcgtttgcttacgggtggcaaacatgcaattacttggcatgagccttacgatgtttgggtaatgcgtgaaagtgtttttaaaaatatataatggaaaatgtccatttacttttgtgcaattgagatcttatttttctttttgaactaaatttggttgagaaaatcgtagatcaaacaattgaaataggctttcttcaagtttaaacttctttttttcaaaaataagttagcttatcttgcttagatctctgatgattgtatttctccttattctctgtcttatcattcatttgcttattgcctagcgcacgcattatgcgctgttaaatgcgggacaaagcgttctcttcacatggctttagctttattaattaccttttttaatattaaaattaaactatcattttcaacttaaatttggtaaaattgctccaaaattgatataaaaatataaatattaataaataatttatggtttttccatccagcatttggagtccacattctcagaccgtaaatttggaccaacaaaagtctgtgcgtatttgtgccgtaatcattcattgctgttgccgcgcaatttcctcaattatttacattgttcggaggactatgtcacgctttatgttctcattgttttggatagttccaagttttcgtcgcttgctcaactcgctctcgcggtgggtaaagtttaaaataaaaggaatattattaatttatgtatttagtttattatacaaatatacaaaaaatataaattgctttaaatggcacaatttattttttatatcagctaaataatttgcatttttgtttttcagcgccagggttttgacggtcgtggaccatgccgcgacactggactttgtgagagcgggtcttttgtttactgcccggacgaagtacgttaattttacaattcttaatttaattggtattaaatttgtttaaattctcttaaactagtttaaattctcgcgagtaaagctttctgcattttttaaatgacctcctaaacgtggttggcgccacctcacaaaaagtgcaaatttcggcgcttcacaaaaatgtgcaaatatcctatttttcctatgattttttatcgattttttattttaatttaaatttaattaaactatttaaattagtacttaaattttttcttctatatgttatgttgtatttcga

SEQ ID NO: 73013 - DNA, 280 bp, Heterodera glycines
atggatgagcaaaaataccgaaaaaaagtgaagaaaatggtgaccatgatgatgatgaccgcgaagcaattcaatatctgccaactttggcaaactgtatgtttttaccagggacggtttagtgcctattttgcgatttttttatgccttattaggtgcctatttcgcgattttttgtgcctaaaaaaggaacccctaataattataaataaacaaaaaaaaatgtaaaatttgaataatttaaaaataataatttcagatagcaagtttgtgaaataaa

SEQ ID NO: 73014 - DNA, 2379 bp, Heterodera glycines
atggacatcttagatgtcggcccaagccaatcgaacaaaaaatatatttgtgtgatcgttgatcatttcacaaaatatttggtcgcagaaccaattcctgataagtcggcagaatcagtggcaaaagtttttgtcgaaaaattcattttggtttatggcaccccacaaaagatccattcggacagaggaaaggaatttttgaatgcgacaatggaagaaatttcaaaagttttggacataaaaaggtccttcacagcggggtatgaccctcaggccaatggattggccgaaagaataaacagaattatcatcggaattctgaaaaagtcgaccgcgagcaattggacttgggatgagagattggcgtatggcgtttttgcctataacattacaccgtcaaatgttacggggtactcaccctttttgttaatgtttggccggaatgcaaaatttccgctcgataaacacgtaccatttccggttaatcctgtttacacgatagattccggaaaatacattcaattgttccgggaaaatttgctaaacatgttggaagaagcccagaaaaattcggaagaagcgagggaacagtcgaaaatttggtatgattcccgaccaaaagtcacggccaacaagttccaaaaaggagagaaagttatggtcgtctttcctggtcaaaatcgtcgttcgcctcacaaaaagttactttggtcacattttggaccatatttgatcacagaaattggtgattcatcggcaaatttggtaccaatagacaaaaaggaggtcaccccaataaaagtgccgattgaacgattggttaaggtcccaaaaggcgtcccagacatttcgacactgcctaaagggaaaaatccgtttaaaaacgacctaaaattgttgtcaatgtacgcaggaattcgttcagaaatttgcgaaatgactggaaataagtgccgcgaaattgggggaaaaagcgaatcgcaattggggacaattgcttcagattgtttggggggaaattggaaaagcgactccttttcagagccaatggatgtcggaagtgtcagtgccggatttggatggacttcggagtgcagtggaggcggctcggggcacgagctgtgcgagaaaatcacgctgggaagtatcgacccggtcctgaacatgtcgaatctgggatcggcggtagtcaaaacaccgcttcaagcccttctcagcatctttctgctccgaacgggcgtggcttcttcgctcacggcagcccaaactttggtccagacaattgttggagcagaaccgaagctggagttgtgtatgtacacagggaaaaggggggaccaaatcagcaccggcaaatacccaacggaggaggaccaacggcaggctttggagaagtgggtcggatcgtgctttgtggctcgacaggctttaaccgagtcgggatataagcccttgtcgatgcaaatgccagagggagtcaattcgctgcccgattctgagaaaaacaaatggcacgaggtcttcaaagacagttcatgggcactcgaacgtgtgcgggccacgattgtgcataaagcgagccgctttttggcacatgaccgtgttctgctcggagactcatcggccgaaatgctcgccaaacacatcaacagctcctactgcatcggaggagagagttccatggccgacttaatccgccaatttcagccgatcgttttgtcaagccgtgtcaaggcactgctcattttggctggacgtgattctctgatgcagggcgaaaccgaaaaatcgatcgcggcccaattcgaaatgatcgtcagcctgtgccagcgcttcccgcacgtgcagatattttggtgccctccaccgtatgtgcacgccaaggcaacggaatgcgaggagctgatcacgaaaatgcacgccatcatcaccaaatcgccgatcactccaattttcaccaccgacaaaggccgatcagttttggaaattttccgattcggggaaaatttcaacaaacacactgtttccgaagaggggaaaatgtgtaataatggctgcaaaatgcttaaggcctggattttctcccagacgaaattcccgggcgatcaggatttgaaaattcggaccgtcaattctgcagttgtctctacgagtaatcgagccgattctcgtatgaacccgacggttgttgtggccccgaatgttaccgcaagagatcgagtcgatccttgtcggattggaccgttcccgccccaaaatcgccgtggcacttcgactcgccatcatccgtatgctggacaatggcgcaacaccaatcgctatggaccgccgatgaatcgtcgttccgatccgtccgactctcgcccttttcgccgttga

SEQ ID NO: 73015 - DNA, 2596 bp, Heterodera glycines
atgggccaaaaagtgcgactgaattcggttggcgaggaaatttgctacgacgaattggtgggcaacgcatctgatgttagcaacttttttgtgtaaatataatttttgtcttttagggctcatttactttcaacccaattcaatcggttttcgaaaatgaaaccgaaatggaattcactccgacgcagaattatgacttaggtaagaaggtcaaaaaaagactgttcaccaccaactttgtcatgtcagattatctccgttcccttccctcgatggtggtcaatggcctcttcccccttctgcactttgccaagcggttgctgaagtccaagcaaccggaagtgatcgaaggcatcacgcggcctcgccatttggtcaaggagtttcaggtgagcagcagcggagggacgagacgcatttgtgtactgtgacatcgctttccttccaaatttacgcttaacaaataccaaaattatttaaaaacgatcaaatgatggtaaggtgtgcttgcctttggcattttaaaaatccaaaaattgattttttttttttcctgatggaaaactaaaaaaatgccgggactcaattttatttgtgtttttggaattgttacaattatttgatccaatttttcggtaaaaacttcatccctttaggcgctcctaggcaaaatcaacgaggttggcctcgtgtgcgtgcagctcgaggtgcaatttgcgccgaagtttcgctgtgaaagtgccgaattcactgtgccggcgccgatggagccgcccgttactttggtaacaaaattgcattaaaagcatttaattaagtattatacaccagggatggcacggaattccgatttccgacgtttttggggtcggaattccgatttccgaaaatttttggacccccggaattccgaaaattttttaggcctcggaatgccatccctgttatacacactcattttaaatttagtcagtgaaacagccaccgaaggatgacaaaagaaaaagtttgcgtttattttaacaattttgttttaatttgtttgtttccagtgaaaagacacggagcggttgaggaaacagtgcagaaaaagacactcaaaagtttgttgttacattttttagaaaaattatatattttcccaaaatattaccattttggaggttttttttgatatcatggtttcgaaaaacttcaaaacttgggacgggcacacttgaagaaccaaccaaatatcgctttttctacgacaattcccgcatttccagagaagaatgccggcactccgttgacgcccgcgaatggccctattttggtcgggggtttgccattgtccacgcatttgcacacgccctcgtcgtccggcagcttcaacccaatgggcgaaattgtgaagctcggacagaagccgatgcagtcggcgtggcgaaaggcctcaaatgtaagacggggaaaatgggggggggggggcgggggcaccccaatttaacttgatcgttttcggaaagaaattcaatgatatgaattttgttttttacaaaattcagtatgagttggttcggctcccccaatttgtttaaaaatgcactaataatttaacttaattagatggcaaaaccgccacccccgacgcacattcatcagctgaaaaagcgctttgattattcttcaacaaccaccaacaacaacaccatggatggtggtggacatcacaacgaagcggacaatgcgtttgacgaattcgcaacacaacaaaaggggacggaggagggcggcgccggacagcaaaacgcgaccgttgctgacgacgcggcgttcacgacacagtccacgtcatccttcgggacgttttgcaaagagcgcaaaatgggcagccaaagtgatgggggaaatgggacatttgcattcactaattgtcatgcatttgggttaaggaccccaccgaaagtcaataccgaaggtggcgcacaacaaactcatcgaaatccatgacgattcgcccgaattttcgcatcgatcgccactccaacgcctccgtggccaagaaacaaagacggccgcccacaatcagtttggcacaaattcatttcatcaaaggccggtgtcacacgcgtttacaccgtcgaacaacaacaggagcaacaaccaatggaataacggcaactttggagggaatagccactggaacaatggcaaatctgccaatggaacagcagcaaatttggcggagacgaccaatggaacaacggcaaatttgggggggacgacccatggaacagcggcaacaatcagtggggcagcggaggtttcggtggccaacaaccgtaccaaccgccaccgtcggaacccaccagcagcaccttcagcgaattcaagggcacatcacgaaacgacacgtttggggggaacaacaaccaatggaacaccagcaacaatcagtggggcagccgagggttcggtgaccaaccaccacccagccgaggagggttcagtaaccaaccagcaccgtaccagcagccacagcaacccatcagcagcaccgtcaacgaattgcatcacatttctcaaatgtttgttggctaccaataagatttga

SEQ ID NO: 73016 - DNA, 1407 bp, Heterodera glycines
atgaaaatttcttcgctggctacaaacttttccattgaaaatttgctgtccaagccgcacacatcaccaaccccaccaccaaatgcttctgacactgctccccccattgtgccaatgccaatgttcctcccattccctgcggccatgccaacaccagaaacagtgcctgcggcaacaatttttccgccgccatcttcaatgttgtggccagtgcatggctggcagtttttcacgcctattgccactgcgcctggcacaaaggtgtggtttaattattagttttagctaacatttaattcttacaaatttgcaattcattttgaatatattgaggcaaaagatcatcattaagactaattaggatggacttaattagagaggggtgggggcagcataaatgggctcgccctattcaaacacaacggtacttttttatggaggaatacggtatttcatgggcaaatctttaaaattatactgaatatgtctgaattgatatgattagagaagttttattggtttgattagattatagagcagaaacagtccgtttatattttgtttttaatcgaaaaacagattaagaagttttcagtttttcagcattttaatccgaataaatcccttgcccgtctctagatcatataaatttaaacaggagattaaggaactcaaaatgactttcttttcaaataaaaaatcaaatttttaagcaaaatgtcaaaacgatgacgactccgccaagttcaagcagtacaacaacgggcacagcaccaactgccagcaatgacaataaccaccatcaacagcagcaaaaattgacagcagcagcaacagcttcagaaatggacagaaaaactgggaatgagcaaatgccaaagctggcaccgaaaatgccaacaaatccaaacaatgcacatggtgatgatgatcatcatgatgataaagaggaccatcatcatcatcttggaaaaataccgtccaacaacagcgcattttcaagcctaaagaaagcttgctcggctactgtagcgactcaattttacggtaattctaaaatgctattttaattttcttatattaaatttttaactctgtttaaaactattgaataacgaacggtttttaaaaatgatttaagaagattactataattgacccgtatttttaaattggatcggttactgtgttttttcgtttttgtaattcaattttttcgaaattcaatttaaatttaaaattttctatccaccaaatgataaaatttcaaaaaaattctccgaccgtaatgctttccacaacatccaggagaaattttcaaaaaaaaaagaaacgtcaatttgggttcggcaaaatcaattttttccatttccgtcatcccatcgaattactgtgttttgtaataaa

SEQ ID NO: 73017 - DNA, 438 bp, Heterodera glycines
atgatcggagagattggaaagtgccacagaaaaatgcctttcttttgtcaggtgagcccgaaattgagtgcggaccgggcattgtgcgctttaatgtgaggactcgcaaaggcaacgcgtcggcggtttacgtgcggggccaaagtcagaacgaggactgcactttccacaacacgcgcaacatcaccatcgaattggccaagtgcaacgtgcgacggaagcgggaggtgaacccgaacccgggcattgcctaccaaatgaccgtcgtcgtccaattgcacccggttagcctaattgtttggaattggaaaataaatcactcaaaaagtgttgcccaatttgcagctatttgtgaccagagtggacagagcttacaatgtgaattgcttctaccgagaacagagacaagacgtcagtgtggactttggagtgaagtga

SEQ ID NO: 73018 - DNA, 165 bp, Heterodera glycines
atgcagtcgacgcagaatagttgtccgctggagatgcacaaaatcccggtggagcgctgtgacccggtgtttgacaaggcatgcgaaggcagaacggagataccattcacacgggccaaatacgacaaaaccacggggcatgggctgaactcaccgcgcgagcag

SEQ ID NO: 73019 - DNA, 892 bp, Heterodera glycines
atgctttccatctggcataaaaacagctcctggcatgttccagtcgataatggacctcatgttggcagattctggcttcgcggcagcctgcctagtaggcatcatcatcgtcaccaaggaccaaaaaaacattctgttcattggaaaaagatgttctcgcgatatcaagaatggggaattggtgtcatacgtgaaaaatgttcgtatttccaagatgaaattagaatatctcggacaaattatcggcaaaaacgggcgcagacccgaccccagcaaaatctccgccatcaatgagatgcccgcactgtcggacgtctcttcacttcggtcatattcgggaatggtcaaccattaccaacaattcattaaaaccatgcgcctcgtcagtaagccgcttgatgttttgctaaaaaggacacagaatggaattggagcgtacaaatgcaaaaaggcattcgtcagactcaaagaactttggtcatccaaattgctgctcacgcgttagggggggggggggggagagccgctggcgggcgaatggcggcggaatgaatcttcgcattctaatgaatgtgaatgaatgccttcttcatcatttcgctgcccctccgatcgatctgtgctattatttccctttgatcactttcaatttcttttctctcgtcgcgatggacaccaaaaaattcactaattactttttaataataatttttattaatttctatttatttagtaatcaattaaatttgtttttttgaattttagatgttttttcctttcaaaaatatgttaaaacaattgaaacaaaggcgaataccaacaacgaattggataattttattaacacttattgcaatttacaacacacaaatccatggtaaatgcaaataaa

SEQ ID NO: 73020 - DNA, 388 bp, Heterodera glycines
atgcttcaaatctttttgacaatttcatttctgttgataattggaagtgcaattagcaatggaactgacgaagtgaaaagaggtaaaatttataaatataaaatgtaaatttaatttaatttatttgcaaattaacccaggattttgtccaaatttatacaaaaccatgcttatttattggcaaaaaaatgcattgttttttcattcgattacaaaaaaataattaattaaaaaaagggaaaagatttctaaaagaaaaattttcacaacatttattgtttagtggaaataagtctacgggctttggtggatgatgccatcaattgggcccaccacattggcatggcatggcgagcggacaaaaaatttccacggtgatttaaataaa

SEQ ID NO: 73021 - DNA, 354 bp, Heterodera glycines
atgcccttttttcttatcttcctcctcattccattctctcattcattcttcctgtattttctgttcattatgttgctgcaaatgtcaacagaaattttgtgtacgtttattattcccttattttccgcatttattttgctagacatttaagcttgtaaccaattttaacaatttcaacacgaatttttaaactgtagatttttggaacttcaaacttcacttttggattccctcgctttggtgcttttcccacttctttcagtcagttggtctgccttgtttcttcattggtcgattacttttgctgcaactttttgttcgtggattcaatttgatcaaatgtgatgatcagaa

SEQ ID NO: 73022 - DNA, 695 bp, Heterodera glycines
atgaaattatttccgctacttttattaattattttatttttaattgacaaaattggatcagaaaagaaaaaattgcaacaaaagtcatttggcgaaatatttggagaaaaatgggaagagaaagaagaagaaaaacgaaatgaactcaaaaaaagagaaataattggaaaattttataaaataaaagagaaaataaagcaaaaaggaagaaaatattcaaaaaaagaatggggaaaaattaatttgaaaatagcaaaaaaattgggaacaaatcgcaaatatatttatgaatggatcaaagaatttggtcttcaaaaacaaatgcataaaaattacaaatcaaaaactgatgaagaaaaattagaaatcgtgcaaaaattcattgaaataacaaatgaatataagcaaaaaagaaaaaaatatgccgaaatttgcaagaaaattggagttagtgaattcactattatgaaatggaagaaacaatttggcattcgcggtaaaataacggatgaagaaaaaatgggaaaaatgaaaatttattgggaaataaaaaaagaaaatccaaaaatgagtgacaatcaaattgctaaaacattgagaattagtctaaatagcattataagatggaaaaaacagttttgagaagaaacttcgtcgaaaaaagaatgatcctggctatttaacgcgataaagaa

SEQ ID NO: 73023 - DNA, 1973 bp, Heterodera glycines
atggccaaattcttttggcagtacggcgaagagccaatggcaaaagcattggtggccattcgattgtacaaatgcatgagccgcgaagcagcgcacgactacacggaagtggaagtcagcaaccaactcagagagtgtgccaacgcggtcagtggtcggacaaagcgacaaacttttgggaaatgggcgggcaatggggttaatttcagggacaaattggggatggcttttgtaagaatgcaggggggtgaggatggtagattttgaaaatgaaaaatgcaaaggggcggatggtatttgtcgcattcgcttttcctttgcttttcctttgcttttcctttgcttttcctttgcttttcctttgcttttcctttgcgtcgtgccaatgcgctgcttcttcttcttcttcctcctacttcttcagttccgcgattggtccctggagttgctccacaactgtcatcagcaggactctcagctgaccatgcgccttctgacggccgaactgcccaattggggccatcgcacttgcctttcgctggcggtcatcgccaacaacaaacgcttcttggcccacccgtgctgccaaattcttttggccgaactttggcacggcggacttcgcttcagaaggtgcgcgttgcaattgcgtgtaaaagcaccaatcgcaatttgttcagtcaatcgaacttcaaagttgtgcttggcattctgttcccaccgaggtaattaataatgaattgtctcatttcgcctaatcactcgtctaatgactgtctgttcattggcactttcatttgctgcagcattctcttacttgacttcaaaacaaattcttttgataacttccattcaaatgccgacacttcacttgaagaagaggaagaagtttatgaagaggaggaaagcaatagtgacgaggaaaaagaggagggcacagagtgcggaggagggaaacagcgggggacagagacgacgacggcaaaacggacaaaatgccattttagcaaaatgtcagaaatgagcgaagagcgggaggaggagcagctgatggaggaacggaggaggagggcaggggagcggcagcaacaattcgtgcggtgtcaatgtttgggaaatcgtaaagaaatgcaattgccaatggcgcatgtacgggaaaaggacggggataatggggacagactgaaaaaggacagacaaatggggacgggacggcacgagacccatccctggcacgtcgtaccctatgtacacgccccgccgccccgccccctctccctgggtatgtccatggtgtatgtaatgcaataaaaacgagacaatcgacgttagtttgattttgcgatcaagtaccgctcccccgcccctcccctctccggttggtgccgttcattttcatgccgatgctccgtctcccctccgtccaccactttcagtgccaacggcgggtactctgtcggccgacctttcccatctgccgccttttgtccaaatttgtgcttttctattgcgccccgatcacttccttctggacttggtccatctcttacgccactttcatgctcgccctgattttcgtcctgctgatcgaattccccagcgaagtgtcccccgtcgaatggtttctgttcgtttacgtcctttccttcgccatggaacacttccgcaaggtttcgtctgtccctttcccttttccaaaatgtttcttctaactctttcagcttttcgtgctcgagtcgtcctctctgattgagaagctcagtgtgttctacagtagatactggaacattctgaccactgttgccgtcctctcttttttcgtcggctttctcttccgtctcaatccgtccaccgtccacactctctcgcgcactgtccttgcctctaactctgtgctttggcacatgaaactgtttgattttctcagtgttcacccgcgcatcggaccttacattacaatggctggcaaaatg

SEQ ID NO: 73024 - DNA, 1491 bp, Heterodera glycines
cggcgagcggcgggggagagacattcgtagtgcgaagaaaagtcgccgggggttagtcgcgaggggcgggacgacttgagagagacaaacgccgttaagtaccgcgaccttttccaacgccgggtccgtcagccgccttcctacgcttggattgaaagagtgtttcagcgtagggattgcatcaaattcattcccgtcggcgatcactccgatcggtctgtgccgtccttccgctggccgttcccttgggctttcctttcctttagcttttcctttcccttggcttttgcttttcccttgcttttcctttctcttgtagcatttcattgccttcagttgccattgcggacgtgtcagtgcttcccattcgcaattggcactttcgcgctttaccacttcaattgtcgttcgtcgcggcactgacggggaccgctcagcggagaaaggcccaaacgaagaaagggcccgttggactattggcggatgcaccgcaccaaacccaacggatgcgtacggagtcattcaatttcaggtgattgggcaaagttgttttttgctttttgaagggccattcgaacgaatgccaaatgaatgaatgagcaaatcaaatgccgtggaaagaatgcctttggcaagtgaacggtcccttctccgattagggcggtcctcacgtgcacaaagcgcgttatgtgcgcttgtcctttgactctgagcctgccgatgtgttccgtcttttggtgcgcgaatggggactgagtatgccgcggttggtcatcacagtccacggagggatggccgacttcgagtgggactttgccggccaattgcttttcgggacttttaaaattgtcagagtacccgagagagttggcaaagtgttccgcgaaggattgctcaaagcggcagaaacaacgggcgcgtgggtgctcaccgctggggtttttgggtttgtccgtccaaatggacaggccttttcaggtggactcgggcgtagtcaaacatattgggcgtgccctcgacgaggcgggcatttcggcgaggttcgctcccattgaacggtcgcttcagacaaagttcgcattcgttcagaatgcgttcgcggattgtcaccgttggcattgccccatggggacttcttcagcaccgcgagcgcctcctcggccgaaatgtccaagtgccctacgacagacattcgtccggcagtccgtcctcctccgctctgcccggcgtggttcgtccggcggccttgtacttaacgaccgccactcgtactttctgttggcggacaatggcaccgtcggccgttacggggcggacatcgttttacgcagacggcttgaggaatttttggccagcagagcggcgaaggaagcgcacgacgggcgaggaggcacggacagaggcggcagaagcaatcgaattccgatcgttagcgttgttttggaaggcggactttgcacgctgaatttgatccatcgtcacctcacgggg

SEQ ID NO: 73025 - DNA, 514 bp, Heterodera glycines
atgatatatcgtagaagtcccaccgaagaagaagtgccatttctccacaaggcaatgcacaaattgatgtccatggtattttggtgggttcattctttgtgtagagaaaacatttagcaactttttcgatgggctctcaaattgggaccgatttattccatgtcagtggtaaaaaagaaaaaagcgaattcaattggaggcacttttgaattaagtaatgcttagtatgttaatgctaacagattttataaatgctattgttagtctgcttcaaaatttaagcatatggaaatgtgagcttttttattggcacggaatggcagcaacaattatttaattgctgaccaaatcgctcaatatttacctcaaaaattcgtattttacgcatccccccagcgttgcttcttccagttactaattgttcaggtattgggttttctacacaatctattggcatcatcaagagcagtttacggtgagagcagggacggtttctacaaataaattttcttga

SEQ ID NO: 73026 - DNA, 188 bp, Heterodera glycines
ggtgaatggtacttcccgtaccattacgaatggacggacgaggagctcggcgttccgcccgacgacgcgcctgacccggaggaacgccaattctggggccatccgggcgaactgatcggcacttaccgcgcatagaaagagccgtttacattaggagtcttcattaatgacgagttgatcgaaagcaa

SEQ ID NO: 73027 - DNA, 641 bp, Heterodera glycines
atgcgcacctccgcccgcgcatttgaccgcgtggatcgcggtgtgcacagcgctggtggcgcttttggtggttgcggaggtctgttaatttgagcatttaatcaatattccgttaaactcctatttctcaattaagcttgtgcgcgccgggttcaagttgcgccaatttttgaaggaccgcgccttcaaaaaagggattatgcgccgccatcgccagcgtgagtttctcactattaaatttttagcaaattaaatacaggaatgagcgccgcaaggcgcaaccgtcaaccggtgagcgcgccgactccgcttattttgccggcaatgttggccggagtttcgcttcgcccgacgggcgtcaatttgacggtggaccgggtaggaaattttaattaaaatctttatatattttaatttctcactcattaaaattacaatttaaatttaaaggcagaggggcagcgccgcgcggatggtacggacgaagagcccgtgtacgatgaggtgccgcttgacaccgtggaacaaaggcgtgatgaagaaaatggggaggaggatgaggaagaagatgacagtgatttttagtgaatcggcaagcgatcactcaccatttaaccaatcgatcgatttttcactttaaa

SEQ ID NO: 73028 - DNA, 851 bp, Heterodera glycines
atgtcggataaaaaagcactgttcaagcgcgttatcgctgaggttgacctcactataagcacgggaggcataactttgagtgggccccgtctgtctgttccccgtttcattccgtttgaggaaaatgggcgttgccgcgcatgtaaaggaactgaggctgaggtggacacaatggtcaccaaggagggaatcaccttatggtgtacacggattgaaaaggcccagtttgtcccttttgacattgtctacgagcttcccggccattgtttctttcgcgtgaagaataaggcaagggtgttcagtgttccatacagcgaactgccgtcctcagacaagtgcgcccagtctctaccaccaccagtaaaacatcaacggacaccggacgacgaggaggagaagaatttgagacgtaaggcaaaggtggcgcttgacttagtggaagctggtctagcggcagacgcaatgatgcaggatgggacgcgttggaagaaagccaaaaccgcgatcaatgtgctggccaatttgcttttggcggaatcattaacagatgtctcaccaacttttgatcaacaacaacaacaacaacaacaacagctatcgtcaaaagaggaggagaaggaggaatgcataaacaacagcagtgctggagcagcaaccgaatctgctcccgatggtgatgtaatggacgatttcgtcaatagtattcaagcggcgacaagcaatatgcaatagcaaaaaagcgcaaaactcgctctgacctatatataaaagctgattgaccaattttattctccataaatattttcaagctctaactttataaaaaatgttaaattctcaaccgttcagta

SEQ ID NO: 73029 - DNA, 955 bp, Heterodera glycines
atggagcggtataaacggcaacaacaacaacaacaacaagctaaagttagtcaactaataaaagaaaatgccaactggctttgcgcactgtcgaaagcaaaatgtgtgaaacgatgcgggagactgatcagaaaggcgaacactgatcagctgctgtcactggtggaagtgtgcttgaacattgttgcttcccgattccgactgacaactcggcagaagaaacgactaatgccctacgtggacacggtgcgccgcgtgagcagagcgaggagcgagaggggcgctaagcgagcgcttgtcatccagaaaggagaggggtttggcggactatttgcagccctcttaacacccgtcttaattgaattggcaaatcggttgtgacccgaaacacataaataccctcgtaaaattgtctcacacgcattcattcattaataaaaatggcaaaaaattcattctcgtaccacaagaaatttatcggggtctcacctctgtctcgcagacgggagacctcaatttggacgcggttcgccacgacctggaccgggccaggggtggacggacaacaacaaatccttcggcgaaaaatgtcaattataaccagcagctccggcgttatttacagatgagaaaggaacatgcggacagaccaactaaagttgagctgaccaagggaataagggtactgatgaatagaggtggcgaagaaggcgaggttgttgataccccacgccgtcttctcgctcctccagcacctcctccgccgcctggaagacctcctcgtcgtccaccgcccagtcctccgggtcccgggggtccttcgccaccaacaagtcccccacctcgtccacaacgctcctcgagaccgagcaggacttctcggagaagtggtcgtatggagcaatggaggaaaaggcgatacgatatacaacagcaacggcagccgccgccgctg

SEQ ID NO: 73030 - DNA, 162 bp, Heterodera glycines
atgaaaattctgatcattggtgctggcgcttcgggccttccggcgctgaaaacggcgttggaatacggcttggacgcggtgtgcatggaaaagtcgttggatattggagggctgtggcgctacaaggaaaatccgggacaaggagaagggacagtgatgaaa

SEQ ID NO: 73031 - DNA, 1898 bp, Heterodera glycines
ttcagtttttcgaattcggtggaatacgaagaagcgaatgaatcggacgaaatcaccgaccctttgcccgggctcagcttcgaactgaacttcaagcacttttctggccagtctttggcaccgttttccaataattggccctcttaaggctttctgcaagtgtcccccacccatttcctccattattggttcgtcacctcccaaaaagactcatccaaagacccattggtgatgaacagaagcaaatgaagccgtaatttggttggagctgtccttttgaaggtgttttggttcaacggtgggcccggctgttcttcgctggacggactcgtcaacgaaatgggcccttatttggtgaacccggatggacaaacgctgcgagagaatcccttctcctggaacaaatttgcatcggcgagtgctttgaactgttggaactgatcaccgtgccattctgtctctgtgttggttcagatggtttacatcgaagcgccagcgggggtcggcttttcctacgccaccgacggaaacacaacaacaaacgacgacttggtcgggttgaaggggtcggcagaccaatcaaataaacacatcatctgaagtcgggaggggagggaatccacgaagtcgagaaatgagtgactgctccgactccctttggttggccaatgctatgccaatcattctttcttggcacaatttgtcataaaatttgcctattaggccaatcgactgattctctgatcattttatccctttttaatcagacttcgctcgaaaattacgaggccatcaaacagttcttcgccaaacacccgtctttccgtaatcactccgtttttatcaccggcgaatcgtacggcggcgtttatgtgccgacgctaaccgcgcgaattgtggacggacaagcggaattccccataaatttgaaggtcgatccttttattaattgagcaatgcgttggcatttcctttagggaatggccatcggaaatgggtatatgaacgcgaatttgaacattgacacttccgctcggtttgcttatggccacggaataattggtaattggagagacggacaattggaacaaaatgccaaattggaaaacagatgagaaaatatggaacgaattggagcagcggtgctgtagaggatgcattggtgggcaatttggccaattaatggggagggaggggagagagtggcccatttgtgataattaaaatggaatggaattctctaattccccaccccccaaaaaaaaagatggctgtgatttgacggcgttgaaagactcttgcgaacggatggtcgggtcttttcctaaaaaggcattctttcgtttttcttttaggtggacgacattttcgaattcctttggcacggcggattgaatccctacgatttgttcgtccattaattgcccaattagcccggcccggcggcttttcctttggctctcctctccctttgaaggtaccgcgattgcgacccgagcccgggccgaaattccatccgcatggaagtgctcaaaaatgggctcgtccctccgaaaatgcttcgccgtttcttttccaatgtgacacgaaacttccgccggcgtctgcaagtattcgtgtcgattacaaccatttcaatacgtaccattcacttgaaaggataccgtacaaggagcacaaaacgttggcacaccgtccgtgccatgtttaaacggtaaaacgattgaaaaaagaattaaaatggtatttgaatgccttttagatacggatttgaccacatatatgaatcttcccgaaggttccgcacaataaaccaacaataataccaaatttattaagtgcgaaaggcactaaacattccggacagtgtgggacatgggacatttgcaggttggcat

SEQ ID NO: 73032 - DNA, 975 bp, Heterodera glycines
atggaggaaatgggtgggggacacttgcagaaagccttaagagggccaattattggaaaacggtgccaaagactggccagaaaagtgcttgaagttcagttcgaagctgagcccgggcaaagggtcggtgatttcgtccgattcattcgcttcttcgtattccaccgaattcgaaaaactgaaggaatcgccatggtcgaattgaggacggaccaggacgaacagcagatgaaccagcagcaaacggagaaacatattcaaagggacggaggagagaaaaggccaaaggaacggaaaatggccaatttaaaggaagagaaaacaaataaatatacaattgcctgacagaagcaaagcaaagtaaagcaaagctaagactgtgcccactttcttttatttgtgtcccgttattttcagagacattttgccaccgttttcgcccttattcaaccaacagcagctgtcgtgtgttctttttttgtcatttggccgaagaaaatattttgcttttgcccgaggggccaatccccgccgaagatttgcccggggcgataaatcaaagggctaacgaatattcactggtcaaaggaggccaagaattaattgaaccatctaatcgttgatcaaaaaatgccaaatgaagtgatgcgaaagggaatcaatggaatatgacatcccaaaggtcattttggcataattaatccccccttgagaagtgtcttttgtcttttccgctcactttttcatttcgtttttaccatctcaacaattagccgtcattaaatgaaaaggcgcaaatcgaagaactgtgtaatatttttacatttgatgggcaaagtgtttgttgtcactgtgcgacttcggtggaaactttgctcaattttctcaatttctgtggcgaatcggtcgaagataaagcgatgagcggcgacggatgaaagggggggggggcaaagattaaagggattaaataaa

SEQ ID NO: 73033 - DNA, 1538 bp, Heterodera glycines
atgaaacggtgagcaaaatttttggaaattcgattgggaatttgatgttctacaatttcagttggattcgcaacgacatttggatggacattttccctcattttgaccgtccacaactcggcctcaaattggcacttctttcgccacgtttcgatgagctggtggacaaacacttcgatggcaaaacagaattgacaatttggcgcccgtttaaaattgaaaaaattggaactgaagcaaaaattgctgttgagacgaagcgaaaagccaaaattgtgcattttccgttgcccgaccgtccgatgcacaacaaaattcgctttaaccgccttcagattgagtaattcaaagaatgaattattaactgataaaagctacccttttcaggtacatcgatcattccgtcgtcacatttctccgtaccaaccagcaaatgtttgacaaaggcaccaatttggatttgtatatcgaggccaaggatgtcaagccgatttgggatgtttttgtccgtcaaatttggcccatttttgcgccaaacattcgccacttgggctttgtcagggataatcattttgactatttgcgtcgtctcatttcgccgtcaattctcaccgacctcacccatttggattcaatcgatgccgcttatttgttgccaacggtgatcgctgatgatgggccaaatgcaactgatcgccaagcgctgtccaaatggttgaacattccgacaaaagacgggaagccgaagcaattgatttgttgtgctactactactacgtcaggaaccattgaattgatcaacaatttcaaagaggtggggccacattttcgtaaaacattttggattaattgccattttattttcgtttccaattgctttaggcatttctccatgccaccactcctgctgccaactacataattcaacttcaactttttgaaccaacgccaattgagccatttgaattgacgaacgaacagaccaatgaaaagttgacagtgaagaaagaagacggtgatgaaaacatggagaaagaagacgaagatgactatatcgtggtggtgaagcgatgccaaattggggcgacggttcggtgggaggacaaaaagacgaataatttcagcaatatcaatttctggcctcttaatggcaaatactgtattgggtgagtctgatgagagaaacagtttttgctttaaaaatcaaatttaaacattttatttcatttaggcgaatgtctccaccaaagtcgggccaaaagaacacaaaaaatcgtctgaaaatgaatcccgggcccagcggacagcaacagaagaaagagtgaatgaattgttgggaaatgagaaattctgatcgatcattgtgaattttaattgagctgataatcgctcgtcgcgtttatttgttgcttcttttagttaaatgaaatcatttaccataaaaagaaacgaactttgaggaaaattgtgagcaaaatttttttattgtattaaatagggatcatttatttatgtaagaaaaatcgcgaaatatgtaa

SEQ ID NO: 73034 - DNA, 770 bp, Heterodera glycines
ccctaaaaaatcgatttttttcaaaaaatgatatatcaaaaattaatttgtaaaatattcaaatgtgattctaagcctattttggtcatttttatggcattttgtgcctatttcactttttacgaagaattttttttccaaaaaacagcatttaaaaaattatatttacatattttcctacatatttgaggatttttgtacatatttcataaacatatttcagtgttttttatacatattttatttacatatttcgcgatttttcttacataaataaatgatccctatttaatacaataaaaaaattttgctcacaattttcctcaaagttcgtttctttttatggtaaatgatttcatttaactaaaagaagcaacaaataaacgcgacgagcgattatcagctcaattaaaattcacaatgatcgatcagaatttctcatttcccaacaattcattcactctttcttctgttgctgtccgctgggcccgggattcattttcagacgattttttgtgttcttttggcccgactttggtggagacattcgcctaaatgaaataaaatgtttaaatttgatttttaaagcaaaaactgtttctctcatcagactcacccaatacagtatttgccattaagaggccagaaattgatattgctgaaattattcgtctttttgtcctcccaccgaaccgtcgccccaatttggcatcgcttcaccaccacgatatagtcatcttcgtcttctttctccatgttttcatcaccgt

SEQ ID NO: 73035 - DNA, 2271 bp, Heterodera glycines
atgccgagcaaattctgtatttttaggaaccaaagcccgtcatcttacgcactgaaaagacttcacaactacgatggggttgatgacaactgtcccaactgtcacaggcgcattgcttcgccattgtctgttgacgcggccactgcacctgccaaagacgatcgctctgattcatctgaacattctgatgtaaatattcaagaaaaaatatagacaagggattactgactttaggaaccaattgagccagaaaaccagcagctatctgaagcagttgatcatgctttgaacatcaacgaggagatttatacgccgatcaaagctgagtatgacaacaccagcattgcttacttcgcagtttataatgcaatgattcgtgcgaagaacaactgctacagaaacaggccgacaccaccgcctgagatgctggctgaattgagggtgtgctccgaaaaggagaaaagccttttctgggacttcaatgcgtcaacaaagcggcatcaatatgcaatggagcagatgcttaagatgaaggactacctgaaggctactgcgcaagccaaacatcggcaatgtgtgaaggagcaactttgcgactctttgaaagaggctacaaacaacaaggctccaataatacgggagcagcattgtttgctcatccaagcgcttgaagaacagctttacgacatcatcaagcagtttctcttgctctggcactcattgcagcagatctgtcccagcacggcgacgttggattcaatgcaggattggcttcaaagtgctgaggtcaatggcatggaactggcgcgtttggccgacagttgggtcgaacacctggccctcatcaacgaaaacatcaaaagttgtgtgaagaagtgcaataaggcgaagatgacgaagagctttatgtccgttggccaacttacaggcctcctccaagcaaagctaaagtagagatattaatgtgttacaaaaaaatttatttaactattaaggcttgtgcgtaagaggtcaaaaaagaaggctgtaagggttgaacggcatcccctgctcgaccatgtttttgaagacctgcgtcaaaaacatttccagctggaagcagccatacgaaagcaggaagaagctcaaaacacaacagacgaagaacaaagaccgcgggccaattccatcggcaaaaaacgacgaaatgaggacaaatcggcgacgtgtgagacaagcgtgaagcgacgggctaaggccgctcaggcagcagaacaacgaatgcaacgcccgattctgatgacggctgaacaagcaaaggcgttggaggcggagcgaatcgaggcccagaagcgcatggctgcagaccgccgagtgcaagagagattgcgccaggctgaccaattcctcaagcaacatcttgctcagcagaagcggcttaagcagcggaatctggtctggggcaggcaagccgcatacgagcgatacatcaatgagcggttggagaagctcaaggctgaggtcaacgctctacggaaatctgcacgcgagtcgatgaacttcacagaaattgacatatgtcagctgaaaataattattttatcaaatagcgtcaaatatttagttctgccaactcgccaagctgttgaagcatattgcgctgacatcattcgctatgccaatcatcatgctgaggaggatgttcaaaaggcaataaaggaacatcagcagattctcgagcgacgagagcgggccttggatgaggagcggcagcgacaaaaattgcttagcacatggcggggttaacaaattaagtggaattgcttttaaaaacaactttagacgaagacagacaatgggcatatcgagaagacccagtgcttgctgccgagctcgagaagataagacagcagaaggagcaaattgatgttgagtatgcggaagagcaggccaggcttcgtaacatcagaagagccgaggaagatgcacggtcgcgagcccgcaatgagttgcttggcctctacgattcaccagaatctggtaaaagcaaaatttgtagtttcgttcgagaccaaaatttcagagggttggtcggatgaagacctgttctacaatgtccgtcaagccgacagaatgcccatcatgcaagaagtgggagtggcgcagatgccgccggaggcaattcgcgcaagagaggtcatagatcggcgcttgaacttccaagaggccgactatgttggtgagatgacgccagctaacaaaggcgacgacaacagaggtagccgggagtaa

SEQ ID NO: 73036 - DNA, 1056 bp, Heterodera glycines
atgatcaactgcgcaattttacggcaacgcaaaatcgtggcgaccagcgacaagttgttgatcccatcatcatttggtacaacggcacggatcatttccaaacccttttgctggtcagtaaactaacaatagtgtttatcgttttttactttaacaatttaagccggacacgacgcctgcttctcgctttgcggtcgaaatcgtcacttcgccgcgagtttcctccttcgattcaccttttcggtgaagaagttgaagctatggaaattgcagcgcctgccgctgccccttctgcgccaattccatcgacgtccagtggaattgaggagaagcgttcgaccaccgtcacagctccatcaatagtgactgaagaagaagatgtgttcctggaagaatcgttgccgaagatggagtcctgcaaatgctgtaatagcgctgttgtgccaccggcattagaagacgccaatgtccatctaaaacaacagtttgcctattacggctacattagcactccctgttgtggcgacttccatctaagatgcttcgaaaaatggtcgcatttgtttttcaagtctgtgcaaattacttctatctttaggaaccaaagtccgccctcttatgcgctgaagcgccttcacaactacgatggtgttgatgacaactgtccaaattgtcacaggcgtattgtttcgacattgtctgatgacgtggccactgaacatgccaaagaggagcgcgcagattcatctgagcattctgatgtgaataattaaaacaaaaaaaatagctaagggattactgattttaggaaccgactgagccagaaagccagcagctaactgaagcagttgatcttgctctaaacatcaacgaggagctttatacgccgatcaaagttgagtatgacaacaccagcattgcttacttcgcagtttacaatgcaatgatccgtgcgaagaacaactgctacagaaacaggccgacaccaccgcctgagatgctggctggatttgagggcgtgctccgaaaaggagaaaagcctttactgggacttca

SEQ ID NO: 73037 - DNA, 653 bp, Heterodera glycines
atgccaatcagtaaaacgttgccttgtggaaattataatcatgaacaatttgcaaaattaaaaaatgaaattgtcaatgaaattaaagaaaaatttgtaaaaaattctcaatttgaagaaagcgaaaggaaatgtttcgaagaattaaaatcaaaacttaaagtgttagcaggtaaataaacaacaattaacgaaaaatgatagaattaaatcacttaaattcacagattattcattttatgcaaaaattgagggggaatatttaattgggaattggacggacgaaaaggaaaaggaaaaggaaaaggaagggccaaaaaaggtggacaaattccggcaaattctcgcctatttggaattgtgggcaaaaagtaatgaattcattaataattaattgagtattagagaaaaggtattatttaaatacatatttagacaaccaaattttggacgatttgatgggatttttgaacacgaaaatgcttttgacaatgctaaccaaaatattccttttgtacccaaatgggtcaatgccttttttggtcgagaaattcttcttgacttattccacctggtgagcaattattgttaattggcatcattagcgtttattactttcaaggaattggcctttgcccgtccaattagccgaa

SEQ ID NO: 73038 - DNA, 566 bp, Heterodera glycines
atggtcgatcgtgcggctggcttagaatggatggcccaagatgaagcacttgtggagatcattgtgccacaaatgctcacagatgaacggcttaaagcgcagcttgaagccgtcaagagtaaatacagtatgaaggtgtacgaaaacttctggagacgatattttgacgcgttcaacggaggaaaagaaaaagagcaatttgtgaaggattttttgaaggaggtgaacacagaaattgacgcattttgaccattcactatttgtctgttctcaggaaacggaatcgaatttgacggatgaagagcgatggaccgatttcagtgagtcgcttcgcaaagtgataaatggcacaatggaagtggtactaacggagaaggtgaacggaaaaccgaacagttccaatcagacgggaaacagtcaagcgaaggtaaacggacagaaagaaaggcataattaacagccaaaaaatgcttaaggcattttgcctatcaaaaagttttgctttctttttctcttaattaaaaagtcagccgaaaaatcaaaaattaatatgcgcaaatccgtta

SEQ ID NO: 73039 - DNA, 235 bp, Heterodera glycines
cccgacgctgcccttttcggcattttgacccaattcttcgagacgccattgaacgtctttaaagggttttctaaaaaagaaggtccactttatgaattcactaaagaggtcaaaaaaactctgggttttgctgataacagcaaatgggaggcgctcacgaaaaggccgtggcaactgaacttcgacactgaatttatttttggattcaccggtgatgactcatcaaaatacaacg

SEQ ID NO: 73040 - DNA, 546 bp, Heterodera glycines
gccgatcatcgattgagtgctcttagattctgtctttcctttcctaagttttcctttgcttgtttttttccatttcattagatagtctttcttttcattcaaactgcgtccattgtgaatgttttccaatggataaaagggtggatctgtcattgatgagcttatgtgtcaattgcttaattatagtaatttataatatgaaaccctttcttaacagggccaatgctttttagtttataattgcctcggccttaattatgttcgcggtttgtctccctatgcacgaaaagtgtgccgcagtggaggcagtccgccaattggtttgcctctcctcagtgccaaattcaattggccattcggctcttggccaaactcagtctcttcctccttttggcattccgcggctccattgttttggccgatgcctttcctttggctgtttttcagctccatcttctgctgttcctctcttcgatcatctgttcgactttgagccgtggacggcggcgtgtgactcatttcagtgatcaccgattgattgctagg

SEQ ID NO: 73041 - DNA, 751 bp, Heterodera glycines
  unsure (1)..(751): unsure at all n locations
atgcttgccgtacgtccaccaactgccgcagcttcagctttggcacagcctttggcacccaattacggcattaattatggccaatacgctttcggccatccttctggtacttttatcacttgctcttatcagtgataaatgaagtgctaatgcaggccttcattttgcagcacgtccaccaacttctacagcctttgctccagcccagcctttggcacccaattacggcactaattatggccaacaaccctttggtcttcattttggcgcagctccttcggttaccgtcgcttctgttccggcacagcaattggcagctaatcccaataacggccttaattatggccaacatcaattcggccgtcttcctggtactttatcactttatcttatccgtgataaatctattacaaattgtaggcactaattttgccgcacgtccaccgacttccgtgcatctgctttggcaccaaattatggccagcaacccttgggcaatcctggtacttttgtcacttgtcattgataaacttaatacaaatttaggttccgcacgagcagtttctgatnnggcgcnccctttggcaaatagtaactttcctccgctgctttaattgcttgtagttaattagacagggaaacacggggacagtcttttaattaggtcggaagaatagggacaattaatatttaagactttgaccaatggttatttgtcgccaaatatccaactccgtcaattaatattaaa

SEQ ID NO: 73042 - DNA, 112 bp, Heterodera glycines
ataaaaagtcaacgtaggagcctcaaaccaagtggaaaatgcgttatttatgcttaatatatcgaaacaagtgcgcagaaaaaaaggcatatgcctcaaaagtcggtctcta

SEQ ID NO: 73043 - DNA, 1333 bp, Heterodera glycines
atggcgccatcatttcatgaggcaattggtatttgttagaacataaaaatatttttagcaatttaatttttttttttaatgtgtaggtaaagaatggaaacaagcattgttcggcagaggtggcttattgacagaaattttcaattttgtcaacgataaacgcaaggaggatttggccaagaaacaagccgctccaaatttgaacggtgggcatataagaaaaaatttaaaatgtgaaaattaattcataaactaaataaactgaatttgaaatagggtgcggatttttagttaggggaaataccaaaatatacctaaacgcaattggctttttccatataatttttgtaagtcgattctgatagttttattacaataatattaagaaatttgtcaaaataacaaaaaagtgacgacaattatttctttgggggattttaattaattaaataaatttttgaggtagcaggattaagttgctaataaaaaaaattttaaaaatttatgaaagacagcttaggtaattgaattaaattctgtaattcttcagtttatttggccataacttttcttacttgaaccacccatacattcttggtatcaacgtaaactaagagaatttttatatacaaaaaattatgtgccaaaagcaacagacaatttcttggatatacccgaaaaaaaaagtggccatagaaactgaaattgtataaaatttgaaatccattagcagataaggccagcagggaattcagccaaattttggatgcattattgcgcaaggcgaaaagtggcaattttgacgaggaaccgttgccagaaataccattcattggcatttgcaaccgacttagctgtgccgacatttacaaagcattagaccaattccggaaaagtgaatttttctcaaattttcaggtaaattttttcaaaatgcaatttaatttatttgtaaatgaatattttcgttttttttaattcttttttaaattatttaacaagcattttgaactcagactgcaattgctctactacaagacccaaaaggcctggacatgatcggagaattattagccaatcctgatttaattgaaaatttttcgggacccgaaagtcttggcgaaatgtttggcagcaaaatggcacaaaaaagtggcacaagtcgtgtcgaaattggcgaaaatgtggtaaaaaaatctataaattacattgcaaaataataattaaaaaacctaataattaattatttataaaggatggtgaaaatattggcattgatttttcatcccaaattgatggtttgtttgaaagaaattcaaaaatttaaaataaa

SEQ ID NO: 73044 - DNA, 890 bp, Heterodera glycines
atgccaaatctgacgaaaatggcactattaaatgagcatacagtagttagtatttttcaatgcttagctttccttacattcattgttggtgggttgggttgattgcaatttttgttgataattgaattctgtccgctgttgcttggcgctgctgtagctttcggccactattggcgctgccatttggccatgaataattgccataaaaatgattaaatgataataataaaaaatggacatttcgccagcctaaaaagcattcgtttttaaataaatatcgatacatgaaaatgctttccgtttggttgtgaattgttttcctcatgaattatgacaaatgtgtgtgtgcgcgtgaggattttcgggaccttgacctcattttgggacagaatttaagagccacgtttttttaatgatattattttaccgacccataaaatcaggggctcccaaatgtgaggctctaaagtttttaatttccaaaatcttcgaaaactgtcaagtttccaaatccattaataaatcgcatttaaaattcagaaaattttccccggctgcgcttattggcaccgcccctcgaacctccatttttttaaggttttccaaaaaataaactaaaaagtctcagtaatattttttttctccctgttgtcattttgaatcttttctatttatctaacacagaaacatacaactattttccccccttaatttatttattttttgcaatttaattcattaaaaattttaaattatgtaaattgggtggcaaaaaaaatttttttgttgtagccagtaaaattggtaatgatcaaaagggaaccgcccacttcggcgccggccttttcggcgccgttgctaacaacttttttcctgttcaaccaaattaa

SEQ ID NO: 73045 - DNA, 234 bp, Heterodera glycines
agtgtccaagccacgaaatgtccaaaagagtaaaaacccacgaaatgtccaaaatttttcaaaatttataaaaacaaaatgagtctaatttaggatttttagggttttcggggtcgctgaatacgaatataccctttatattaccccttgcctaaccttaggcccatctgaataataaaaaactcaaattcgagacttggaaatttcgtgggctggacattttgtgggtcagcg

SEQ ID NO: 73046 - DNA, 816 bp, Heterodera glycines
atgaatgaaaaaaacacaattaacaccaacaacagtttaaaagccaaaggtggcactctcgatgagaaattacagccaacagccaacggagagacagaagtgttcattcagacgaaaccatccaggttctatttacgacattatttatgttcctagctgattttttgggactgaagctgggcacaccatattttgaaaaaattaaaaaaaaatgaaatttcgaccttttgttcgagttcgatttagctcaaatcaatgcactttttccctgcccagcgaccacccaaaataccttttttatcggcttaaattttttttcaaaaatcttttctacaaatggtggcaacctcttgcttcagttattgcctggtttttttttccatttttcgcggattttattcggtcattttcctgatattttggatttccctccatttttatagggccaaaaccgcatgttcccgtgtggacgatgtgtccctgctgtccttcatctcattttcttggatgttcccgtggatgtggcgggccttccgcggccaactgagtcccgtcgagtcgtctgcccaatggacatgctccattttcgactcggccaatgtcaacatgacaaggttttgttgttcatcagttaggtatatgaaaaaaaatgagtcgctatattttacgcaacagcgcctgatacaaaaattccggcgctaattaaaaagtgacagattttgaaaattttttcacttttttttggtcaattttttttttgttgtttgttttgatatagaatgatgaacacattaagcattgagcataatttggcga

SEQ ID NO: 73047 - DNA, 915 bp, Heterodera glycines; identical to SEQ ID NO: 9998
  unsure (1)..(915): unsure at all n locations

SEQ ID NO: 73048 - DNA, 75 bp, Heterodera glycines; identical to SEQ ID NO: 58933

SEQ ID NO: 73049 - DNA, 3517 bp, Heterodera glycines
  unsure (1)..(3517): unsure at all n locations
ctttacaaaaattttctttcccataactaaacaaaacatttatatttttcggtcttactttctcacgttttatttggttaatttttgttataatcactttgtctccgtcgtttaaccttaattcatttcctttaaattttcttgattatttattcttttgtgcttttatttaatttaatcgataaattcatttttgcgctcgatttgacccaattatcgatttgaaatgtttcagtggtactgtagcttcgaagatgtgctgtagattatattttacccaaaaaatttttaataacttgctagcgggggaatgttcgtgctacacaccgtccgaaaaaacgagatgtgtaccaataaatagagagtgccagagaaaaacattatcttttttctctaattttttgtctccttttggcgtactatctaatatttttattattaggaaaaacaacatttacttcgggaaccgcccggttcgccgcggccacttcgccgcggccatttcgccgcgggtttttcgccgcggggttttttcgccgccggctttttcgccgcggactttttcgccgcggccagttcgccgcccgaagaaaaatgtccatttcgccgccataattaaaaaaaaatttgttatacttctcgtgtaccataatttattaaatctatattgtctatctttatatcttaagcaatatttggttacttattaataatgtctgaagttgaaacaaatcgtcacaaggataaattaattaacgatggattcctttacattttcgacaaatttaatgttgatattagtttgaaattctggcgatgcgaacgaaggaacgaatgtcgaggcgaattcacaccgacatgaacaacaattttgtcaaaatggtcaccgaacacacacacgaagcaaacattgccaatgtgaaagcaaaaaaaattgtcacggggatcaagaggcgtgcggcggaatgcatggaattgccttcacaactccgtgcaaatgcaatggtcaacgtttcaacaccggtgcttgctcagttgccaagtgccaatggaattaagaaggtaacgaaaagcagacacatactattattttttgctttgtttttagattgtcaaacgtgtacgccatgaaattgtagctgcaccagcggctccaaattctattcacgacctccaaattggccaagcatatcaggtgtacaagcgcggtgaaggagttgaggaggagcaatacctactatctgactctggcgttttttcacttaatgccgacaattcccaacatcggtattaattaatgtgacatattttaaaattccgcttatattcaggattctgatttttgccaagaactcttacgcaaatggacgcatgcaatggtcgaagtgttcgcagatggaactttttccatcgcaccacatccattttcacaagtttacgtcctcctttcaaagtttgttttgtttggtttttgaatttcttccagaaaaatttcagaaaaggaaaatggactttcccaatcgccacatgtcttctgacaggaaagttgcgatggtctacgaaaaaatgttcagaatgatcattgacgcatggccagccttctctccaacgtccatcacaatggacttcgaacaagcggcgatggacgctgcggccgcagtgtttccgggcgctcagcttcgagggtgcctttttcatttagtgcacaacatgcacaagcgcctgatttccgaaggacttcaaaatgtaagtttcagttcccaaaaaaaaagaaattgtctcccgtttagcgctatcgaagtgaacggactgtcaacgaagagcagcgaacaaacgacatcgcggaagcagcgcaccgtcgactccaaacaatcttcagctgtcgctacccgtcaatttggcgattcatcgatgtccttcgaatggatcagcgtgcgcgcgacgctgactatgtgagctgcgtgaacggcgaagaacctccaaagaagaaaaagaagtttcggaaggctgacaagcgcattttgaacattattgaaaattttgatgcccaaaatattgttgagtttctcaggggaatttcaaataatagtgttatggacccgtgattttgttgttcatttgttaaacttatataataatgcggtatacatgtttgcacaatgaaaggcaaattaaaacttttttgaaaatttttttggatttttaaacactggcgccgaaaaagccattttatatagggcgccgaagtggccgcgccgaaagagcccgcgccgaaaaagctcgcgccgaaaaaacctcgcgccgaaatacccgcgccgaagtggccgcgccgaagtgaccccgaccccaaaaattcaatgtcaatccctttgaaatacctaatctaatttatgaaaataaatgctatcataacagtgctgagaaatctgaattatttgccaccttatttgccaattcatttaataatagtgaaaccgacccaagcaatccatgcttgggtaatattatagaaattgatcaatgctttatatcggatataaattttaacatcatcgagacccaaaatcttctgaaaaaacttccgaataaaaatggcacttctcccgataatattagctataaaattttaaaaatttgccattcgtccctgtcaactgttattactgacttgtttaggatctcattagacatttgttcacttccagacatctggaaagaatcaattgtttttccgctttttaaaaagggtgacaaaaataatcccgaaaactataggccaatttcattaacctgctcactctgcagggtaatggaaagaattttaagcaaaaatatttacaattttctattaaaaaacaaaaaaatttcggaatttcaatttggttttgttagaaataggtctacaacgagtcaactaataacagttgtggaagattggtacgaggcaataataaatggaaaaaatgttgacagtatttatattgattttcaaaaagcatttgactcagtgccccatgaattacttttatacaaattgaaaaaaataggtctaaggggcaaacttttgatgtggataaaggactttttgagtaataggacttttcgtgttaaaattggggatgatttatcctccagtaaaaaagttggctctggcgtcccccagggctctgtccttggacctttattatttttgatttatattaacgatcttcctgatgctttgccatcaggagtaagaattaaattatatgctgatgatgttaaattgtatatttgttataaagcaagaaccgaaacagaaattatgcataaagcattgcataatttatcagaatgggcaaataaatggcagatcagaatctcaattanaaaaacttttgtacttcatttggggaataaaaaccccaaagaaatatataaaattggtggaaatataataaatgttgtggatacaattagggatttgngcataaatattgataaataatttgcattttccnatcatgtcacacaaata

SEQ ID NO: 73050 - DNA, 171 bp, Heterodera glycines
acggctataaaagccagctacagcaccaccacctgcaaaacagtttcctccgtcgccgtctccaccaccagcacagacgcgtccgacggagcggccagcaaagcgcgacggccgccttttcactggacaacggtgcgacggcacccgcggcgagcccattgcgatttgacg

SEQ ID NO: 73051 - DNA, 1104 bp, Heterodera glycines
ttgtgagcaatttgtgtggcaaggcgaggcgggcaatgaaaatcgattcggcaccagcgaagaatgtgaagcgatgtgcaaatgtaagcagcggaaaagcaatgccaaagtcgacgatgctttcctttccctgagaacagttgcacaagtgccgggaattcttcggcccaaaaatgttgtggtgacaaacgcacggggaacatcaaaggcaccgacagtgccactctcggccgaccggcaaaagagtgaagaagttggagcagtgcacggagaacatccgcaaaatggcaacgaaaggcacagcatcggtggtgaggaagcgcaacaggaacagctgggccacgaaaatgaccttccgctcgcgaaagccgcttccatcgcgcagacggaagacgcggaaggggcggtgggaatgccgggaccagcgcaagcgatgtgcggagggatagccacgggagagactttagccacgggagagactaagttcatttgttgctctttagtgccgaaatgccacccgcagcattccccggctccgctgccgcgccctccgccccaccgcaggcgccgccacctttgccgccggcaatggccggtagcgccggttacgcgctgtcctccgcgtacggtgcccaaccgttgccaaaattcccgcaaaaagtgcccgacaatttgccgccaatgctcggcccgtcgccgcccgcagtgatcgattatcaaacgggcaaacgatgtaagccgaaagagaaggataatccaattacgaagtccattccgactcagttgaccagcccaaagaggcagaagcatcagcagcggtggttgctgcttctccaacggttgctgtccaaggactgccaaatcacgtgccatcgagcaaagagcaaagcattggggggactgaccaaaaaagtgaccggaaaggcacaatggcatttgaaatgcatttttaaggcttcggcgacggcattttggagtcattctccaaagatatgttggctaacggtcaaaatcaagcggaacaatcgccacactcaattccgatgtgtccgaacggactcagtgccatgcgatacaaagacggtgattcattctcgaatttga

SEQ ID NO: 73052 - DNA, 294 bp, Heterodera glycines
atggtcagcgctcagttgggcgtttgttttgccctaggcaaaacaaatttttttcccttgggcaggttcttcaatgctcagtccggcctttgcgagcagttttcattcggcggatgccatggcaatcagaacaattttgcggaccaagacaagtgcgaggcgaagtgcagtcgagcgacgacttcggtggcgaacagtcaccaaatgttgccggagcggtgcgccttggagaaggaggagggcaccggcggaggataccatgtccaatggtacttcaacgtcgaaaaatttacg

SEQ ID NO: 73053 - DNA, 1806 bp, Heterodera glycines
atggagcagcaacagcacgtgcagatacctgtccaagtcggaggagtacaaattgaaaaggcgacagaggtaggcagaaagagtgcgggacagacggagagtgacagacacagagaggagcaaaagacaacagtgaacaaggagagcgaaaagaaccgagagggacagatggaagaaggtgtggaatatgacggtgatatgatctttttggagacccaaagcaatggcagagaggaaaagagaaagggaaagcaaaggaaaggggacacggaagagacggacagacagacaaagttggaagagacactgaccgagttggagccagacgaaaaagagggctggaaagagagtggggaggagacagagccagagcaagtctacatttcaccagcggaagagagaccggcagcagagaaggaaggagcgagaaacaacagagaaagagagggacagacggaaggaaagagtgaaggcagagaggaaaaggaaaaagagaggcagcagaacagagaaaaagtgcaacatcagcagcaacaagttcaagaagtactgggagaacaaccgcagcaaattcagccggtacaagccaaaaagggggccgaaaatataggacaaatggaaaatggacaaaacacacaaccgaaacaagcacatcaaggccaagcagtacagggagaacaaccgcagaaaattcaaccggtccaagtccaaaaagggttcctaaatatagggcaaatggaaaatggacaaaacacacaaccgaaacaagcacatcaaggccaagcagtacagggagaacaaccgcagcaaatccaatggatggaagagaaacaaaggcaaaacgtaaacgggggaaaacaacagagacagcagaaaaaacaggaaaagataacagttcatcagcacgaagtacctgctcaaaagcttgctatggaagaaggaaaacagcaacagaatgtggaagaacaacagcaacaacagaaactgaataaaaatgagtcattatcatctgatcaggatataatacgcccatcgaatccgatcattgaacaacaacggcaacatgttgaagagggtcagcaaccacagcaatctgaacaaagtaaagctcacaatcagcagaagcagcttgttccaacagcaacaactgctgaggctgatcacttctcacctcattccgctgatcaatcagttgttgccgctgttccgtccgtctcagtgccgaattcgccgcccactgtctcattggagggcagtggcaacggcggcgcacctccaaccgccccatccgccgcgtcttccgcctctccgccctccgcttcggccggagctccggaaggctcactgtccgacctgtttaccatgcaccatttgcaacagctacggtcaggcgggagcagcgatgttgggagtggacgggaagaggtggcacgcaaaatggtgccggtttggggcggactgatcgacgacagttcgcaactgcagccgatcagtacgacgctggaggaggaggagcagcaacatatgcagcagaacggcaccacggaaaagcagcagagagaggaggtcggtggtgaaatgccgacggaaggcgacgacaaagagacaggcggcaccgccgcgggggcggagacaaacccaccgaagcaacgacagccgaatggagaagcggcacaggccatgccggaacagcaggagaagacggtggtggtgagcaacaacggatcgggtgagaaaaaagaaacgggggaaggctttgatgatcaattatcagccagggagggagggaaacggacacgcgagtga

SEQ ID NO: 73054 - DNA, 930 bp, Heterodera glycines
atggttggacaaaatcagaaacaccaaatagtacaaggagaagaaatgcaaactgaacaagagaaaaaaattgttcaaactaatccaggacagcaacaaattagacaaggtcatcgacaccaaactgaacaaagtaaaactatacaaggacaacaagttgaacagtcaactgaagaagacccacacgaaggaccacaagcagtacaagatgtacagccaactgaaggacagcaaaaccaagctgtacaaggaaagcagcaaggaaagcaaacagttcaagggcaacaaatgaatcagcaaattcaagtgctgcaaaaccaagctgtacaagggcaacaaacaaatcagcaaattcaagggcagcaaaaccaagctgtacaaggacagcaacaaggaaagcaaacagttcaagggcaacaaatgaatcagcaaattcaagtgctgcaaaaccaagctgtacaagggcaacaaacaaataggccaattcaaggacatcaaaaccaagcagtacaaggacaacaaacaggacaacataaccaagcagtccaagggcaacaaacaattcaaagacatcaaaaccaagctgtacaagggcaacaaacgaatcaggcaattcaagaacatcaaaaccaagcagtacaaggacaacaaacaggacaacataaccaagcagtccaagggcaacaaacaattcaaggacatcaaaaccaagctgtacaaggacagcagcaaggaaagcaaacagttcaagggcaacaaatgaatcagcaaattcaattgctgcaaaaccaagctgtacaagggcaacaaacaaataggccaattcaaggacatcaaaaccaagcagtacaaggacaacaaacaaatcggccgattcaaggacagcaagcagtccaagagcaaaaaccaaatgagccacaagaacagcaa

SEQ ID NO: 73055 - DNA, 656 bp, Heterodera glycines
atggttaccgctcctaccgctgctgcggacgtcgccgcgtctgtcgccgcgtctgtcgcctcggccgccggcggcggcggttcatgcaccgcgtgctcgtcttctgttaacctggccgtgttgaccagggaagaagtggcggcggccaactcgataagaaacgcacgacttgcagaggaaccggtcaaccaaattagcacgtcgggtggatgtacaacactgacgcccacctgtcccccgggtgaatctgtaagttttttttctttgagattttttctagtaagaatatttttcacttgtttcaccactttcaatttaattaaaaatctactaaaataaaaaaatctttattttttgaatgttaaaaaaattttcacggctttgaacagtatccttgttgatacggtgttatggcattagtcaaaaaccatcaaaaaaagtcacttccttctaatattttcttagaaaatattaacattttttaaatcaaaaattttgacaagaaaaaaaattgagggatgaattttttgcgaaaattttccaatttttaggggtgcatttttttaattttagctcggtcttaggggtgcatttttttgaaaatttttaggtcgattcttaggggtgtatttttcatttgtattgcattcttgtta

SEQ ID NO: 73056 - DNA, 424 bp, Heterodera glycines
gtcattcccattgtccggattgtctgagtggaattgaaaatattgcgataagaaacgctgtggagaatcgagtcggactgaaccaagtcagaagcaatgaatatttggtggacaaagtaaataaagttcagatttccatcgaatgtccgctttgtcgtgcgcgttgccttttgaaccgtcaacgagtcaaaaactacgcaattgaggccataatcgcatcgatgggcacagttaacaatgagcaggacccaaacaacgaaataattgcggcaaaaaatattctggtcaattttttcaattgtttttcttttgcgtttgtccttaattttgtcatttcagatcaaacaattggaaaagaatgagcgtgagatgaaaaggcgcttttctgagcaggaagtccgaatcgaaagagcatttttcttcg

SEQ ID NO: 73057 - DNA, 854 bp, Heterodera glycines
atggctgacttttggcttctctttttggcctgtcttctcgcctttttcgtcggtgtttctcttttgattgccttttgctgtttttcgtgctacgcttgtttttgcggttcttccgattgttgctccgccgattcaaaataaaatgtgtttttttaccatctttgtttttttttgttcattctctccaaattctatggcctttcttcacattttctgtttaattaattttgtctaattattgtgtaaatgtgacattttctcatgtgcataatgtaaattgttaattgttggattatcttaataataaccgaaatattttattctttgcatttcatggaaatgaatttgccacagtttaaagtttgagagattttagatttttatttgtaaatttcttgtcattgttttattttttcttaaacaagactttcatcattttccgccttcttttcgccctcaacaattcctcgtcaattctctgtttttcttaaatttattaaattatttgcatttttcattttgctttgcctctgaatatgcggaacatctcatgggtttgcttttggcattgcatcgatcttagtgccaactttttctcctccaatctcacgcgtctcgccagtcccgaagtgccaattcgattttggcaactgccgggaacaaatattcatttgtcagttcttcaaacggacctttcaaggctttcacaacatcgccccaattttgtgcagtgccggtgcaaaagggcaatgcgttcggagcactgcaaatggccgttcattttcggcgaggtcaaaacggacaattcctttggacacgaccccttcaatttcaatttgagttggctattgtga

SEQ ID NO: 73058 - DNA, 873 bp, Heterodera glycines
atggaggcggagcagggaaagttggcagaagagttagcgggcagcaaagtgagtggggaaaacgttatgcagaatttccatccatttgaatgggcccttttggcgtttcgtcactaattagcaaaaaaaaaaacgattcacttataaatatccagcagcagtttcaattctgcaaaactctcagagtgttggtcggccgtcccttcacagttcgtcctctgttcgcagttccctcggctatcgtggcaaagttctttttatggcccaccaaatgaaacttcgctcggactctcttcccaaattgggggtcacttcattcgttcgtttttagtacattttgcactgatttaccttttgtcagaagaagtctcttctgccgtcgtcaatccgtcgttcgccaatcaaaggaatggccaaaatccgacctttgtccccccttaagcgcccgccaccccaacttgtcacacttttcccaaggtctttcttcgttgtactacggtacattcgctacggtagccaaaagtatttttagtgataaaaaagagatggaaagaattcgcgagcttttggtgcgtcagttggagaagcagcagagacgggtcgacccctcccccctcccttcggtcatttcgcctttcgctttcccaccaatttttttttcacagtctccgccttcgtccaaccactgtcaactgttcatctcctgcatgtttctcctgcgcagtgttcagtccgatctgtgccgtccttcgcctgctgagacgggtcgtcccgtgccgggtccgccgcggcgacgcttcggccgatgcaacgcgcgtcttttgccattgttcgaggtgaaaatgctctactcttttcgacttaacaaataaa

SEQ ID NO: 73059 - DNA, 950 bp, Heterodera glycines
atgaaaaatccaatttccaaaaataacccaacactagaaaaagggcaaatcttagtaataagttcacttggcacggtttttctttacaatttgttggagtgcattcactgcaaaatgctgttcatccaacaacagaatgagttacatcattggcccattcctttggccggatttgacgtaattatgtgccaacaaaaagtcgacggggatacaatgctcgtggcagcgcagaagaattggccatttgttgagaggcatcactttttgacaggcgaattgcaattcttgtcgctaaatccggaccattaaattccgtaattgcttcccacttaattaccattatgttgtacggacgaaaccaattaggcgcaattttggcattggtcagcagacgaaggaaaagcgagtggcacttcagcagacgactcgctcgccaaattgagctcggcacgaacaaaagcaattcagtgacaagttcggcggggagccaacggtagtgctctttctgatgagcagcagcagcgacgcaaatttgtgaagattgcatcgcgaaaaatggggaaatgcgcagagagaaaaggcgacggaatggcaaatgtaaacgaaagcagaggaaatgaatggcacaatttgggggacggatgaaaaggttggcggaggatggcatggcatgggaaaggcaagccaagcctcgctgggcggagagcgacattcgcatgtgaagtgacccgcgatgggcgtggttggtcaattcaaaatgcactaaaattcaaaaatgtacccaaattattggtaaacggcgtcattctcgcgcgaccttgaggggaataagcttgcattttaaatagacaaatcgtaaataggcttaaacttagtctaagctttaggtctaggcttcggcttacttgagcctagggatgtgtgtgctcattttgtgtgtttttaataaa

SEQ ID NO: 73060 - DNA, 2251 bp, Heterodera glycines
atgctttactggtcttcacaacaaaaaatagattattcaataagatgtttgaataagaataaaatttatataatgtaagattattttggcggatttgtaaacgcttaattctgccgattcatttggtcgagcaaaacattgtccatgaaattgcgaacgtcgctaattactttggagaggctcattaagtaatattcatcacaagtcgggcaaaacttcacagcaaaatgacataaggctgcaaaaattggaaacattaagtgaaaaatgagccaatttatggacaaagggcttctgttggggttttagaatatttcacatttaacaaatttaaaacgaaaaggctaatttaggaacaggtggcagatttaattttaataatttattttttcattatttcgaaataattcttttgttaatattttaatgaaaaactgacagctgtgtcgagcggcacaaattccacttgcaatactttggacatgagcacagagtttacaacggtgctaggtcgtttcttaaaaaccgccacattgggcgtttcttaaaaccgccactttgggcgtttcttaaaaccgccactttgggcgtttcttaaaaccgccactttgggcgtttcttaaaaccgccagggcgtttcttaaaaccgccaggtgggcgtttcttaaaaccgccactttgggcgtttcttaaaaccgccagggcgtttcttaaaaccgccacattgggcgtttcttaaaaccgccacattgggcgtttcttaaaaccgccagggcgtttcttaaaaccgccactttgggcgtttcttaaaaccgccacattgggcgtttcttaaaaaccgccacattgggcgtttcttaaaaccgccactttgggcgtttcttaaaaccgccactttgggcgtttcttaaaaccgccagggcgtttcttaaaaccgccaggtgggcgtttcttaaaaccgccactttgggcgtttcttaaaaccgccagggcgtttcttaaaaccgccacattgggcgtttcttaaaaccgccactttggtcgtttcttaaaaccgccagggcgtttcttaaaaccgccaggtgggcgtttcttaaaaccgccactttgggcgtttcttaaaaccgccacattgggcgtttcttaaaaccgccactttggtcgtttcttaaaaccgccagggcgtttcttaaaaccgccactttgggcgtttcttaaaaccgccagggcgtttcttaaaaccgtcagggcgtttcttaaaaccgccaactcatatgattatgtatgtatatccgttaaattaaatatacaataataatcggttagactctttgattatacaaattcatattaaaaatttagcttacgaatctgagtcaaaaagaaacaacagcatcagtatttttgtattataatgatggacattttgaactgattaaacagccaacaaagataaattaattattttgttttatttctgtgataatctttataaaaattcattcccttttgaaagttgcaaagaaattctgtgggacttattgtggcacctctctattagactcttgtctaatagctcctgtaatctggttttgcaactttcaaaaaagtaacaaattacgaattagcaattttatattcgaaaattttgcagttgataattgttgctataaccacgatgtgtgctacataaataaatatcagaaacgttacgattgtgatattaaattttgcaattgccttaatgaatatcctaattgctttctaacaaaagtctgttctccaactcatatcttaaatattttattttttagaatatattatgctggtcagttcatatttttggagaacgttttaaagaaggataaaaataattattttattttaccgtcactagatatgcatatgtattttaaattttttattgttatgtaaacttctaatatatatatatatatatatatatatatttatatacataatcatatgagttggcggttttaagaaacgcccaatgtggcggtttttaagaaacgtcccagcaccgtttacaactatgcaaaagtgaggcattctctcgcgaaattgttgacgctaatttaaaacgaaaattatttaatcgggttaatcggtatttgaaaatccatattgttttcctggactttcgcgatttatgtccatgttttcatagttaccatattttgacataatatcctcccctttggtgccgtaaagaattcatcaaaataaa

SEQ ID NO: 73061 - DNA, 1902 bp, Heterodera glycines
atgtcctgctctttctatacctttgctgttttgcagttggtcccacctccacaacacatgggaatccgaggcgagtttaaaggccgcgaatgtgaagggcttcaagaaggtcttacttcaacagttttgtcttcatataataaacaatttaggtggagaattacagcaaacgcgaagcggaggtggacgtatggtttgtttgtggcattagttaaacggactaatgaaacccaaatataggcgccaaagggccgacaaagaatacatcgaactgtacaactgcgaactcggcatgaacgatgagttgattgaggtaaacaacactgtgctctttgtttcctgggagtaattggctcctccttccagcaatataagcaagtggagcgtattatcggagagcaggcgtcccttgacaaaatcagcgataacggcgaggcggcgactgagtatctgatcaaatggaatggattgccctattcggagtgcacttgggaggacgaagggctgattcgacgcgaattcgaccacaaaatagctgaatttgaagtgcgcgaacaatcggatacacagccaaagaaatcgtacccggtttggaaccgtcggtttttgttatttgaaatggaaagctttgactttaggcctataaaagacggcccaaatttcaaaaacttgagtctatgcctgacttccttaggccagttgactctgaaatggaattgcgtgactatcagctggaggggctgaattggctgctttacgcttggtccaagtgagctgactgaagttgacattcattttatgtaaatttatttagaagcaacagcagcattctggcggatgaaatgggcctgggcaaaacgattcagacaattagtttcatttcgtcgcttttccatctgcatgatatgcatggcccctttctcgtcgttgtgccgttatccactttaccatcgtggcagaacgagttcaccttgtggggaagccgattgaacacagtcatttatatgggcgacgtcaattccagggaacaggtgggtaaatggtgatatgggtataacaaaaacaaacggcttttccattaaattccattcttacaattaactgaattgtcagatttttagattcgcatccatgagttagatgttgatgaacatgcaaagttatgcaaggccaatgttgtgataacaacatatgaaatctgccttaaggataaggtaatcttccataaacataagataaaaccttgaatttttagctttatctcggcaaattcacatggacttgtctcgtagttgacgaagctcatcggctcaaaaacgacgactcgcttctgtatcaaactctgtacagttttcacaccaatcatcgtttgcttgtcacgggtactccattgcagaactcactcagagaactgtgggctcttttgagcttcattatgccagaaaagtgggtgatgaactttcatttactagtactttaataaaaagttgcatttttacatagatttgaatggaatatattcaaaactaattttcaggtttaacgattggtgtgaattcgaacgggcacaccaagaccgtgaccacaaaggaatttcgtcattgcacagaaaattggagccttttttgttgcgacgagtgaaaaaggatgtcgagaaatctctgccggccaaagttgagcaaattcttcgcgtggacatgaccgctcaacagaaacaatattataaattggtgctgaccaggaactacgaggagctcagcaaaggcgtgaaaggcagcattaatggcaagcaaagaattgcaattttttaaaaagttgtttagatttatgacttttgttttaattatagggttcatcaacataatgatggagctgaagaagagttgcaaccattgttgcttg

SEQ ID NO: 73062 - DNA, 831 bp, Heterodera glycines
atggccgatgaggacgttgtcatcgctaaatttgatgcgactgcaagtgaatactcaatccatttgctattattctttaatttacaattcacctttttagatgatgtgcctccacaattcgaagttcgcgggtgattgcttttttttaaatttcctatctatgctttggcatttaatatttgtttttagatttccgaccattttctggctgccaaagaaggacaaggccaacccggttccttatcaaggaggccgtgaagtgaaggacttcatcaagttcatcgccgaacaatccaccgaccctctgaagggctatgggcgtgacgggaaaaagaagaagaaggcaaaggctgaggaactctgatgggtcaaaatatttgcatggtttgaacaaccagtgattttttccctcctcccctaatgtgtgccgattaaaaaatttggtcggtgtgcattttatacgtgttaaaacatcgttggggcttagtaatgggttctcgttttaatgttaatcaatgctgcagctcgtacaccaaaattgttttaatttatttgactttctggctcttttcttttattacttaaacattatgcgcatgaagagatgcttctttttggttttagaaatagtaaaacagcattcgcagttttaaaatctgaattccgaattgctttctcttcatggcatgatgggattgtgaatccgatccgttgttgtgccttataaagctcccaactcccaattgagggctattgtcatgctgtcccctgacttattttccgccgtttcaattgtaattttattttcaatttgtttgtaaaggaaataaa

SEQ ID NO: 73063 - DNA, 1750 bp, Heterodera glycines
atgtcctttacgccgtcaaatgcggcatttattcccccgccgcctggcaaaggaaagcccagcagaaatgtgccgctggtgtccggcccttcccccgccgccgctgcgtttcgaactcgtccgagcggtggcgccgctgccggagacaatgcaacgcaaaaaaattgtaattgttggagagtctcgaaaatgccaagccaaagatccgggacagagactcaaaaaacaataatatgttaagaaatttcactcgaaaatataaaccggtctttcgaatagccccctattggtatggtttaacaccttgttctgaacaaaaaagattgcattttggtggattttggcgggtgtctccgccaatttacattccaaaatgttcggtttggcttttcgttcgtccatccctttgccttttacatattactctcgctgcgttcagttgttgaccaatctctgtctgcgatgttcgcaaatcgccagctgctccagtcggtgtgcaacaatccgatggtgcaaagtttgggcaaacaggcggtggtgtcaatggtccggcagcagggcaaagagttcgtcggccgaacgtcgacggcgtttggcggcggaggcgccgctgcgaccaatcaaaaaacaatgccacaacggacagtgatgagcagcagcaacaatagcaatggtggtcgtactgcttcagcacaaccgacagcgaaccgtacgttgtgagagaaccgattttgggatgaaaagggccccggaatttggaaaaattcattgggaaagggaattattaaaacttgaacgaaagatcctggttgtttggtttggattgtgttccttaacttggccatgtgagagggtaaaatccgaaattggcaaatttcgaattttaatggtcgccaaaagcggcatcactttttagagtgtcattcattttttaaatgttttctaataaatctatggctttttgtcgacgaatgtccgtcattttgaaggccaattgagcagcagccaatgcttggccgagaaggaattggaggacattttcggcccattatcccttggcccgtcgtccaacaaaatgccgtcgtcgtcgtccaccgccgcccatcctccgcctcaatgggcggtgccctgcgccgggggcagtgccgcatttgccgacggtttttttaccggtgaattccttcggcatttttaattcaaatttttcttcaatgcttagctcaatcggcaccccttcgtccgtttgattcggccgcctctttccctgcccattccgccaacgccccgctttaccccgttttggaccgctattcgcctccctctccgctcatcgaattgaaaacgccggcctctgttcctttggatggccaatgtcgggctgtggcattgtacgactacgacagcggagtgcccggggatttgaaggtgtccaatgtttttttgtcccaattcctccctttcaattttgtcccaaatccatcgtgtttcttttgtaccgtctccccttacccgttcattacagttctctgcaaacgattgggttatggtcatttcgcgtgtgaatgccgattggttgcgcggtgaattgccaaacagtggtggcaattgtctgcgtggcattttcccggttaattatgtgcaaattgggcccaaggaattgagccgtttgccgtgggaggacgaggacagcggaatggacagcacaaagcaaccgaaacagcaatttctgagggcgttgtacgactttaaa

SEQ ID NO: 73064 - DNA, 478 bp, Heterodera glycines
atgaatttttctccgatcactctgtttctgctctcttcactcgccattttctctgcagcggatgcattccgccaacaaacggtcgccgttcgcggccgtttaatgtgtggggataagccattgacggacacgaaagtgaagctgtggaataaaaacaaaattggtagaaaatcataattttaaattcctatcaatatatttattgatcaaaaataggccgtgatgatcagctggcggacgtgaaaacggacgcgcagggaaatttcgcattggacggcggcgtcgggtccattttcggcatgaatgtgcacctgaaaagttgggcactccatttttgtaaatgcgaaattcgagcgaatccctaacattttttgccagtttatcacgactgtgaccgtggcatccttccgtgccaacgcaaagttaacctcggcattccgggcgagtacgtcacgcggaccagcaccgttcagcgatg

SEQ ID NO: 73065 - DNA, 825 bp, Heterodera glycines
atgtcatttttgaccaattcaataaattatggagatgctttcacacaagcagcagcaaaaggaggtcaaaaaagatgagaaaagtggaggaaaataagaaaaatataaaacccaaatttttagaagtgaatggcgatgcaattaatttggataattatggacaattatttgacggaaaaaacagtgaatcgatcactgatcaacgacagcttaaggtgggcgaaagaaaaacaaacaaaaaaacagacagaaacaattgggaaaatatttttagtattatgtgcaacccaaaagagattttgctaatttaaattcaggaatttcgtgaaaagtttgccagaatggaaatggaattggaaatggccaaattggaactcgaaactgtgagttttgctataaaaatattttattttctgttttccctatttgtcttaagaagacacttgaacaaaagttaaagcagcagcaggaactgattggattgaaggaaaaattggccaaaattgaacaggaaaaggagaaaaatggtaaaaataataaataaaggaattaataaaattattttatggaaatatttatttaaatattcgataaaattaatgaatttaaatttacagatgccaaatatttgactgttcatcatagggaaaaggaaaggggtaaaaagttacaaattattagggttgtaaattatatggattaatatcttttttctgcgcatatgctatggagaaaggggctcaaaaatagcatttctgcattaaaattttttgatttgtgaaggtttttagtccatataaatccatattttgggggttttcgaga

SEQ ID NO: 73066 - DNA, 54 bp, Heterodera glycines
atgctgtaccgttggggaattgaacccaagagaacagtaaagaaagggagaagg

SEQ ID NO: 73067 - DNA, 835 bp, Heterodera glycines
atgaaaaggtaagataaataatatttttaattttatataccaaatttaacagagaaatattaaaagtgaatgattattaataaaattgttatattcctttatttatactttttcagtttaattaccttcggattcgctgttaaacagcagaacaaattcgatggaataattcttagccacaagggcacttacgcatattataatcgtggcgatatttggattaacggaaaaggaaagggaagaaatggcaaatattcctacggtgttggcgataccgtaggaattggtgtcaattcggccactcgacagatcattttcactaaaaatggacttcgtttgggttggtaaataaataatgaatttaagaatcttaaatataattttttatttatttgattttatataaatcttttccttaactttttcacagattcctctgaatttttcgttgctcaatcttttgctgatgattcatttcatccatttgtttctatttggcattatggtggccaagatcaaattgaggcaaattttgggcccaatttcaaattcgatttggcaactctctgagggtgaaatattcaccaaagctgatcaatctgttctttttactgatcaatttgttcgtttaatcttttttttaagagtattcttggaatcagggaatataaatatcggtatgtacatgtgtatgaggtagagaattgatgactttgaaatagggttcggtccggtgggaaaaatattggaaatttcaattgaatagtaaataagttagaatcaaaaattttactcatttaaaaaaaattttcatttcgacgcgtcgtggttatta

SEQ ID NO: 73068 - DNA, 481 bp, Heterodera glycines
atgatttatcatcagtcacggaacagtcgtcaacatttgatgatttatcatcagtcacggaacagtcgtcaacatttgatgatttatcatcagtcacggaacagtcgtcaacatttgatgatttatcatcagtcacggaagaatcgtcaacatctgaggccttatcatcagtcacggaagaatcgtcaacatttgatgatttatcatcagtcacggaagagtcgtcaacatctgaagatttatcatcagtcacggaagaatcgtcaacatttgatgatttatcatcagtcacggaagagtcgtcaacatttgatgatttatcatcagtcacggaagaatcgtcaacatctgaaggtttatcatcagtcactgaagagtcgtcaacaatttccgagtcttgtgcgtcggtgtgcagtggatttggatggacaaattataatggcaattgttacaaagttatcgaaggactgatgaatcagac

SEQ ID NO: 73069 - DNA, 88 bp, Heterodera glycines
agaatatgtggccaattaatcaatttgtgttgtatattattaattttaagcatttttaaaacaagcataaatatttgtggagaagaaa

SEQ ID NO: 73070 - DNA, 890 bp, Heterodera glycines
atgttgacgactcttcagtgactgatgataaatcatcaaatgttgacgactcttccgtgactgatgataaatcatcaaatgttgacgactgttcagtgactgatgataaatcttcagatgttgacgactcttccgtgactgatgataaatcatcaaatgttgacgactgttccgtgactgatgataaatcatcaaatgttgacgattcttccgtgactgatgataaatcttcagatgttgacgactcttccgtgactgatgataaatcatcaaatgttgacgactcttccgtgactgatgataaatcatcaaatgttgacgactgttcagtgactgatgataaatcttcagatgttgacgactcttccgtgactgatgataaatcatcaaatgttgacgactcttccgtgactgatgataaatcatcaaatgttgacgattcttccgtgactgatgataaatcttcagatgttgacgactcttcagtgactgatgataaatcatcaaatgttgacgactcttccgtgactgatgataaatcatcaaatgttgacgactgttcagtgactgatgataaatcttcagatgttgacgactcttccgtgactgatgataaatcatcaaatgttgacgactcttccgtgactgatgataaatcttcagatgttgacgactcttcagtgactgatgataaatcttcagatgttgacgattcttccgagactgatgataaggcctcagatgttgacgattttttagggaccgatgttgaaacttcacataatgaaagatcttccgactgtgaatctttagatgatttggaatcatccgatgatgaatcttttgatgatgattcagatgatgaagaatgctccgatgaagaatgctga

SEQ ID NO: 73071 - DNA, 944 bp, Heterodera glycines
tacctattcagcattcttcatcggagcattcttcatcatctgaatcatcatcaaaagattcatcatcggatgattccaaatcatctaaagattcacagtcggaagatctttcattatgtgaagtttcaacatcggtccctaaaaaatcgtcaacatctgaggccttatcatcagtctcggaagaatcgtcaacatctgaagatttatcatcagtcactgaagagtcgtcaacatctgaagatttatcatcagtcacggaagagtcgtcaacatttgatgatttatcatcagtcacggaagagtcgtcaacatctgaagatttatcatcagtcactgaacagtcgtcaacatttgatgatttatcatcagtcacggaagagtcgtcaacatttgatgatttatcatcagtcactgaagagtcgtcaacatctgaagatttatcatcagtcacggaagaatcgtcaacatttgatgatttatcatcagtcacggaagagtcgtcaacatttgatgatttatcatcagtcacggaagagtcgtcaacatctgaagatttatcatcagtcactgaacagtcgtcaacatttgatgatttatcatcagtcacggaagagtcgtcaacatttgatgatttatcatcagtcacggaagagtcgtcaacatctgaagatttatcatcagtcacggaagaatcgtcaacatttgatgatttatcatcagtcacggaacagtcgtcaacatttgatgatttatcatcagtcacggaagagtcgtcaacatctgaagatttatcatcagtcactgaacagtcgtcaacatttgatgatttatcatcagtcacggaagagtcgtcaacatttgatgatttatcatcagtcactgaagagtcgtcaacatctgaagatttatcatcagtcacggaagaatcgtcaacatttgatgat

SEQ ID NO: 73072 - DNA, 2323 bp, Heterodera glycines
atgataatggctcgaaccatcaagagtctcgacattttttcctactcaatgattcttcaccaattgccagagttgaaaggaaacgcaggagctgatcaagttaatgcgttcttccgacaatttgacgcggtcagcgaagattggccaaacgaaaggcgtttaagggcacttaaatcgaaatgttcgggtagggcagagcgggcctacaattctgcagttgccaacaacccgtttcggtatgaaaacatccgaagggctatgaaacaacaacttgactcgacggatgccaaatcaacgtgtgcatttgatgagctaatgaccggggtatgcagaatgaacggcgaaagcattgacgacttagccgaccgcgtttcatcactggtgagaagggcctatcccggacatggcgaacatttgtacgacgattattcaattcggcatctgatccggtcgctaaaaaatccgaacttggcactcactttggaaatggcacggaagcctgacatgatttttgacgaattcgtggccatggcagcgcgcgcggagatcacccaaaatgcagcaaaagcagccgaacaaagagacacgaatttttgccaaaattttgaacaccgccgacaatttaatttccgatcatcgaatcaacctgagaattttgtccggtctttcaaatgctacaattgcggccaggaagggcatgtttcccgtaattgttggtacccacgacgcgatcagtcaaattatgccccaccacaatataatgcatcggctacgggagcggacaggattccctataccaatgaaagccaaaaatcacaacaaaattttccgaatcatacccaacaaccgagaaattttcttcgacaaaattatttggtcgaacaaacagaaaaatcgccggcgtgtcactcaaatgttttgattggaggaataagtgctgtaagtgaaaaggtggaaaaattatttgaagacgtgaaagcaaaagatgcgcagagtgctaaagagaaaagggaaatagtcggtaaaattttgttagcaaatgtttcaattcttgggcagcatgccaacgcaatgttagacggaggagcacagatttcgttgatttctgctgcatttttgaacaaaattttgaacatttcaacgtcgagcaaagaatttttgaacccaagccgtcagaccttgcgcgtcatcgacataaatggggaggaagtcaaatgctacggaattgtttcgttgccggtgagaagaatgggaaggaccgtgtcagttcgtctccacgtggcccaaacatcgttcggctacgatttgctcttcggaacaaattcactttcggacctgggttttaaactttttgacgaattgtccgacacaattgtcgatttcaaaccggcatcgaacaatgacaataaggcagtaaacatcatttatggtttgactttgattcaaaattccacgccatgtttgctagggaaagaacgaacagaaaaggctcggaaaaatgatgtagccatcagccaagaacaaaaagtcgcagatgataatgttgccaaaattccgaaaagtcagcaaaagtcgtcacaacaaaagaatcgatcgaagtggcaagcaaaaaacgggaaaaattcggcacagaaaggaggaaaattggagaaaaaatttggggaaaaagggagtgaaaagagtaggaaagatgtagaatgcaaaacagaaaagtcgattttagaggttcaaaaaaatggaaaagtctgccgaaatgttagaggacggagttctcaattggggacaattgaatttttggagggcgggaaggaattggacccgaaaaagtcgaccactggtaaaaagaatggcaaaacgaacccgatcttcagaaattttggtggatcgtacaaggaattaggaaaagctgggcatcgaatttcggcaaattttcgacaaattggcaatgtaaacgaaaatcgagagaaaggaggcggatggaagagaaaaaccatctattatgcgactccatcggggccaatccctaaatttgttggatcgtcgacggcggacggcaatgtgtcagctgagaacccttcctttcgggccgaatcaaggaaattttgacggcagagacgccttttttgttgggggcgggatgtgataatgacgaatatttattttagttttaaatttattggcgttttgttcttattattgtttgtgaattgttttagttctttttcagactttatgtttttgaattcatgaagatatttttatgtttattatcgtctctcctcctgaattttattgtggtgtttgattttattttggaaataaa

SEQ ID NO: 73073 - DNA, 465 bp, Heterodera glycines
atggttatcccacgctcgccgcaccaaactcgccagcgaacgcgacagcaaggcgtcatattggacagcgacggaatgcaaattttgcgagagccgaatgaggaaccaccgaattttgttgtttcggaggcaatccgtcccgcaaatgaaattttagagagcgggagcattctcggcggcgagcaatttcgacaacgacatttggaagtgaatgttcatgaatttgaaccggcagcaaacgaagaaaggatgagtgagcacttagcgttggtggcaccaatggttaatgcaggttcggggcatctcgaaaattttggaagaaatatgggagaacggaatgctgtcgaaataagaaatttgccaccgaatggccatctttttggagacaatggaaactttgaggatggttgggcccgatcaccgaactcaccgttattcgaatcaagtcgccatgcttatctgaat

SEQ ID NO: 73074 - DNA, 438 bp, Heterodera glycines
atgggcataaatattccgaattatatcggtttagaagaaaaaacaaacaaaacaattaatgtaagatttattattttttcgtgaaaaaagaccaaaaaacagaaatataactctttttttttgactatttatgaagaaatctagggttggtcgggaccgggaattttgggaaaaaccgggaccgggacttttttggttgaaaaaccgggactttttggctgggaaaaccgggaaaaaacgggaatttcccggtcccggtcaaaactggtcaaaaccgggagctaggtactcagttgtccgtgtccaggtcccggtcccgtacaactctaaagaaatctatcgatttttaagaaagatgaaattcaggccgtccatagtccaggaaacaaatatggttccgtataatttccagccctaatcatattttgaacaaataaa

SEQ ID NO: 73075 - DNA, 214 bp, Heterodera glycines; identical to SEQ ID NO: 72307

SEQ ID NO: 73076 - DNA, 334 bp, Heterodera glycines
atggtgcttatcaacaacccaaacccaatttgtacaaaaataatatgtttaattattatttttgtaacaatttttgatacaaatccaattctttgcgccaatctaattgatgacacaatgtcagaagtgttcaaacatatgaaaatacatggtgagaagctataaaacaattaacgaataattaatattaattaccaaaaattgatttaaaaaaatgtaggaacgatttgcagggtaaaaatgttgactccaaagccattagatttaattaagcccagcatacaagtaaagtaatcatttggtatcattatttttagggttatccattatttaa

SEQ ID NO: 73077 - DNA, 1031 bp, Heterodera glycines
atgattttctgcggaattggcggttcgctggatccaacggaatgggcaaactttgtgaagattattaaatggaaaagtgcaacaacaaaaaatttcgccatcgcatttcgaaatttgccgcctattaatttggtaaaaaaagtgatgtgattgattaggaaatatggtcaaattttgaaacaaacgcaaacacttggccaagttttgggattaggctgtgattttggattttgagattcatcgccgcccccccccccctcgggcaattgtttgcattgctgtgtgcattcatgttaatgcaaacaaataaatccatttttgactcttaaaaatgaaattagtttaaattaagccacccaccgatgatagcccatagactgaggctttaaaattgaaaaaaattgataaagctctctccaaccggggcgccaatcaaaaaatggccaccaaagcacaaggctgcctaaatttaaaaacaaaaagtcatattcactggattttaaacacttgaagcataaatttctcgaaaatattttgttgtccctatttagatttggtgtcgaaatttcagaaaaatccaacccgagttccttccgttcaatatttttaggatttttacatttgatcagaaattttggaaagaacggaatcgggatttccgggacaaaaaaaaatttggttttgccgccgaaactcgtggggtttctcgaaaacactcgggattgaccgggagtctaggcggcaagaccatatccggtccggtctctctaatttttaggcccttcttcaagggtacattattaattattcaatttaatttagagctggtcgggaccgggatttttgacaaaaaccgggaccgggaattttcggattgaaaaatcgggactttttggctgggaaaaccgggaaaaacccgggactagtcccggtcaaaactggtcaaaaccgggactgggtactcagttgtacccgttttttcagtaccagtcccggtcccgaccagctctaatttaatttaaacaattaaa

SEQ ID NO: 73078 - DNA, 177 bp, Heterodera glycines
atgccgccaatgatttttttccgtaaactgtctccacatatattcgtcacaataactgggcaacaattcgcggctagtccccgacatcgccttgaacttcattttcaagttcttccaaaagcactcgacatggcttgtatgggcgccggtgatcggatccacaaagttcgaatccgg

SEQ ID NO: 73079 - DNA, 450 bp, Heterodera glycines
atggtgccatttgaattggtgaacgaatggacgaaggaaaagctgacattggccaaggcaaacgaaaatgaattggacaattggataatgaaacgatgcaaaattattggggagaaagaggaaaattgggacaacaattgcaacaatgtgttcttttggcttgttggtggcattgattgcattgggtgagcaattaaaaaaaggcatttgattttgtttaaataattcaaattgcgcttaattaaggccattgtctccgccaccggcagaagaaacgggacaaagcatcacaaaagtggcgtcttctgctgacgatgaatgagtgacggacaaaagaacgaaacaatggtgattagtggaagaagaaatgattatttaagaatggccaaccgatcataattcatcagtgatcaaatgcaatttatgatgaaaacctctcaatttcggtaa

SEQ ID NO: 73080 - DNA, 554 bp, Heterodera glycines
atgacattttacgcgtcccaacaacactttacgcgtcccatgacattttacgcgtcccatgacattttgtgtccatggcagggatggcattccgaggccccaaaaattttcggaaatcgaaattccgtgccatccctggtctcatggtattatagttgtcttaataactaagagaaaaacttttttttgttaggtattcaataaagtttttaactataaatttcgttgttaaacctaaggttatcatgacaactcatacacaggcaactcgaacaatggcttattgttagactaggcctaagtttaggcttttgtaaattttcttttcttatattagttgaacttctgttgacatcaataagtgtgcttagagttgcttttgcacttctcttttatatgcaaccacgcgaaaacgtcctggcccgccaaaaacttacagaaaaatattttttcgtaaatatttctggcttttttatcaaaatatttgtcccagccctagtgattagtagggcttccaaaaatatggatataaaatctctgaatatggcaataaa

SEQ ID NO: 73081 - DNA, 428 bp, Heterodera glycines
atgtaaaaattaacagaaattcacgggttcataaggtaatttggacaataaaacaaaaaatcacgggttcattcgatagttgcgagaaattccccggagaaacacaaataatgtgaaattgattttttgaactcgcatctccaaaattttgtcatcccatcagaactcattttagcgaacgtgtaaaagtggccttcgtaagacaattttactttttgttttttggttgcaattgggttagccatttctgaaaaatgtccaaatcagaatgtacatcaaattggttaactattaaaaaataataggatttggaataagtaaaattgtaaaaaatgagcgaatgttaattaaacctaacttatgccaagtggcgagggatccctcaggcttagtttttagaatcttaatttttaaaaaagcacattttt

SEQ ID NO: 73082 - DNA, 636 bp, Heterodera glycines
cgacgatgcaaagcatgtggattaaccctaattaagccaatgtctggccattcaaaaaacgacactttttaaaattccgcattttagggggcaatcaaaaattccacattcttttacatgacaatccaagaatccgttgaaggaaaattcaactggtcaaatggcgccaaatgctcaatttattagtaaattatacaccgaactaagtcaaaccagccaaaagattgtcgaacttaataccacataaattgactttcactgaaagcattttaaatgttaaaaaatatatcaagttcatccaattcgacaatccatggcatgagaattgggacaagaatgattgccaaatgatgaggaacaacaaaaagcatcattttcaaatttcatgcatattaagcggtgcgatggtggtcaggtgattgattttattcattcacattttgtagggatgacaagtgtttattcccgtgtttgtttgtccgtcaattgtatgtgtgatggatgtgtcaagaaactaataaacgaagacaaaataaatatccgtgttcaatgggagagcgagcgagaggaagagagaacaataatgatgataaagcatttttttttgaattttatcatttgaatcaatcaattaat

SEQ ID NO: 73083 - DNA, 492 bp, Heterodera glycines
atgatcagatcactttccactgggggagctttatttttcaaccctaattttttcaaaaacccaacaaaatcggtttacctcagttgggccggcacgattgggccccagaacttgtttggctattttttctttgtcaaccaaattcaacattgttagtatcattcgaaagcttaatatgtttagaagctttttctaagctattgcttcaccattagacaattaccaaaaaagttatacatgaaaattgcgaaaaagtcgaaattttgaagttttttcttaataaaattttttccagtcttgaaaattgtaaggctaatagagcatgtgaagagctttcgaatagtaccaacaattttggattacaaagaaaaaagctatagtgaaaaagcatgctgggacccaacggtgccggcccaactgagcgagtccgaacaaaatggcgatttttcgtaaactttttgccaaaaataacaaatttttccaatgctttta

SEQ ID NO: 73084 - DNA, 891 bp, Heterodera glycines
atgagcggaattattctgacgtgtaccagaataagcggaattattctgatgtaccagaataagcggaatgattctgacgcgtgcaagaataagcggaattattctgacgcgtgcaagaataagcggaattattctgatgtacctgaataagcggaattattctgatgtaccagaataagcggaattattctgacgcgtgcaagaataagtggaattatactgagaataagcggaattattctgacgtgtaccagaataagcggaattattctgacgcgtgcaagaataagcggaattattctgacgtgtaccagaataagcggaattattctgatgtaccagaataagcggaattattctgacgcttgcaagaataagtggaattatactgagaataagcggaattattctgacgtgtaccagaataagcggaattattctgacgcgtgcaagaataagcggaattattctgacgtgtaccagaataagcggaattattctgacgcgtgcaagaataagcggaattattctgattaccagaataagcggaattattctgatgtaccagaatagcggttctgacgcgtgcaagaataagcggaattattctgatgtaccagaataagcggaattattctgacgtgtaccagaataagcggaattattctgacgtgtaccagaatgagcggaattattctgacgtgtaccagaataagcggaattattctgatgtaccagaataagcggaatgattctgacgcgtgcaagaataagcggaattattctgacgcgtgcaagaataagcggaattattctgacgcgtgcaagaataagcggaattattctgacgtgtaccagaataagcggaattattctgatgtaccagaataa

SEQ ID NO: 73085 - DNA, 354 bp, Heterodera glycines
cgcttattctggtacatcagaataattccgcttattctggtacacgtcagaataattccgctcattctggtacacgtcagaataattccgcttattctggtacacgtcagaataattccgcttattctggtacatcagaataattccgcttattcttgcacgcgtcagaaccgctattctggtacatcagaataattccgcttattctggtaatcagaataattccgcttattcttgcacgcgtcagaataattccgcttattctggtacacgtcagaataattccgcttattcttgcacgcgtcagaataattccgcttattctggtacacgtcagaataattccgcttattc

SEQ ID NO: 73086 - DNA, 3634 bp, Heterodera glycines
  unsure (1)..(3634): unsure at all n locations
atgaagccactgtggaagtccaaagacatcgtgtataaacaggagctctgtgtgcttttcactgaaggtgatgcggggcaagcaggccactacgacccaatcaaatcaacaggcagattatttggtgccaagacaagctattgttttggggtaatatatgtgtgtaaattgagtataatgcaaatatttagtgcgaaatgccatacacacaccagacccgtcacaacggaaattgcaaatggaaatgtcgcaattgtcaacgagtaggcaaaacctttcgtgggacctgcagggatagtgacttttgtttgtcttgcctcggctgtggaaaggtatccgcataatttaattaaataaacaaacccttgtgcagacctttgagagccgtgaatgctttgaacaccatgcaaaggttatcaaagcaacaatcaagaagggggacaaagaagtgaaaatagagaaatcaatgtgcaaaagctccagaaaatgcgtgaaatgcggcgttatttaccgcgcaatggtctcttccttatctttcgttttaattatgtcagttttcagcaccaggacaaagagagaggtcacgtctgcggtcataagttctgccgcgtgtgtctcggattccatgcacctcgtgactgctacattccgtaccgcccaaagaagaagacagagaagcgaatcatattcttcgactttgagtgcacgacggatttccagccagatcctgaaattgcccgtttcaaacatcaggtaaaaaaattcccatatttcagtaacatagacaagttttaggtgaatttctgctatgcacacgtgacttgcacgagttgcatcgagaagggaatctggaaccagtcgctggagcagaaatgcggaatctgtggcgactaccggacgtacgcgtgggcaccattcgacttctacaacaccgaagttgagcgccgcttccgtgttgacgacccactggcatcattcaccaaatggcttttgaacttcgagactgagacgctgggactcgatcacaacgagcgtggaaagaaacgcaagcgcaccgttaaacagaataacaacaacaatggacaggcctgtttctttgacaacgaagccgaagatgatgaagacagcgacggcaatgatgttgagaacaactacatgctcggatacgatgaaggcggagaaaaaccaagatccgtgaagacctacgcctacgcacatgctggtatttacgaattaaataatcaataaacaataattcaggctcgcggtatgaccatgtgctcatctttggcgagatgctacgcatgggtgttcgccctgatcttgtccgtcaaggaaaccatctgctggagatgaaggcacataagaagggtgccatcacgacaactatcttccgggacaggtaaaaattatggaaaaatggcattatttattatattgacaaatttcagctacaaactcattccactgaagttggcctctttcgtaaagacgtttggcttgaacatcgatggagtggaaaataaaaaatattttccgcataagtttaataaggtgaaaaaatgaaaaaaaatatatatatatcaaaatccaataaaattttaggccgtcaattatggaaacgtcttggaaactcttccaccgcttgaggattactcaccaggcagccacttcccagaggagcggatcaaattggagaaatggcacgctgacaacattaacacacgctttgacttgcgagagatcatcgcagactactgcaaaactggtaaaattatgatacatttcaaagtattctgcgaaacttcagatgttcaaatcctggtacatggtgttttgaaaatgcgagagctcttcatggccgagacaatgcatgatttaacagattcaatcaccatcccggtagctgagaaacgtgattttttccaataattttaaatttcagtctgcctgcatgaaatactttgtagcactgtcgtaccaggataatgaacgcattgccattgtcccccatcttggttatgaaaagaggggaaagcagagcacaattgctcgcaagtacctcaaatggcgtgcgggggaagagatgcgaaacaacggctggacactccgcttcattgaaagccccgggggcgagtacaaatatggcaactatagcctagacggaatgatggagcgccctggaatggcgaaaaacctcgcgatcgaagtgcaagggtacgtattttatttaataaaaataccatcaatgtccgattatttaagctgctattggcatgcttgccccaactgttttcctgatgaggaggcgattgttggcggtggagagacagcaggtgcgatccgtgcgagggatgccaagcgtatcaaacaaatcgccagggactttgaagtagagatcatttgggagtgccacctgatgcgtatgctggaggaagatcctgcaatgaaggccttcttcgataacacgccggactcaggccctattgaattccgggacgccttctttggcggtaaaattcggctagttttttgtaaaacattccaaaatttaggtcgaactggacccgattggttggccatgggcatgatgaagccaaacggagagaagctgaaccgcagcatcaagatcaaagacttcaatagtctgtatccatcacggtgagctttataaaaaaattaaaattatgtcaattcaaaggaacatgttcaccaaatacccgattggccaccccaccctgctcaaaatggacaaaaacgtggaatggaccaagccggagcatatgattgataatgatggaataccgattgaggggatcatcaagtgttttgtggtgccaccccgccactgcttgttagacatcccggtaatcccgttccgaatgaacaacagaactctcttcatgctctgtcggaggtgctctgaaatgtatccaaaaggccttgtggaccctgattacaactgtcctcattttgaggaccatgaacgaggtaattctgtgtaaataattaaaatataatgcctatttaggtttttcaaccaccattacacacattgaattggaagctgctctgagagcagggtaccgagtcacgcgggtcttcagtgcgtacgtgtggcgacgtgcatgtgattggagcgacacattgtttcactcgtacctcttcaaatttttgaagataaaagaagaaggttggttgtttgtaacataaaattattataaaatgcttaagcatccgggtaccctgccaaatgtttggtggatgggatctcggaggaggagagggaagaaagacaacagcagcacattgacagctgctacgcaaagagcaaagtgcgtcttgaggcagccagaattaagccaaatccggggctccgctatattgcaaagctatgtctcaattccctatggggacgcttcgcactaaggtaaataactcaacaaaaaacataaaaactactgcacaggaatcggctgaccanaaccgaaattgtcgacagcaacgcagacctcggaaagctgctcaacgatgataagattgactcagtagcctcgacaactgacccgatcgggtctggatggtctgctataagacaanggatnngacatgtgtcgagcatgacacaagcaac

SEQ ID NO: 73087 - DNA, 1289 bp, Heterodera glycines
catcggcctgcaatcctccgacgaacctcaaatttggggccgttgtctgcacggcttttccgccggcattcgcgtcgcttgcctctttcggttggccattcagcggaaagcatttgtgcagacgctgaccaaattcactctgctcaccgcgaacagttcactgtccgaaattcggccaaagaatgtggagtcgataaagctactcatccaaattggggttgaaaatggcagccatttggacgtaattgactggcaaattggctaatttcaaatttttaaattttatttttttagcaaagctggtacgacgtgttgaaatgcatcagtcagcttgaactggttcattccatcggcacgggaaaccacggtaattaggatggatttgcgtgtttttactcatgacaacggattcagctgatgctaaaccccactggatgatggttccccaaatcccattccttaaagacaatctgaagagcatgttcaacatccgtgacaagtccttctccaccgtgcagggatatttggctgaaacatcctcccaagacttagtggtggccatagacaggtgacagcaattattctgatggggtttagacttttaccttgtttttgcaggatattccaagactcgagtaaactgtccggcgaagcggttatcgaatttgtgcgagcattgtgccaagtactgctcgaagagttgtgcagtcctggtgggccgagcatgtacatgttgcagaagatcgtcgagatttccttctacaatatgaaccgaattcgtatagagtaagtgcgaagagatgttgctgtttcttcaataatttgtggtttgccattctcagatggtcaatgatttggtccgtcctcggcgaacacttcaacttggccggctgcagttccaaccaggacatttctcactttgcgttggatgctcttcgacagctttcgatgaagtttttggaaaaaggcgaactgccgaacttccgtttccaaaaggaatttctgcacccatttgaaggtgcacaattttctcatcctttcatttttactcgaaatatccctccacaattcaagtgataatgagtcgcaacaagtcgctgtcctgtcgtgaaatgatcgtctcctgcgtcactcacatggtccattcgcatgccgacaaaatccgctcgggttggaagaacattttctcactgttcacactggcggccggcgaaaaggacgagcgaattgtggaggcggcattcaccacgacatccgaaattataagaaaagattgctatttccattag

SEQ ID NO: 73088 - DNA, 4043 bp, Heterodera glycines
ttatttcttttaaaaataacaattttttgtgcatgacaatttatattttattaggtggcggaatttaagaaacgcgcagcacgcatttgagtggcattttgggtaggaactcaatttgacagtaattaaagtgtaaaattctctagatcaattgtccgtctttttgatcattcgtccgttccctttaatctctctgttgttgcgttttcgttttttgtttcatttcctttggccatcgtctttttgtttggcgttatttgctctgcaacaacagaagtggcaccaatgtgggaaagtcgcgcgtgtgtgcttaaaaaattaaatgtaatttaacaatttcctaaattcgttttacaaattttccacggcgtgccaatcgccacaccttttacatttattggcaccggcacttatcaatcaatcgtcaattggttgatctgaccagtaaaaaaacgcaccgaagtccacgcactgtgaacgcccggtagccgcactcggcacaaacgacgggcagtgagtgctgctgtttctggtggtggcccagcagtgcgttggtcgccgtttggaacggacaatgcggacattggaccaacggcggagaggcggacgggggcgaggaagaagacgaatttgcgatggatttgaggccaagcgaagggtgtgcaacttctgctaattggccattgggcgctgttctgttggctccgggcgaggaattcgaagtgtcgtcgggtcgaagccgattccgactgaaggagaaaaggaagcgggtaaaaaatgccaaaatcgatgcccccggcaaatgtaccaataatatttcttatggccaattagcgtctccatggccaaaaatgatacatcaccgcacataaaaaatgaaccgaacgacggtttgaaaaagttaactttattttaataatttgcttccaaatttattatttttttttgtttatggtttttaattttcttatacattaattgttttttgatttattttgcaatgaattccgtatttcaaaatgtcggtttatattcattttaacccgttaagtattcaggggtcgctgatcacaaaaccagtatttcgatcaactttgaccccggaccagaattctgataaaagtcgaaaaaaaatttttcttcaacaaatagatattggtttgtgaacagtgatttagaaatatgaaaaaaaattgtggcggttaaactatatagaagcaaaaatttctaatttgtacaaatccttatattttttaaatgttatctaattctttaagatattaatggtacgaacaaagcaatcttttccttccgaggctcagtgttcctaatcgtctttacaaaagattgatttgcctacttcaacaggaaatcaaacgggttataagctaccggtcaaaaaagcagtcaaaccggttcaaagctccggtgaaaaaaaagcggtcaaaaattttgaattattatgaaacagaacatttgaacaagaaaaggaaaatgaaagaattattttctgaagataatgaaatttctaaaaattttttgaaaaacataagaaaataaatataataattcgttcgcttgcgcttctttggcctgtaataaatttagttttacatcgccaggcccaagttgttttaaaatatcaggacaagtttatcataaatataatccaatagcacaaccgacagaccataattcattgccaacaaatggacagttgtattttctcgatagttgcgaagcacaaaatgtaattacattctcataatttagatatatttttgacagaaaaaatagaaataattcttagaaaaaatttccctttgctaaagcttatgaaatgatgagaaatgtagtagacgaacaaaaacaattaacaacaacaaataaaaacaatgaaacacaggaagttaaaatgttgttgagtttacggaaaggttttgatccaaatcaatacaatctccagcacacaaatgaagtagctgcgattattgtatgcaatgcaaatgaagaaataccagcggcaaatataattgttgttgaaaagggtagcaaaaaaattaaaaaaaatttatcctttgttatacccaatgggaacaaaaggatggagctttgacataaaaatcaaaacggaaaaaagatttcattttgtgattttattaaattcaagctattttacagacattcttattttttgcctcatcatttttctaatcaactttttcaacaatggatttttgaccaagcggcccgtgttgaatgggatagactgaactatattagaactcaccaagaattaagagcgtgtagttataagggattagaagattatctttttaacaaagctgaacaaacgggagtaattattggaaaacaagtgattttaccttcgtttttttaggagggccaagaaacaaatatcaacattttatcgattctatggctattgtgggagaaaatggaaaacgggatttatttttgacatatacaataaatcctgaggatccggacataaaaaaatgtttaataaaaaatcaaactgaagataggccggatatcgtagcaaagattttcaaattaaaagctgatacgaaatttttggtaaagttatagcttattgttgggttgtagaatcccaaaaaagaggcttaccacccttacattttctaatcactttacatccaaaagataaatttaaaaatgcaaatgacattgacaaatttattcgtgctaatcttcctgataaagaaaaagaaccttttttacgctcttttttagagaagagacccaaataggagaagatggatatgctttatataaacgtcctaacaatggtgattttgaatttgtaaaaggacatcgcttaacaaatcaaaatgtcgcaccttataatccatatttattaatgcgattccaatcacacatcaatgtagaattttgttcagaaataaacgctgttaaatatatttacaaatatatctataatggatatgatgcagcaacagttgaatgtgtaaaagaggagccgaatggtgaaaaaattatgttaaaatacgatgaagttagccaatatcttgaggcgcgttatttgagccctgtcgaacatgttatcgattgtttaaatttgagatatagggtaaatcacattcaatcggacgattataggtacatttagaaaaacgaacagaccatttatattgataaaaattccgaaagtgataatttaaaagaagctatgcaaaaagctagcaaattaacggcatactttaatttttttaaagaatatccgaacgcaccggaatttaaatatatagaaatgccaatttattgcacttttgaccattggaaatggccactaaaaagaaccgataaagttattgggagaatatacacaataaccccaaaaatagagaattatattatctccgttatttattgctcaataagcacgctaaaagttttgacgatttaaaaattgttaatggtgttaaatcaacatatatgccgaagcgtgtttggcgttaggattaacacgagatgattcagaatggaacaaatgcttagataaaacaagccaattcaaatttcataaaggtcttcgttcactttttgcaaatattttaattaattgtgaaccaaaatacccacttactttgggaaaaatataaagataacttaagttaggatcttaaaaaatcgtatactgatcagattgcttatcaaatagctttatcattaattgaacaaaaccttctaaaccatcaaaaatgtttggacgattttaaagatatgccaaaaataaatcaaaatattcagaatatttcagatgatcagataatgaatccacaagatgaattaaacattgctttaaaaaaaatattctttaatgaactgaacaaaaagtaatttttgagcatataaaaacaatttttgaatgctctaatgaaagctcatcaattgcttttacattgatggaccagggtggacaggaaatcgtttgttcagaccgctatttatcatatagccagaggttttttaaaaaa

SEQ ID NO: 73089 - DNA, 265 bp, Heterodera glycines
atgtcttcaatgaacgataatgtaccgttgcaagctgaaagaaatggaattcaaacggatagcgaagctgtgaatactgacaaggtccaacccaaaccaaacacccgcagcatgatcaaaaaaagtcgctggggcaataattgtgcaaaacctgtgcaaaaggatgctgaagaagcgccagctgtcaaaaagaggaaagtcgaagacaacgagctgtgggtactcgtgaagggaaagtatctattgggcttctacctgtgtgcgg

SEQ ID NO: 73090 - DNA, 866 bp, Heterodera glycines
atggccattaacatgagcgacaaaaagggattagtcaaacaaatcctgggcgaagccgatcttaccattaccacctctggtattacagttagcgggccgaggctgtcaacgccacgttttattccctttgacgagagcggcaaatgccggtcatgtaaggcaaccgaggtggaggtcgacacgatggtgacaaaagagggcatcactatttggtgtacgcgcgtcgacaaagcgcagtttgtaccgtttgatgtgatctacgatctgccgggacattgcttttttcgagtgaagaacaagtcaagagtgttcaatgttccctacagtgagctaccctccgacacgtgtgcagacctaggggtttcaattgaagagaaggacttgaagagaaaagcaaaagtggctcttgatttggttgaggcaggaatggtgtcggacgcaatgcaggggggagcacgttggaagaaagcaaagactgcgatcgatgtgttaggtgatcttttgcttactgaaccactgagcgaacatcaaaagaacactccagattcatacctaatgagcctcaaagccgacaatcatcacaagtgaaagaagaaacaacttcagtttccgcttctgcagctgggagccctcaaacccacactgttgaagagatgaaggaacaaaatcaagaagatgttgaaaaaaagatgccgcctgcactcccggatcctccaactatgagtggcgaaaagaaggtggaccctaaaaaagaggatctcggagacattgataaaactcttgatgaattttttgagagtattaaggcagcaaccaccaatatgtaatgatatttaagtctttgcttttgtattcttttaaccaca

SEQ ID NO: 73091 - DNA, 1070 bp, Heterodera glycines
atggctgtttgtaaatgcaaagtgtgcgacgagtgccgtcgaaagcaacggctgcatgaaattagcgagcggaaaaaaattattgaaagctgcggtggggatcaccactatataaaaatgattgaattacggatgcgcgacttagagctatataaacgagcttataggcgaataaaatctgtgatcgaccaagtgctggaaggttggtaatataaggagggtgaaatttttaaaaaaatttagggccattccatgtaaaatgcacttcaaagtgccaagaagaatttacatattatttgattaaatgggaatgttgcactgaggattatggacggggagtgggctgcacatattcagaaattagtgatatagtaagaaaaaaaataataattaaaataatatttaactgttagagccaaaatgagttgttggcatattacgatcgggaacgggtggtcggcgagatcgatccgccgttggctgataacaatgcaccgttggcaatggctggaattatagccgagttgcgcggtggaaagttaccgcagggaaatttggctcaagatgatttgacccaaaatgaggacctaattgcggcgggggaggaggtgattataaaagaaatttttaaaaaataataaagttaaatagtaaattttaatggataaaaaaatcgaaatgttgtgttaattgtaggccgcagggcaagatgctccagttaaatagcgggcgcgacgcaaaaacaaaaagaggggcggtaagaaggtaaaaaatgggatagaagaggaggaggaagaagaagaagcagaagatgagggggaggaggaagaagaggcagaagaggagggggaggaggaagaagcaaatgacagtgtgcagggtagcagtatatggtccgggtcaattgactcggccattactgccttctccacaatgtcggccacgcagcgaaaaaaagtgctagggaggagccgacaatggtggcaagagcgcaaagagcgcaaaaaggctgaaaagggaagatgcgctaaaacagtaggagcagtggaaaatgataaattgaattttga

SEQ ID NO: 73092 - DNA, 933 bp, Heterodera glycines
atgaaaaatttgctgcccgaacgggcagagagtgcgtgcccctcattaattagcgagttaagtagggctgttaatgagctgcagcgacactgggaagtgcatggaaccacttattttttaattaattaatgccagtggcatttttttggcatttttatttttttgcaaaaatttgtttttacgtaatttttaaaacaagttgagcacatttcagtgtcttgaagaagaattgtacacaaaatggacggacgaagaaattggcgaattcatttattcattgtgtatttaaaaatgggctaattagcgagtgatatttattttatattttattttaattagtattaaatgatatggattttgaaatttaatttattaaacataaattaatttaaacatattaacttatttaaatgttaactaaattaagaaatgattaaaatgtttgcattattgaataatataaaatctaaatattaataatcgcataaatggaaccaattaaattatttaaatctttactaaaagctattttaaaatgattgattattaacagggctgcaaaaaatattcaaatgaatattttttcctggcttctccatgctctaaatagtaagaaaaacactttcttttttgtgtttgcgtataaaagtcggaacttttatttgcatatttttgcatattttaagtttttatgcatatttaatgcatattttgccattttttgtacatattttcagattttttgcatattttgccatttttcgtcaaatattttcagatttgaatatctcttaggaaaaatttttgaaaatacctaaaattaaatcaaaatctgaattgatgcgcgagtggttaacagtgagtttcactgccgaaaacccttgagaaattttgatttgaaattgcaaaaacaagcgatataatttatgagga

SEQ ID NO: 73093 - DNA, 217 bp, Heterodera glycines
atggtgcgtctaacgccaacaatagtttttgttttggcattgtgttgtgcctggcttttaaccgatgcccaaaactacggagcgatgattgcaaaatcgcaaaacaagcgggagacggaccaggaggagacgagtgcaacaacagaagcaacgacgaaggaaacagaagtgacagttggcgagcagcaggacgaagtcattaattaatatatgctaa

SEQ ID NO: 73094 - DNA, 1874 bp, Heterodera glycines
atgacacaaaattgtccatttttggctaatccattattcaatcaatcgtaaagccatcatccaaaggacattttgttgagaattttgtgctctttcatgagggtttaaataatttttacgaaaattttttccaacccccataagaattttattttctgaaattttcccggtttcaagtaattttctggttttcaaatcaccatgaaggaatgatctgaccaaattagtaaaagaatttttttttgattagcttccaaaaaataggctcacttgaattatctcagatttttggggcggctttttctccaatcttgtggttttttgaaagtgaacatatcattttaaatcttattcttttggcattctgcttggcttgcacaatttcaaacaaaatttgtccggtagaactgtttaatgcccaaattcaagggtgaacggtatcattttgtgtcatactgtacctttgaattatttatataattaaaaaaaataatttccatttaagcatgccgcgttgaaagccttgaaggcgagcaaacagtacgacacactcgcgatcatccacaaaaatgtggacgggtcgggcgccgcacattcggggcccgcctttttgccgtggcacagggaatatttgaaaaggtgaaaattaaaaaatataatgtatttaattaaaattagaatcacaaataattatttccccgaagaaacatggctgagaaatttcgtaaatccgccaaaatcgctttttttagcaaattgtcatataccttttcttagatttactaaatcacaaccttcatggaattatttgatagacctaacttttctcaatagtccgaaattttcaaaaactgaccaaaaacttaaaaaaatgatttttctttttccttaggtaattaattagattgtgtttttattttaaatatttttgtggacaaattacctaacttgtttacaagaaaatattgtgttcaactgatttaatagaaaatataattacaaactattaaatgtagcaattaaatccaattaaattaatattagcaataaaaaattaatattaaaaaaaaaattaaaaggtacgaaatcgcactgcgacaaattgacccaaccgtcgcattgccttattgggactcgtcgctggaaggccatttgccgacgccggcggattccattctgttcactgaaaatgtaaagaatttaattagaaatttaaaatttaatagtatttaaatttaattacagccgaaaaaagtcaataaaatataaatgttttaagtttgctggtgaaaacaacaaaaaaggcgaaattgtgagcggcgactttgtcaactggagaacctttgacgtaattaacccctagtgaatttaattaattaatcaattaatgcattaactttttttaaaagtaccaattttacaaattttccgagaaaaactgatcataacatctcttagacacaacaaaattaaataatcttggcttcatacgatagttagtgggttgctctattaactaaaaattttcaggaaattttattcaatttttaaaaaaaccatggcaattttttcaatcttttcgctaacaacattctggaaactgtctgaaattttctggaatttatttggctaatagagcaaaccaagagctaattttccaagaaaaatctgaagaaaattggcacttttacgaaacgaccgagcaccactttttaattaattaattaattaattaattaattaattaattaattaagatttatcacatttcagggaacccgaaacctgaagcgatttgtgggtgaaatgggcactttgcccaccgacgaagggtaattaaggggcaattaatttttaacctttcttgtattcaa

SEQ ID NO: 73095 - DNA, 3435 bp, Heterodera glycines
gtcgaatttactcactgtcgaaatggtccagtgtcgaaaatgctggaaaacagtgagagtttttgaaatagttcagtgtcgaaatttctctatgtcgaaaacgtagtgtcgaaattacttagtgtcgaaaatactcagtgtcgaattagcgatgggtttgaggaaaacgggtgttacataaataaataaattaacccaattttttctttttattcagcaatgcgcaagtccccagcatttctctgccggaccaatgcatccgttccaggcattttttatatttaattttttatagaaaaaacgattattatttattttaaaattttaatcataaaactttaattaaaatattttttttcaatttagccttggcagaacattgacggattggtgaacaaatacacggacaacatgtacgaatttgcgccccgtccgagctgctcaatgggcccggactgtggatcgaagtaaaaatatttgaaaacataaaaatttattaaattaacaaatattattaaaattttgataaataataattttaatatttaaataaaataacaaatttaatatttaattaacaactatttttaaaatttgatagaataataaaatgaatatttaaattaacaaatattattaaaaattttcactatttttaggtatttgttctgcgaccgttcccatggcaagccccgatgtgcggccaaagtccgaccgaatggcaattgtgccggattcactaatggcacgaaaaatttgcatttaaaattttatttataatttaaattataaaaatgatgtttaattcaggtgaagatgtttgtctgaatggcgaatgccaatatgggaaatgtgtgaaaaaggtagcaaaaattaatcagacaaagtcacagcggtgaataagggctctgaaaattgcggcatttttgatggaaaaatcgcgaaaatctcctgaattttaatcgcaaaaattttagttttgtttttaaattttataaaaaatatttattcaattcttagggttgcgacaaacttcgtattgtgtaaaaatttcttttttttcaatccaaagcaaaacaaattatcgaaaatttcccctacacacgcaaaaaaattaaatcaaagaaaaatgttttaaaaaaaaaatttttttggaaaaactccctggtttgggttcttaattttagaattttttgagcctaaaaaccggcccggcaccggcaaaaccaaaacaacaaaaaccgacaataattaaattattttcagtccccaccgccaaccacgccaaaaccaccgccaattgtgacagtgtcacccattgaggtaggtggtcaaaaaaaaacccagagttattatgaagaatatatattccatacatagtctggcttttatttaaccaaccactaattacggaaaatccctaattatctccataattacaaccataatccgtcattatcatagcaccaagatgtgtacagcaaaaaatttgctggcggagatatatttttttaattttttaatccgtcccttccaaaatagaaaaatcccagaagaaattacacacatgtgtgctttgattttttggttttattttacagtaatacaattttcattttttgttaattttttaaacttttaattccctaattatttaatacgctaattaagtcgccctgctttaatgagcacgaatgttgcgcgaaatgggcagccgacggacagtgcgaatcgaacagcgaatacatgagccaattttgcaaagccagctgcaaaaaagtaaataaatgttgttcaattagtttttaattgatttttaattatgcttaattaaatgtaaattttaacattaattctttagtgccaatattcgtacaacatgcaagagggtaaaaattcaataatgataaacaatattaattttatttattattttatattgaaaaatttaaacccatcatttttatgcttaatttgatatgccagcagttcatattgttcagaatgtgctgatcgtcataaaaattgcaaagctttgtcctaccaaatgaaatgcgattcaagctggatggtatccgttttaatcaatttaaattttatgaatttttatttaatttataaactaattattaaaaaaatataaataatttttataaaattattccgtgtaattgcattttaaggctgaaaactgtcgaaaatattgcaacaaatgcatgtaaaacgtatgcaaacatgcgctggcggttccccggggggagaaaaacgtaaaaaaaattcggaaattaattttattaatttttattaaaatatattagccacgctttcatatggcggcaacaatggtggctgtaaatcaaaccaatgctacaacgaaaatatttgttgtcaggtgaaaaagaaaaataaaatttctaaaaataaaattttttgatttttttaaatttagaacttttaaatacaaaaaataataattggttattgtacttatcaaaaaatatttaattacaaatttataatcctttatttttatgggtggaattaattgtgcaattaattggggtaattaataataaaattattgtacagcactgggcaatgaacggtggatgtaagaagaattcggaatggatgaactgcaactgtaaagtgagctgtggccaatgcatcccacgaaactacaaatacggaagtaagtaattaatatatgaattaattataattacctagttcattaattatttattatttatttaattatgcataataattaaatgtgtatgtgcacggttaacttttcatcacttattcattaattatacatatatattcgaatccacaaattaattatgtaattcggttaattaagcgaatcctcaaatatgaaattttcagaattattaactaattgactaattagcaattattggcaatttgtttttagcgtgctccgactatcacccgaaatgcttcaaatgggcaaagcatggtcaatgcaaatccaacggatgggtgttggcgaactgtcgccgcagttgcaactcatgcgcaagcatttggcacatcaaaaaggtatttaaatatattttttaaaattttaattgattaaaagtttatattctggcagaaattcagtttttttaataatttaatataaatttaattatctttattaatgtttaataaatttaaagatgtgtgccgatgggagggggaagcgcagtgttgatgaccatcacttatgggcagacgcaatggaagagacggtaattaattaattaattaattacttaattaggccgaataaaaatgaaaattatgattctaaaatatttaaaaaatttcttttccattctcattagccaatttctctgttgcgcatggcgcgcgaggcggagaaggagcagaaggaagagaaaaaggaggaaaagaaag

SEQ ID NO: 73096 - DNA, 1125 bp, Heterodera glycines
atggccgcaactccaagtcgaaaaggcgagcctgagcatatgcaaagaaaacattgcgcagttttgaaatggaaacttgtaaataaagagcgacaaggttagggatattgtactttttggctaattaaaaattaaataatattttacatatttaatttacaaaataattcatcggcgtaaagcactgccagtattgtcttcgttcaattcactcaaatcatctacgtaatgaagctcaacatcaccttgaatgctgctgcttcaacatcggggatgttgtaaattaatttttttgaatgattactagagcacgactaaaaaggcaacaaaacaccaaaaatctcgaaaaaggcactataatagggaccaaaaaattgaaaaaagtaaaggcacgaaaatcccgaaaaagaaataaaaattagtttttagtttctaaaaaacccccaaaatagttgctaataactcgaaaagtagtttaacaacagccgaaaaaacacgtttttcgtgtgtttcaggccacgtggagcacaggaaaaaaatagtgaaaaacctataaatcgtatccctagtcataacaaatcaaaaactgatgaacaaaaaatttaaattgttaaataatttatggcaatgaaaaaataatataaacaaaatgaggaaaatattcgaaaaaagaatagcaacaaaatttatacagaatttaaattatgcagaaatttgcaagaaaattggagtatgccaatgagtaatttacaatggaagaagcattcaacgggtgaccaaatccggaagtaccggtaaatcaactcggggcggtaattggtaagtcatttactatatggatgtgtcggcatgccgatttaaagtgactgatgtttttggccacaaaaatcttaaattgtgaatattattcactcccgtagtcattttgccgttcaaaaagcatcagtcataataactgtggatgccctgccgcaaaaacatgttcatgacgatgcccaggatgaacaaaaaattgaaattgttcaaaaatttaatgcaatgaaaaatgaatataagcaaaaaggaagaaaatattcgacaaaagaatggagtcaaaattatgaagaaatttgtaagaaaattgga

SEQ ID NO: 73097 - DNA, 687 bp, Heterodera glycines
atgaaattattcctatttttctttttaattgtatttttaatttgtcaaattgaaattgcagcggaaaagaaaaaattggagcaaaaaacatttgaagaaatatttggagaaaaatgggaagaaaaagaaaaagaaaatgaacagaaaaaaagagaaattgttcaaaaatactatcagattaaagaaaggatcaaacaaaaaggaagaaaatattcaacaaaagaatggaataaaattgaatggaaaatagcgaaaaaattgggcacaaatcgaaagaaaatttaccaatggatcaaagaattgggattatacaaataccaaagcaaattgaaaacggatgaacaaaaaattgaaattgtgcaaaaatttaatgcaatgaaaaatgaatataaacaaaaaggaagaaaatattcgaaaaaagaatggaagagaaattatgccgtaattgggaagaaaattggagttggccatgatttaattaaaaaatggaagaaacaatttggaatgaatgaaagaataaatgagaaagaaaaaatggagaaaatgaaaatgtattggcaaatgaaaggagaaaacccaaaaatgagtgacgagaaaattgcaaaaatattgaaaattaatcgacggaccattgacaaatggaagaaacgctttggggaagaataaatgaggattggatacattaaa

SEQ ID NO: 73098 - DNA, 454 bp, Heterodera glycines
atgtggaattgctccggtaaaccggtaccgggtcgggtacccggtaaaaccgggtattaaaaaaacccaaaatcttttttaattttttttgcatgaaaataaaagtttaatcttttaaaaaagcataaaaaatataatatttcacaaataaacgctttattaattgcccaatttttattgttatttaagccacttttttttgcggtgcgctttttccaaaaaacttttcgagagcaggggcgatccggtggtgccgataggcgccgcctggaaaaaaattttgagaatttacttctgatttgttgacatattttattcaaaatgaccaaattttttgattttagctaatatgtttacagaatttgaaccaaaaatgttatcaagaaatacatggttaaattcttctaaatttcttacggggctattgtaaaaatataatattttttaaaataaa

SEQ ID NO: 73099 - DNA, 1423 bp, Heterodera glycines
atgaaatttggtgggtggatagagcacccatgggttcttaagaaaagtgtttttattttctgctaaatgagcatgagtgccgagttatgacgtgccaaagtttttggatttttccaattaaataaaagaaataattgtttctctccgttaaaagtgtataatgatgtaaaggtagtgcgttagtcaaaattttttgggtcccaggttcgaatcctctacatgcaaatccattttagacttttatttttgttattttatgcaaaatcaattataaaaagaatttttaatgaaacaaaaactttaattttatttaattttaaaattcattaaagataatggtgcaataaatagcctttcagttaaaaataaattaatttttgtcaaaactttatgagtaacttatttgtcaaaattaataaaaaaaaaaaagaattttatgtcatattttatgataataataataattgattttggcataaaaagcaaaactaaaaatttaaaaatgaatttgcgtgtaggggatacgaacctggggttcagggaacgctgtctagagcactaccgctgcgccgctggacattgtaaagccatgcaaggaattatttattttgtttattcattaaaaaaactttggcacgtcataactcggcactcatgctcatttagcagaaaataaaaacacttttcttaagaacccatgggtgttctatccacccaccaaatttcattcggaaatcccacggacacccttaaggccacatttttgtaagtttcctagataagattctcgaatcgcgtgggaaagtcctgttaactaaagccgggtgtatttaaacaattagataaatttggtggctttacaataacgccctttttgtaaattagccaaaagcggtattgggaggggagtgcccctcctgtgaccgaagatggcactccctaatgatgtttgagagctttggtcaagcatttttgggtctcaaaaaatactaaaatcccacatttttcttgaacttttcagccttttcactgccgtcggtgacattttgctccacttttttgcggcgcttttattgcagaatgacaaacaaatttagcaaattaaaaaaaaattatttttctttctaaaaattaagcatttttagtcactataattgctatcgccaaagaatggcactttccaagcgcattaaggaagagaaaaataatttatgcgtcgatggacaaccaaaacaccaaaaccaacgaaaatgaacgagtgaatggagtcgataaaaagagacgcgcaaatggacaaatggaggaattgtggagaaaaaggcacaaaaaaaagatagtaaaagatggcactgaatggatgacacaaccgaaacatgatgggattgtttgtcaaaaatgaagacaaaagttgaaattgaaagaa

SEQ ID NO: 73100 - DNA, 526 bp, Heterodera glycines
atggctaaaagaactttattacggaagcgacagaccaaaaatgcacgccatacgcgtgagaacaagcgggaggagagaaaagcgcagacgcagagggcgagacaaggccgatgggccaagaaaagtgagttttttcatcaattttatctcaaaaaaatcatttttttgtattccagccgctacacaaccaaatcccaatgccgaaatagcactgcaggacgaagcagggccgtcaacatctgctgcatcaacagaagaagcgatggagcctccgccaccaactccaggaccagtgccaacgccggagatggacgaggaaattttggaatttggcttttcgctgccatcgacatctgtcacaccaatcggcgatttggtgccgttttcgacaacaccaactgcgccaatggacaccggagagacgaccccgccaccgctggccattgacgagcgatcagagcgcatcgaacaactggagaagcagctcaaggaccgggacgacaccatcaaatttctccgcgagcag

SEQ ID NO: 73101 - DNA, 504 bp, Heterodera glycines
atgttcacctcgtttatcgactcaaaaattctgtcagcccaaaatccgcgcacaaaaacaataaatgtacaaatatttgatgagaaaattgccgctttgtcgtcaacagaaagccaaaaagaaaaaacaatggaagccaaaaattgtcagaaaaattgttttaaaaatttataaattttacaaattttcagccctaaggctggcaaaattggagtttccgaggccaaggcctggcagttcgtcggttcagccacgaaaatatggtggctttcttccaattccggcacaatctgtgctcgagccaccggccccagctgttgtgccaaacaacagaaatttcttggcaaataatgccggcacaaaaaatgaacaacagagacagggcgatgaggaaatggtggaggaaccatttaatgacgaggcatggccaaccaaaccacctgttaatgaatgataaacagattaaatgattatttaaaatttaaggaaaatctgaaatctgaa

SEQ ID NO: 73102 - DNA, 2063 bp, Heterodera glycines
atgggcaatgaagcagtgcatttgggacatgggcacctccacctgggcatttcgggtgttgaagaagtgaatttttaaaaattttcataatattttattattactttagtaattaccttaatatattaataattatataattattatattccgattaattcattgtcagaatacattggtggcttcattttgtgatctgttggagcgaatttggtctcatggattgaagaaaaagcaggtcatcctaatttttttaaatctgccaatcaaacaaaaaaaaatcttttttcgaattcgaaaattatttggttcttttcgagagttcctgtttaaaaaacaaataattcaaaataatattatttcatatattaaacagttgtttaatgaacaaatttttatatttgtcagaagcacaaaagcttgaaaaatttaagcaatttcagagggctaaaaatccaaaaaatttccaaatttcagggaaaatcggccctgtggaattacattatcgcctaccatgaatgggagaagaaaagtaacagggaagcgagccgtaaagccagctttacagctggtgggacgaacggtgaatcacagtcaggtacagtaattgggcagccatctttaccactatcatactctaattaccgtaataaaatttaatctttggtaaaataccaaatggtctaattttaattaagaatctgtcctttggattgtttttcggagacgtataaaacgtaagggaaaatttggaatataccttcaagcaaatgcttttgtcgcatgagaaattccatttatttaaaatgcatttcagtcccgctttttcagtattattcttgtgaaattacagtatcttaaaccttgactcgtgtactggatggagtactgtattattttttccctagtcaaatgcctgaaaatttttcgagagaactcttttctgcttttttttaagtggtggtttattaatttgtgttttggcattatactgtaaatatatattatacaattttgtaattgttttcgttggtggtttgtccattttttgttgcaatttgtcacactgtacacaggtgaggaggaggatgaggacaaagtgtcgacaaccgttggaacagaatcggacgacaatggcacgcccaaggcggcattggtcgatctgataagttccatcagacggatggcgtccgcgggaggtgcagatgatggcgacgaagcgtcattgtcatcggcggcgagttctggtacagtcgcggcgacgacgccaacagtgccggactggtctcagtcgctgttaagagcggctaatgtgatttgcgagcgcatatccggtgccggaggatccgctagcagttccggcggcgacattggcggtgctagcgatagcataggcgactacagtaaaaagtcggcgacacttccgccacgcccgccaccgcctcggccaagcggcagcagcaggtcacgtcaggcggcgacagaagcggaaccgcatcctcaactgcaacagcagcagagaaggagcagaacgccaacgccaaattcaaaaaagaatgcgcaagtgccggcaaaagcgagcgcaaccgcgaccgggacggcagcgattgtggtggaaaagagtgcgcaaaaagaggagacgcgggaaaagaacacagagacaagcggcggcggcgacggaacgccatcaacctatcgaaaattcatttacaagggcccgccgttgaaggagatgaacaacaacaacaatggccggagatcagtgagcagtcagcggagaacggcagcgacttctgcacatggtggcggccttttgacaaatctgatcaccggtactgtgtgtctcttatcccgattagttaaaggaattattgtatggatcagacagtggtgctatatatatgtcgtacagtatgccgttctgactttgatcaatttaagagcattataatctgataactggtataatactcgtcactaattagttgaggccttatgtatttattttgtacagtatgctattagtgtaaaattttagtgtactatataataatttatgagga

SEQ ID NO: 73103 - DNA, 1274 bp, Heterodera glycines
atggcgaaatgccatgcatttgtcacatccgtcattcaatccaatccatttgatgacctgggagtaagcctatataacaacaaacaataagcagcatagtcgaggattaaatttttgacgaagtaacgattttttgcttttgttttttggtggattcattcggtgatcagagagagagagaacaacgcatattcacagagttagcagagaaacaaaaaaaaaggaggaaagagtgtgaggaaaagggagaatggtagagaacaagagaaattctgtttaattaaaattattaaaaaaaaacaaacacaaattttacagaaattaacaaacaaacaacgagtcagtggaaggacaagcgtattaacaagtggtaaagcccggggaacggacatagaacagaagcagcaattccttccttgtgggacaccgtgccaattaggcacgagaggaggcggtaattgtgctgttcatatgtgaattggttggacaaatttacactgggcacaagagagggaccaatgggagaaagggataacaaacggtggcaaaacaaaatgtgatcgaattcggccgaaatatcgcgctagccttatcaagcggttcaagttaataatgtcaacaaaaacaaacaaaaaagaaaaaacaaaaaggagtaaaaacaaatggttgaacattcgcaaaacaaaagacgacggccgacgctctgtgcccattcctagtcgattctgatcagaactacccgatttgctggtatttgtacagatacagacggtaatccttgctgcaggggagggaatgtcggacaataaaatgcttaaattgggacgacaaaagaacggaccttgccaacacaaccgaatcgtcgatcaacgccacgtcgtaacattgcgcgtgcttcaccttcgactcaaaggcactcagcagagtgccgtcctggcggggaaagggaacggttaatcaattggttgttgctttcgagggactacctgactgaagacggtcaagttgaaattgttatgattatccgcctgaatttaaaagagcaaataaaatcgaactgctgcccgtggtgtacagaccaccacaatctcgccaagttggttgatgccgaccccaatcggataattagtcaccccctcgccaccgatctgacgcaaaaattggccctcgtaattgaacaccttaacaaatacatcaacaattatattcatccattgaagcgccaacaaaagtgcactgactttgatggaatgtgcccggttgtcactgattag

SEQ ID NO: 73104 - DNA, 383 bp, Heterodera glycines
cttttgagtttggatacagtatcaacaattgaatgttaagaatttgctgttttttagatttccaaattccgaggaattaaatgtccagtccgagcgattcaaagttcgcctgctcaaccaataaaagttcgtttgggattcctcccgccgccgttcgttcctttctgtttgcttctgtactccgccccttcgcttccatccttatatactgttaccatttgccctccccattctattaccgtgtccccacacatatccaccgtatcccttttttgtgcctttctcccatttctttcatccattttctcaaaagttatttagtattactattatttttattgtcctttatccagtaaatttcaacaaaatttcattcttagttc

SEQ ID NO: 73105 - DNA, 1422 bp, Heterodera glycines
gcggaagtgatggattggctgcttcgattccgatgctccccccgccgcggtcccaaataaaggtcactctcactcgttctttcatttcaccggaatagaattggcactttcagcgccaaaagatgacttaccattgtaaattcggtgaatttggggtcatcgaaggccaattcaccgaacccagcggagtggcggtgaatgcgcagtgcgacattattgtcgcggacacgaacaaccaccgaattcaggtgaaaactgtgcaattttccgttttaggttgtttattaaaggtgttcgatcgcgagggccgcttcaaattccaattcggcgaatgtggcaaacgcggtaaattaatgggaaattgtgtcaaaatccgaacattgtttctctttcagatggccaactcctctacccaaaccgcgtttctgtcaatcgcgtcaccggcgattttgtcgtcactgagcgctccccgacgcaccaaattcaaatttagtcagtccttcacaaaatgccatgatgctctttctcatttttggttttatccaaccgtttaactttttctcttccaacagcaaccaatacggccaattcattcgcaaattcggcgcttccatcctgcaacacccgcgcggcgtctgtgtggacagtcagggccgaattgtggtggtggagtgcaaagtgatgcgcgtgctcatcttcgacatgttcggcaacattctgcacaaattcagctgttcacgtacttttacaattagcaatcgcaaataccccatttaatttgcttttcgtcgtttaggctatttggagtttcccaacggcgtttgcaccaccgacaaagaagaaattctaatcagtgacaaccgggcacattccatcaaagtcagtgcacttttgttggcgcttcaatggatgaatataattgttgatgtatttgttaaggtgttcaattacgagggccaatttttgcgtcagatcggtggcgagggggtgactaattatccgattggggtcggcatcaaccaacttggcgagattgtggtggtctgtacaccacgggcagcagttcgattttatttgctcttttaaattcaggcggataatcataacaatttcaacttgaccgtcttcagtcaggtagtccctcgaaagcaacaaccaattgattaaccgttccctttccccgccaggacggcactctgctgagtgcctttgagtcgaaggtgaagcacgcgcaatgttacgacgtggcgttgatcgacgattcggttgtgttggcaaggtccgttcttttgtcgtcccaatttaagcattttattgtccgacattccctcccctgcagcaaggattaccgtctgtatctgtacaaataccagcaaatcgggtagttctgatcagaatcgactaggaatgggcacagagcgt

SEQ ID NO: 73106 - DNA, 59 bp, Heterodera glycines
cacttcttcaaccaccgcctccaccaccgccgccgatgccttcgttgtcgtcagtgcag

SEQ ID NO: 73107 - DNA, 1327 bp, Heterodera glycines
atggcatcatttgtcatcaatcccggtggtcccggcggttatgtcattccaaagcgtcgaaatgcaacggaggaggaaaagaagaaagaaagacatggggcggcggcggcgacggcggaagatgacgccaaatgtgagtgcgcattaatttttgaatttatgctcaccggatttcattgctggtgttatgtttttgcattactgtagtatactgtaccatttatcccaacaaactaaagagacaaccttatagaaagttgcattgctaagtgtaattatgcagttagagagtcgattattttttatgtgttatgctgttctttatagaaatgcattttagaatttactaaattttaccgtttagtattgcttattaagcgattaaaatagcggtgaatgaaacaaaatttatttgattgggttcatcattatgagttttgcctcccaaagtttgcccatatggaaatgattccaatttcatccaagcctaattacatattgtcaattgttaatgtatgcgattgccctctctaggagtaaggattaattttatgattgtggaaattgagacaatgttgatgttgagttttggattagatacccactacatattttggttggtctcagtcatagtcaaaaaaggaagatttatatcttaagattagctaattttctgaaaaataaactgcaaaagcgaagctcataggttcgaacatttggggaaatttcaagggaatctaaaaaatttttctacgagtttacagaaatgtagtgcttaatttcatatatatgtacaatttggaaaatcttgataatttggtgtcatttaatcgaatttaatttctccgttttgcttctcaaatccccccaccctaaccattcccaatgtaattacctaattattttattttcatttatcaacaattatgctcattcaatgctttagtgtaaagttttttgaattatatcatttccattcctatatcctcacgcttaatagggtttcttaattgttgctcttttttggttacatagcattaagttggtatcttaagctgcttcctcatctcgtgctgttgttgacaacaaaaaggattcgaccgcaagcagaggcaccgccgttcctcccatccgtaatccgctcaacgtgtggaccggctcgcttagatttgaagaccaaactgttgaaagtgttgatctgtactcgccgttccgtgacagtgccaaaccaaatggattgtatgttttttgcattgaatttttctttttttgttggcaaagtgccttctggcgtaatataaaaaatagaattggctactttaaatag

SEQ ID NO: 73108 - DNA, 2333 bp, Heterodera glycines
  unsure (1)..(2333): unsure at all n locations
atgtccgaaacacacccattttcggaccaattaactcaacatttcccaaaccaggagaagttggacgacaaagccaatctcaacttggcggagggaagcgatcggcgaattggggagaagttggacaacgaagccaatctcaacttggcggagcgaagcgagcgacgaatttggcacaaggcagtcaacgagggccacacggttggacgagttgagcgagtgcaaacgagaacgaaagaagaatggcgaaaatggagggagaagaaagtgaggaggacatgaggaggaagttgcgaatggggaggacttgccaatctgacaaatttttttatcacttaattcgatgatcagggacattcatttttttttctgcccaaattctcattttctttgcattaattatgctttaattttaaatgctttcaatcatttaaattgttaaattctatttctcatttcctctcctattatctccgacacatatctcttgcaaattgacggcggctcatccgccatatttaagccattcattctttcccatctcctcctctcacatcattcacttaaaaaattgtttttaatcgacaattccgccttttgcaattctcatcacatttttaaaattaaatttcttcattggaattttattgaaatttgtgttttgcaaccagcaaaccggaggttttctgagcaagttttccgccacacaaaactaaactgcttaatttcaaattgtggcggaaaaccggttccagcctaaattattttttaattaattttgtctaatcaaaatttcataattgttttcccctttttacaagtgaaaagtatctgacattggacaaattggaaattggacgcgttgaacaaattggaaattggaagcactaacaaattggaaattggacgagctgaacaaattggacattggacgcagtgaacaatttggacattggacgcactgaacatttggacatttgacgcaccgaattggacattggacgcatcggacaattgacgaatcgagaaccaattgagtgcactgtcttggtgcacgtctcagcgcgcaggccatccccatttactaagacgtgcctgccccagacaactggcgacctgttgtgcacaggcgggttcaatttttttcccaaggggaggtctgattaatctggtctcatccagaattaatcagttctttaatttctgttccttcctcctcctaaaaaaggcaatcaagttcatttcggactgaaaatttcgaagtctcatcttcgaaaagtcaaacatttaaattgcccaatttaaatttgtcaaaaaattatcggcatttcatttccaattcactttttttttgtccaatcccatttagtccaaattttcggaatctcatttccgagggtctaaatcttttttattttttgttgttttgtttttttgttttttgtttgtaacccaaattgtccaaaccatccgcacttggtaaaatcagagtcttttggttattgattaaattggagtttcagttccaaatttttaaattgttcggtcacagttcggttattgattattaaattggagtctcatctccgaactttcgaatttggtcattgatttgagcaatgacagcccccatccaggcattaattagggggtgtgccagcaaattgggagcattattgggtaccgaaattccacctgacctgggaataaatgccctaccgaatcaatgccaaagaaggctgtacaaattcagaaactttctgaatgacttagaaagggtggtacaaaagattgaagataatttgggtttggctaatgagtatattggcaaactgagtcgagacaatgcaatccgtaaagaaacggaaatgcaggaattaatgcaggagttacaaattaatgagaaacaaagggcagctgacgttctcattccaattttgagggacaaaattgaggcattagaagagaggttagacataactcacaacacggatggtgacactacctccggcattgtacccctctcaaggagcgtgccaatgcgtaaaaatttgccaaaaactgagcttaagagatttgatggtagtccatctcagtggataccattttgggattactttcgtacaataattcatgaggactctcatgtccncaaaattgataagttcagttatttagactcatgcattgaaggcaaagccagtgcaatcattcagggtattccaattagtgagagtgggtatgatgatgcaatagatttacttttaaagacctacggggagaccaaacgtctaattcgaacgnttaaccgggatttatgtcgctcccaatta

SEQ ID NO: 73109 - DNA, 822 bp, Heterodera glycines
atggtttggacaatttgggttacaaacaaaaaacaaaaaaacaaaacaacaaaaaataaaaaagatttagaccctcggaaatgagattccgaaaatttggactaaatgggattggacaaaaaaaaagtgaattggaaatgaaatgccgataattttttgacaaatttaaattgggcaatttaaatgtttgacttttcgaagatgagacttcgaaattttcagtccgaaatgaacttgattgccttttttaggaggaggaaggaacagaaattaaagaactgattaattctggatgagaccagattaatcagacctccccttgggaaaaaaattgaacccgcctgtgcacaacaggtcgccagttgtctggggcaggcacgtcttagtaaatggggatggcctgcgcgctgagacgtgcaccaagacagtgcactcaattggttctcgattcgtcaattgtccgatgcgtccaatgtccaattcggtgcgtcaaatgtccaaatgttcagtgcgtccaatgtccaaattgttcactgcgtccaatgtccaatttgttcagctcgtccaatttccaatttgttagtgcttccaatttccaatttgttcaacgcgtccaatttccaatttgtccaatgtcagatacttttcacttgtaaaaaggggaaaacaattatgaaattttgattagacaaaattaattaaaaaataatttaggctggaaccggttttccgccacaatttgaaattaagcagtttagttttgtgtggcggaaaacttgctcagaaaacctccggtttgctggttgcaaaacacaaatttca

SEQ ID NO: 73110 - DNA, 1644 bp, Heterodera glycines
atgcatggagaaacagttgatcagaaccaatatgatcaacaatttgatcatttggaagtgaaagaagagcagagtgaagaaatatccagaaattgtgatgaattgggcggccaattgccaatgccaacaaataatggacaaatttatgataatttttcaaaagcaattaataaaaagaaaagagaaattgttgaaaaatttcataaaattaaggagaaagttaagcaaatgggaaagaaatattcaaagaaagaatggcaaaaaattgaaagaaaaattgccacaaaattaggtgcaaataaaatgaaaatttacaaatggaagagcgaacttggaatgatgacgaacaaaaattattcagttgaagaaaaaagaataatgttaaagcaatttgatcaaatatatggcaaattaaaaatgaaattaaatggaaaattggaaggaaaaggaagaaaatgccaaaaaataatagcaaaacatttgggcacaaatatcagcagtattcaaagatggaagaaagaaataaaagttggaaaaatggtgaaaaatcaaaaaactgatgatgaaaaaagagaaattgttgaaaaatatttaaaagtaaaaattaaatttatgcaaaatggaaaacattcccagaaggaatggaaggcatttaatgcaaaaattaaacaaatgtttggtgtgagttattggacgattgaaaaattggccaagaaattaggaattaaacaaaataatttaaaaggtaaattcaattaaacttttatttttaaatttaaaataaatttttcaatttaaatatattacagagcgaaaaaggttcacaattgtcgaaaaaatggaaataatgaagcaatattaccttatgaaaaaggaaactccaaaattttccgatgtgaaaatcgccgaattgttgaacattgagctaatgtccttaataaaatacaaatccgaatttaaggaaaaagtggaaatgttttgaatacgacagaaggccaataaaaccaccacaatttttcgagatgaaatgaattgtttaattaaaattcaactctattttagaagaaaatgtgttttaattttatttctcaaaacataaataaatgccaaaattcaaagcgcaaaatggtatacagtataacattagataaatcgggatatacaataaaccatttgggtagttaaatttaaaataattaaaatggaaaatactgatttatttggtagtcagtttgagggtcgtgaaaaataaactttttgtagatggaattaaaattatcaatattggcatctaattaaggtttaaactcttaagttctcaattcttccttagtcattttgagagtttagcttgcttaccctaatgaattaaataatttttgagtaatttttcttctacaaattatgactaatttttatcgaaacatttgtagcaatttgtcgtgttcgtcgaaattgccaaaaaaaatacaactcttttttatcaattcccacatcctataagttcaatcctctattttaatatggattttttttattattattagttcttttaatttttaatttaattaataaaatttgcagaatccaaattttaatccggtggcgcctgtcggcagctcagaaagacctcatgattcttga

SEQ ID NO: 73111 - DNA, 1951 bp, Heterodera glycines
atgaaaatattattaatatttttattattatgcgcattaatattcaaaaaagcaattaaccaaattgaggctggcaaaataatccaagaaaaaagttttgctgaaatatttggccaaagatgggacgacggagcagaagaaaacatctgtcaaaatgatcaaataatgcatggagaaattgctgatcagaataaccaatttggacaaaatgttcgacaatttgatcagatttttgatgaaaatgtggaagtgaaagaagaggagagtgaagaaatgtccacagattatgatgaattgggcgaccaattgccaatgccaacaaataatggacaaagttgtgataaattttcaaatgaaactaataaaaataaaagagaaactgtggaacaatttcataaaattaaggagaaagttaagcaaatgggaaagaaatattcaaagaaagaatgggtgaaaattgaaagaaaaattgcaaaaaaattgggaacaaatcaaacgaaaatttacaaatggaaaagagaatttggaatgatgaagaacaaaaattattcagttgaagaaaaaaggataatgttaaagcaatttgatcaaatatatgcaaaattaaaaatgaaattaaatggaaaattggagggaaaaagagaaaaatgcaaaaaaataatagcaaaacatttggacacaaatatcagaacaattttttattggaagaaacaattaaaaagtggaaaaatggtgaaaaagcaaaaaactgatgatgaaaaaagagaaattgttgaaaaatattttaaaataaagaaagaatttatgcaaattggaaaacattcacgcaaagaatggaaagaatttagagcaaaaattaaacaaaagtttggtgtgatttttcagacaattgaaaaatgggacaagaaaattggcttaaatcaaattctttcaaagggtgaaatttttaaacaaattgttatttattaattaaatttaaaaatttttattatttaatatattacagggcagaagcattatacatttgcggaaaaaacggaaaaaataaaacttatcaattgaaaaaccaaaacccaaagctcaacgatcgccaaattgcggaaattttaaatattacaaaaagatctttagaaagatataaatctgaattcaagagaaaaagtgaaggtgtcgcggattgactgagaatatttttaagctttcagggccattcattgttaggttttgatgaatttaaatttcttaaaaatttatatattattcggcatttcattcattttccaatttgttgcttatgtaagagttaaaagtattatgcataatgtttgaaggttgttttttttgttctattttttgttgtaattgccagggaatggatttatatgtgccaaaaaagctccaaaatatgtgctaaaaagctcaaaaaaggccaacatatgtgccaaaaattgaaaaaaaaactgtcaaaaaataagtgaatttatcaaaaaaatcacattttttatccatttcgctagtacaattctaatcaaaaacatttcaattctttgtgacgtaaatatttttctcgcttcaaatatttatttatttttctgttttcattgataaaatttaaattttgccttaaaaatgaaaaaagtcattaaaacggtcaaaaagtgcaaaaagagaaaaaactaaaatttttgaaaatttttgtacattttgacaagaatttgagtgcaaaaaaagctacttttgtaaaaaaaattaaaaaaaaaatccccagaatatgtgctaaaaactactgaaaaccaaaatatggtttcattttaatgaatatgcttgatgccattttcaaaaaagccgaaagacagccatattaatttataaattgaaacccactcgtaataattaagttaattttaaacaaaaaaatgaaaactgaaaattttcaaacaaaaaaaataaa

SEQ ID NO: 73112 - DNA, 329 bp, Heterodera glycines
atgtcgaaattggacggaaacccatttgctgacccttttaaggtacgatcatttaaatacctttctgttagtggttattttatttttctgtttttacaaatcatttttccctcaggacccggctgttcagcgtgtggtttcgccggctgcatcagtcggaaacaattcaacgagtcaatcggtcatcgaggagtacaacccattcgcaccaagtgcttccgctggccaagttagtgcatgtttttaaaccgccgtgtttaattccattttaatttttatttataaattaaccgagaatttgtggcttttattaaacacttaaaaataaa

SEQ ID NO: 73113 - DNA, 255 bp, Heterodera glycines
atgagcgaaaaaagtccgaacggaagcggcgaattgcgattagaggacaacattttgagaccggatgaaaagaatgtgttcactgaagcattgcgaatttacgaaagtgttggagagcaattgaaagagaaagggcagcggaggaagggattggtcgaattcgaagcggacaaatgttatgtgatcgaatgggagtaccgaattgagaggacaggtcttacaaattggggtggtaaaagaccgtcaatggtttag

SEQ ID NO: 73114 - DNA, 620 bp, Heterodera glycines
atgctttttctattggctgggcccgcgttcgacccccgcggagcaaagccgttgtgcgttggcactgcgcgagaaggacaccgaactgtgcgagcacattcgagtggaagcgggcaaagaagcgccgatgcttttgcacattttggacggattgatcgtttggggttagccatcgctcggccaaagaccgtccaatcacgcggaaaatcggcgcaatttgtttaggcaccggctcaaacgtcctttgcgtgatcggaagctccggcaactgctacttggcacaggaaatgcgcttccctgtcaaattccgttctcagggcatttacgtgcgaatttgcgatgggtccattgaatgtttgaggggcgaacaatgccccgacgcacttttggaaagttcgaaagcattggccaagaaaatagccgaggcggagggactgaaatggaccggagaagtggcacatttgggggaagacattgcgaagccgagggaatggacaaaggcaccgaaaatgtttcgtttccgggacaatgaattttgggagatgaacactgctcatccgcaggccaatttcaccttcacccaaaaggatttgaggtacagttggccaattcaccattaa

SEQ ID NO: 73115 - DNA, 1256 bp, Heterodera glycines; identical to SEQ ID NO: 10052

SEQ ID NO: 73116 - DNA, 763 bp, Heterodera glycines
gcctccacgacggagcagacaacaacttcgactaccgtaccggcaccgtcttcgtcttcttcggctcatcaccagcagcagcagttacagtccccaccgtcgcccaccgcctcatcatttagctgcaagctgaagcttttcgaggcacaaagtcgcaacggtggtggtggtgctgctggctatccaaatgcaacaacagcagcagcagcagttggtgttggcacaaataatggatcacaatcatcgtcgacacgaccgtccggcattccgttgaaagtcgagaaaattaaattaaaaatttaccaaagccattgaattaaaaaaaaaaaaattctaagtgtattgaggatttattaaagaaaaatcgtttcttcgcccatttttcgcggttttattgcattttattgggaaatttccaaccccctctttcctcccttaaaatttccctgttgaagaagccgctggtgtgtgcgcaagatttggagaagctcaaggaagcggctgaacaggaagcggctatgagaagacgagcagccgcagcagcagcaaacagtaacaacgacgggaagcagtatcagcaacacaaccagcagcaacggcaaaattgtggcggcggacgattggcagaaaatgccatggaaatggacgaggacaacgactttggagatgatgacgaggaggcggatgagcaccgggacacggtgcacgagctgagccgactgttgagcagcagttcggtgcttgaccagcagcagaacggagg

SEQ ID NO: 73117 - DNA, 259 bp, Heterodera glycines
atacgcccctgtgaccacgtttcggccgacgacattttgtcctgctccgcttacacccacccccctccccctctcattggcagggcaagtcgggcttgttcatctcccagctggtgcccggcggtgtggcgcattcggccggcttccgcgtggacgactctctgctggcggtcaatgggaacgacctgcgcggcctcacccaccaagaagccatccaatgcattcagacggcgggcgaccgcttggagctgttcattga

SEQ ID NO: 73118 - DNA, 1389 bp, Heterodera glycines
atgccaatgccatcgtcggcgttgttcaacagtgacaacagttcgggcgttgaaaggtgcgcaatcacggattggggccgccgtttgagcaccgaacgcaatggccgactctcctccaccggtggcacagtgccgccgggggcgatggcacccgtaattgtggcattcgccggtgattggttggacagcgaaaagccagcagcggcattctgtgaaggaatggtggattttttacggaataggtgccaactacgtccgggcattttttaaattttttcggaatgacccaactcttccaggcattttccgaaatgggctaaaactccgtctcggcaatttaaattttttttttctcggaataattctacttcgtcccggcctttttagaacgggtcaaatcagtcccggcttttctttaatttttcggaatgatctaactctgtccttcgtacccaatcaattcaaattattaaaattcatagaaaaacgaactcgaaattatggtgctagggcgtttcttaaaaccgccagggcgtttcttaaaaccgccagggcgtttcttaaaaccgccagggcgtttcttaaaaccgccagggcgtttcttaaaaccgccaactcatatgattatgtatgtatatccgttaaattaaatatacaataatatctattaatttttatttgttgtgcaagtaagtgtcagccggaaatattaattagtctagcagtgacagactaaaaatctttattaaattaatttacaattatttacttaatttttaatagctcctgtaatctggttttgcaactttcaaaaaagtaacaaattacgaattaacaattttatattcgaaaattttgcagttgataattgttgctataaccacgatgtgtgctacataaataaatatcagaaacgttacgattgtgatattaaattttgcaattgccttaatgaatatcctaattgctttctaacaaaagtctgttctccaactcatatcttaaatattttattttttagaatatattatgctggtcagttcatatttttggagaatgttttaaagaagggtaaaaataattattttattttaccgtcaatagatatgcatatgtattttaaattttttattgttatgtaaacttctaatatatatatatttatatacataatcatatgagttggcggttttaagaaacgccctggcggttttaagaaacgctcaaagtggcggttttaagaaacgcccacctggcggttttaagaaacgccctggcggttttaagaaacgccctggcggttttaagaaacgcccaatgtggcggtttttaagaaacgtcccagcaccccttcggctccttctaattaatgaaaatattttacaatta

SEQ ID NO: 73119 - DNA, 825 bp, Heterodera glycines
atgcccattgtacttgttgactggtctgatattcgtgagcaaaaacgacttatggtattgcgagcttcagtcgcactacacgggcgctctgttactctttatgagaaagcgttcccgctttcagagcaatgttccaagaaagctcatgaccaatttctagccgaccttgcgagcattctaccgagtaacaccacaccgctcattgtcagtgatgctggctttaaagtgccatggtataaatccgttgagaagctgggttggtactggctaagtcgagtaagaggaaaagtacaatatgcagacctaggagcggaaaactggaaacctatcagcaacttacatgatatgtcatctagtcactcaaagactttaggctataagaggctgactaaaagcaatccaatctcatgccaaattctattgtataaatctcgctctaaaggccgaaaaaatcagcgctcgacacggactcattgtcaccacccgtcacctaaaatctactcagcgtcggcaaaggagccatgggttctagcaactaacttacctgttgaaattcgaacacccaaacaacttgttaatatctattcgaagcgaatgcagattgaagaaaccttccgagacttgaaaagtcctgcctacggactaggcctacgccataaccgaacgagcagctcagagcgtttcgatatcatgctgctaatcgccctgacgcttccactagcatgttcacttacgcccgtaccgggagtcccggcaaaatcccggcgggatcccggtcccgtccgggctctaataattatttatctcaatactggtttgacttaa

SEQ ID NO: 73120 - DNA, 3892 bp, Heterodera glycines
  unsure (1)..(3892): unsure at all n locations
tttccccaaatcatttgtcacttgactcagctgtccagtctgactnngtccaacaatccatccactcatctgccnccggacatgatggggctcgtcaatttgcaggcacagttttttattaatttntaatgaaattccattaattactcaataattaattaactatcagcgtttttaaaacatcaaaaagggaaaattttttgaattttaaaataattcttttaaacggttaaaatcttaaaattataaaaaacattttccagcatcaaaaaaatgctcaaattttggcatttttggtgttttggcataaaatagttgggcttgggcaatatcccgaatttgggggaatattccctcggcgtggcacgcacgttttggcactgattaacctaaaccatttttagcaaaaaaaaaattatcggagagtctcactctgttttacttatcctctttttaaaaggggaaaattcgcaatttttcaataaaattttcaaaaaatttcccgaaaattccaatcctttttttttttgcagtttctcgatgttgcccaatgtgagctccgtctgctgcccccctcaattgtccgcttggaacggcttcgtgtgctcgatttgtgcgacaattatctgaccgaattggtcggtttttgattgtttttctattttatttatttattttattattatattttgaaaaaagtctggatttttgggttccatattggacctggaaaatcatgaaaattcattctcctcgaggtcttgaagtggattttttgaaatttgcttaaaataaattacatggtctgaaatcaatattaaaatcattttcaacacataaaaaagcgtttttcaattaacttacaccttcatttttttaatctctttgaataaacagtttaccacataaaaaatcataaggtccattacaatatgtgtataagagaattaattacctaattattttatatctctttttaatccccaaaaattatttgttgccttaatgtgtttccttttttttgtttagttttaatccctcgaattgttccactgtccgattattttttttaaaactatttttccaaaattttccataaaaaaatacttgcagccccccaaaatggactgtctcgtcagcctggagctgctcgacttgcactgcaacatggtcgcccggttgccggacgaactgttgcggtgccgcgcgctgcgcacgttggacatcagtgggaaccaattgacggaactgccgctgaacattggcgacctgcaaaacctggccgagctggtgctgtgcgagaaccaaatccggcacttgcccagctcagtcggtcggtgatgcctcatcaattaataatattatatttaaaaaatgcatttaagaaaaattatattaccgtttttcctataaaaantacagtaacnctcccccccccccccttaaaaatagagttcaccttttgaagagggttgaaaaccaaaaccaccgggggttctattattttaggaaatacgatattagtaatagtatttttttaaatttgagaccggaattttgtaaaaacccgggtccggatgaaattttgtttgttttccttttaataaaattgattttataattaatttttggaattttaaacaaaatccacaataaaattaaatccaaattttaaattaatttaaaaaagtccaaaattcatggcccccatttttgcaggccaattgaagcggttggaagtgctgaaggcggccaaaaacaatttgacggtgctgaccccgtcaatttgttcatgcgcactgctcaccgatttgattctgtgcgagaatcaactgcaggtgaacattttttttactatttaaaaatatattatatttttaaattttatacttttatgatttgagagtctcaattttttcggcaaaaaaaaaattaaaaaatgatgagggctcaaatgggttgctggcaaaactaatcatcaaattcacgtgttgaattttcgttggttctctactttttaactaaacaatgattgagcaattgaccctccatgtcctaacaaataataataaaataaaattttaaacataagcaaagttcgagtccgctcgagcgcgcgccaattttttttggccactaatgagctattgaccctcacaaatgttaaataaaaaagatacaaaaaattggaaaaaagccattattagtaagtagtaaatggaatattggaaaagaaataaataaattgttcatttcgtcgtgctatatatagcgcagtcggtagcgctgaggcgcttaattaatacatgaaagttcgagtccgctcgaacgcacggctaattattttcattattttttaaattaaaaaaaactgattttttttttattgaggcattcccatttttgtccctcgcaatattgtaaaaattaagaaattctaccgaacgatggcagtcaagttgagtagcttcctaatgagtttttcataactttttctatccttttccctaccattgaccctcatcaatgttaagaaatacacaagagtgatatttaaataaattggacgtctaaaaaggaagagaatctaatcatcaaatttactaattagtgaattttcattatccaccctttatcataaacgtatggacggactccatcactgagcaaagaatcattgaaaaggatttaaattggtttgtggtgtcgtgcatatagcgcagtcggtagcgctgatgcagccgtttaaatacatgcaagttcgagtccgctcgagcgcacgccaattttttttgaccattaatgagccattgaccctcacaaatgttaaataaaaaagatacaaaaaattgcaaaaaagccattactagtagtaaatggaatattggaaaagaaataaataaattgttcatttcgtcgtgctatagcgcagtcgttcacgctgatcctcttaattaaatacgtgaaagttcgagtccgctcgaacgcacggcatttttttccaaatattttccttttttcttttttccccataatacctgtaataatatttaaaatttttttgctttacatttataaataatatttattttttcaggaaattccttccagcattggcaatttgcggcggttacgatttttggacctgaacgtgaacaatttgcacgcctttccgccaacaattggtggatgtcagtcgttggcaattctctcactgcggcacaaccatctcagcgagttgccaatggaaattggcaaattgaatgtgggcaattaattaattaattggctaattagtgccaaggagcacagaactcaaatctttaaacaagaattgtgtttgcgaaattttaaaaacctgatttttgggatattaaaataaaaatagactgactgagaaccataaattaaaatattattaaaattaatggagttttttttaacaaaaaataccaatttcagtgttttttttcgtctatttaaaaatgaaaattgttcttgaggtcatgcccatagccagggggtgggaatttccccacccccgaagatacatttcaaaaatttggcaatttttcgaaaatttaaaacattttaaaaatttatcattgaagccgatttgcgcccggtcggaaattcttttaatagtttttttatttttttactattttttgtccgataaaaattgagattatttccaacaattttttgggtggggttggggtgggtttcgttgaaatgttgttgttcagcaactccaagtgctggacctagcggacaacagtctacagtacttaccgtacacgctgaccgtactgtacaaggccaaaacactgtccgccctttggctctccttcaaccaaccgccgctgcccaagctgaccaccacgcatga

SEQ ID NO: 73121 - DNA, 758 bp, Heterodera glycines
atgcccagaacttacaaagatgagctcaatttcattgaacggatttctcctgtcgaatttaaaatcaaaaaagggttcgtgccaaatatgaatgtaagtttgctcgcttgttcagaaacagttcattaattaaggtggaaggtcgtttttatgtgaatgcagcgctggagaaactgatgtttgatgagttggaagtcagcacgataagttcggctgctggttttctgcctgcagtgaaacaaattggaaatgttgcctcattacctgcaattgttaaaaattcgatcggactacctgacgttcattccggctacggattcgcaattggaaacatcgccgcttttgattcagctgacccacaatccgttgtttcgccaggcaaattgttgaaattgcttcgaccttattcatgcattgtttttcttaggcggtgttggcttcgatataaactgtggcgtacgactgatcagaacaaatctcttcgaaaaggacgttcagcctcacaaggaacagcttgcgcagacaatgttcgattatattcccgttgggatcggctcaaaaggaattatcccaatcaatgtgagagacttcgaagaatgccttgagatggtttgtgaatttccgacctgttgaacagttcaccaatttaacaaattagggaatggattggacgcttcgcgagggttactcatgggcggaagacaaggagcattgtgaagaatatggtcatttcgcaaaaaaatgcaggatgaattaaa

SEQ ID NO: 73122 - DNA, 1014 bp, Heterodera glycines
atgaccaaacgaagaacacaacagtctctgctgcccaacgcgctgaagagcatcaaaaacatagtcaaccaaacacaaaagaaggtgaaacgaacacaacaagtcttcttgagattggctgaattgttctgtaaaagcggcatgattaatgaaataacaaaggattaattaatcaattaatctgaagtataaacttcttttctaaaaacaaacttcgtaaggctacaaataatgtccatataaaatcaaagagcgaagaacacgagagatcatcgaacggatctttgtatttggccttttgagacggaattattgttgaagtttgttgagtgtcatggacaaatacgcgtcgaaaaatgggaagaaacttaaaaaatggtcgaataccgcatgatggcaaaaaaaacttttttgaagatcacagcagccactgccagattggactgaacacgccttacatggtcgaaaagccgacgagaagcggaaattagttccacccaactgttaagcttgtcgaaaactcaagtacggtgatttcacaaacggagagtaatttagaaagggagtatctgcagatgagctcttgtccaaatggtgtcgcctgcccaacagtagtaaaaaagccacaggccatccaagaaaagcggttgccttaaaaagataactacaaaggatattaatgtttggatgcctccaaaatattctgttgccggcctgtgtggtattgcttcaatccttttccaccaggttccccccgaaccaaggattccattctggaaaaaacttttaaaattcccttggaggttggttcgccaacttccaatcccgtgcctgaaaaactctcaatatttgcagtttctgaattatctgatttcgacattccttaaaaaaatggagaaattaaaaccaaggtccaaacaatttgtttcagctgcttttttaagttttcatactttttgaatttttaagcaatacagagtgagttccataatttctaataatttcgccaataaa

SEQ ID NO: 73123 - DNA, 930 bp, Heterodera glycines
atgatcctcaatttgatggtgggtgtacttttttgatcaatgttatctatttcattttgcagagcaagctgtgtcatttttattaaagtttggcgattttgaaaaacgacctataaacgcccaattaatgatcaaaaggacctcacaaaattgtttcgagaagctaagcaatcgcaagacaaatagcagacctccattcatcggcaaatcatatgttataacaacagaagtaacttatttttcatattcaaagcttttggaagaagtacggtttacgtcatttctcgagtgtcgttttgagactttatgttaacaattttagaatatctgcttataattctttatcattgtacgatgaaaacggtttaaattaacaacaaataaattaaaaatttggcatgatatgtgagacattttttgagcgagaaaggaaagaatcgcgataaggttttatgatattgaacggaggctcgttgtcaaaccaaaaagtatagtctcgaaacgacttacaatttatcccgaaacgacctgtagcccaagaagtcatttatatttctaagcataaaattgttaattttagacaatttgtccaagtgcattgtcttcggatgagcaaaacgaagcacaaaagattcgcaatttgttgtcgtcatttaagggaaacgaagacgatcttcttggttatttgttcgaagactgtttggaaaatccaaaagaatttgttgcagacaaaggcaaaaatcatcacatttagcatttatcaactccattttattttattatctaaatttcagttgaaacttggtctcggaattttgcgtgcaaagctgccaaagaaatcgctttgaattccaaatttgacagcgaatttcaatcagaaattgccatgcgaatagccgaagtagggaaaaagagcattttaagttagta

SEQ ID NO: 73124 - DNA, 1036 bp, Heterodera glycines
atgaaagtcaccaaattggaaaggtaaaatgacattttaagtaattcaatttacaaattcgcataaaattattatttttgtgcatttattggtaatttttcaaaatttacatttttatagttttgtctcgattggattcgccaccaaggaaatgccactggacggagcaatcggacagcatttgaacagttacgggtaccgaagcgatggctcattaggctgcaatggtatcagtcggccgtataaaatgggatttggcaccatgccaatgccattcaacgcggcggttggacaacagagggaccgccgctacgttgggagtgccaattggccatttccattggaatttgtgcccgtgccaatgccatcggacggcgcattggcattccaatcgccagcattttccaccggagatgtggtcggatgcggcgtttgtttggccactcgacagatctttttgacgaagaatggccgacgaatcggtgggccaaacaaaaaacaaaaaaagcaaataatttaaattcaatttgtcagatgactcctcttttttcactacaactcccatcaattctctgtttccatgcgtttctctgtggactggcgacaaaattgaggcgaactttgggccaagtttcaaattcaatttggccactctttgaagaaagccgaagaaacaacgaaagggcgattagcattcatttaattaattaattcaataatcttttttctttattttatttttaattttttatattattttatgatgtgtatttgttaatcaaataattttctgtttttttattcacttttattttctgtttttccttttttatgtaaagatttggttaaaaagagaccaccgaagaaaatcttgaagttgaagtaattagtaattttgaagaaattgctaaaactattaaattccccaaatttcctctttgttctttccactcattttggtgccattttattaatatttaaaatcgtttaatgggcctttttattaattttttcgcacttccagcagaggcaacaa

SEQ ID NO: 73125 - DNA, 994 bp, Heterodera glycines
  unsure (1)..(994): unsure at all n locations
atgtcatcatccatcggttcgccagatacatttttccgttcagaaactgatcagggtaatagaaaaattttaaaagaattacgaaaaataaaaaaataattatttaaaataaaatacaaaatctctaaattttatcacaatcagaagcagcagcaggagcagaagaagtgggcaaatacgaagtgttcagttggcacggaaatttgagtgatcaattgtcagccgaattgttcgtcactgatcagcagttgctgaaggtgggccattttgaatggacaaatgatcaaacagcgggaggggaggggaggccaaaaacagagaaatattatgggaaattagcacaaaatttacaattcgttttaaaggttttctaatgatataaaatcaaaaggagaaagggccgacctattcctagagcaatttgatggcattttgccaaaaccattcaattatgaaattaagacaaattactaattattttttggactgaattatttgttttatttaaggaatgccgagaaaaacttgccaactccgaattgagggaaacgaaattgttgtggaataacggggagctgaatgctgagaatgtgagaaaaaagaaaacgatgaaatttcaaaagtgaaatttcagagggcgaggggcgaaaacagagaaaatttaaactttttttatttcagagggctctcaaagcagagttggaaaagcagaaacggatgacggaacacattgaactgaaggccaaagtcttcaatatggagcaggaaaagcagcaattcgagaaaaaatacggtatggagaattttgaaaattaattacaaatttccaataccgtatcccgagccttactgttaaataagcatttcaaaaagaatttctttaaaatttcatattttagtttccgtcgatgtgttcaattcattggtggaacgcatcaaacagttggaaaatcaacagcagaagaaagaggagggcagaaatggtaanaaataa

SEQ ID NO: 73126 - DNA, 1851 bp, Heterodera glycines
atggcgccgggatctgggtcgcagtgttggttcaacaccaaaaagtggcgaaaattgaccaaaattaattttattttaaaaattgcattttcagggcaaaagcagaccgaagccgtgccaacagcagatggagaggggacatcgacccaggccgccgaaaaagggccgtcaacgtcaactccggaccttcgtaagtcaaaaaatcactattttagaagaaaaacttaaattaaggcccgcgttcaagcccaaggccattgtcagcaactccgatcaggcgccatgtgcgtgtccatcaaaaaactgacgaaaaagcaacaaacatggactttacaactaccgacaatgcaacacacatggatttgacaatgatggacaaagcaacggacgtggatttggcttatgaggacgccgcgacacaaaccgagcaattggacaaacagctgaaggagcaggaacaagtgatcagctttcttcgacagcaggtccgcaacagagacgcactgatcactgcgcttcggcggcagttggaggaaaagatggcaccaccgatggagacaccgaccaccagcaaaagtgagtgaaactaaaatcccctttttatctttttcaaataattttctcttttttaattttagcaactccaacaggacgaccaagatgaatgtcgatcatttgcagcgcacctcacgtcgcaaattggctgatgaaatcgcggctgtaataaaacgggacagatcacgctcagccagccgggcgtccctcgaacggatcagtcgggaagttcggcacaaatttgctcattacacgccacagaagaagaaacaacaactgccaagacaaaaaaagtcagttgatccagaggatgatcttctgatcctcgggcttgtcggtacacagaaggcttacagacgaccaaaaaacactattcgcctgatcaatgccaaatttgatgtgttcccgccactcgaaaaagtaaaaacaaattttagcatttatatttatttaaaaattcaattgaatattgttagctgcttgacatcaaacgccgcatctgtgggtcattgcaatacgcaccaattgagactagtgcaggtgttggatttgtgtgcactgatgttgaggcagctctggaggcgcgtctttcatctgccaaggacaatctgatcagatttggcgacgaaatctacataaagctgagcggcgaccatggccagagttgtacgaagattaccgtctcattcagccaggctgctcggtcaaattctccatcaaacaatttcgtctgtgccgttttccctaccaaggatagccgcgaaaacttggagcgctatggaagcacactttgggaacaaattgacggaataggcacattggcgggcaaacgagtcaagtggtaaattttaaaatttgtttttttccatttttatgaattcaaaaggtttatgggcggagacgtcagttttatttggtcaatgatcgggcattgtggttctgcagtgacaacatttccgtctccaatttgcagttgcagaagtgatcatttggtgcaggacggcgaaatttgtgaactccggacaattgatcaaactgtgttgttttatttaaaaatttatatataataattcagagacgaagtgatcagagggaagagcatgatgagttcgatcaaccggaagaagaaactgacgaaatttcgcttatcaatgtcattgattgatggtgatttagcaagaagaaattggtggtcgacgggagacggacgaagaaaacaatggagaagaagaacaattcgattttgaatagacacagttcgataaaaggtttttcttcgttttttcaggaaataaa

SEQ ID NO: 73127 - DNA, 76 bp, Heterodera glycines
tagagaaaaaaagtaatgtttttctctggcactctctatttattggtacacatctcgttttttcgggacggtgtgt

SEQ ID NO: 73128 - DNA, 553 bp, Heterodera glycines
atgacagcaaagtctattttaaaccaaatgattttcagcagaagcagccaaggaaacgcagcagtcccggctcattgtccacttcaagctcttcgtcaatcatcgcaatcagctcaacttctcctaccgctgttcctgattcagtttcaccacctttccgtcctctggaggtatgttatcttggccattttcaaaacagtacgtcaagtggtatgaccggcactaataaaattgtcaaattccaacgttttcacatttttatgttcaaaggttttttaaataacaaacgaaagtcaaatttgttggttgcattgtataaaccttgtcgcttttttgtccatttatatcgcatttcctttccacttttttgagttattttgcaaatttattgtcagagagggccaacacttcaaaaaaatcatttgtaagaaattccgaaattttttttttaagacaactgggcctactaacagcaaagccactaaattgcataatgctgaagaaatgcttgccaaggctgacaatgagcagaggggtgttcaacgctttgtga

SEQ ID NO: 73129 - DNA, 117 bp, Heterodera glycines
aaattagtcaaaatacatgtcagattcgtgattagcgaccttttaaaccccggataaaaaattatcatggttttttatcttaaaaaaattttgcaaaacaaaagggtcccccctttt

SEQ ID NO: 73130 - DNA, 969 bp, Heterodera glycines
atggcggaacggaaagaattccgacgcatgtttgacgagacaaagatgccaaaagcaaacccgcactttgaccaattgttgatatccttcaaatcgggggtatttaaaaaaatcaatcggttttctccaaatgcacccgggtggggtgctgctaggcttaacactggtgtgaggagttggagaaaaccgatttcattttttacaatatattaaactcaaaatttttccctcctagaaatatgaggactctgtcgtactggagcttgaacagtttgccaaatttgttcagctgcagccagtttttacgatgaatcagcagcagattggtcaacattttggacgaggtgcaattttaaagttgacgtggaatttacaaaaaaaaaaaaattcttttttgagcattggcactgacacaattcattcactctcatgtacactttttgagtggcaaaaacaaacccaataaaggcattaggaccatcagtgccggtcagtaataaaatatgtttgtattaatttataatttatttttaaaataatgattcatctattttttgcatatttttgaagaaaaactgctcacttcaatggctgctgatggttcgatgggttacacggaaaatgttttacctgtactccgtttgttcaccgcttttttaacggacattaataaatcggaggtatgtttctatccagaccgtaccccataaaaatttacattttttcgctctgggtaaaaagaaaaatgttttcagttttttttttaaatgttcagagtaggaattgtagtcggtcgattaaaaaggccattttttactattttaggcccaaattaaaaaaaaaccccaaatacatgtttagctgaaatcaacagccctatctgaacctgacgttcaacaagtgccagttcgttcattgcgctcgcgtcccattaaaagggtggtgtcgccagacaatggagcaaactga

SEQ ID NO: 73131 - DNA, 171 bp, Heterodera glycines
gattgaagaaatcgttcaatgaattggaccgagaatcgctggccaagaatcttgcatttacagcaggtagcaaaacatactaacgaataatcaaatctattaccgattgatccttttctttcatagtccgtctcgacagtgatggtgttgacaaaatacagaactcatttt

SEQ ID NO: 73132 - DNA, 1848 bp, Heterodera glycines
atgggctatttggcggcaattccgatgctcatcaagcgattgcgcgacgctgcggcggatgggcataatagccatgatgaggggggcgaaacgcggcgaaggggtgggaaaataattgcaatatttttttattttaaagaaaaaaaaatttattttttttgtatgaaaatatatttaattttttattttatttttgtaagaaaataaataaataaaaatttccatttgcaacttaatatgctatttcttaaatgttttaaaattagaaattaaaatttttttatttgtccaaaaaataacggattttttctaaaattcaacggaaaaaaatgtgattaaaaaaattagtggggaaaaaattaagataatttaattgaatagctttaaatatttttttaattaaattttttttttgtaataaaataactgctcaagattccgtttcccacacctccgtgctgttgggtcgtcatgcgaaaacggtcacttgtggattgcatcgggctgaacgctcaacactcaccgcacaacacacaaatttcaccgaagccgagtgggggaaaccattaattaattaataatctaacaaatccatggaattgtgatcatcctgcttcggaaaaggcgattttgcgggaaccggaaaaattatctggaatttccgtaacgaacgccattgttttatagaaaatacccaaatcaaatattcttggtattattcgaggagccctaatgtttcgcttattactacaaaagttgaaggaaaaaatcacctaattatggccaaaaatgaggaaaaaaaacgaattttcaaaaatattttcgtcatcatttttcacaaaacgaatgaaacttttttaaatttacaaggtaatttcccattagcaaagctttttttttgtcatcctgctttgaaaatttttgaacaaaatttgtaccaaaacccttatataatttcactttttcccccctttttttacagtttttacaatgcgctccaggatgcgtatttgttgacggaccagcaaatgtgggataatggctatccccggtgggcagaaacttccgctgctgctgacaaagcgatggaggaggaggaggggcaagggttggacaccgacgaccccattgctggtgatttttgttttataatttattttattttaattatatattttttaataaaagtgtatttaaatacattaaaatttaatttgtttacaaatttatcttttcgacgtttcgttaaacaatcaaatatttaaatttctacaggaaaacggcgcgtcgaaattcgtcagtctgagttagatgcgggcaaaagtcgtatcccatttgtggacgatgcaggcaaatcctatgaatttatacacatatgcagactgaattcatacctggaaaaaacaatttttttcgatttaaaaaatatatttataaaaaaaattaaaatttcggtgaaatgttccataaattaatatattttttttgtgtatttaatttttccatatttcagtgttgtccagggtgtgtgatcgttgtggcaaagagtatcggctgaccaaggagggcgattatgcggccggtgcttccgctgatcagtgcattttccattggggccgggcgtggaagaaacggggtgggtgtactgtattaggatatggtattctggggcaaacacaataggaactcattatcagagttatgttggtgcagatttagaaaaagaataatggctccccctccgccgtttcctttcctccccttcgaaaattcaaaaaaatatcttgaaaatttttattaaatttctagaaaaaaaatttgaatttttttttagcaatctttgggtaa

SEQ ID NO: 73133 - DNA, 851 bp, Heterodera glycines
atggcacccgctactgccaacaaccatggcgccggttcatccccagcccacgccgtcactgcggcttcatctgccgatcaaaatgacacatcgaccgcctcacaaaagggcaaatgcaaggcactctacgaattccaagcactaaacccgggcgaactcgactttaagggtacgaaacggaaaaaagggaaaacaacggacaaaggggacggggggggtacaagaagaaactgagagtcattcattagagacgtaaattgtaatagagagagagagttttctttttgttgcccctttgtcattaagcactttttagagggccaaatcattcagctcgattcgcaaattgacgagcattggtttgagggcacagtggacggccggaccggctttttccccatcacttacgtggaggtaccaaaaggaaggggaggggaaacattggactcttcccctttttgaggtgatcgtaccaatcccttcttcttccacgacggcacaacaataaactttgtagaacaccgaacagatgacacaaactgtgctttgggatggtcaacagaacaagtcaaacaaactcacctaaatttgctaataattccttaattttcactgtttgtttttcgacccgagattctcttcttacaatagaaaatggcaaatttctaaaccattaacttctcagataatttgttttatttcttttcctatttctgaaattatgtccgcggagattgttatagctaatcaatctaattgtaaagccatttattcgagcgaccgttacttataattcatcctatgacactttcatcaacattcacataatttcaattataaaatttaataaa

SEQ ID NO: 73134 - DNA, 1061 bp, Heterodera glycines
atgtctctgtcagcgctcaaaaaacagttcaacaaggccaaccagtacctgaacgaatcaattggcactgctgaggcgacgaaacttgacgaagaatttacggagatggaaagagttagtgggggtatttaagcgaaatatgtatcactatcatagaattaagcttgtaaaaagtgcaaatctcatttagacagttgaaaatgcacttaaaaattttaacagaagtgagataaaactaattcatttttctaaatttaggattttttgctaatttaatatttcaccgacattaattctaatttccttttacagaaggtggacatgacaaacgaactgatcacgcaggtcatcgcgggtaccaacgaatatttacagcctaaccctggtcagtccggcgttttccaaaaaattgttttttccctgtgcaaattttgatataaattctcccaaattttaagcggttcgtgccaaaatcgccgcattgggcgcaatgtccaaagtgcgcggttccaccaaaaatcaatcgtatccccaaacggagggaatgttggcggacacaatgcaaaagtacggccgttcgcttggcattcaatcggactttggaaaggttttttgaaaaataatcgatgtattgtacaattttttgctctttctcaggccctttgtgacgcggccgatgccttccgtcaaatggccgacgtaaaataccaattggaggacaacgtaaagcacaactttctcgacccgatcagcgattttcaaaacaatgaactcaaagatttcaatgtgagtttttgcaatttaattatctcttttcttttttgaggataatttgttattctcttcacttattttaacatttttacgaaaagttttcgctttaaatttacccggggattaattttttagctcaacatttaaaaaagccattatttttggacaaaaagactgcgtccaatcatgttttcgtgtcaaccatggaccggcccagacccatagctccactacccgagcagaacaaaaaatttaacaatatctttccgatttaaattaataataaa

SEQ ID NO: 73135 - DNA, 879 bp, Heterodera glycines
atgagtaaaaaaaaattaaaacaaaagtctgacgtgaagaaacccgtgcacaaaagatgggacaagcgggaggagcaacaaaagaagttggagagggcgagacaagccaaattggcaaagaaaagtgagtttctaatcaatttttaaagcctaaaatatttcaactaatttcagcagtccaacagcaacaaattgaccatggggaaggagaagctgagatggagcaacaagaaatggaccaagcggagcaagtggaagagacttacgaccatgcaagtgagttttaatgattttaatttcaaaaaatatcaaatattcaattttttagtgcattttgacttccagctggagaatgatgtccaaatgtcgccgaatttggccattgacgatcaacaaccgccgacctgggacgcaacagcagaagcgggagtccaatgcgcgatacaaacaatggaagtctcaacccaaaccgactggaacatccatgctctgctttctgctgatcaaatcgctgatttccgcgccactgctgatcaattccgtgttcacatgttggagcactttcgtcggcactgttcgacttcaaaatttcatcatttggtccaccatgcccctgaatttgctgaaaaccatggattttggggccttctcagtgagcagcctgtggagaaatttcacgcgttgttcaatgacgatctcgcgcgcaaagcaaacatcaaagatctccacgatattttgatgttctgtgctagagaatctgccattcgaaacgccatttttgattcaaatgaactctgatcagtcttttgtagttttttttataagtttattatactttttgttgttatttttcatacatttttcaattttttatattta

SEQ ID NO: 73136 - DNA, 91 bp, Heterodera glycines
ttaaaataactctaaagttggccttatttttgcattaaatttccttattaatcgattcagaatttttttctctatcgatatgcaaaatatg

SEQ ID NO: 73137 - DNA, 1629 bp, Heterodera glycines
atgcatggcaaattgttcggtgccgcgcgggcggtggtgggcgaattggtgtttcagaccggcatggttggctatatagaggtgagactaattggttaattgaaacggtgaaaactctttgattttaatttttgcatacgaacgataaaattgtctagtttaatgtagagttaggactaatttgtttttttttcatggcatggcatttttatgaaaatttacgccgccataattttccatttttcagtcgttgaccgacccgagttatgctcgtcaactgttggtgctcacttacccactcattggcaactacggagtgccggacgaaaccaaaaaggacccaaaatggccccaacttccgtcaaaatgctttgaatctacacaaatttggccggcggcgttggtggtcaatcgcatttgtccggagggcgaacattcgcattgggaagcggtcgaatttttatggcataatttgcatggaaaatttgtcaattttcctaggggtcgattaaaccaacggatatatttttaggtccaatcgttgtccaattggttgagcaagtcgggcgtgccgggtttgtccggcgtggacacgcgtctgctgacaaaacggataagggagaatggcacactgaaagccaaggttttgtgttttttgagtggcaaaattagtggaatggaaaagcagaaaacgaaacgaatttgtaaataaatttgttaaattgattttcaaaggcctcaaacataaaatttctgcattaacagtaaaataagttttgaacgctatgaaaaaatagaaaaaatccggaatttcaaaaaaaaacaaaaaaaaattttttttcaaccttttaaaattaagaatatggtgggacttgtgtaatcaaaaattatttttatatatttttaatcaatatttgcaatttcccgtagccacatttttgtctctccacaaaatgctttgttttgatttttgcccatttttcagttggtgctcgagtcggatgatccggaacgctttcaatttgtcaacataaatgaggagaatttggtggccaaagtttcacggaaggtacatcccaaatccctcctcccacttaccccctcctatcaaatgattcaatttttcaaaattcagtctccccaatggtttggcgacaaggagcaatgtcagagccgaattttgacgattgactgtggcctcaaaaacaaccaaatacggtcagtggtgttacactacatcaacggctcaaaagatcttttttttaaaatttgttggggttggtagattttttccggaaaatgttacacaacacaaaaatcatcattggaattttgttaattcgtgataaaaaaatagggagcaggacaaaatgtcaccgtcggaacatcatcgagataacatcgttacaaaaaaattttttttgttttttaatagaggaaaaataccttggatttttttttttgcggcaaggttttcgagtgtatccaaataattgacatgaatttgaattgtttcatgcccttgtttttcaatttcttcataaatcatttccaatcactcaattttttcaggtgttttctgcagcgagactgtgccgttcacgtcgtcccatgggattttccccttga

SEQ ID NO: 73138 - DNA, 477 bp, Heterodera glycines
atgaacgacgacaagctaattaatgagattaccgacgatttaaatatcgccatggaacacgtcaacagtgctaagtcaaaaattacgactgttttggctatccagaaagagaaggaaggagctctcaaacgccgtattgacactttatacgaagaaaacgggaaggagaaagacaatagtacccgacttttgaaggagatgaaaaaattcaaaagtttcgcggaagtgacaatcaaacatggacaagagtgtttcagctcatccgccgatataaccttggggttaaacaaccccgtctaattttaccttagcaaccttaacatatttagtgcggaccttacggacatcagtggtgacattgaggagactctcaaattgacgacgatggatggctcaaacgaagtccaattggaccaggaccaccgaaacgtgaaagaaggggaattggaagtcgaagagcagcagatccttggataa

SEQ ID NO: 73139 - DNA, 506 bp, Heterodera glycines
atgtgtccgaaattaataacaaagcttaaaatggtcggcccccttcatgttagcaaaggttgatatccttgtgtgtttatttatgttcttttatatattttaaaatgtaatttagaaattcgaataaatatcggttcgttttaccgaaattcctaaagctctgatcattttttaaaatttataatatttttttcaaattttttacccatcgatttcacgcaaaaatcgccgtaacagaagccggattggcattgcattggcatttggcactaaattattatttgatcagttataaattcaaataatatttacctgatagcaaattcgttgggctcgaaaaccgccgggatctgctcttcgaattgctaaataagatttatttaaaaaaaaagatttaagaaaaagttattttgcgctgaacctttattttttgaatttatatctttttctagattttttctaaaattaaatttcagatgtaaaattattttatttttattattaaa

SEQ ID NO: 73140 - DNA, 706 bp, Heterodera glycines
atggccaacggatggcgccggaggcgcaggcgaaacattatgccaatggggacaacaacaacgattgggacaacaatggcacgaatgatcgtgccatttttggtgatttcggcagtgacagaggcagcagcagcagcagcggcagagcaaacggcacgaggtgacaaatgccaatcaaatgaaaagcaattttaggattaaaaacaattgcataattcaaaaatattttagtaatataaatatatttacaatttaaaatatttttgaaatatttaaaaatagattttttattctcgtaaatatttaatattttataaaatttactcaaataaatataaacataaaaaccataaataaaaaaattttcacttatatattttataatttttatataattttattttaataataaaaataaaataattttacatctgaaatttaattttagaaaaaatctagaaaaagatataaattcaaaaaataaaggttcagcgcaaaataactttttcttaaatctttttttttaaataaatcttatttagcaattcgaagagcagatcccggcggttttcgagcccaacgaatttgctatcaggtaaatattatttgaatttataactgatcaaataataatttagtgccaaatgccaatgcaatgccaatccggcttctgttacggcgatttttgcgtgaaatcgatgggtaa

SEQ ID NO: 73141 - DNA, 774 bp, Heterodera glycines
atgtccagaactccattaaacgacatcacaaatcaccgcagccctggtcaaaatcagggaaatgcggcgcgaactcgttcagcaatgggtcgagaaaatatcgacccaaatgtccctattgagggacataatcttcccctttttgaggaagaaattccattggagaatccatggaattggagaaatttgactgaatctgattcagattcagtgactgagatcgcaagggaatttagtccaatgtctttggactcggacccggaatggacgtggaaccctccacgttccatatggccaagaaatgggagggagccattgagtcaatggtttccccgtgtcatgggaaatcactggcacgaaagagaaagacgatctgctgaagcgctccttagggacttcctaaggaacagcgcatttttaactaccaatcacctggccactaaccgtgaaatcatcttcgatggattgtcacgtagcggtgcagaacggaccaacatttatcccggattcaccgtcctcaatcattttgagggacggggaataaccatcaatcctcttgtaccattggtacaagagtgtggcgggtttagtccccgccgcggcgaaattcacatggattatttccccactgaagtggtggacttatgttattttgagagggagactgaaatcccccaacaaataaaccaacaattacgacaggacgacacggatccgggaggaaaccggaacctccgggaattctcagagccaccagtggctcgagaccgataa

SEQ ID NO: 73142 - DNA, 1133 bp, Heterodera glycines
atgactaagtcctcctcttcctcctctgagggagaattgtccgacgcatcattttcgccaaatgacaagattcccctttgtcaaagggggatcaaaggaaatccgctggagctggtggacgcggcccgggcggtaagcaataccacccggagaaaggggaaggaccttcggagtctcattgactccgaagcgaaggaggtggcacgaaagccgcctactgttccgactgcgggaaggaagggcatcggaggggcgctaaaaagtgcccctctccgaaggaggatcgggcggaatcctcccgaccccccgtaatttctcctaaaattaaggatactctgccgaaaaaggcagagggtcgcgcacgattgccgatccgagggccagtttcgatcgcccctcggaagccctcgcctccatcgccaaaggtcaaggccacgacagaatcgagcctgcgccgtcggcaacattcggatttatccggaatggcatgcccggatttatccgggttagccaggatttcaacggacgggagacccgggacgagcggctacggaggattagcaggatctctacgaatgagagacccgggactagcgggtatggccacagaaccgctagtgccgtcgaaagtgaactgattgaggccgtgaggagccttcaatcagtcgtggaagaactgcggaagagcatcccgccaaaattgacgggaggcaacagtgaaccattaggccaccgaaagaagcgccgacaccatgactcttcgtcctcctcgtcgtcctcctccgactcggagactgaaaagcggaagaaaaagagaaagaaggataagaagaagtgaagggaaactttggccgcggaagtattgtcgcggaaagcgacaaatgatatattttgataataattaatattttttcctttcattaatttagtatttttctctattttttattttgtgtgttactggttctctccctctttctttctctctctctctatgcgcgtacgcatgcgcacgcgtctctagggctataaaagccgcaccattcgcctattggggcacttcttctcacttctatttaatatttatatttaatcgtcccttctccatttattcacacatttatttgtgacta

SEQ ID NO: 73143 - DNA, 817 bp, Heterodera glycines
cttttatctcgaagaagagttcatgaggccaatgattttggtcctttgtgagccaattaggcccaccccaccacgaagaatgggttgagagctcttctggtgtagctcctcttgttgccagatcagccggattttcagctgttcgaacaaagtgaaacgaacactttgttatggtgcgaatttctttgattcgccgttcaatgaattttggttgggcttcttttgaagccacccaatttaaagcaatttgagaatcactccacaaataggagtgttcaattgctcggcgcaattgagtttgtatgaattttaagcctcgaattccaataagaatggccatcagctccattcttggaatagtgagtgctttcgaagcactctttggcttaaggcgattttttgagaaaatcaaccaattttgaattttatttgaactctccactcggagataaattgcggttgcaaatgtgtggatcgaagcatccacaaatgcgtgcaattgaagggagcattctccctgtatcattgtccttcgtgggactcggattcgcttgtctttccaagattcttggaaagcattccagcgagtcgagtcctcttctgagagggcatcatcccagcctttcttttcctcccataaactttggaagaaaagttttaaaggctggatgcatgggcccatcaatcccaaaggatcgaataaagaggccaaaaaactcaggacgagacgtcgattcactatctttaatgaatcgacagatgggaattcaaagacaatgtcgtctttgtcaatgtcccaaataagtcccagcacttt

SEQ ID NO: 73144 - DNA, 6145 bp, Heterodera glycines
atgagtgaactcttacgaatcacaatcgcgccgattgtgaagcgtctcaagttgtacattgagacggctcaggaaaatctgacaaaagatttgactgaggaaatcagaacagatttgcttgcagagagacaaaatctctgtagagcagtatcattgttggagaaaaacaatgacaagtgggaggctgtcttccaccgagttaaaggtcctgctcttcaggaagaagagcagaactacaaggactacaaacctgaaggaaaagccttcatggaatgggccgaccaagcccgagggcttgtcgacaccattgatggggctttaggcctctcagaacagggggacgatgtcgttcaccctgcacaggtccaacagcctgttcaaaacattcagccacaagtggttgtggctccgcagcgacatgaagtgatgttgccgcccatttcgcttccaaaattttcgggtgaaccccgagaatggcctttattttggaagctgtttgagacttccgttgaaagtcttcaaattgaagacttcaaaaaacacatttatctcttgggatgtcttcccgagaagtcagttgctcgaagagcaattgatttgtacccgccttcagatgaaaactacccgcgagtggtagaaatcctcaagaaaagatttggggatgagaagtcaattgtggagacactccaatcagagttgctccatcttccaaaaccgtcagattcggttcaatctctgaggcagttctcagagtccattgaaaggatttgtcagcagttgtcagattttggagaaaatgaacaaaataagttcatggcctccacgataaagtccaaattgccataccatctcctcactcaagtggtggagaaggaaatgcgttcaggtggaacatttgattgttccgacctacgcaaggcaatcacttccattgttgaagtgaaggaagaagtacaaagatgtacacaagtcttccgtggggaagaaaaaccccgaaattttcctcctcaaatgcagaggaacaatttccaagggagaggaacaaatttccctcccaaccaatttcgtcagggtcattggcgacccaataacagaaatgagtctgtggggatgatgtctccccaaatacacagatcatttaacactgtcaatcagagggaacaaacacacttttctcctcgagaacgaggaacgaacccactttgttctctttgtagtgacatgggacacgcaccaagcaagtgtccaaaatatccaacacctggagcacgcagaaggcggcttgcagatcaacaacgatgttttaattgccttatgcaagggcacaattctcaacaatgcagctcatcaaagaggtgcccaaaatgtggtgaaaaacaccacttcatgatctgctattctgaaggagacgctccgagaggaagcactcctcaacaaacatccaaaggaggggctgttcaaaagaaacagtcctccaatagacgaggagaaccacctcgtccaacacaaaatcatttttcggcattaaatgaacccttaagaataagggaaaatccgtctgaaatatcaatttttgacggaaaaagaacaaatgttttaaccagcgttgtgacaaagaagtcacacgcgtttttgatgacccgacgattgagggtccggtcaagtcgcgatcctcgtcgaatgatcaaagccatgtttctttttgacccggcgagccagacttcatatatgtctgacccgctaatcaaaaaactgaaaccacataaagtgacttccgaagaaatggaagtctacggtttcggtggtgaaaggaatggaccaatacggttccattcacctgtctactccgttcaaattcaacggagtgacaataagtgggaggaaatcctcctcaatcgaaccgagcaaatttccactccattcaaaatggtggagtggaattcacatgattacacatcggaggagcaggatgttttccaagctctaagtttttctcaggacgaacctgagattctcataagtgctcggcacttttggaaatttttccaaagcaaaaaggaagttttgcctgggttgtttgtcatccaaacaacactgggtcctttagtcaacggagaatcagactttggaccaaatgttcaaaatccaggactgtcaatgatgaccattgatgagtccaatcaagagcagatgccagctactaaagaaattgaatatttctttaatttggaatcgttagggataaaagaagaccctaacgaagacgatgatcaaacagcaatgcagctgtttgacaaatcaatccgtcgtgaaaacggcggacgatattcagttaaatggccatggaagaaagagacaccgaatcttccctccaactacagaatggctttctcaaggttaatatcgactttgaataagctcagacattctcctgaacttatacagcaatataacaacacaatccacgaccaattatcaaaaggtatcattgaagaggccagggaagcacctggcactcttgagcactacattccgcatcaaggagtgttggctaagggcaaaaaacttcgcgtcgtttatgacgcgagtgctcacacaaggggtacaaacagtttgaatgactgtttgtacagaggtccggtacttttacctgatctcatcggaatgcttttgcgattccgatgccccacatttcctcttctcgcggatatccaagctgctttcttgcagatttatttctttggaaccagaagatagagaagtcacaaagtttttgtggctcaaagacacggaaaagccactttcatcggagaatctgataatatacagattctgccgagtcgcatttggggtgattagttcaccttttatcctagcagctacactacaatatcatctaaaaaattgtcgttcgattttggctaaagagttagccgaatcgctgtatgtggacaatgcgctcatggagtgtgaaactccagaagaggcattaacaaaatataaggaagcgaaggctatccttaaagaaggctgttttaaccttcgggaatttattacaaattccaaggaggtgatggaagccatcccccctgaggacagactcgagaaagccaaagtgaaagtgctgggacttatttgggacattgacaaagacgacattgtctttgaattcccatctgtcgattcattaaagatagtgaatcgacgtctcgtcctgagttttttggcctctttattcgatcctttgggattgatgggcccatgcatccagcctttaaaacttttcttccaaagtttatgggaggaaaagaaaggctgggatgatgccctctcagaagaggactcgactcgctggaatgctttccaagaatcttggaaagacaagcgaatccgagtcccacgaaggacaatgatacagggagaatgctcccttcaattgcacgcatttgtggatgcttcgatccacacatttgcaaccgcaatttatctccgagtggagagttcaaataaaattcaaaattggttgattttctcaaaaaatcgccttaagccaaagagtgcttcgaaagcactcactattccaagaatggagctgatggccattcttattggaattcgaggcttaaaattcatacaaactcaattgcgccgagcaattgaacactcctatttgtggagtgattctcaaattgctttaaattgggtggcttcaaaagaagcccaaccaaaattcattgaacggcgaatcaaagaaattcgcaccataacaaagtgttcgtttcactttgttcgaacagctgaaaatccggctgatctggcaacaagaggagctacaccagaagagctctcaacccattcttcgtggtggggtgggcctaattggctcacaaaggaccaaaatcattggcctcatgaactcttcttcgagataaaagaggaagagttacatgatccaccgaaagaagatgaaaaaatatttttggctcatacatgtgcagagccaaaacagcaattatttaatgcaaagaggcaccattcctggaccaagttggtcaggacagttctctttgtaatacggtttctccatttgaaattattaaatggaagagacccttcagagctcacaaaaaagcaccggaaggaaatcgtcaaggtttctaaaaccggaccattcacagcagaagatgttctgctggctgagtaccttataattcgtttggatcaatttaatgatccagatgaattcacaaaatttccctcactaattgatagtgaagggattctcaggctgagaacgagattaacaagaagtgaccaaccttatgggttttcacatcccatacttcttggaaagaactcggaaatccgagatcttatcattttgcaatgtcaccaaaaaagacatcacctaggggtggacagcacccttacggaatttctcaacaattattggactcctcagtctcgaacggcaataaaaagggttataaaaaactgccgtcgatgccgaaggatgaaggcataccaatttgccttaccaaaaatgcctccactgccggaggaacgagtctgccgacaaatgccctttaagtcaattggaattgactttttggggccaacagagacacgattggcaggagtgaaagtcaaggcatggataattatagtaacttgcctcacaacgagagcagtttacttagaagccatgcttgacacaacggccgaatcttttttaaatgtcctccgacgattcattagtcggaggggaaaaccagacttaatttggagtgacaatgccacttcatttaaattgtctcaaaaaacgattgagcaattgacaactccaaagggagttgagcaaaacaaagatgaatttcttgcacttaataaaattaagtggaaatttatcgctcaaattagtccatgggcaggtggcgtttacgaacgcctcgtgcaattatgtaaaaattgctttaaacggacattggggagaaaaatcctcaatttcgatgagcttaacacttttgtggccgaagttgaggccactctcaaccatcggccaatcactgttgtgtcagagggagcggatggcattcagccactccgcccccatcgacttacttcaacccgatttacagataaattgggagacaacgacggaagaagccgatcccaacgacaagcaaatctcatcctcggagaaattggctgctttatttaaagcaaccagagaagcccatgaaagcttctggtacaaatggcataatgagtaccttctccttcttagagagagatctaagtgggatcacaaaggcgctcatctcctagataaaggagaaccaaaagaaggaatgatcgtcctcattcacgaggagttcactcctcgaaatcagtggactttgggaaaaataattgagcttaatggcagaccaggtgccattagaagcgttcaattagaaatgccaattcatggcattaaatcaaaaaggtatggaaccatgcctcgaaaagtcgttattacacgaccagtcaacaaaatctttccattagaggtaggatttgaaaatcttaccgaaaatggcaaagaaaatttgaaagttaacgaagacgaaactgcgaacagttcaacagaaaatacaactcctcatttgggaaataaattgccaaatgaggagcaggaaaatgaggacaaaaattctcatttgggtgaaccaaaagccaaccaaaacaaacatggaatgattacccgcagtaaagcaaaagtgatgacagttcttaactgtctcactattttctgcatttttggattggcaggagcctatccaacaaatcaatgcaatgagtgtaaactcatttgctcaaacaaaggtgttttggcaaaaattccgaaggaaattcggaaagtggaactttgctgctctgagaattgttacattgatgagaatgtacacaaactcacatatgagttgccaaaagaaatcctcctaaatgactaccaatgtcaaggtcatttttggatggattcaaagcacatgtttaaaaaggacattttatgtccagcagtcgatgagtgcgtactcatcgaatgctatttatgcatggaacaattggcaaatccaacgtgttatccgttggtgtcctccat

SEQ ID NO: 73145 - DNA, 810 bp, Heterodera glycines
gctaaacaattcaccaccaagcacggcttcacacaaaaataacaaggtacgttggataaagcaatttcgagagaacgagaaatttttattatctgccaacttgggtacctttagacaaaaaaaattctataaattgcatgaaaatatatttgtaaattattaaaacgcatatatttttattaaactcaaaatctatttgaacaaacaatcttggtgattttcttttactcaagatgatactttttcgaggccgctgattttgaaagtttttaaaaaatatatccataaagaggccagccaatcaacattctgtttatgtttcagttcgacgatgttaacaaattcatttgcataattagcactatgatgagcatgttaaagaacgtaacggtaagtgttcgatttttttgcttttatatgaaattggggggttgaatataaaataattgatatttttcattaaaaaggtaatctaaaaataggaggcatgaatgacatttatttgtgctttgtttgattaatttcgaaaattttcattaaaaatgcattaacgaaacattcaccaaagattgtctttaacttggagctcatttagtgatcatagattctatttcccaactaaaaactcctatacaatttcagtattaattatactctaaatttttatagcacattaatcttcacaaagaattgacctgcatggattcaagcggcacttatcgtttggcattcccttccgctgcagcgcttctcactttcatttacaaaaattgcccaaacattactacattcaatgtctcaaacgaagaa

SEQ ID NO: 73146 - DNA, 742 bp, Heterodera glycines
atgggaatgaacaccatgttactaaatgcaatcaacgttgatttgcctaaccgcagtgcatttgttactggtggtcgatcaaagccatttgtaactgaagtaattttttatttgatttttgctgtaaatttattacctgcgccagttttaataatttttagttttaatttaaaagaaaattttcaggaaagatacgcaaaccgatgggccacgcttctagaaacaggaacaattcagaaataccatggtatatagaaaattctcatttcattattacattcctcaaaatgagttccataaaatttatctaccattttacacctaattgaataagttttataaaattaaaaagagacaattttctacaaaaatgtgtcgtaatataatttttttctttttctttagaatggtttttttcttttttaatatattttttcatcggaacccttttttgtgtttttaattaagtttattcgtgatttctctataatttgcgccctttctcattgctttttttttattaagccattgctcgtgccgctcatcaaaattactcctttcacggttttacggatgatgttcgtttttatcaacaatttttgatgaaacgagagacggagcagttctacaaacaatcgtaataccaaactgaggatgcaactaaggctgggcctaactgattttaaacgcaaatccttaattaccggggcctaaaaacaccgattttccgtcatttaataaa

SEQ ID NO: 73147 - DNA, 1658 bp, Heterodera glycines
  unsure (1)..(1658): unsure at all n locations
atgcggaaattccaagtnaccttaattggacaacttctttgtcaacgacgaccagtcgcctttggccccttatggaacagaaaaggtggaatatcagatggggtgcgtcccttcctaaaaagttctcttttcgtctacccctcccatccttgntgcactatttcttttcaaaattggtccaaatttttttgcttttttgaaatttaattgtaaaaaaatatacaaaaaattcttttcgatttaaaattgtgcttctcaatgatggaatgaaaaatgcttctacagtatataagctggattttctaatttataaaagtatttgcggttgcgaattcggtactttttggttttgtgacccctctccacctgaaattttcaaataaaaagtcatttcaagggtaatttggggcgctgatcacgaatatgacatttatttttcaaaattccgaatcccgaacctgaattcgaacaaaaattcgaaattcataaattacaatgaaaacatattttgggggttttcgaggtcgctgaaaactgctatgacatccatttgaccaaattctaaacccggactctaacaaaaaaaaaggaaattaattctcgacaaaattcaaaatatgcaaaaccgacgcatgttatgggtcctcaaaatcgttaaaactatttttaaaccatagtcagaaattggtaaaagaacgtcaaatataaaagattgaatttgcttattgcgctaaaaaaccgccgcacactcgactacggcggccagtaggtggggcgagactacgggctacggaagaagtatttttcggtactgaaatgtccattttcactgggacttagttggcccagtgctcagatggcgttggttcgaatctataccttgttttttaacttagctcatcaagagatttcggatgataccaaatttgtgtgattttgaccgttttaaaagcttaggtgcctcccttttcactcaaattttcaagtcttaaaccggttcaaaaccggtttaaacgctttgccgcgcagtttttttatggtttaggcgttttcagcacctaagaaaacctataaaagtatttttatgcaattttgagtctgggacctatgatggatattttaccttttaaattttttagtaaattaaacctcggttttttgttcaagtcagggttcgagtttcgaatttggtcaaaaggcatgtcataatcgttttcagcgacctctaaaacccctagaaatatgttttctttgtaatttatgaattagaatttttgttcgaattcgggttcggaattttgaaaaataaatgtcatattcgtgatcagcgcctcaaattaccctagaaatataagcttattcagggtgctgattttgaatatgatatttatgaagaaagtgaaaacggcgtccaataaaggcttactataaatgacggacattgggcattaattgaaatatatttgaatcttcaaacgaaattaaaaaaactctgttagcataatattttattaattaattttaaatgaacaaattcaatcaaatgaattgtatcctttccaatttttcagttgcacgagttgaacaaatgccaaatcgatcgtgccaaaatgccgaccaatgcccttcattcgaaccgcgcaaattcaatttatctg

SEQ ID NO: 73148 - DNA, 794 bp, Heterodera glycines
atgccaaaagcattaaaaaaggacgccgagttggcaaattgcatgacgtgggtgaatattgatcgcctttgatgggtatgcgacacaacagttgtgtgtgtggtaaacaaagggagggaggctaagacatcaaagatcatttgatggccgaccgtgcaaacagacgccgccagcaagggaaaaaattttaaaatttttttggcacgtttggcaattaaaattttaaaaaattaattaaataattaatgataattattattattcaatatgtactgtattaagagaaaaataatgaaaaattatttttttattcctctgtgggggttgaaccagggcaaaacgcaaaaatgaacgcaggcttagccaataggctacaagcacattgaccgaaatgactttcaagcgttatatgtatgaaacattttttcacaattaaaaactttattcctttttccgaatttccatcaataattttgagttcgttcttcattccgaatctggacctaccggggtcgaattttgggttattttatgcgcacaatttttcaaaaataaaattaaatttcaggattttaacattttcactaaaaatgaatcatactcaaattcgaaaagcattctttttaggcttatttatgtatgtatgtacaaatcagagtccaactgatttttttgttttgccaaaaacaaattccaatgataaattcaatatttttgattgctaaaataatacgtaaaatggtggtccaaatgaacgggatcgaaacatgggcttcgagagtgggtttccggga

SEQ ID NO: 73149 - DNA, 853 bp, Heterodera glycines
atgttgctgctgctcctcctcctcctcgacatgttgctgctgctgctcctcctcttcctcctcctcgtcagagttcccctcggtgcgcactaccacctccacaatgggcgatggaacccgggggaaaacctggtcctaaatcaaaaatttggctgttgccatgtcatgactcatcattaccaagggtaccctttctgcattgcgcaccccgaacacctcaaagttctcagggtgggcaccaccgacccgggctatttcgctaaattcctgatgtttatttgctgattttcgccccaatttcctcacatttggcgggccctctcgatgtcgatggcaccaccaacagctgcatgggtatacacagcgtccatcagacgagcgagggtatacccaatctataaaatgcatttcaattcttaaatccccgttctcgctaattttacatggctgagaacttcctcatctttgaggtactggtggtcagatgattggtacctaattaggtaccaatacctcacagcatcgcagatgagacatggcgccttgtcgtacagggccaaagacgtcacttcatactcagtggtgccatcgtcctcttctgctcgatcgtcagcgtcctgatccgggtgtcgatgttgacactaataaataaatttgtccattaaaaatgaggtagttgcgaatggcttctaactcattttgcactcaaaattatgaaaagatctatctcgggatgagtcaaattatcatttttgcctataatccataatttcacaattaatttagacttattagataaaaattaccccgaccgtccctaatcgcaatttcaacaaattttataacacattca

SEQ ID NO: 73150 - DNA, 893 bp, Heterodera glycines
atgcagtggattaaattcaactgcacgctttgcccaagtggacttcagtgtttctatccgcgcaagtacgcaaagcctgtgctttgtgctcatcccagcgtccgtaacatcacggactttttgagcaccgggcagcttggcgaagctgcaacgacaacaacaacaacaacaacatttccgacaactgcggaggtgtcggcggcggcgacagaatgcgcacctccgcccgtgcatttgaccgcgtggatcgcggtgtgcacagcgctggtggcgcttttggtgattgcggaggtctgttataattttggtcatttatccgctaaacccctattcctcaattaagcttgtgcgtgccggattcaaagtgcgcaaatttttgaaggaccgcgccttcaaaaaggggatgctgcgccgacatcgccagcgtgagtttctcgctattacatttttagcaaattgtaattaacaatttgtacaggaatgagcgccgcaaggcgcaaccgccagccggcaagcgcgccgactccgctcattttgccggctatgttggccggcgtttctctgcgccagacgggcgtcaatttgactgtggaccgggtgggcaattttaattaaattaaaatctttatatattttaatttctcactcattaaaattacaatttaaatttaaaggcagcggggcagcgccgcgcggatggtgcaattgaggagggcgatgagcccgtgtacgatgaggtgccgcttgacagcgacatcgtggtcgagatgcgcgatggagaaaatggggaggaggaggaggaggaagatgacagcgatttttagtgattcggcaagcgatcaaccaccatttattcaatcgatcgattttgcactaatttaaccatttaaaaa

SEQ ID NO: 73151 - DNA, 851 bp, Heterodera glycines
atgtcggataaaaaagcattgttcaagcgtgttatcgcagaggtggacctcactataagcacgggcggcataaccttgagcggcccccgcctgtctgttccccgtttcattccgtttgaggaaaacgggcgttgccgagcatgtaaaggaactgaggctgaggtggacacaatggtcaccaaggagggaatcaccttatggtgcacacgcatagaaaaagctcagtttgtcccttttgacgttgtctacgagcttcccggtcattgtttctttcgcgtgaaaaataaggcaagggtgttcagcgttccgtacagcgaactgccgtcctcagacaggtgcacccagcctctaccaccaccaccaccaccaccaatgacaacagcaaaacatcaacggacaccggacgacgaggaggaggagaagaatttgaggcgtaaggcaaaggtggcgcttgacttagtggaagctggtctagcggcagacgcaatgatgcaggatgggacgcgttggaagaaagccaaaaccgcgatcaatgtgctggccaatttgcttttggcggaatcattaacagatgtctcgtcaacttttgatcaacaacaacaacaacaacagctatcgtcaaaagaggaggagaaggaggaatgcataaacaacagcagtgcttcagcacaactgaatctgctcccgatggtgatgtaatgggcgatttcgtcaatagcattcaagcggcgacaagcaatatgcaatagcaaaaaaagcgcaaaactcgctctgccctatatataaaagttgttgattgctgcacgatttgtcataatttttgaaaatgttaaattctcaatcgttcagta

SEQ ID NO: 73152 - DNA, 445 bp, Heterodera glycines
atgctgctcattctcgacgatctgatgctgtcaatagaggagcgctatctgtctgatttgttcaccaaaaaatcccatcaccatcagtttgcggtagtgttcatcactcagaatctgtttgagcggaagatcaaggtggctcgcctttcggcgcagtatttggtgctaatgcgcgcgcccaactcgctgctgtccattcgaaatattggagttcagctttttccgcgtcaactcgattttttccttgacgcctaccgcaaggcgaccgctcgcccctatggctatttgctaatcgatatgcacgcatcatctgatccggcgcttcgcctccgcaccaacatatttaaagaggagcaggaggaggacgagggaacagttgtgttcatccccaaaaatggagcggtataaacgtcaacaacaacaacaagctaaagttagtcaacta

SEQ ID NO: 73153 - DNA, 1292 bp, Heterodera glycines
atgccataccgtatcccaaaaagggaaccaaaagtcgaggaagcgccacaacagcaacaacctcttcctgctgccgctgttgtcgtcgaagaaatgcccgttgttcctccgcctaggaggggggccaaacgtcgctaccccgtatatgaagatgatgaggtgcagataagaaaacgagtgagacaaccgagaagggtaagggtacagtactcacccgagccaggcccatcgacatctgcacaaagtgatgaacaacaacaacgacaacaacaacgcgaactgtttgccattccatcaaatcagctgaccatgactcagcgggttgaacggctatacatcaaatgtaaccattacgctgatcgtatgggcgttcgtggaaatacaattaacaccgcaaacggcaagccgttggtgcataccaatttgcgaatggccatccgctatataatagacagaagagcgggccgccccaccattagaccaccaggagcggccatattggaagaaaggcttcagcaggacccaattctgtattcatggacggctccaccaaagagaccgtcacagagcaaaaccacgcggaccgcaccaaaaatcaaaaaggaatttcgtccgaaaaaatggagctgatcaacgcaacgcttgacaagctgtataacagtccatcgtcgcccgcggcgttcgcgggcgttaccgcgctgtggaaagaggcgcgaaaaagtatcaaacatttacgcaaaaaggacgttcaacattatttggaggggcaccgcacatacactctgatgcgcccccgtagggtgcgctttccaagggccagcactgtagcggcaggattcatgaccgatgtccaggtggatttggccgattttcaagcgctatcgcgacacaaccggggtcaccgctatctgcttgtcgcggtggatgtgctctcaaaacgcctgtttgttgttccactcaaaaataagagagccgaggagatgttggaggcattcaagctgctcatcgatcaaatgcccatggccccccaccgcattttctccgataagggaaccgagtttaagaacagattgctgaaggacttttttgagcagcgagaaattgagaagcatgaacccgtgcattcatcggtcaaggcgtcggtcgccgagcgggccatccgcaatgtgaaacagcggctgtaccggtattttgcggaaacggagacgctgaactgggtggatgcagcacagaaaattgtggacgggattaaccgctccccgtcacgtgcccacggaatgcgtccgattgat

SEQ ID NO: 73154 - DNA, 2382 bp, Heterodera glycines
atgtgtggatacaccctgatggtaagtgtaaaatcataaccaaacccatttgaaaaacccgattgtccatgcctctgatcaatcagaatcattgtcatcgccatttcataaacataatttgatcactccgctccccttttgctgatcagatggctgctactcattggtgggccgtactggcgggtcggttttgaccgcacattttccattcgatttgcttttgtgtataaaatttgatcggtgcccacagacgacagccgttgagcttggacagcggatgcatccaagtgggcaccgttgtgcacgagctgatgcacgcagttgggtgggtaaaagggggagaagggcattcattgatcagtgccaagagagagagagagcgaaattgatggcatacgagtgatttgccgagaaaatttgtatacagattagagacagggggacgggccgagatctctgttcaggctgatcagtattgactgcgttattgcattgatcaattaattagatcgaaggccgagcataaatataggctctgtctaatgtcaatatcgaggtcggaaaagcaaggcatgtcgagactgatcagtcgtgatgaaagtgatcaggctggaagattgaatgctgacttgtacctttcgatatacataaatgtgatcttcatccattttatagtcaggctgtttccgaaagcgaaaaatgccctaaatttttgatttgaatctcaaaatgccgtctttttggcgaaatttgtccccttttcttctttacagcttcttccatgaacagtccaggtacgaccgggacagtttcatccaaattctgtggtccaatgtgcttcggggagcggacggtgagaaaagcgatttcaggggcagaaaataatagggagtggtcgagacaatgttcagatcaattcgaaaagtacagcttcaataccatcgaccaggttaatccatggcattgggaattaatggatttttttcttgcagcttggcgaaccgtacgattacggaagtaaggcggggggggggggggggaagggtgcaagggtgagagcggggaaagggtggagaacgggtgccaatgaaaaggcggcgagaattgtcccgaaaaattattctcgaccccaagtcgagattatccgggttaattgtcggaaatttaatcacgaccaaatgaatcgatgatcggtcacacggggtactccagcgaaacctcgacggagtttttggcattgtgccttcgagctttataatgcttaccagtctcggaaacccttcattctcgagggacaactctcgggaaccgagacgggaatgggtcttacaaaattctgttcaatcccacgctaccatacccacacaaataccccctaaaaaggcataatgcactacggagcgtacgccttctcctcaaatgggaagcggacaattgtgccgcgcagaaacggcgccaatcgaatgggccaacgggtgacgttcaggtggatatgatcagtagggcataaaattacatggaaattataataatcagaaaatggaaaaaaaattttaaatttgttatctgtcgctagattttatcaattaaacgaaaattttcagaaataagttaggttttatagaatccttgatcgaaatacattgaaattttaaaaattgggtcggaggaattcgaaaatttgcacacaaaaaagtaacaattattttgtaaatcattaccaaaagtgaaattgacctacggaagatcaacaaattgtaccaatgtgacaagcggacgccaaacacaaacagagtcagtttaaggggacttaatcagaaaatgactgctttttaatgaaagggacggcaatttacaaagagtcgggatcagagggtacaaccaagagtgaatcgactaagaaacccaaaccttcattgattttacgggggaaaacccaaaaatccaagtgaaattctgatagagttaagaacctctgatcatgtccgagccttatttgatttcggaattcgaatacaaaaaaacacctaattaaagcaattagctttaattaataattaatttcttgcatatttaagtgcaaattttattcattttcctgggaattcaataaataaataaataataaaaataattatttccaggccaatgccaacagcagaaattggggtcaacaacaacagcaggtggttattttcacaaatgccatgccatttaatgatgcttattaataatgcctttgtttttttttctcgctgctttcaattttggttgatcgctgccgcttgtatttgtgcttttcaatttcagtttaaggctaaaacgatagcaccggcattctcggggatgatggtccccggcccaacatctcaaaagtcccaa

SEQ ID NO: 73155 - DNA, 514 bp, Heterodera glycines
atgggcttttcccggctgattctgatcactctgatcagttgctgtcttttgccattggcatccgttgttctggcacaatgtccttaccaggggtggacagtgagcggatcctgccaaataatgggatattgtgtagaccccagggataagtgctattacaggagttcgtgttgtaagttttttttgctattgcattattggttttaaaaatatatttttaaaaaatttcgtttcccatctcagctataagttaacaaaaatattataggtcgaatttcgaatcaacagtacgcgcagacaacaaagcaaaacccgaaaacggggctaatggaaacaaattactgccctttgggggcctacagagatggaggtcattagctaattagtagggatgggtgtaatttatagaaatgtatttttaaaaagaaaatttaaatattttaatttttcataaacataaatctcatcctaagtgattagcatacgaaatggcattttaattatattcacaaaa

SEQ ID NO: 73156 - DNA, 534 bp, Heterodera glycines
atgttcaggggcgggtcaactggtgaggaacaatcaaattatgttgcccttgatattcaaattctcaaagtaccaatgcttcaatgccgtgccgtggacattcacacgtcctcaccgctggcggggctgggacagcgcgcaattgccgtaatggacgacggggactttggcagtgtggacgacgtgcagcagaaataccgcaggacgggaagtgccggtaaacagtgagcaggcatttcattggaattacttgtaactttttccaggcacaaacattctctaccgtatccgtcgagaagagcttgcccaaggcaaacatccgacagttcgtcaaatggcccgcgcttttgaatcatttgaaaaactccaacaaaaggggaacagcagtgaagagccaaaacggaaaaggcgagaaaaagcgaaacaaaaattgttggaagggcaaataatttcagaataaaaccgacaaagggcggactattcggactgttgggcaagtcgagttcgatggaagtcagctcaatgtcggaaaag

SEQ ID NO: 73157 - DNA, 681 bp, Heterodera glycines
atgtgttggacgccgagccaagtgtgcgtcaatcggcaagactgttgtaagtgttgccaattattgcttaattttttatgatagtataattggggggggggggggtgataatgatgaaaaaatgtgacttaatagaaacagcgggtgcacgacttcccccgcctcccgcaaaaaataatataaatttttagttttaaacttttttaaatattttttttagcataagaaattatgcttatgtttgaaaatattgcttagttttttattattagaaaaaaaatttgtttacgagaaaaaaacctctaagaaagacagaaagggaaaaaattaataaatttttcggcgggggggggagacaagctgctgctccccatcgcaccatcctgcaggcgaaattgttaatttaatggatgttaatttgcttttatgatgtttaggtgtccaatcaaacattccggtgaacagcaacccctacggcccgactaataccggaccaaatacgaattatcccggatttaacgcttacaacccgggtataagcggtgaagacacctgcagacagggccaaggacaatgtccgttgacaatgtgccaagacggatgtgagttttatttcttgaaaattcaaataaataatagtaagcaaatggacatttatttttaaaaaacgaaaagaaggga

SEQ ID NO: 73158 - DNA, 582 bp, Heterodera glycines
atggccctctctgcccttctgcttcttctccccctgcttctcaatgttcaaaatatcccaggtaaatcccttttcctgcttacttggatattcccatttgttgccccttaagatgagtcagtccaatcggatatgaaggctgtttattcggctatttcatcgccggaacaatggaagaactcacaaaattcattggcttcactcgaatcacaactgacagagccccaaagagcactggcaaaaatgcattgggaattggagaccatccaaaaggaaaagccggaggcaccgccacaattcgacttgggacttttctcggaagctttggaagtgatggtcgaaatggacgaagaagcgaaagaagtgaagctgaggaaggacaaactgattgaatgggcaggaggagaggaagcaaaaaaattgaaggaaaagatgacggaggaggacacagtgccggaagtgagggtgaacgagaatggtaaggttgaagtgaaggacggcgccggaggggaaggacggttggaagtcagacgaacaaaggacgagaaaggcagagagcaggtggtgatcacccttatgtag

SEQ ID NO: 73159 - DNA, 1159 bp, Heterodera glycines
atgaagcattctgaggttgctgttgcatacttgcaaatgcttcatggtcatgtcttggctgtgcatttgtcgtattgcttgtcgaagtgtcagcgttgctggccagtttgtcacaagcagggcaattgctgtttctttttcgccttaagcactggttagtgtagcaattgagccctattattaaacaaattatattaccattttttcatgcagttacgatgaaattcatgctgaaatatttgcatattaaattaaaattaaaatgggtatgccaattcaaacatggcctaaactttgcgagcctatcaggttaatattttttataaattttgacttgatataatttcttgggtttttgtatcccaagcggctcacttacaagatatgctctatctagtagaataaaaaattacttcacatgacaatgaaacaattctttgattttcttttttcatttcattatcgcaaatggggcagtcattttccaccaaagcacctgttaaaaaatattaacttaatttgcgttagtgtttcaataaatttacttcgagcagttcccaacagaagaaaaagaattgccaagaaaatgaagtgtttaggaaaatgcatcagatattaataaaagaaatggaagatatttttaaataaaatattaaattataaacaaaaaaaaaagaaatatttttaaaagaaaatcacgaaatattagttcaaaatttatgaatattacgaatatgattaaatctttctgattagtaagaccctgaaacgaagacaatattaatatttttgaggtcatatttaaccttacatttagcaaatatgaagaaattttatacactcaatttggaaaattatgtccaaaatatgaggaagggacgagggaaattgaggattggatttgggggaataaggaataagccaaaatccgggccctggataaatgacctccctaaattggtaatcccatgggcgcctactagatctaatacgcgtgcggggatgggtgagaaggagcaaaataataatataaatatttgccaattacattaataataattccgccgcgttctgctctcgctcgccgattaactgcccgctcaactgactccttatcgagagaatgctcccgattaaatagttggacttatggaacgga

SEQ ID NO: 73160 - DNA, 1034 bp, Heterodera glycines
atggcaagtgatcatttttggtccgcccgaatcgccctagtgagtttgctcaaaatgagacaacgcatacctattttacaaacagtttcccctttcacattttagcgaaggtggcacttttttggcacaactcgactttccgacgagttacccgcaacaaccgccgaagatgcgatttctcactaacattcttcaccctaatggtaaaccgtttgcatcaaccgttccttcatcatgcttttcctctccctacagtttacagggatggctatgtgtgcatcagtattctccacccgccgggcgacggaccgtttggcgttgagagagcggcagaacgttggcagcctgtgcacacggtggagtccatcgtcatctcagtccaatcaatgctttcggagccgaactttttgagccctgcaaatctcgaggcactcgtaagaagagcattcgcatgaaatgaatatttttaaactaattcccctctaatttcagctgatgtttcgcgtcaatccccagcggtacaatgagagggtgaaacaatgcgtgaaggagtcgaacgtggcgcttgaaagtgattaccgcgatattccaaacgatggaggaggacgccgtgcatcgatctaaccttgaaactgtgatctttttcatatgaaactcgttttgattgtacataatacgaatcacacacattgtccattcattctcatatgtatttattaatcattgtgtaaaattaaagaatttaataacttcgctttttctgataaaaaaattatatatccaggaaaaagcctagaatttgaaaatttgaggttgggaatcaggccgggattggattcccaggattcaaattctggaatttgggtcgaaattattaaaattaacataaaaattctcaagaattttcgaataattcgtatggtcgggaggccttacacgcacaggtgacattggaaaatttgagatgttgcaattggtggtaaaaagtcgggatctggatcagattccgggaaaatccacatgcggaaaataaa

SEQ ID NO: 73161 - DNA, 393 bp, Heterodera glycines
attcgagacttggacatttcgtgggctggacattttgtgggtcagcggccacactatgggtcaagcccagtgttagacaaaattgctcataacgccaaatagcgtaattggcgtaaatttttgcgcgctaattcaaacacactgatcactgccatttctgattgtttattttgatcagccatagctttgttcctctccaactaaattgacctaaattggtatctaaaataagaatttgaaaaggagaatctttttctagttaaaataactctacagttggccttatttttgtattaaatttccttattaatcgattcagaatttttttctctatcgtgtgcaaaatttggtggggttttaacaagcagaaaaaaagttaaacagcatgaagta

SEQ ID NO: 73162 - DNA, 236 bp, Heterodera glycines
  unsure (1)..(236): unsure at all n locations
atgtcacttatgcgtgtaagtaaggcctccngaccatacgaattattcgaaaattcttgagaatttttatgttattttaatatttcgacccaaattccagaatttgaatcctgggaatcctatcccggcctgattcncaacctcaaattttcaaattctaggctttttcctggatatataatttttttatcagaaaaagcgaagttattaaattctttaattttacacaatgatta

SEQ ID NO: 73163 - DNA, 624 bp, Heterodera glycines
atggcaagtgatcatttttggtccgcccgaatcgccctagtgagtttgctcaaaatgagacaacatatacctattttacaaacagtttcccctttcacattttagcgaaggtggcacttttttggcacaactcgactttccgacgagttacccgcaacaaccgccgaagatgcgatttctcactaacattcttcaccctaatggtaaaccgtttgcatcaaccgttccttcatcatgcttttcctctccctacagtttacagggatggctatgtgtgcatcagtattctccacccgccgggcgacggaccgtttggcgttgagagagcggcagaacgttggcagcctgttcacacggtggagtccatcgtcatctcagtccaatcaatgctttcggagccgaactttttgagccctgcaaatctcgaggcactcgtaagaagagcattcgcatggaatgaatattttttaactaattcccctctaatttcagctgatgtttcgcgtcaatccccagcggtacaatgagagggtgaaacaatgcgtgaaggagtcgaacgtggcgcttgaaagtgattaccgcgatattccaaacgatggaggaggacgccgtgcatcgatctaa

SEQ ID NO: 73164 - DNA, 298 bp, Heterodera glycines
atggcattgaatgcacggcagagaattgtcgttctatgcttggtccggcacttttcaacatacgttttccggtttgtcaaacgtggaatttgcgaaggatattgataaaaaaagagattaaaaccaagtttaaactcattcaacaacgagtgtcaactttttaaaataattaatttaaataaataaaataaaaatttaatatgctttttcttatattttcagtgcattcaaaatgaaatataattttttaaaaattttattccattttttatccatggagaatattggcacaaattaa

SEQ ID NO: 73165 - DNA, 340 bp, Heterodera glycines
atgaatttaatgactacttttttgacaacaaaaagaaaatcttgggttcttatttcatttcatttccagtgagtcacaattaaaatttcccttaattgacccaattatggctaattaaggaactgtggacccgagcaaaggcttttacgacaaaagcgaggacaaagtgacattggccatcgatgtgacagtgaaagaagcaaaaaaggagcacaaataccaacataattttgtaaagtaaatgtttcggtttgaaatttacttgacgacatatttttattccgaaagtcattagagtaaatgttctcacattttgatggcttattttatttgagattca

SEQ ID NO: 73166 - DNA, 70 bp, Heterodera glycines
atgcaccagtctctgccattgtttctgccgcttttcatcttcttcgtctacgcgaccgattgtctcaacg

SEQ ID NO: 73167 - DNA, 1017 bp, Heterodera glycines
atgtcttcccactcctcaagtagcagtagcagctccggtggctctttgaagcccgacacattggcacactctggcggttggaggaatgaccacttctgtcatatctacgaacatcaaaccgcaatcaaaatccgaatcacctcatatgacatgcttcccattgcgcctgctccaaagcaccattgtgctgtggtcacattcttgtgcaagacatgcgccaaaaaaactcacgtaacgtatgaattcagcagaaaaggaaagagcgcaatgtaaaattttttttgtggtgaccaggggtgtcaccaaaatcttacggaatccgatccgtcaaaaaacatcagatttttaacaattggaaaaagtgggagacgatggtgccaacaagcgccgccggaaaattttttaaaaattgagtgcaatacatatgttaactaacagaaaaaatttccattttttaatttggagctcatttttaagaaaataatggatttttgtgactggaaatttttagggattttggctagttttttgtccaaaaatgaaaatccaacactttaggttgggagagtacggaaacttcatcaaaatcgttcgaaccaaaaaaattgcgatgtcaccaaactctgaatgacgtatacgctgacatgccgttgaggggctattgtgtaatatggtacaattgtcaaaaatgggcagacgatttcttcgataatggtaattattaatttaagggggcgggtggtcgatttctgtcccccccccctctttgaagaggaccccaggctgggcggctcggaaggaagggcaaaataatttcagttcatatttagtgatccaaaaagaatggttgaagagtacctttgcccgtgcccatgctcagacaaaactttgatcaaaatcgaagttaacaaagtcaaaaatacagcgacacggcatgttataaccgctgaagtaaaatgcccgtgtcacggcgcaccgacttttgtcacttatgaactaaccgcagcaggaaaatga

SEQ ID NO: 73168 - DNA, 1004 bp, Heterodera glycines
tagcagtagcagctccggtggctctttgaagcccgacacattggcacactctggcggttggaggaatgaccacttctgtcatatctacgaacatcaaaccgcaatcaaaatccgaatcacctcatatgacatgcttcccattgcgcctgctccaaagcaccattgtgctgtggtcacattcttgtgcaagacatgcgccaaaaaactcacgtaacgtacgaattcagcagaaaaggaaagagcgcaatgtaaacatttaaatttttttttgaggtgaccaggggtgtcaccaaaatcttacggaatccgatccgtcaaaaaacatcagatttttaacaattggaaaaagtgggagacgatggtgccaacaagcgccgccggaaaattttttaaaaattgagtgcaatacatatgttaactaacagaaaaaatttccattttttaatttggagctcatttttaagaaaataatggatttttgtaacgggagatttttagggattttggctagttttttgtccaaaaatgaaatccaacactttaggttgggagagtacggaaacttcatcaaaatcgttcgaaccaaaaaattgcgatgtcaccaaactctgaatgacgtatacgctgacatgccgttgaggggctattgtgtaatatggtacaattgtcaaaaatgggcagacgatttcttcgataatggtaattattaatttaagggggcgggtggtcgatttctgtcccccccccccccctctttgaagaggaccccaggctgggcggctcggaaggaagggcaaaataatttcagttcatatttagtgatccaaaaagaatggttgaagagtacctttgcccgtgcccatgctcaaacaactttgatcaaaatcgaagttaacaaagtcaaaaatacagcgacacggcatgttataaccgctgaagtaaaatgcccgtgtcacggcgcaccgacttttgtcacttatgaactaaccgcagcaggaaaatga

SEQ ID NO: 73169 - DNA, 1020 bp, Heterodera glycines
atgtcttcccactcctcaagtagcagtagcagctccggtggctctttgaagcccgacacattggcacactctggcggttggaggaatgaccacttctgtcatatctacgaacatcaaaccgcaatcaaaatccgaatcacctcatatgacatgcttcccattgcgcctgctccaaagcaccattgtgctgtggtcacattcttgtgcaagacatgcgccaaaaaaactcacgtaacgtatgaattcagcagaaaaggaaagagcgcaatgtaaacatttaaattttttttgtggtgaccaggggtgtcaccaaaatcttacggaatccgatccgtcaaaaaacatcagatttttaacaattggaaaaagtgggagacgatggtgccaacaagcgccgccggaaaattttttaaaaattgagtgcaatacatatgttaactaacagaaaaaatttccattttttaatttggagctcatttttaagaaaataatggatttttgtgacgggaaatttttagggattttggctagttttttgtccaaaaatgaaatccaacactttaggttgggagagtacggaaacttcatcaaaatcgttcgaaccaaaaaaattgcgatgtcaccaaactctgaatgacgtatacgctgacatgccgttgaggggctattgtgtaatatggtacaattgtcaaaaatgggcagacgatttcttcgataatggtaattattaatttaagggggcgggtggtcgatttctgtccccccccctctttgaagaggaccccaggctgggcggctcggaaggaagggcaaaataatttcagttcatatttagtgatccaaaaagaatggttgaagagtacctttgcccgtgcccatgctcaaacaactttgatcaaaatcgaagttaacaaagtcaaaaatacagcgacacggcatgttataaccgctgaagtaaaatgcccgtgtcacggcgcaccgacttttgtcacttatgaactaaccgcagcaggaaaatga

SEQ ID NO: 73170 - DNA, 212 bp, Heterodera glycines
atgagggtccgacggtgcaggtaggcgaggattctgatcgaaatttggggaacaaatgaataagcaaatcgtaattttcagtgcattcgtgattcaaacggctttttttgcggcatttttcaaaaaactttttttaggcttggggagtcagggtggcaacatgaagtttgggcaccgggaagtttgggcaccagaaggagggatttaaaaaa

SEQ ID NO: 73171 - DNA, 1020 bp, Heterodera glycines
atgtcttcccactcctcaagtagcagtagcagctccggtggctctttgaagcccgacacattggcacactctggcggttggaggaatgaccacttctgtcatatctacgaacatcaaaccgcaatcaaaatccgaatcacctcatatgacatgcttcccattgcgcctgctccaaagcaccattgtgttgtggtcacattcttgtgcaagacatgcgccaaaaaaactcacgtaacgtatgaattcagcagaaaaggaaagagcgcaatgtaaacatttaaattttttttgtggtgaccaggggtgtcaccaaaatcttacggaatccgatccgtcaaaaaacatcagatttttaacaattggaaaaagtgggagacgatggtgccaacaagcgccgccggaaaattttttaaaaattgagtgcaatacatatgttaactaacagaaaaaatttccattttttaatttggagctcatttttaagaaaataatggatttttgtgactggaaatttttagggattttggctagttttttgtccaaaaatgaaaatccaacactttaggttgggagagtacggaaacttcatcaaaatcgttcgaaccaaaaaaattgcgatgtcaccaaactctgaatgacgtatacgctgacatgccgttgaggggctattgtgtaatatggtacaattgtcaaaaatgggcagacgatttcttcgataatggtaattattaatttaagggggcgggtggtcgatttctgtcccccccctctttgaagaggaccccaggctgggcggctcggaaggaagggcaaaataatttcagttcatatttagtgatccaaaaagaatggttgaagagtacctttgcccgtgcccatgctcaaacaactttgatcaaaatcgaagttaacaaagtcaaaaatacagcgacacggcatgttataaccgctgaagtaaaatgcccgtgtcacggcgcaccgacttttgtcacttatgaactaaccgcagcaggaaaatga

SEQ ID NO: 73172 - DNA, 1374 bp, Heterodera glycines
atgcatctgaggtagaattgatttaaaaaaaatttaaatgtgtggaatttaaatgtgcctttttcaggatattcgcaaaaaatccttaaaaaaatgcaataaaaaccaaaaatacacccctaagaaatggcccgaaaaaatttcagaaaatactccccctaagaattgaaaaaattttcccaaaattgatcccgaaaattttatattttcttcataacaaaaatttttcgtttatatccttattcgaaaaaaagtttatacaattgaaattgttatgtttttaagtgttttggtacctaaaaagcgttaataaaaatttttaattacctattttagtgcctatttgaggatttttgtgcctatttaatgcctatttcgctattttttgtgcctaaaaaaggaagccctacttaggttgtttattaattaattagttcatccatttttcagtacatttatgactttaaagcgcaagatttttaaatcttactgatttatgttgatttttggaaaaaattctcaaaaatagccaggctcccggacatttggacagtggacattacgacagtggacattaggacagtgaagtcatttggacagaagtggacatttggacagtggacattacgacagtggacattaggacagtgaagtcatttggacagaagtggacatttggacagtggacattacgacagtgaagtcatttggacagaagtggacatttggacagtggacattacgacagtgaagtcatttggacagaagtggacatttggacagtggacattaggacagtgaagtcatttggacagaagtggacatttggacagtggacattacgacagtgaagtcatttggacagaagtggacatttggacagtggacattaggacagtaagtcatttggacagaagtggacatttggacagtggacattacgacagtgaagtcatttggacagaagtggacatttggacagtggacattaggacagtgaagtcatttggacagaagtggacatttggacagtggacattacgacagtgaagtcatttggacagaagtggacatttggacagtggacattaggacagtaagtcatttggacagaagtggacatttggacagtggacattacgacagtgaagtcatttggacagaagtggacatttggacagtggacattacgacagtgaagtcatttggacagaagtggacaattgtgatgcgcttgacatgcgcattccagaaaaattttcagtgaaacaaagaaaaaaacaaaatgcaaattccttttttttattagctttaatgacgcatgaaaaattgttgaccataaaattaatgtggcaagaaaaatcgaaaaataaa

SEQ ID NO: 73173 - DNA, 2433 bp, Heterodera glycines
  unsure (1)..(2433): unsure at all n locations
atggttattccgccgttagcatcatcagcagcagaaaatgcgttggtgacgcagcaaaagcgacgcacaaaacggggctttgaactgttccgtcgacacgacggctgcgccggcaattggagcacgggccaagaatgcgcaggtggagctagtatctttgtgctgtccatctttgtgatcattctgtgcgcatttcgactgtcgcacgaggccaaattgcacacgatgtcccatccggggaccatccaattaatcgcattgctctcactgattgccttctgtgtggctctcatcatcggcctttacatgatgctccgtggctgttttggcgcaaaattagacggaggttcggcatggggccgaatgtgttagagaagaagatgaaaggggtggggatgaactgctggcgacgaacattttttttgtcaagggggattttcgaattttctgtttttcctttttcatttggtctgtggaaaatttgtgccgaaattttcggcccaaacattttcgcctttgctttttttaatcattggtagcataaaaaacattaactctactcattgtatgtcaattaattaaccattaattaagctgcagttaatttgtgctacatttttattttcataaattttttgtttcaaaccgaccacaacacaggcgaaattggcctgctgctgatacgcatgttactgaatgggcgaagcgggccgttgcgtctgacaataagcaaagtttaaaaccgtgctgagacaaaccgaaaatagtttcagtgtcaattaaaatattaattatacaattcaaatagatgtcgaaaaatatgaatttaattatactattaatattaaaaatataaacagaaaaagatgaaatcattccatctccgaacaaaaaaaatcacattgaaacgaaaatttaattccaattcttgaacacatcaaattgattggcaagtcaacttactagaggattgttcatttttagaaaaaaagcaacaacaaatctactaattttcttcttaaatttcacccaatatttattaaatttaagttctttattcgattctccagaaatttcatgtgtttttccataaattttccttcatccctattctttttccactaatgttacaattgaaaattgttctccatttattaattgtacgaaaattatcatttatttcgagaactttttgttttatttatacatttcgatagtccaaagatttttctattattctgttaaatttcagaaattttttattaagttttaaaaaagttggggcaaaattagtgagtcaaaattttttggaattttttggttacacctttttgtaaatttataaaattaaataataattaaaattaaatatttcaatcattgatacttttgtaacttcgtcctagcacctaaaaattcggtaattgaataagatattaatttattgcataattttaaatgatatttattttgaattaaaaattttttttaattgataaattttctgtgcgttattaagcggtttaaagaaatattaaatatcttatcaattaaacaacatttcgtcacaaataaaattttatttttccaattccttcatgtattaccgttcaattttttattaatatatttagatttctttcattttatatgttatttttaattttaattattttatatggcatcggaattataataaacggcgttgtaattttggtcatattaacttttaacaaaatgagaaaatcctcgatgaatttgcttctgttaaatttggtaagagctctaaaaatatatcagtttttcaaatattgaaaaatctccgcatttatttggggtttttctcatattttttttcttccacaaaatgccactgttgccaaaataatgacagtccctggactttgacttggaaattgtggcaccattcccttccccgccatccaacggtgctgcaatagacgtgccgaagaaaattttgaaattatagagatttgttaacagtttattacaataaaactggctaattttggagtttgaaattacaaaagtttcctttttcccttaaaactttctatctcccctatgggaacattaaagagggccattccaaaacaaatttgttttgaaaaaaatttcatacatatatttttattttcagggcttgtccgatctatgtctgctgtcaataactcgcttatctatgcccaaatgnttgacgaccattcttgagttttactgattnattgcatttcaattttttgaaccggggttggggcctgccccattctgcttaattggcaccgggggggaaaggaagttcaatcctgcaaagggatgaaaagggggggggggggggggggggggggggggggggggcgcggctcctttttttttttttaaaaaaaaaaaaaaaaaaaaaaaaaaaaaaaa

SEQ ID NO: 73174 - DNA, 1886 bp, Heterodera glycines
atgcctgctgtcaataaactcgctttatcttatgccaaattgtttgaacgaccaattctgaagttttcactgatttattgccatttccatatttttatgaccggcgtttgtggcctggtctctattctgacttatatggccatctgtgtggaaaggtaagttcaattccatgtcaaaagtggggaaaattggctgggaggggggggggggggggggaatcccgcatttttgacatgaaatgaaaatgcctagaaattagaattttaatgtggcatttttggttttggtggcgacgatgggggtgtttttctgtgctatatttcaatcttcaaaaaatttcccgtcattttttcgtctcgaatccctctttttttctgcccgtggtaactctgttcgacaatgccattacgtcaagaaaatgccatcaccaaagttctcgaaattataagaaaattaaatgacctccgcataatgaccaaaaaattacattttaaaatgtgttttaaatttcaattaagatacattgtaattatttgtcctcttcacgcatccaattggtgcacaaggagccgaattttgcttgtgataaattcaatttgggcatttgccattatgtacagactaccgtattttgatcttattggcacagaaaagcgtaagaccaatttccaattacaacaataaaagtgaccgggggaaaatcactccgggggatttacagtggtcgttggttggcctctaatctgacacccatttgaccaattcagaattcccaactcgcacttatgtatgtcagatcacttctttgattttaatagaattccaaatcagccatttttaaataacgccggatattaaaaaggttctcgtagataatttgagtgatttctccaggtgccagagatagtgttgaaagttattagttcgtcgtgataaaattaaggtcctttgcctaaaaaaggattaacgtagatgatggcgattgctgtcccattcttagaattttaagaacccatggagacactaaactaatagaggggatacggtaaaagtaaatattgtgttttttcattcccagatgagtacggttgttttttggagtttcttccatttcattgggtctccgaatttgcgtttatccatctgtcagtgttcatcatatcagcaactctttactacaaaacgtgcaaagtgttgtggtcaatggaagtgttggattacacacggctaaatggtcacagtttaattacctaatttgtatctcaattaattttaatcaataattgcattaattttatccgattaattttcagagcgtaaaataaggcaacgccgaaaagtgatgaaagtgctcattttctgctttgttttatattttctgtgctcctttggatcaatttcactcttcataatatggttctttttatattttacattttaaattatcgcaaaagccaaaaaaggcaaaggaaattttcaaggaaaagcaaaaaaattgagcactttagtaaaaaaaaattctgtttaaataatgcaaaaatttagtgaattgtacgggattgacattcttcggtacgcaattcgactgttcgcaatgcaaagtgcgatcaacccattcatatacacactgatcgggaaacaattccgtcaaaatttcaccaattttttttctcgtatttttaaccataaataatttttttttaaatttctttatttgtattttcatttatcgctgatattccactttttattgcaaatgacttcattaacacctaattgtatgattgatgaaattccatgaaatgtaataatttattttatttttttgggacattactatacattaggcattgttaattgagaaaaaaatgattcaaaaattgaaa

SEQ ID NO: 73175 - DNA, 385 bp, Heterodera glycines
atgaagcctattattgtatggggggaggtctctaggtgcaaattattgaacaattattttgcattgtttcagcaattgaaatcacccaatcggatcggttatcggcaagttcaaatcacggacagtgtgttgcgtgttcaagtggaagaccggtctcagctgatcagtcccgaggctgagattaacccaatgctgggcgatcaaccgcacgcacaacgaatgctccaaaatgttgtgcatatgccgaaattacaatttatattcattccataaatccatttttaaggccccagaagcccattgggacagcatcaccgatttggccacattatggcctcatttgctcgtgtccgccggccgtgagggagtgatcaaaatgtggaga

SEQ ID NO: 73176 - DNA, 1240 bp, Heterodera glycines
ccccccccccccccccccactgacccaaaatttgtatggaaaatttggaattttgccgaaatttttaggtttttttgggttaatattctcttcaagacctttgcccttattatttgtttctttaatttaaattacaccaaaattttcaacaaaaaatgttttaaaaagaaattttaattttttttaattttaaaatttgttcatttttgaaggcatttgcctcttctctgaacggcactttggccacattggcagtgctcaaaggtgtcggcgttggaaacgaacaagcggtaggaggcaattttgaaaatggaaacatttttttttgaaaaatttaaatttgagacagttttggcggcggcactgacatggattttgaaggacggagtcggcatgttggcacgcattgcattcgcttgggccaaaggcactcggctcgactcgggtggggcgagccaaaaatttggaaatgcaaaaaaaataattaatttaaaattttaaataaaggacattttgatcaattttattactttttattaaaaatcataaagaaaacaataattcttttaaaatattcaatgttgctttcttaaataaaattgaaaggaattaaaaacataattaattaattatattttattcaatatatttttatttaaattattatttttcattctatttaataaaaagaatttctataataaatatttatataattaaatataatttaatttttttgcatcatctaattatttataaaatattttttattaaaaatatttggcaaataaacaattcattttaccaaaaatggaatgacggtgtaaaatgccattattaattgtactcactcaagactctcgagtttcgcctaatgtattagtcaatttcaaaaaccttctcagattgcaaacgatggcgactttttgccgacctgctcaacgatgcaagcttttttatagtaagtttctttgaattaaatttttaaaattgaagccaatttttttgacacgattaaaattatttccatttaattacgttttgtttatctgatattttcctatcatttgcaccttttgatcattttatcacaacttactgagtgagtgagcactttgtttatttttcttaaaccatcgaaacttttttggatcagatttcctttccgctcaatctaacatacctacctaattggtaagataacattttttatcaatcgtttcatctttcccaagtgaaa

SEQ ID NO: 73177 - DNA, 123 bp, Heterodera glycines
atgccaaaatcattagcatcacaagtcgaagccatagaacaacaacaacagaacattgtggaaacatacaatggcgaaccggtccatgaatacagttttgctcgaccccgaggggacggcgac

SEQ ID NO: 73178 - DNA, 723 bp, Heterodera glycines
  unsure (1)..(723): unsure at all n locations
atgctgaactgcgaacttatttattggaaatacatacaagttgatgagttcagtttaaaaggtagaaaagtagttcgcagccaagcggattcgaacnccagacnccngcattatgactataagaactttaaaaaaaatcattaaaataactaaaaatttaatttttcattcataaacagctcattctcaaactatttgtgagttctatactatgggttttaccagcaataaatttttagaaaaactaaaatttttggaaaaaaatcaactatctgatgaaaaatcatcgaaaaaattaatgattttacagaatttgagtttctcaacttcgtgatcagtgcattttttagccctagaaaatgtgtttcttaaattttaaattttcgcataaacaacaaaactttggccatgattaaacccgattaaatgagaaaaaaccggaattttttgggataaatattaatttgtaaaatattgataaaagtcaattttcgaattattctatcctttctctattagtctcctattatattttttaaattattcgacaaaaatattgaatttttttttaaattaattttttcttcctttttttaaaccacactctcttagtaggggaaaacggggagcaaaaattgtttccttctaatggatgatgatgatgatgatgaaagtggcaaatatttaattgatccttttcattaggatttggtgcaaaataaa

SEQ ID NO: 73179 - DNA, 1863 bp, Heterodera glycines
atggacaacaattcgcctggtccctcaaataatgtcaacccggaaaacaaaattgggaaaaccaatgttggtggaccattgtcagacatcgacttgttcaaagtttgttcaatttgaatttgtttattggcatattaattacccctactacctaagttttgattttccaggagatttgtggcattgacgaaccaactgcttccgcgttgttgagggagtcgggcggggacctcgaggccgcgattcaccaatttttcttcgtatttttttttgttgcctatttttgaaaattgacgaaccaattttctttagacccgcgagaatcccgaagttctccagaaccaggacaacgaagtgcaggagcttaggaggcgtgcaattggtgacagggcacggaataatcagcagaagtgcgtttgtttgtttcttgttttggcacttttgctgttgggggaacaccgaaaaatgccaaaaggttgggggacccttatggactgatttttaaaaaaagttttggactcatttggtcactgcagaacagagaaattactaaaacttgttctcggctgtatgtttttggggccaaaatcaggacagttccaggatgttgcgttggagggtgacgccctaggcaacgacccttttttgcggcgcgctttctacaaaatttttggaaatggggaaaatttaaaaaattttctcgtgtttgttaacggattttcaccttaaaatgaccaattttgggacttacaattagagctattttttgtgggttttccgaaaatatcgaattttttttttttaaatttgggttgtggaggtcttggaggggctatcactaaagaaaattggacgttttgaacccagcagaaaatactatttatccctaaccgtttgctatgtttagccaatctcttccggtggtttcggcacctccgaatgccccgctcatttcgtggtctcaatgggttcgtggcattttcctcatcccgtttcgctacctttacacaacggcaatggacgtgttcttcttcgtttgtacgtttgcaacttcacttttaatttaataccaccgatatttagttgatttcttctttggagggcggccgccaagacgtccaatcaccggaaataatcgtcaaaagtgagcaccaagcttaatttcttataattaaactgggtatttttgagacacaaaaattattatctgtcagtgttcattcgttaagttaaaaaacggcagtgttttaaaaatgaaagctaattttttttttgtagattttaaaagacgcaaaagtaaatttgggttctattgcactttatgagtccaaattcggagtttaaacaagttaaaatattcataaaacaaatttcgtatcgaaaaaatgatgaattaagcaactgttacataacatactgaatttgttgttgtcctttcagcaatgccaatccactggcacgagggcagcaggacgttttggcggatagaatgtgaaaaatgattgttttttccatatttttcgcaatttaattcaaaaattgcttccttttttcagcataatgcgtgaacaacaacaggcgtatgagcaggcgctggccattgacaagcaaaaagcggagcaactcaaaatggaaaagcaacgggcgcaggcggaggcggacaaagtgaacaacaggaaggcatttttggcacgaaaacggggcgaagtggcggcaaacattggcaaaacggcggcggaaacgaatggcaccggcggcggcactgtggcggaggagaagggcgaggatttggtgcgcattcggctcgtgtttccgagttctgcccgcatggaacagaactttcgccactccgacagtctcgag

SEQ ID NO: 73180 - DNA, 2123 bp, Heterodera glycines
atgagaaccctgccttattttatcattttcattacttcacgtgaaaaattgttggcaaaaatggcggaagtaaatagaaacaaggatattgttggctttttattaattctgatatataaattaaagaatttttagctcagtctttatattattttattattactaaaaaagaaaattaaaaatgtttaaatttcttattttcaatttgttattgcttggaacacgaatttttcaagaaacaaaatgtcaaaaaggttatttttaaaaaataaatgtttatacatacttaacggggatggcattacgaggcgaccccaaaaattttaggaaatcggaatttctattcccaaaaatgtcggaaatctgaaattttgaattaaaaaaataatagaaattttctaaatattttaattactaggttttaaactaaaccaaaaattaaaaagtaattttctcaccagaatattttttatgtcaatcaatttacattgtttaaaatattattgggaaagtgactatttacattgacgccatttttaaaggcccgcgttttttttaaattttgggaacgaacataagcgtagtccggtgggtgctggggaaatttttttaaaagtttatgcgatttaaacagaattatacaaaaactgctaattttgagattttgggctaattttttaggaaaaaacaaggagtttttggggtccggcgggccgacaggcgctgaaaaactaattatttcgtaattaaaaaaaatcattccgaattggtaaaaaattaataaaaaataaatttccgattttttattaaaaattccggaaaccgaaatctgacctccaatttttttcgggaattccatgcagtccctaatacttatcatttttaagtgtatccaaaatttaagttttcaaaatttcaaagataataaaggcacccagacttattattaaaatatttgatttagctaaattatattgaatgcttattaaaatatacaaaatttaagccacttaattttcaatttttaaactgctttttcgtcttaataaatttaaactccgcttcttctaatttagatttgattatgacggaaaagaaactgttgagcacagctccgagcgtattcttccaatctgatgaatttttgtttgaaaaatggttccaaaattatatttttggcattttatgcgccgaagaatccgaacgaaaaattacaccggaaaattatttttacaatttttatgaaaaagctcaaaaattgcggaaagatttctgttggacaatgaaaaatggacaaagcgtggaaaaagcaacagaaaaatttggaaagaatgcaagaaaattaataaaagagttggaaaatgaccaaaaaataaaacaaagtattcaaaaagcgatgaaaaataaaaatatcaaaaaattaaatgaagccgaaataatttcggtgataaaagaatttgaagcaaattcagcggaagaaaacaaaaaccaaattaactcattagtcgtccaatgggtttatttggcgttgaacggactgtggaaagcaatctaactcttctctcttcatgatgcgcgcagataggaaagtatcccccggaaaaagtgggataaagcacatgggataaccctcaaaaagaaagcggcaaaagctcagtcgtttcgagcaataccatggtatggaaaggccgtgggttcgagtcccaccaggcgagtcaccttttatcttctacaactctccctctctcactccttttctcttgtgcaaaaaaaagagttggtactttttggttttgttcctacacctcaaaattttaaatgcaacaagacgacaaatgtcccgggcgcaatgtcatgtaacctttgatcgctatgctaatttagggtcactgtgagtttgtgcgctcacgtttgggtgctcacgtttgggcgccaacatgtttttccacgaaagctttctataacttttttcaatgtcatccaaatccaacatttttgatatcattcgaaagcttaacatgtttagaagctttttctaagctactgcttcacgattagacaattaccaaaaaagttatacactgaaaattgcaaaaagtcgaaatttttgaagttttttctta

SEQ ID NO: 73181 - DNA, 84 bp, Heterodera glycines
tttaccagcgaaaaatgcacttggagaataaacaaggagagaaacaaggggagacgcgggcgcaactcaaagacgacgcctttc

SEQ ID NO: 73182 - DNA, 1924 bp, Heterodera glycines
aattatgataattcagttattttttctcctgatcaaaaagctgaaatttttgcaaaaattttttctgaacattatttacataattctaagtctttaccttttgatttatctagtcactctcctgtaattaatgatattgaatttaatgttgttgatgttggccgggtccttaaatctttaccaaataaaaataatacttcaccggatggtataaatttcaggttaataaaaaaattgtttcctttcttttgcaccttatgttaccgaacttttcagaatctcatttgataccggaaaattaccgaccttttggaaaaaatcaataataattcctctctttaaaaaaggggataaaagttgtctcaccaactatagaccaattgccctcacatgttcactgtgtaaaatttttgaaaaatttgttgtcagggcaattactagtttccttttaaaacatgacctaatctcagtacaccaatttgggtttgttaaaggtcgttctactgttacccaacttattttaactcttgaaaattggtttgacggtatttacaatggaaaaaatattgactgtgtttatattgattttcgtaaagcttttgatgttattccccatagcttacttttatataaggttcataaaattggcattagaggtaaaatccttaattggatttctgattttttggccaatcgctcctttttagttcgtgttgaaaattcgttttcttctgaatacaaaatgtgctctggcgtcccccagggctctgttctaggacctattttgtttcttatttatattaatgatttacctaagaaaattccgaaaggaatttttatcaaactttatgcagatgatgtcaaattgtattcaatacatagaactaaaactgacagagtgataatgcacgaagctctgaggcaattgtccaattggtctaatgaatggtgtatcgacatctctattaacaaaacctttgttttgtacttgggaaaaaataaccctagagaacaatataaaataaataacaacacaatttgtgaagtggacaccattcgagacctgggtattcttatcgacaataaacttaaatttactgaacatataaataccgtaactagaaatgcttacggtagaatgcgatttttatttcggattattaagtcaaaaagaatttcaatatggaaaaacatttttatctcgtatatccgtcctcttcttgaatatgcccctgaggcatggaaccctcagttaaaaattcacattaataaaattgaaaaatgcaaaagtactttactcgtatagctttaagaaaatgtaatttgccatataatccatatggacaaaggcttgaactttttaaattaccaactcttgaaaaacgacgaaaaaagtttgatattcttacaacatataaaataattcatggtttcactcgtcgggtccccaagttgcaaatccccaaaagtcgcaccacgatgggaccaactgacgggttccggctataagcaaaatatgtgacagtattaaactcaaaaaatattttctactgctaataaatcgctctaattcgtgaattgttcgatgaaaatgaatttttttggactttctgcgaaaataggcagaaaaataattaaaaaataaaacattttctttgattatgtgaaatgctttattttctactgcataaacaacaatagtagactaaatgtctgctacaatttggcaaattatgaaaaaattgacgaatgaatgatgagaatatttggtgcctaattgacttaattattgacaaaacgcagcacttccatttcatcggaaaattggaataaattttcgaaatttgtacatttccgcgtgaatgtgatcacttggacaacaaacagaagggaattgaagctgatactgatccaaatcaaagcg

SEQ ID NO: 73183 - DNA, 1887 bp, Heterodera glycines
catccgctcgtcgaaaaataagtgaggactacaaggaaattcaactaccgtctccggtgtttctggatgatcaggaccaaacgttgtgggacaaacgggcggccaagaagcgattgttgttccaccattcgtcgttggatgtgccggccatgggaagcattgacacggcacacgacgatttggcacaccgctacgaagacatggattccgaggcagaattggccattcaggaggagccgcctcgttacatcaacgacgaggaagcggaagactttgaggagatgatcaagttggtggcacgaaaaatgccgaaaatggaatttttgcaagttcgaaagtgattgaaattcgaactcaaggccacaacttcaggtttaaggcgaatcgaattccgaccaaaaattcggaaagaggaattggaaaatttcgaggattaaaaaaaattcaaaattccaaataaaatgtcgcaaaaatcggaatttcggtgcccaaatattttttccgcatattgaaaattgcaatttttctgatccaactgttccgatattttatttagaacaaattgaaagacagtgaaaaaaacaattaagggctgctcgaccgccaattgatgcgttcagcaacccaattcttcttcgtgacgcagacccattgacaacgcgcaaaaagttgacaaaacgcggcagcggtaaaggcagtgccgcgtctggtggtggcggtggatcaacactgttgcgccaacacagcaaaagccgcttgaaaaagttgagcgaacagtcggactcacgaacaccgtcaggtggtgccacatttgatagtgacgatgactgattgatgagatgataaagccaaaattcacacaaaggaccagaatgggcaggcggcacacacaagcaataaagggcacaataattaattaattgcctaattaccagattaatgaatattttaattaattaacgcaagcattcgtttttaattttgtttttacgataaataaaatactcagaataactttttaaaacctctactaaatttattactggttacggattatggaaattatggcattttgagcccacttaattacggattttggttattgaaaatcctagttacgctcatttctaatacataaatatttttgaattacataatattgtgtcagaaacccgtttccacttgaatctaaaattacgacaaccaataaaaaaaattgattttcccattttaatatattcttcagtaaattcttttgaaatgagttaatcaaattaaaaattttgaaattttatttaaattaaatttgcctttgtcacgtgccgctggttttctgtgaacgcgggatataataatgaatgaattcacaaatttttgcataaattttgacaaattttcatgtgcctccttttttaagtaacctgcactaatgatgattatgatgatggggcagataattcaagcattggtaagaagtttttttattaaaaaaatttttaagatttcaaataatttaaaaaacttttactagggatcgaaatttgaaaatgcctggatttgggtttcatgtttgtcatggacctttttctagataatccagcaaaatccaggtcaaggatttgtaaaatgaagaagagttaattaaattattaaatagctagaaatccttgcagaaatccttgcaattttattacagattttgtcagtatagtggatttaaaatttaagtttttagctgacgccaccgaaatgctggccgaactgtccgccatggtggccaaatcgacggcccattccggcgccaccagtccagcaaacattctccagtttattgaggagcaaaaacagaaagcgtcaagccaagcagttgctggagaacaaccatga

SEQ ID NO: 73184 - DNA, 804 bp, Heterodera glycines
atggatgatgaattaaacacaacggtaagaatttactattaaaaacccaaataagttttttaaaatattttaggcgtccagagaaaagaaaactgaaccaatcacattaattgaggccaaggaggatgtgattagcaacattgaaaatgtaaaagcagcaaagttggaaaatgaggatcaggcaaaagctgaaaatgaggaaaagggacaaattggtggtgataaaagtgaagatgtcagtgaaaaaacaatataataaataaatattacatattaatttaaatattatgaagatgtcagtgacaaaataattatataatattatttttaaaaattaattaagtatttaattgaaaaatatgaaatatcagtaaaaataataattaattttatattattttaaaatatatttattttaattaaaattatttgaaatttacatttttagaaaactgccatttctgatggacaacaacaaaatgaaggcataacagtgaaaggttgtgctgctgctgctgctgctgatgaagaagatgatgatggcactgttgtaaccagctcaaacattgctgcacaacggagtctaaaatgggacgatactgtggttagtggtatactgtaacgaaaatttgaaaaaattgaaatctaataaatttttaattattttcacattttaagcctgatcaaaaggaggaaaagccggcggcaacagaagaacagaaagtgcggacaaattcgtgcaaggatgagaatggctttacttattacaaatgccgcttttgtgggctcacatttaattatatg

SEQ ID NO: 73185 - DNA, 600 bp, Heterodera glycines
atgaaaaatgacaagggattggaaatttcggaaaaattggagcaaaaccaagaaattgtgcataagtttttgggaatagaatctgaatcgttagaggatgagagtgatgaatatgatggaacaaatgaatatgaaaaggatgaagcgagctatgaatatgaaaacagagggattttgtctgatattttggaaatggacagaaaaaagagaacaacagtgactacaccggacgcgcgatgggttaaaaaagtggagaaaagcaaattaagaaaaagtggaggacaggagaataaaaatacaaacacaagagtgaattatgctctttataagttgaatgaggaccgaaaacggcaatatgatcaaatttttacccaggcttgcgaaaattcaaaatttcagctccaattggccaaagccattttacaaattagtccaaatgagggagtaagacggatatttaatcgggatgatttggtggccaaatggaagggagaaaaacttgaggtcggattttgcgctccgattattcctgaaaaaataatttgggacaaaaaaatcggaaaagaatgctttgaatgggtaccaatattgccgaaataa

SEQ ID NO: 73186 - DNA, 4763 bp, Heterodera glycines
gaatattcaaaatcctttggtacttaaggcaggtgcattatttgagtccgacagtattagagtggaagaagccatgatggagtaccgtaaaagaattaacaatttacccgcctcaacttttcgagtggtcaaaaggcccaacatttcggaagtcataaagctaattaaggcagaagcaaaggaaacacttgggatagtaatgggaaacaccggaaatttgctggatttaatgagaaacattcccgaaaaggcgaaggaagcagttaattatttaaaaggaatgtcatttttattggtgattttgcctattttggtactgattgcaatcattggttttattgtgaccaaatattggcccattatttatgccggatttcgggctgggtcggtggcaacacgagtcattcgccgaattattgggatgaaaagacacagaacaagggtagcggcagtgccaacggcaccggaattagcagatttaaattccgtagacgaagaggcttatgttttggactatttaccacctagaaggattgcagcaattacaaatgacccgagaaggcttccatcgattcgcgtgcattttaatgggctattaaccgctgctttggttgactcttgcgcaagtgtttcttattgtcgggagtccattgcccgtaaggcagggctcacaattaatgatttaaatggggaaaatgcaaatttaactgcagcaaatgactcacggattcaaattttgggtaaagcaaacacaaaaatacggattgaggaccaaaatggaaaatgtggtgaatgggaaataacggtacttgtctctcctgataaacattgtcctggcccagttcttttgggtctaccgattttaacagatttaaaaggagtgatcgcattcagtgaacggaaagtacgattgggcgaaatctgggcaaatataatttccgttgtcgaagcagaaaagccaaaaaatgtgaaaataacattggaaaatgatgaaatttttgaaccaaggactgaaaatgtaattacagcaaaagtaaatgaatctttttctccggatcaaaattttttggtaaagggaacaataaatcgatacccgagtataattgtcgggagaactttggttgcacccggggacaaaaattttgttacattgcaaataatgaatgcgggaaaaatgccggtgaaaatttacggcgggtcgcatctcgctgatttggaattggtacggataaaggctttacctggggacgaaattcatccgaaagattatataccatccgaaacgagatggcatgaaaaactcccaaatttgccaaatatggccataaatcgattaccatcagagagattaaatttggaaggcacaagattaagtggggaaacacaagaaaagctcaaggaaattgttgacaaatatagggaggcttttgtggcagacgatggaaaaattggactttaccggggaccgatcgcacataaaatcgatttaatgccagggtcattgccttttcactttcgtccttatcggtatccgcctgaaacccagaaggaaattgaaaggcaaataaaaataatgttggatcagaacataataagggaaagtgagtctgaattcgcatctccgatcgtgatggtcccaaaagcggacaaaaaatcctggcgttttgctattgattatcgagcattaaataaaatgactaaaaaacgggtttttcatttaccaaatatacaagaacttttggatttaatgggggcaaaaaagtattacacatgcatggatatgcaacaaggctttatgcaaattccaatggcacccgaagatatcgaaaaaacggcatttatttcacatttggggatttacgaatttattatgatgccgtttgggctaacagccgcaccggacaccttccaaagagtcatgaattcattaagaagacggctaacggcagctatgcttatttatctggatgacattataattgggagtgagacggaggaaatacatttattggacattgaaaatttccttaagttattaagagaagttggattcaaattaaaaattgaaaaatgtcactggggaatggctgaaatacgatatttgggctttttactaagcgaaaaaggcgtgagaatggacccaaaacaagtctcagctgcaaattttaacacaagacaaatttgaagggaaaataaaagaaaattggggaaaagaacaaaatgaatctttggagaccttaaaaagtatgttaacatccgcgcctgttttacaatcaccccgatttggcaaaaccttcaccattgaatgcgatgcctctcgaaaggcaatcggagcagttttgcttcagaaaaatgggcctgtggcattcatttctcgtgctctgaatagacacgaggccaattacccgtctatcgaaagagaggcacttgcacttgtttattcggtcaaagaattctcaccctacattattgggtcagggataacaaaaattattacggattgtagtgcgctgacaggcatgatgaatgcaaaagaattaaaagggagactagaaaagtaccaggtcaccctccagggtttcgatcttgagataatataccgcccaggcaaaaaaaataaggcagcagattttctttcaagatacaatattccgggaattttggaggaaaatgatgaaaatggggaccaaattgaaaaaccaaaaaagggaattaatgccttgaaggcactgaaaacaaatccgaatcagaccgctgaaaacgaaaaatcggaattaagaatttcaatgttcgaaataatgaaagagcagagaaaagtgcgggaaattgcaaaaatattttatattttaagaacgggtaaatgctctgacgacgattcaaaatggcgaaaaataattcaaaattattgcttggtaaatgaactaatttattataaaaatggaaaagaaaacgacggaagcccaaaattacttattccttactcactaagaaaacaaatttttgatttaattcacaatgagggacattttgggtttgaaaaaacatttcatgaaataaaggaaagattccattggaatggaatgaaggaagacgtgaaaattttggttgagacttgtgaaaaatgccaaaaacggaaaattttgccagggcaaataaaatcagcaccaggggtcccaattcctccaactgaagctccatttcaacgcgtacattgcgatttaatgggcccgcttaaaaaaacagaaaaaggaaatttatacattttattggccattgacagtttttcaaaatggatgatggcaaaagcgatcccagaccaaaaagcaaacactgtctcagaatcatttattgaaatggtggtccaccaacaatcgacccccgaaatagtcgtaacggatcaaggacgacaattcacgtcagaaatatttaatgatttggcaaaaatttatgggtttgagcaccaaatgtccacaccgtatcaccaacaatcaaatgggcttgccgagggatcaatgcgcataatggctaatataatttcacaattaattaatgaaatggggaataattgggacgaagttttgagtcatgcattatttatttacaacacatccattcattctacaacaaaattttcaccattttacatattacatttgcgccacccgcgcatgccaacagatcgcttacttaaattaccatccaaagatgaattagtttctgaaatttctgtttttacgaggaaccatgtcgaaaaagcctcaaaggcttgggaatcagtaaaagaatcaattataaagtcacaaataatacagaaaaatgagaatgataaaagccgaaaagctgaggaaagggaatttgaaataggagaaatggtacttttaaaaaaggaagtgttaaagcacaaatttgatcaaagatgggtaggtccattacgctgcgttgggattgaaacggataagaaaaatctgattttacaatcattggatgggaaaaacaaatttaagaaagtacaccaggaaaaggtcaaaaaattcaatggtccagcaattctcccactaagagaatcggatgaaccgttaaattgggaaaaatatgtggatgaccccaacgttgaacaggaggaagccgaaatgagtgaagattcgggaaaagaagacaaaaaagggaaagaaatcaaaaagttttcaaaatttggctttgaaagcagtgatgaagaagatcagagcctcaaaattttttttgtaagaaataatgaaaactgggacttaaatgaaaatgagcaaatttgggaacaaaatggggaagccgaagaggaaaatgaaattccgtgcacaacaacagaaatatttttggatggggaaataactttggcatatacaagttggcctgaagccaatttaatctcattaacatcattagttccgacaaatttaataaaagatgactgggaaatacacacaaatgaatttggaaaaagatacattacggcatggctttttgggataagttttgaattatttttgagcgatgagcctgacagggttgtcctaggaattcaggcacaattttcaataaatgacgaatggcactcaaaaactgaaggggaaagggaaacatattgggaacaattgggtgagattgacggacaaatcctcgaaattcagagaattcccgacataaccattacttattccgagaacccattaataattgattatgaatttgatcaaaatgatgatcagaataattcaccgacaattaat

SEQ ID NO: 73187 - DNA, 926 bp, Heterodera glycines
atgccagcaacaacatttttcataacaataataacacttgtaatatttagtcatctccattttttggcaaatacgtcatcagttacaaatggcacttctctgctaaatgaaactattggtaaaaaattttggttttattttttctcaaaattaccgtatttttctttacacagtaccaaaattacgaattttgatccttacaacgagaattccaatcaccgagacacattatgtgctacaccgtaaaatggctgaactgcttgcagacgatgcagaacatgtggagaaagtggtatattcaaagaaaaagacttttataatatgatttttaaataaaatgtaaatttataaattaaaaatttttatagtaaaaggcaaatttatcatttgaaaatattattatgaaattgattttcctaataaatttcatttagaaaccaaaatttttcataatttttttaaaaaaatattttcaaaatgttaaattgaaaatttttattttttatcttttataaatctcattaaaaatcaaaatttaatttttcatcggcttcaattgacggcatcaatggatcacaaaaaatctgatattaaatgatatcaactaaacctattctgatataaaaattcagaattttaatcattcagcttttgcttgtcgcaaagcctgattgtgccgagacaagtgaagtgccgtcaaaatttcatggacgattattggtgtggaatcggatgacttttggcacaaatgccgcacaaaatgtggaagaatgccaagaaatggtcaataaaattatgctggacatgcaaacgcgacccaacttatgggagaaaaatggcacacaatttttgccaagtgccgataaaccgtatatgggcaaccttggtaaataaatgggattaatgattttttaattaaaaatgaa

SEQ ID NO: 73188 - DNA, 716 bp, Heterodera glycines
atgaacggcaccgaccgcacaaataacttcgccgaagcataccattgcacgctgcaactttcgatcggacaaggacaccccaccgatctggaaattcataaacaatttgcgcgagcatcagaaaataatcgacgtggacttcgaacatttcctcgccggaaatgctccgccgctgaaagcaaagcgttaccgtgtagtggacagacgaattttgaggattctggagcctacaatgaggaaaaaacgcagccgcaaatcgacgatgatcaccaatatggccaaaaccaaaataaccgaaatttgattattgaaatgctcaggggaatttcgagcaattaccaaatgggtaaatgaaactttgttaattttgttaaaactttttattttttctataaatttttgaatatttcttgtcaatgtatctgtgaaaatgaaaatatagcatacagaaaacttaattaatccattttactctataaaaaatgtttgagacgcaactggccccttaagtactaagacgcaaatggccagacgcaactgacccccccccctaccgtggaaaaatatgtctcgagttgcggaaatgccaaaaaaacggtttttgaacaggttcaaaactcgaaaaaatggagacggagaaattatttttcaacagaatttatttaacgaaactttgaaattttgaaggtgtcccaaaaatgtcacgcgtcaataaa

SEQ ID NO: 73189 - DNA, 70 bp, Heterodera glycines
gatttgaacctgtgaccccccattttttgactaactcacagaccactaagacgaaaaaaccaacttaatt

SEQ ID NO: 73190 - DNA, 450 bp, Heterodera glycines
atggcaaacgatgagccaacggaagcggcaaaattggcggaggaatttgccaccaaaaatttgacgacgaaagaacggatggatgccattctgaagatgatcagcggaagaagcggagaagaaggagcagaggaggaagaagaaggagaggaggatgaagaaggagaggaggatgaagacgaaaagatgacgggagaagagttggaggagagggaggaagatgaagaagaagtagagttagaagagagggaggaagaagatttagaggtgatggaagaattggaggaggtggaagagttggaggaagaagaaaagttaaaagagagggaagaagaaaaagaagaggaggaggaagaagaagaaggagagctggaagagaaggaggaagaagagaagaggatggaagaaaagaggcgggaagagtggcaaagaagcaattcattggtttaa

SEQ ID NO: 73191 - DNA, 45 bp, Heterodera glycines
atggcctttgaattatggctctatgatgtgtctccaccgaggaag

SEQ ID NO: 73192 - DNA, 186 bp, Heterodera glycines
gaggcaatccaacgctatccgccaaatcccgtgtcagtgcacgcgggccgccctatggctgtgtccatcacccaaagcacggagagcggcacgctctactcattggcacagatccgtcgcattgcgaacattgcgcattcgcatggcattcccttgcacatggacggggcgcgattcgcaaacgca

SEQ ID NO: 73193 - DNA, 1142 bp, Heterodera glycines
atggcccaaaaattccattcaatgattgtctctatcacccttttggtcaccgtaatggcccaccatgcacacagtttaaccactccactgacagcacatgtccaccccgtgccacagtacaccggcttcccggagactgtggctgtcccagtgccaccacttccgtgcaagccgttgagtgctgcacagcgagctgcactcgctcccgcccatccatcggcggccgacgcgtcaccccaacaagaaatgctgcaattccaccgcatggttgccaagcgtggttgcggctgttgttgttgtaaaccatgttgttgttgctgttgtaagccgtgctgttgctgttgctgtatgttgtggatgtttttgtaaacagggacaaggctcgtgttgcaaaacaagttggatgaggcaaattaaaacttgggttaaaccttgactccgagttcctcgtcccgatccccgggctttttgggcctgctccccgactccgagcaaaaaaaaaggtgtaaattttttgttgaaatataattttgaccatttcctgatcgggattaccgacaattttgcactcgccgaccccgctctgccctcgcccgtattctccgagaatttcttccccgagggatcgagggaggggggcttaactctaattaaagcctttgttatttgctgggcctttttttcacatattcaattccttttatctatgcttggctatggacccaaatccgtagattaaacaaaattcactgcccatctcgaccccggccttttccaaaattcccggttccgtacaactctctaaaactaaatatatatataactccaggcaagccctgctgttgttgcaattgctgtaactgttgttgctgttgccataaatgcatgtgcatctgtgtccgcccatcatgctgctgcaagtgctgcccaagctgctgtggatgtaaaaatgtttaaatttgggcaaacatttttttaaaattaattattcaaattatggagacaataatggacatatattacagtattccttttgttagtttgagttgtacggcgattaatttatttttttcccacgaatttgatttaaaattaaaaacaattggcaattgtgaagattattggtcccacaaaaaaaaaga

SEQ ID NO: 73194 - DNA, 534 bp, Heterodera glycines
gccctggctatgggtgtggatgccggcgccgccgtagacgagcattgactgctccatttggttatccgatgccaatgttcttacaacagttacgtacgccaatctatgagccgagattatgccgcgaactttgtcaggtaacaaatttctaattaatccagttcttatttaattaataaattggttttttttaaggtcagagttttgagtgagcgaagccattcaattggtgaagtgcacacaaatgtgaatttaataagcgcagacgaccggcaaaggatggccgcttcggcggcaggaaatgaaaagctgtgaaaaagcaatgacgacatagcaatataaaagattagataaataatatattctattgtgtatgaatagggtgtatgcattgtttattatttaattatggggagataaagtattttctgctacctatttttgtttttcaattaaaaaaaaacaattgaatatatttttggtaggacagtttttcttcgaataattatgttaccaaaaaatgaaagaaaatca

SEQ ID NO: 73195 - DNA, 604 bp, Heterodera glycines
  unsure (1)..(604): unsure at all n locations
gtcgtcttccacgttgtcggcgatcgtcaattggttgagcaggacatctcttcacgccatccgtgcatcaatgcattgcgaaatgtcatccgtttggcaccncattctggcatcaatcatatcacatttccattacttttggttgagcacatgactgaggtgtttttgcatagttttttatattatatttctccccgaccctcggggtagaaaaacggagaggattttttttaaatctaaaaaagatatttttctaataccaaaaagtcttataaatccatttaagaagtctctcatccgacttaatccatttcttccacacaatgttttttcccgctagtcaatgacgatcagctggtgtttgagccgtgccgaactggtcttcaagtgcctgaagggttttctgatggaggtgtgctccagcgggatgagcacagctatcgccggaggcggtggtgccatcgttggcgcctcgggcaatgctggtggcgcgccccattttaatataaattttgtgttgccgtctgcaatttccccttcattatttcaacaattggtggaaatgttctcctccatttttcattcagttccctcgctaaatgct

SEQ ID NO: 73196 - DNA, 835 bp, Heterodera glycines
atgaaagcgaaccgcaagcgtcgtgcggcggcggccgctgtacgacaacgacgaaggcggcaacagcagcaaaacgactgtgacagtagtgaaaaggcgaataatgaaccgccgccactcgccggtttacaagcatcagcagtagaagaaggtgaatttggttagggtacagtacaccccaaaatatcgccgagacaaaatatcgccacagaaattttaaaagaaaatttttttttggaaaattttttcaaaaaaacttagcagttttcataaaatttcgaaaaaatcgcaaaagtttttcaaaaaaatttttcttgagattttcttactaagaaatttcctaagaattttttatgaaatatttctgtttgaaaaaaaaatttttaaatttctgcggcgatattttgtctcggcgatatttcggcggcaatattttgtcccgtccccatttggttacaccacatttttccgggactttaagtcttcttcaatttatgcaaagaatgtgtaagctttgaccaatcaattacggaaaaattgatggcctatgagactgatgattgtgagaatgttctctaattaatggaccaccccgtaaactgcaatagagtcgcttttaatactactactatatatatatatatatatatatatatatatatatatatatataattatagcatcattgccacgcctgatgatttcgacttgtaataacgacattgtggacgacaattctgagttttctcaaggtgcagtgtattacactagaacaagcagttcggctccaaacaatcagtgcaccaccgcacgcatttataataaagtcatgtga

SEQ ID NO: 73197 - DNA, 285 bp, Heterodera glycines
atgaaggaggggaggggggtaagttaccccctcaaattgaaaaatgcatagggagttgcattagagattttcctgattttaaatttatcagtcaccattttgtcgtcggacaacagaagttcaagcagttcgtccgcacttttgtgcgccagtcgatgccgattttcgtcagctaaattggtgagaaattttttttcaggattacggttcgaaattgctcaaatataggggagaatcatggaatttgttccatttttcggcatttgccccagtctaacaaataaa

SEQ ID NO: 73198 - DNA, 970 bp, Heterodera glycines
atgcacgcgctgttcgcctgccgattgtctgtggcacgcgcgttggtcgcccaccaattggcccattgcgcggccgcggcggtgatcaaacggagcggtgagttgtgggaaaatggaataaatggactccaaaaatgcttaaatccggcaaaattttgtttgtccaatgccaatctaatgcccgacttcctaaaatattttaaaatggcattttccatggaatttatccaggcacaacccaaaatttcgctgtgacataacgccaccaaattttttttatttaattatcaaacttagcaattttcaagatcaaaaatcttggaaaagttaaaaaaaattcaagaaaaaaattcgtagaaagatttataaggaggatattttaagaaaaaattgaaaacttttttagggtatttgaaattttataataaatatttttccgttccgtagaaaattgtcaaatgttttctttaaattttctaatgttttcttttaaaaatttgcccattattttcagtactaatttatttcccctctttttcagtcacttttctgctcaactctttcaatccgaggtgatcgtcgtccgtctcatatattttcctcgccttttttggctttttcaatttttctcccctttttcctcagtttttgcccctctttggtggtcacttttgtggccaaagtgtgcggcgcgccagcggaggacaccaaagttggcttagtgctcaacggggagcaatgctttgtgttggccctttacgttttggaggcacttaattaattaattatctaattggttgcctaatcattttgcatcgtttaatgaacgcgtttgttttaaggacattgaccaacaattcacgcctgacatggtcagttcggatggtgtcatttctacaaaaaaatgaataataatttgctacgatattttcattgcacttttcggttttatgaccactgaaatttttaa

SEQ ID NO: 73199 - DNA, 326 bp, Heterodera glycines
atggaattgggcatttctaaagagacatttataaaatggaaaaaagaattaacgccaaattataataagagtatgagtttttttattttaatttattgtttttttattaaataattttagctcaaaattccattgaagaaaaattacaaaagatgaagcaatattttgaaattaaagaagcaaatccaaaaatcagtgacgaaataattgctgggaaattggatattcaactcttagaaaatgggaaaagtttcttaatatataatttgttaatgtacgactactggtttattgtaatctaattgctttgatgaaatgcttttcta

SEQ ID NO: 73200 - DNA, 439 bp, Heterodera glycines
atgggtgaagaaatggggacagacccaaatggtcaaatgagcgaatattccaatcaaatgttatcaaaagtgatcaaaatacgcgaaaagaaccaaatgatcaacaaaaaagtaaaatgatccaaaaatttgaagcaattaaagaaaagttgaagaaaaatgaaaaataccaaaacaaagacagagcaaaaattgagttgaaaattgcaaaatcattaggcgtaaatcgacaaaaaatatacaaatggaaaaaagaattaaatttaaatcaaaataaaaagatggaaaagagtttttatgtggagaaaaagatcgaattcattgaacgatttaatgaatttaaaagttttatggaaaagggaaacagaaagaatttgtgggcatttctaaagacacattttggagatggaaaaaagaattaacaccaaaatataataaa

SEQ ID NO: 73201 - DNA, 658 bp, Heterodera glycines
atgtcacaccttttgactcaattctacaggattaatgtcgatccagtggtgtcgataggcgccgccggtaaatttttttgcaaattctaggtgaaatttgagatgaaaattgaatttattttgattgattttattataaatttattcaaaaattttggcattccgtcttttaaaattttcaaagaatgcatgcggatcctgccggatcccgcacaaaaatcaaatgcggatcctgttgcaggattggaattcaaaattttttgccggaccggatccggctggattaataatgcaaatcctgcaatcctgcaaatcctgcattttccaaacaatgcaggattgcggactgggatcctgcaaaatcctgcgcatgatccggtcctgctccgggctctaccccttagtgccctggttcatttccatggttttgatttttgaaattaaattagccatttagttattttggtaataatttttgaagcctaccagaccgcttgacaatcggaatttttctctcaatgtttgaactgattttcttttgaaattttcctttttgcttcaacttttctttaattgcatcaaacttttgaatcatttttcttttctgttaatttgttaggccattttctttgccattttgaaaaacagaatgaataaa

SEQ ID NO: 73202 - DNA, 58 bp, Heterodera glycines
gtcaagccaagtgttagacaaaattgctcataacgccaaatagcgtaattggcgtaaa

SEQ ID NO: 73203 - DNA, 1421 bp, Heterodera glycines
atggccatattaattttggccattgctcttccgttagcttattgcctcgtcgatattaaagaattggaatatttgcgggccctcgacgattccatttcgtacagagtcgtgtttaagtcagtttcaacaataataaatgctttaattacttttgtaaattgctttatttttataatttaggccatttgacgaattacctgagcaatttcttccatcagagcccacaacaataagtccaacgaccgcttctccaaagacaacgacagcggcacaagaaccaatttcagaacatgaaaaaggtccctaatttaaacatgttttacgatgaatgccttttttcaaattttgaaattgctacaaataacttgtttttttagtgggggattagttaaatttaagtattttttatgttgttgtttaaatttttgttgtttgctaattccctctgttatggggtggtcaagcgtgacgtaattttcataaaacgaatttgtttttcaaactgccgacttaattgagtattttaaatttaccactcctttttaaaatggcaattattaaattaatttgtttagtttcttgttttagtcttgcagcagcagcatgaagataatgataatgaaattgatggaagtgaacaacaacagcaaagtcagtcttcgcctttgtcttctccgtcgtcgtccttttcgagcagttcggccactgcggaacagcccaaattggtcaaaattgtgtctgctgacgcggaggaataccaatgcgtgttgcccgtgttggcctcgtctgtgcgtattttctaaatttatttttacctatttttgtttttaaattggattaaaatttgttttagtccaaaaagcggatcaagtcgtaccacgggccgagtccggccgaactgatccaatccatctaccgggagcagatctgctcctatcgcatcgagccgtactggaactacgagctgtgccatggacggtatgtgctgcagtaccacgaggacaaggagagcaagaagcgcacggagtactttctgggcaattttgtggccatgaacgctgaagtggtccgttttttgggctattacccccaaaattcgaataatttgttgccgctttctcccccttccactcgaatttttgttgaactcaaagcgtgtggaatttgggaacacattcaaactttgattaaaattcgggttcaaaatacggaattgttcaaacaaaagcctcttttcataccattattaaataattgcaatttctaaccattttaaaaactttttcattttcggttacaaaaactgattatttatttcactgattcaggaggccagacattttgaccagctgaacccgccgactcgcaaaatgggcgacgaacggttggcttattacccagtgacttacacccacggcacg

SEQ ID NO: 73204 - DNA, 693 bp, Heterodera glycines
atgaagcgaaccaacgcaacaaacatcactccgcctcgcgccaaacgctcaatggcaccggcattggacccaatcactgccgcactcgcagagcaagaacgccaacgtacactggtgttcattggcctcccagaaagcaatgccgttcgcccatcggagcgtgttcaggaagacagggaagccaccaccaaaatcttggaccatcttgaagttgaggccgaaccaaccgccgtctttcgactcggccggtacgacccgcagcgaacaactccacgcccgctcaaggtggtcatgccgacacccacacaacaacacgtggcactcggaggatggaagcgtgagcgtgctcgactccgttctcaacaaaacctggcgcgtctgttcgtccgcccagcgctgaccaaagagcaactcaaggaggaatacgaagaacgcctccgaaaacgtcaacagactccagctccattggcttctgcgacgaagttctcacaaacgacaaacgaccaaactcccgttgttgcaaaaggaccaaacaagaagaagaccagtgaagacatttcccaaccgccggaagttttcgataaaacaatcctcgtctgttatgaaacattaaattcattgccaccaaccgacaaaattgttcaccaaattcaatcgctcaaaaaacaacaccctcatcttttcaataaatag

SEQ ID NO: 73205 - DNA, 150 bp, Heterodera glycines
atgactgtgacatcgacaaaaaacaattcttttccgagctcatttaaagacattactctacacgacgtatgggccagcaatttggaggccgaatttgccaaactgcgcgacctcatcgacgactatccattcgtggccatggacaccgaa

SEQ ID NO: 73206 - DNA, 1169 bp, Heterodera glycines
atgctggtcaaactgcccgaggacgagaaggacttcttccgctaccatcgcaaattgttcccgaacagtttcgacatcaaaattctgttgcgacagcccgggccgcgcgacgccatgctcaagggcggacttcaggaggtacggacgccacgggcaattttgcagttgaaattgggtgaactgctccccccccgcccacaaaatttatttagttttttaaaacgggacaaattatttttattgtcataatacttactagttttgtacatcgttatataaaacggttttgttagcctttcagctggccgaccaactgcacgtcccgcgcattggccaatgccaccaggccggctcggactcgttgctcactgcgatgactttcttcaaactgcaggaattgtttttctcggacaattggagggaggtgagcaacagtttcccaaccattgtttacggaccaataaccattggactacgaactaataaatgaatttcagatttctgccaaagttcaagggcacatggccggtctgtccaatagtcagctgaatggtggcactggaatcacgacgaacaacaacgggttgggttaagggcgccggaagagggttttttctgtccattgtctcttttattttggctgcacaaatctcgcttaatcaatggatgatgatccgtccgtcatcaattatcatatttattgttattcgtttctctttctcgatttgatgttctttatccatttttctttccttcttcactcaattttcattgaaattgtaaatgcactccgaaaaacaacaaatttataaaaatggaaatcgactattctttgactcgttagtttatgttttgagtggttgatgaacggtagcgaaatttctgtaccatgcaattcgcccctccccgctctaacaattctttatgaaaaaaacaccgtgaaaatctgaaaaccaaaatagttaggtaaattcaaactttggtttaataattaattactgtttgtgacgccccgaatttttttccataaattgaccctggcttacaattagtcagaaacgagatctgcttggtcattcttggttctaaactcaattctatgctgacttatccctgtgatttatatcaaatctaattcataaacaatagaaatttatttgctttaagta

SEQ ID NO: 73207 - DNA, 1852 bp, Heterodera glycines
tggggacttccgccgccgccgcaacccaacggcgttcaaccgacttggctcagtcgttgctccaacgacggtcagtgctcagccaatttggcagtgcccagtcgtcggtgtcttcctccgtcgggaggtgagaaataatgaaatattggtgaaccaaaaccttatcatgcattgtacatttaccagagttaagggtacttttggtttttggggaaaactatgtaaatatccatgtttttacggaactcattgtcagttacactccgtcaatgatggccagcaaaattgacaatcggcccgccattgtcatcgaaattggcactcgactgaccaggcaattttttcaaaaattccctttctaatcatgggccgtgaaatttatttttccttttgtccaggattggctttgccggtgattttttgccccaggagattttccgctccgaattcgttgacccattggacggtccgtccccgtcctccccaattgcactgtttgaccggtcgcgcactgagcaacagcagtacgaagtgctcgtcaaattcttcaaaaacatcgttttcgggtcgcccaaaagtgccaatttaactaaaaatctaaatttttctgacatttttgtggatttttaattaattttaaatgaatttaaaccgaattttcagcaaattgttgaccactatgagctcgcgtcgtgtggtggtggtcgaatcgcttttggtgtccaattggcaacggaatgccattgcccgtgccctcttccaatgcccttctctaagcgctcattccgtaattaaatatctgttgttgttgttgttgttgttgttgtttaaatatccgttgttgttgttgttgttgttgttgttgttgttgttgttgttgttttgtattatctttataaaattgcagattttgttcgctccgtcccatttgtgctgcacttttcccttcaacacaaaaacttgtctggtcattgacatgggtgctgacgaagccgtgctctttccggtcatttttttgtaaaaatttgtcgaaagcattcatcgacattccatcaaattaattttattctcgaagatagaaaattcaatgaaaaattttgaggaataaaaatcataattttttgactaattttatagtgttggaagaaaatttgctcggcatatgccatggaattctttagttgacgcccttttcttaggtagctgaaggggtgctgatgctgaacagtttggagaccagtgtggcgccctccgcgacggcgttggagcaaaatgtgcgtcgtttgatggcccaatttggccgtctgcggaccgggggttggcaaaaaatataaatccgaaatgtaagacaattaaattattcgaataacatttgacagccgaagacgatgcggagggacggccgctcactgagactgagttggaacaagcggaccgaatgcgactgtgggaggacgtggcggtgcgcttctgtttcgccacaacggccgcgcgcggaaaacgcattcagacgtattgtgcgtggggaccggtgaaatgattttcccttcattccaataacctggactgtttagtgaggggggggggtacgtgcccacttaaaaccattaaatttcccaattcgcttttttgagtggccaataccgattccgctgcttcttcgtctgccgattgttccgctgcgtttgacgcggcttcggctgcgccggcggtggagctccaatttggtgccgcccatctactgacagtgccgggcattgtgcgcgaggcggcggccgaagtgtttttcagcgccggcgacgaggaggacgtccgatcggtgacccaaatgattttggacagtgtggccaaa

SEQ ID NO: 73208 - DNA, 2305 bp, Heterodera glycines
atgtgcgccgcacaccatgaatggctgacaaagcaaaagggacaaaagctaggcaagaagatgaatgtcctgcgaattggtggcctcatggtgaacatcctgaatggatcaacacgactgatggaagtcacgatttgggtgaatgacattccgatcaaatttgtgcttgactcgggtgccgatttgactgtgctggacgaagtcgcacacaaggctattggaaagcctcggctgacccactgcaatgagcaagccgtgtaccatgacggtacaagctgtaagcttttgggtaaaggcacagcacgtttttcatttggaggaaaaacagttaatgggaaatattatgtgacgaagaaaggatcactcagtagaggaagaactggaccgattgttggagcagaaggtgatcaaacctgttgatcacacccattgggccgccccaattgtggtggtgaagaaggccaatgggtcaacgcgtatttgtgccgatttttctaccggtttgaacaatgcgttgctgcttcatcagcatccacttccattgcccgatgatatttttgcgaagctgaacggtggaaggattttctctcaaatcgacttaaaggatgcttatttgcaagtcgaattggatgagaaatccaaggaagtgtgcacgattgccacccaccgaggaaattaccagtttcagcgactgccgtttggagttaagtccgcgccaggcatatttcagtcaattatggactcaatgctggcagactgtccatttgctacggcatatttggatgatgtgatcgtcgtaagccgatcatccgaagatcatcagaagcaccttgaagaggtcttcaaacgttttgaaaagtttgggttccgtgtcaagccagagaagtgcttcttctgtcaggaccagatcaaatatcttggatttattattgatcaggacggaagacgaccggaccaaacaaagattcaggcgatttctgagatgcctgttccgacaaacgtgtccgaggttcgatcatttttgggaatgatcaaccattaccaacaattcgtgaagaacatgaggttcatccgacagccgttggacgaattgttgaaacaggacaaactgtgccaatggtcggaagattgtcaaaatgcctttgagaaggtaatcaaaattttgaaatctgatcaattgctgacacactacgatccggcacaagagatcattgtatcggctgatgcttctgagcatggaataggagccgtgatctctcatcgtttttcggatggaagtctaaaagccatagcacatgcatcatcgtccctgtcagcagcagaaaagaattattctcaaattgagaaggaaggcttagcgattgtctttgccgttcaaaaattccacaagtatcttttcgggagacacttcgttctgcagacggaccacaagccgttgttgtccatttttggcaacaaaaagggaattaaggcttgcacatcgaatcgattgcagagatgggcaatcactttgctcggctatgacttcgaaatcgaataccaaaatactgctgattttggtcaagcggatgttttgtcgcgcctaatcgcgaagacaccagtgccggacaacgaagtgatcattgcaaacattcgtgaaagcaatgaaacgggagtgttgaattttgttgcgaaaactctcccactggatcacaatgatttgactaacgccgcgaaaagtgatcaggtgatcaaaaatgtgaagaaatttgtctgctcacattggccaacaaagaacaaaatggccgcagacattgttccgttccatcgacgacgagacgctttgaccatcgaggatgaatgtctgctttatgcggacagagttgtgattccggcctcgcttcaaaaagatgtcttacaacttctgcaccgaggccatcccggaatgaagcgaatgaaaagtctcgccaggcagtacgtttactggcctgggatggacgaacaaattgaaaattttgtcaaaatgtgcaacgaatgcacaatggaggcaaaaatgccggtgaagactgagcttcagtcgtggccgaaagctgacggaccgtggaaacgcgtacatttggattacgccggaccgtttatgggaaaaatgtttctcataattgttgacgcgtactcgaagtggcccgaggtcttcgaaatcgttcatcgaattccgcagctacaatcgacaaattgcggtcactctgtgccagttatggccttcccgaaattttggtcacggacaacggcacacaattcgcttcaaaagaatttaaggaatttgtga

SEQ ID NO: 73209 - DNA, 1593 bp, Heterodera glycines
atgccaaatttggcaaatttcgactgttttggtcttggtgaccatggcgaaagcgacatcgagggttggctggaacgcttcgcccttgcgcttgactgctcaacaccgaaccttcaggacgaattgaaggttaagctcttgctgacaaagctgagtgagacggcctacgccgagtacagcaaacattgtttgccgaaaaagccaacagagtttgactttggcaaaacttccgaaatgctgaaaagcttattcgcgaagcacaaatcagtttggatcaaccgatatgagtgcttaaaggctgaaaagcaagacgaggaggactttcgcggcttcatcaaccgtcacaaaaggctgttaagcgattttgagtttaagaaactcaacgaagagcagttcaactgcttgatgctcctcgtggcgctcaaatcgccgaaggatgctgaattgcgaaagcgcatactgtcaaagttggctgccgacggtgacagagcaacatatgaaagtgttgttaacgacttacaaatgtttctgtcgaccatatcggaggcaaaagtaatggagagaccatcgaactccaatattttggctgtaaagcgcaggcagcaaccgaagaaggacaattttggagaaaagggctataagcagcaatcatgttggtgttgtggcagagagcacaccccattacactgtccgcatttgaagacagtttgtcgaaaatgctcaaaagttggacatgtgcagagtatgtgcgccgcacaccatgaatggctggcaaagcaaaagggaccaaagctaggcaagaagatgaatgccctgcgaattggtggcctcatggtgaacatcctgaatggatcaacacgactgatggaagtcacgatttgggtgaatgacattccgatcaaatttgtgcttgactcgggtgccgatttgactgtgctggacgaagtcgcacatatggctattggaaagccacggctgacccactgcaatgagcaagccgtgtaccatgacgatacaagctgtacgcctttgggaaaaggcacagcacgtttttcgttaggaggaaaaaccgtgacagggcaatattatgtgaccaagaaaggctcacttaatcttttgggaattgacatgttggatgcctttggcctattggacgctttcagaagagaagttgataaggccatgaaagtcaatgtggtgaagaaggaagcgaaggattcgccgaaccctcaatcaaagaccactttgaccgagctccaatcaaaacacatttggttgtagtggaagagctggaccgattgttggaaaagaaggagatcaagcctgttggtcacacccattgggccgccccaattgtggtggtgaagaaggacaatgggtcagcgcgtatttgtgccgatttttcaaccggtttgaacaatgcgttgcagcttcatcagcatccactcccattgcccccgacgatattttgcgaagctgaacggtggaaggattttctcacaaatagacttctccgcacttcacactttgtcgctgaccgaaacaattacttattttttataataatccaaaacatttttttaatcaaaaaga

SEQ ID NO: 73210 - DNA, 941 bp, Heterodera glycines
atggaagagaaaaaaggcaaaacacagacagatgtaaaagaaaaggcgaacgagagagaggcagagaaaaagacggaaacaaatagcacggaaaaggaagagacagaagagaaaaaggaaacggaattgccaaaggaacagccgaaaaaagtgccaacagagaaaaagacgaaggcagaaggagcaaagggaacaaagccgacagaggaaaaagcgacgaaaatgcaagcggagggaacggcggcaccagcggaggatgaagccgggggaagtgacgcggcaaaagcgaatttggaggtgccaaaaaaggagccgaacgcaaaaaacgcagtggcacaagctgaaacggtgccgacattcacaacggcaccaacagcaactgccgattcaaaaaacggacaagccgaggggtcgtcgcatcagcagcaccatcggggaaggctgctgatggtaaggagcgaaaatgggcaagggacgaaattatataacgaggggtaattaaataaaaggggataattaactaatgggggataattgaatgggttgcttttaggtcaacgggggagggagcagtaacagcaacatcagcagaatgatgacggtgaattgctgcaaattgtcccttcgtttcacattgccccacttctttgaagactcctcggcgaacattggtcgaagtaaatggcacaaacagtgccaatggaaacgcaaaccatcgaaaaccgccattgccggcgcggcaattttcaatgggtgccgaaaatggaacaaaaaacaaagcgatgaaaaagacgagcggagacattgaccaaattgggacggaattatttggccgtaaaaagagagaagaggaagaagaagaggaggaagaagaggaagaggaaaaacagaagggaggagcggaagagagaagggggagtcgaatgcaaatccaatcgcaa

SEQ ID NO: 73211 - DNA, 898 bp, Heterodera glycines
  unsure (1)..(898): unsure at all n locations
acaatgtcggagagggaaaaagaagcgcaaatggaagagaagcaaagggaagaaaggccaaaggaaacggagaaaaacggcgccggaggcaatccattggaacgcatcgaacgactgctcacttgcccaatttgtttggacaggtcaaatgggggggggggttaataagtgtgtaggtcttttgaaaaaacaatgcttttagtgatattctcggaagtgtcgactccgagtcgagaaaagtttggctttctcgattctctgggcccactccgattttgggcttactttttgttcaaattttgtttctttctcttccactctctttcattagcttcttcttttcttccttgttaaagttcagctccttttcaggtacaaacagccaaagcttctcttctgccaacacactttttggtggcttttcccttcttttctctctctctctctgtctctcaccgtttccttctcttccctcccctttcctttagtctttcttgcttggaaagttacgtcgaatcgtccgccattgctcggccccgaattcgttgccccgaatgccgtggcgaaaccggtagtaaacataattcattaacaaattcttgggcatcgtttgttttgtgtttctttagcattgtcagacggagggaatgtgcaaagtttgccgacgaatttgacacttttggcatttttggaaattcatttggaagcgagcgatgtgaacgcagcagaaatgcaagcgtatgttcagaggtaggacaaaggagcagcagaagcagcagccaacccaccacattggcatttccacagattcaacttggaacggtgccgagtttgtgaagaaaaggccgagttggaagggtgcgcgcattgcgagcgcaaantgttgcggggaatgccg

SEQ ID NO: 73212 - DNA, 1224 bp, Heterodera glycines
atgccgagaaaggaggagaaaacgacaaaggcaagtcaaagacaagcgcaagacagaacagaaacaaaagcagcagcagaaaaggagggagagagaagagaaaaaggaggaggaggcaaaaaagaaaaagaggaaaaggaagaggaggacaaagaagaaaaagaggaaaaggaagaggaggacaaagaagaaaaagaggaaaaggaagaggaggacaaagaagaaaaagaggaaaaggaagaggaggacaaagaagaaaaagaggaaaaggaagaggaggacaaaaaagaaaaagaggaaaaggaagaggaggacaaagaagaaaaagaggaaaaggaagaggaggacaaagaagaaaaagaggaaaaggaagaggaggacaaagaagaaaaagaggaaaaggaagaggaggacaaagaagaaaaagaggaaaaggaagaggaggacaaagaagaaaaagaggaaaaggaggagagcaaaggaatcgaaaatagcacaaaagagagagaaagaggcgaaagagaaaaggagagagaaggaagaaaaggaaaaggagacgaaagggaaaaagagagagaaggagagaaagagagagaagggggaaaaggagaaaagggaaaagaacagtcttcatcggatcaacagcaatgccaaaccatttgtcggcagctttctccgcccattcgactgcgaactcagcacaaccggcgaaaaccgcgagtgcttttcacgccggaacaagtgagtgaacaagaaattgggcgaaggcggggaaaattggaaattggcaccaaaaaagggatggaatggcatttcaagtggagaaatttcgcattttgaggtggccaatttggaacaatactttgaacgccaaaaatatgtgaacagttcggagagagagcaattggcacgcgatttggggctgacaccgacgcaaattaaggcgagaaaaacattggcattttgttcattaattgctcactctgttcagatttggttccaaaatcgccgttacaaagttcgcttttcatttcgctttatttttgaatttttattatttagtgcaaacggattgaccaggatatgatcctgcatcgaatgactgcacagctcagttccgtccatcagcagctgatcaccggcggacgcatcggagcaatgcaaacgcaaaacgaatttagccgaatcactttggccagcattttttgcaaccagaaattttga

SEQ ID NO: 73213 - DNA, 1820 bp, Heterodera glycines
atgaccttccacgaacgaagaagggacgaatataatttgtacacagaaaaactcagaaacgacgaacggataagcagcattgacacgcacattccggtgcgcattaatgcatttgagatgaagggccgttgcagtgtttacgtgcatgaactgtccttctttgccaaatatggagaagccgaaataaatttggcggatgggccaaacaatgagtcagttttttttaataatgggttcgattgaaattgaaaataagtctttggggctttcaagggcgctgatcacgaatctgaactcgggtttgcccatttccgaaacctgaaccagaattcgaacaaaaaatttaaaaaaatttccaaatacgcaattttatggggaaaaactttgaattcatttaactactatttaattgatgcataaaatctcgttaaatctttaccttttatttatccaaaatatctatgtagcaattggcttgtggtttatgttttttttggttgattatttcccctcaactttttaatttttaaattatcccatgacaatcaacaaccttttataaaagtcattatttatcagaatataacgattttatgataaaatctgatacacgggaaagttcggcttatttgttgtaattttttaaaattttaaatattgaaatataatggcgcaaatgaactgcttgcacaaactttcagtaaatttttccaaaaccaaaaattaatatttttgatgaaattttatttaaaaaatctggccaaaaagacgttttttgtaataaggtcaaaaaagcaaataatttgttttgaaaaacaaaaattgtttttaatttataagattttaatcgatttttaaatgtaaagggaaaattcttcaatttagtcacggagttttcggtctctaatatcgggaaattttcggtctcgagcatcactaattcatcccggcatattctttgtccgaactttgcacttattttgattttcggtcccgttctaataaaagccatgaaaaacgaaaaactatgctagaaacacaataatttcagtgtggccaaagagacgcgtcgcgagttgcattggtctctctggcagattcttttggccaaatacaaaaaattttttggcggcgacaatacaaaagagtatttctgctatgattgtgagaacaagctcttctcaacaaaatcgatcataagaccaggatctttcaaagaatttatcatcgacttgaaggtacggtacagggaccgtcccagggggaggggggggggggtacagtatccctccccaggcccctactcacatggaatttataaaatcagaatttttgttgaaaatttcgattttgcatgttggtacacccttcaagcctaccgcacacaaatttttcaaaaaatttcgctaaacttttcccacaaaatagcatattttgtgagaaaaaatctgccaaaatgcacattcttccgtctcctatcggcaccgccggacccaaagaatccttaattttaatatataaaatgtatttaaataaataatatgaaataaatatcatctcagcaaacactgatattgaacagtcgctgctatgattatttgcacaaacaaaattttgttgctttgcgcgcctctctaaaggcaattggctacgaaagaatcggcgaagtgactatcacagaaccgggctgcggtgagcaatcgcacacgcggaagtttttcgaattattgtcgtcacaaaagttatttgaacggtaggttttgttttaaatatctaaattaaaattattttcaaatattaaaacagtgaaaatccttgaa

SEQ ID NO: 73214 - DNA, 1642 bp, Heterodera glycines
atggaaatgggcgtggattcattccacgatcggttgtacgaccgattggctgttcaatacgacagtgacgagcaaatggtcaatgccatccgagggttggcacgaccgctggtcgaattccacaacagtaagcattttaacataaattttaattcaaatgtattagtttcaattttttcttttctttttttgcgcttcagtcgcaattcatatggacgtaaacccgagaaattatttgtacgtggagaaagatgggcatttggtggtgaaactgatcgatttcgagggtgccaagttggtctccacgtccaacaaaaatgaatgtgttgtgatcggcgaagagcacgcactaagcccggaatacacagggcccgaatattacggcgaacagagccaagcagtgtgtttatagagcggggcaacattaaaaaagtgccggaaaattgggtacaaaacccaaaaaatgaaatggcaattaaaaaataaaaacaaaaatttaaaactaagtcaaactcagagtgataaagttttataccagaatttaaattttggtaatttttttcaacagataagcacaaaatttgacatttggtcaatgggaattatgctcattgaaattgcatttgaccaatttcgtgctcaacaaagagagacgccgttaattgaagtgagaaaaaggaacatcaaattaggaaaagcaaaacaaattttggttttttcaatttacactttttttttgaattaggatgaacggaaatcaaggctttttgccattggcaatttgtacctcggatttacgcggaatcgtttgggcactcagccgggcattttcaaagagactcaaattgtgtattccgccggcacagaatggattgagcagcaccaaagtgcaattgaaacggtgctgcacatttggatgaagtatccgaagacggcacttctggttacagtaggaaacgatgggaaaatgatggaccaattaaaaaattaatcaggattaaaaatttcaatttttgagttttgggaaattagaaggaaacgggcgaacaaagcagtaaaaaggagcagaatttttggaaaagcattgtcaaacaaacaattttgaataaattatctaaatacatttaattataaaattttcgaattttcagaatttgctaaatttggaaagaaaaaagcgattaaccgcacaaggaattttaaattacattgacggattatgccaaattggagaatttaaagaagttaaaacttcaaaaaaattacgcatttttaattcgttgaattttggagattttttaacgaatttgcgtgtcacaaaatggaaaaacaaatttaattttttgaaagaaaatcgatcagaattggataaaagttataaaaatctgaaaaaaattctaaagaaagtgatcaaaaagcagcgaaaagaaatgaaacggctgaagcgcgagggaacggcaaatctcaacgattgcgaaacggagtgatcggcgaaaggagcgggtgattgatcagaaggggtgccatttgcaaggataagccggcagattcctttgttgatcactgatttgtagagaccggatttttgaaaattcattgcataaattcgaggactgtacccgggccggctttcgggattaaa

SEQ ID NO: 73215 - DNA, 327 bp, Heterodera glycines
atgacttgtaagaaatctcaacttgaagcgattctattgaatattttccgcattttgttgcattatttgtgcaaattttttgaataaaaataaataagaaaaacaataataattcttctattagcattttaactaaaattttaaaatccttgttaattaattttggttaaaagttttttttggttattatttaaataaagattaattcttttaaaattgcagggaatggaaaaatgcataagcatcagaaagaaaatttatacaatcaattaattcttgttaaaattgatattgcaaatgaattatgacagcaatagcaaatggaga

SEQ ID NO: 73216 - DNA, 2282 bp, Heterodera glycines
atgtcaatgttctgctacagaagaagcacaagcagtaccagcaccaacacatggacagccctttcaacatcagcggcagcagcagcagcggacgtgccagtttcggcggcggcaaaagcaaatggtggcgcaatgtgatgtgcggcgccgggcgcggtggtgccaagcaaaggcatgtgtgttgagtgccgaaaaatggccatttaaaaatgatgaaagccaaaatgccaagattcccagcgctagcccttcaaaaaaaattgtttttttttgaaaattggcagtttttaatacttttgcatatccacttcccaaatcagaacctgatgaaaagtcgaaatttgaaaatttggttttcggctttgggttcgaatttagttgaggttcaaaattagccaaaatcaatgttttatcgtaattattaccccgtaaacaccttaattaaaaaattttcacatcgactcttcgaaatttcaaaatgttcgtttttcagtgaaaattggcccagaaaacggcgacgcggcggcgtcgacactttggacaatggtcaccaaaacggaggtggcgaagaggtgacggatgggctttatgagaaaaatattgctattctcaaactcatatttaaaacttgtccctccccttttttccccggggtaaaagttaaaaattttccaagaaaaatcatagatattttttaaaagaaattcaaggggaaaaaattgaaaaattctaacatttattgaaattttataaaagattcgaaggatttttgaaaattttatgattttttttttgctttgaattttgttataaaaaatttgaagatttttcttgaaaaatttctaagtttaaaattaaaaaaaaatttcggcgaaattttgtcctgttctcttttcccccattatattctcctcaacatcgccaggtgatcacgcttgactccgactcgtcttcctcctccacctctgacaacaatgcgcgcagcgctgccggtgccattgccaacctgcgcatttcggcggcgactgccaccgccgccggtggtgtgcgccgctcttcgtcctcatgctcctccgtcgatggcgccaaatccgccggcgtcgaattcgcaccgccgccgacggcaccggcacgcattggctgctatcaacgccggcgcagcagtggcagcagccgcacgggcagcagtagttcgtcttccgcagcgccgttcccgtccagcaccaccaccaccaactcgtcggcatcattctcttccaacacgtcattgtccaacatttgctttggcaccgcctctcacggcagcagcaacaacaaccatgccgtcgtcgcgttgtgtgcccgtgacggtgatgatgatgatgacggtctgaaggatgtcgcgttgccgcccatttgtaacgatgaggacgaagatgatgatgacggtgaactgcttgaaagcgttggcggtgaagatgatgatgacctcgacaacgttattgaggtggtttatcgatcggttgcacaccaataaatttgttattgattgatatgctcgttgaccgactgatcaacggctcttggcggactttttgttttgaagcaatgaactttatgtaaaaaatggcaggaattctccatatggaaaagcaatttgaccggattttttgctgcgatttggattcttgtttctttttgccttattattgggcttttatcgccgtccaaaaattttaatcattctaccaaaaaagcaaatttcgcatttttaaaaattttacaaaaaattaagaatttttaaatgtagtttttaaacctttttctgtttgctacaaaatctaatctgcaattaatcgccttaaaggcgaattgggtgccaaaaaatctgggtctgatcactccaaacatttttccctcctctgatcacctcttttcaacatcagattgaccaaagtgcgccgccgactgttcatcgccaccagccacaacaacaaaatgatgcttcgcaaatgatggaagaggatgaggagttggattgggactgggagtttgaactggtcgaacatgaaggcttcaagctacagccgactgccgcttccgatttgtgttctgctgcgttgacagtgccttcgtcatgttcggtgccggcagcgagcagtccatgtgatcaatcggcgagttccatggcggcgagcagtccacaaaaccaaccggcgacttccatggcaatgaacagtcttagcccatcggcgacttctattgtggcggcgagcagttcgagtcatttggcgacttccatg

SEQ ID NO: 73217 - DNA, 713 bp, Heterodera glycines
aaaagagaaaaattattcaaaattatgagttagaatggcatatttggtgttttttccttttgcttctatcgatatatagattcaaatcagatcataataataggcatgtatgttagttaaaatgacaaaaatgtgatctgaaattgttcgtttttcaaaagtcctgagaaacaaaaaaaaatggaaaaatgagttaaattaaacaataaaaataataataattaccatatggaaatgagtgaattaaaaatgtgtgtgaatgaatatttgagaacgaatttggaaaagatttggtgagaaaagtgagacaataaaaacaaaaatggcaaacaaaaaaaaggcacgtggtttttttggacatcatataacacaacaaaactgtaattacgctaattagtggatgcagcagaagtaaacccatgaaaaaattgcgtcaattctttgtacaacaaaaaggggaattaaaattaaaatcggaaattggcaaaatccccgcacggggatccgaacctcgtgtggcaaagcggaaacaactcgctgttaaccacttgaccacaaagtggaccagcgtttgtttttgtcatacagaaattttttggaaaaatttgacgcaaaatacaaaaaacaacttccgcgtactctctctctctctctgtctccccctccctttctcgtctgcgccagccactccattttgcatgtgctctctcgtc

SEQ ID NO: 73218 - DNA, 260 bp, Heterodera glycines
aaaatggtcattgctttgattattaacatgaaatatccggaaaatttaattgagtattggttatccaattttcacattaatatttaattgtccaactttgaattttttgcaatttaatccactgaactttttggcaattttaatttttttcatcaaaataagcataatgaaatacctaacaccaaacatattttttgattgttttttaataatgcattcctctaaatttgatcaatcacaattttttaaaattaaaaaaa

SEQ ID NO: 73219 - DNA, 257 bp, Heterodera glycines
atgctcacggttcatgaactaagaattcgagacatggaattggcctcggaacgaaatgggtccaaatcgcatttaagcataaaatatggaagtgagagaatttcggtacttatgtggtttacagaccataaaaaaaaatttttttaacacatttctagggggttttcggggtcgctgatcacgaatctgacatccattgcgacgaattccgaatcccggactcgaattcgaacaaaaagtcgaaaattaaaatttaa

SEQ ID NO: 73220 - DNA, 315 bp, Heterodera glycines
gaaattctctcacttccatattttatgcttaaatgcgatttggacccatttcgttccgaggccaattccatgtctcgaattcttagttcatgaaccgtgagcatgtctcttaaccgattttctggtcggtctaaattttggtcaaatctcggctatgccaattttgacattccaaaatttggcgatggcgatcaggcctaccttcttcaaataattatttggccacagatttgtacaatggcgcaaaaaaaagttttaacgggatttttcccggtcccggtcaaaatacttaggtactcagttgtacgtgttttt

SEQ ID NO: 73221 - DNA, 403 bp, Heterodera glycines
atgccttgggtctggcatagcgcagggcaaggtcgccgtcgccaacaacaacaacaacagcattatggatcggtgaaaattcttttttttgcatttaaaaattttctgtttaaatttaaataacaccaaaaatattgtcacgcttttctgtttttttcaatcttaagaatttaatcaatccttttctttttttagcctgtaaaatttttaattaagatttgaattactacggtcttcaaaaaaggctcaaaatgccatttttgtgttttatttttttttcagtaactttctaaaattattttgtaaattaacctacaaaaaatggaacaaatttgagactgtttgctaaatggtttttaaatagtgttaaatttttcagatacaacagaattttaaaaagtga

SEQ ID NO: 73222 - DNA, 483 bp, Heterodera glycines
atgattcgtcataaattacaaaatgagcaggacgtttcggagattttatttttcttgaaggccttcaccaataataaggctcagatattagttgtttgtcgcaacatgcaaaaagttacctttttaacattgtgtccgaaggaaggcgaaaatcgcgaaaatctctttcaattaatcaaacaaaatctattggaaagcatcggaccttattcatttgtacggtacgtataatattatttttatattagccaaatgaacatttttttaaaggtttgaagagcagccgctttcatcagatgaagaagtgctgaatctgttttgatataagttattaacgaagtctgggcagtggaatattttgaagttcatttactatttcatttgcttcactttgtgtaaaatgtccacgccgtttcaaaaagtttaccatggaaatcacacagagcagaaagacaggaaaaattataagataaagaccaaaaa

SEQ ID NO: 73223 - DNA, 1924 bp, Heterodera glycines
  unsure (1)..(1924): unsure at all n locations
atggactcggaagccaatgccaacggcggtgccaataaaccacaccaaaatgtcgtcggcacgaaattgcgcaggagggcgtcgtccgctgaacagcttgcggtcatcggtgaagcgtcgtcaacgacggagtgccatcatgccaacgcgggcattgacagcgccgccccccaccgccgnccccctccgtttccgacttgagtcgaccgttgcgcatacaaatcccggaaaatgtaggcattttattttattttatttcaggaattgagagcatgaaaaatttaagattacagtgtaatttaatataggtaggtcatgctgaatggataggaattttcaaaaaaaaaaaaaattgtacgaaatttcctttaaatgagtatgtggtaacggtgctaggtggaaccgaaaaaagtatcaatggggcgaacctaaaaaaaagttttaaatgatagaaatatttaaatttaattttatttgcagaataataaatcgtactttagctcaaatttaattgttattttaattaaataatagaactctttggtcgatctaattataattagggattatatttttaggcaaaagcctattttttcctgagctctccgtggcctgaaacgcatgaaaaacatgttttttgggctgttgttaagctatttttcgagtttttagtgcctattttctagacttttatttttagcgcctaaaaagcctaacaaattttgaaagaacctatttttgcattttacccaaaattattaacaaaattgtaataagaacaaaaaatacaccccctaagaatcgaccaaaaattttttcaaaaaatacacccctaagaatagactcgaaaatttttcaaaaattcttctccagaatttatttatttattgacaagaatttgtgattttaaaaatatttatctcaatactgatttggcttaatttttttaccttttttgaaaaatttttatgattttacacccccctaaaaatgggttttttttagagcctattttgcatttttagtgcctattttttgggttttttagagcctaaagcctacctatttttgcggtttttagagcctaaaaatgtaatccctaattataataaataaaggaactgaaatttggcagtttctgaaaaaagttctgaaggaattcaatgagtcaaatttttatggtcataaaaaatttaggacattctaaatgtcataccatgtttaatttatgattaaatttaaggcaagttataatttatttttctgcaaatgaaattaaaataataattaattttaatattactatcttccatttacaaattagctcctacctaaattaaaaaaagattaattgggtaaaaaaaaatgaaaaatataagaaattttcttatataaatttaaaaaaaattcatttcttaaagaggatgccgccatttttccaaaatcttacaaattagtgccaaaagtcccaccagatttggcatgattatttgccatttaaaaactcaaatttcagtatggaccagcaacggcaacagcaacaacaacatagtgacagccgtggccagcagtcatccggtcagcaacagctgccaccaccgtcgcgctgcgtgcgcatgatgcccatgccatcgtcgttccaggcgcaaaagcgtgctgctgctgctgccggaaaattgggtgccagcggtttcggcggcagcgctagcgcagaagccgcagcaccgccatcttcctgctccgagtgttgctgttgcgaggcggcggacagcaccgcggtgaccggccattgctgcgtaattggcaacgctgcaacaccgcccatcatcagttcggttgcggaacgctttgtgctgcagcagcatggcgcgggcggcgttggcgtgccgaagaagaagttgccgcagcacaggcggttgcgcaa

SEQ ID NO: 73224 - DNA, 2122 bp, Heterodera glycines
atgcccaaaaaacgtcggcaaaattccccaaatttgagtgagggagaggacattctcgcccgtcttgaccggcttgaaaagttgttagaaggttcagggaatcccacactgaacccaatcatcgaactgctcgaaaagttggaaaggttggtggagcggctcgtggagggcgagaatcgatatggacatcgatttggtgacccccagcacacctcccccacttcggctcccacccccacaaacggcaattttcaatggggtcaaccgccgccttttgctggcaccggcgcagtgtcgcggatgataaccgacgcccattgattgtcattacattgtattttattgcctatgctcttgacttttctcgccccactcgccccgcccccccttctcatcaatctgttcccctctcttttgttctattcattctgatcggggggattgggccaagtgcccgtccgatccttccctccccatctgtcccgtacgaatcgggggccgctcctttccctcatttactcattatgtaattgtgtgcacaccttcggaataaaggatattattccaattttgggaatggtaatgcggacgtaacagatcatagaacaactttgggaaaggaactacggtaaccatattcaataccgttcgataattttgtcaaaattcaaattaagacaaatgtggaaattaacaaaatttgaaatttttcgcttgcttatctcaaaattcaggtttttataaacaaaagactgtctaaccttttttaaaatttaaaaattccaccatttaaataaaagtgtttaaaattttgaaattgtccccctccaccgttcatccccattttgctcaacggcatttttccaccatcgcaaaaaattgtctccccgtgccaaaataccggcgcttactttttaccgcatttttccccggagggcacacacaacacacactcacagctttttgcttgagcggagggcagcgtaaagctcattaacccaatttgcgccttggccacacggcaaaagagggtgggaggggacggcgcaatgccaacgaatggcattggcacacacaaatccgagagcaaccaaagcgtataatgacggtgctgattggggggcggttaagagggtagagaaaaaaaagaaaaaagaaaattcccgattttcaaaaatttaaaatgaaaaatttaaaattttattagttccttgtatattaatttaactaatttcatccattttaaaaataattttctattttaatggcttttgatttgtttaaaaatatgaaaatttgggaatcatttgaaaatggttgcattaaaaattagatcaaaacgaaaattagttaatttaaattgaatttattttattgtaaatttttatttatttattaaaagcattgtttaattgttgttttctttcagaggccttctttttggaaaatttaaatttcaaaaaatttttcttccaaattcccaaaagccaaattgacttgggcacgtcattccgtggctagcaggaaaaatccattacctatgctgccattccccatgcactttagcataattaaattttgtgtgttaagcattcggaactatttacataaatgaaagatccttggaatttttgggaaaaaaaattctaaattcatttttcattaaattttaaacaaatttctcgtttgttgttaaattttgtattctatgtatttggctaaacaaaacaaagaaaatttttgaaaaatttttttacaaaaaacaaaaaatttttaaattatatgtgagaatttaggtttttgtctaagaataggccctcaaaattaaagcttaataaaggtagcatctaaaacaagttttttaatatttttcaggtctatatgacctagtaaaattagaaaaattccttgaaaaaattgacgggcacggagttatccttaaaatttcaaaataatgttagttattttaattaaattagatttatctctcacaaaaaatcttttaatgtgattttgcccaatttttttttttttttaatttttttttggcgttttaattttttttattgttgggaattccttggcaaactgttaagctgaaaacaattttcaatgaaataaa

SEQ ID NO: 73225 - DNA, 805 bp, Heterodera glycines
atggacgtctacaaacacacttgcaagtgtaacgtaaaggtttgttcatctgcattttataattcttgcttcaattattatattaaagcttggtcatgttgctgaggcgattcaagagtgcacggaggtgctgaaatatggcgatgaaaacgatttggatgttttgctagatcgtggcgaggcattcttgcagaatgagcagtacgaaaaggcggttgaagacttccaaaaggctgtgaacgctcacgagggttcaagacgagccaaggagcaactgaatcgggcacaaaaattgctaaaactgtcgaaaaagaaggattactacaagatcctcggtgttcgaaggtcagtcattaattgcaacactttttacactgttcacgtggaaaaatgttaagaaatgcggacaaacgtcaaataatgaaagcctacagaaagcttgcacagcaatggcacccggaccttttccaagacgacgcggagaaacagcgggctcaggacaaattcattgacattgcaaatgcgaaggatgtgcttaccgacccggagaagaggaggaggtaaatcgttctctcccaccccttcttcaaaggaggtacaaccattgtttgtatgtacaaaatacaaatttttaaggtacgatgctggggaagacccgcttgacccgcaaggtggtggtggaggccaacaattccatcagtggcgctggtctggtggacagggcggcggattcaatccatttggagaaggcttcaatccgtttggagaaaatgatggaggattcaactttaaattcaatttctga

SEQ ID NO: 73226 - DNA, 129 bp, Heterodera glycines
atgagtgaaaatgaactcggtcgtaccctggaccagtgtttagcggatactgcgcttaaaattttggcaggtggttctattggtgttgtcacagcgcttgcgcttttcaaggggaagaggtcttggccg

SEQ ID NO: 73227 - DNA, 458 bp, Heterodera glycines
atggtaaatttcaattacgagtggctaaatcctcctcttggcgttcttggtctacctcttccaatacttcagatttcctatttgtcttttatttcgttcactcttattcattttggtattttcataattaattataacaaaccaaaaaaagaattattttagcatcttcgcaacgcaaagaaattgagaaacatcttgaacaaggaaaacattggctgtctaagggacaattccaagaagcacttcaggtgttttttagacgatatgttattttaaacttccttttctagcattatcatcaagcagttgctttggatccaaccgattatcaaatttattatcgcagggcgaccgtttttttggcaagtgggaaagtgaacgcggctttgcccgacttggacaaagttgttgaactcaagcctgattttgtagcggtaattgaaaaaaggaataattaa

SEQ ID NO: 73228 - DNA, 337 bp, Heterodera glycines
atgcagagcctgatgcgttagcgaaatatgtcattgcattgatcaagaaaccactttctgatgcagacttggagaagttgtgcacagacaaactctctgtatttcttcaatcgcgtaaactcgaaaattcatattttcaaccagaaaaagaccctaataaaatatcttatttttagataccgagtcatttgtgtcacgattgtttgaaacactcaaaagcggtcaatatttaccgaaaacagatgcactgacttcatccgaaccaccaaaattgattcttcaacagaccaaatctaaaattgatcaaaaatctgctgctgagcatgacgaggtttaa

SEQ ID NO: 73229 - DNA, 1084 bp, Heterodera glycines
atgggaaatcccctttttgctcagaaccaaatcgtagaacaagtcgttgagaattcacattccggcattagaaatgaaatacagcatccaattggactcgaaattgagcggtacggacgcccgatcgctaattcctctccaatcaccagaatgggaagttcgcataacgagccacacaattcttttgaaaacgcggagtttgaagagataaggcaatttcgggccaggcaactttacgaaaatccacgcggatttcgtgaacaaaattttgtcggagaacaacgagaaaggatgaatgaatttgagcaaaaccatgctccggtcccaaattttgaaagaagaaatgtatttgttggtgatccgcacggaaatcagctaatttttgggaattttgaaaggaacatggaacggaattttggacattttgaaaattttcccggactcgcacgaggtggaaaccaaaatttgaatgttgggggaccaagaatggaacaaattcgagacccacacagagaaagaaatcagtacgaggaacggcatttcatgccaattcccgaaccaaatatgaggcaaattgatggacaaaaccaaaatttggcttttcgacaagtgcagggccaaaattttcaagaaaacatggcgagagtgatgccatacaccgaaggaattcctgatattattcttgaacttcacaaagtcacactttcaaatcagtacgcaaatgtccttagagaaattcctactctttttggcactgaagggagggacaaaatcaacgattttttcaccactcttgaattgtgtacaggagattggatacccgagaaaaagttggaaattttgagagcgaaattaaaggggaaggcatccaaagcattgaatttgtccctacgaaaatttggtcaccaagtgccattcgaagtcattaaaaggggtgacaacccagaacgtcaccggacagaacgtcaccacccaaaacgtcaccacccaaaacgtcaccaacccaaaacggcaccactcaaaaacggcaccacttaaaaacgtcaccactcaaaaaggtcaccgacccaaaacgtcaccaaaa

SEQ ID NO: 73230 - DNA, 1243 bp, Heterodera glycines
atggcttcatttattactacccaaaaaggagcaaaaaaactgctttacgatggttatgcttatttaaaacataaggatggtgctggtggcaaaatttattggcgctgtgatcaggccaaaagttcggccaaatgcagtggttttgccattgcaataaacgacgaaattactgtaactaaacaacataaccacgctccatctccgacacgtattgaagttcaaaccattaaacacagcataagagtgaccgcagctgcacaaccagcaactccacctcgttcaattgtaaatggagcaattcagggctctagcgatgctgccaaaatacagctcccagaattacgacacatgcaaaaaactgccagtcgaattcgaaaagccaatggcaacttcaaagaaacaccgaaatctttaaaagatgttgaaatccctccggagctccgtcgaacccgcactgcttcacaagaaggctttgtctttggcgatacaggccctgaagacgaacagcgtatcatctcacttgcttcaagaacggacataatcaggctgtcgagttgttcggtttggatggcagatggtacttttaaatcagctccttcactttggtaccaaatttgggtcatccatggcttatacaaaggaagagttctcccttttgtatattttttattgccatctaaggtattggttgaaattttgcatatatttaaaaattttcaaataattagtcagaagaaatctactgcagagcgattaattttcttacggattgtatccagaatgttgtgcccaattccccaaagccgaaaatgatctgcgttgactttgagatggctgaaattaaggcttttcgtcgtttttttgatgctgcaacaattcatggctgctattttcattttatgcagtcaatttggagaaatattcagagttcaggccttgcagttccttacaaagaacacgaagaattcagagtgtcgctcaaatgtcattctgctttagccttttgttcaccagcggacgttcgagagcgatttatcggcttggcaggcatccataaaacataaagaaagaaaatttttaaaaaattataggaaatattgttgacaaatttggacataataatggtgttcccgaatttttggattattttgaacggacgtggattggtagaggattcgccacccgcccgcattgtatagtagggccgaatatcaagagcaaaaccaacgtttactcaatgtga

SEQ ID NO: 73231 - DNA, 142 bp, Heterodera glycines
atggcacttttgcagcaacagcagcagcaacaacaacagcagcaacaggccaagcgccagcagcaactgcagcagttgcagcttgttcaacagttggcacagctacgacagttgcaacagtccgcggcactttcctcatccg

SEQ ID NO: 73232 - DNA, 381 bp, Heterodera glycines
cgccaggcaaacggcggcgtcaagactgagccggccgcggtcacattgtcaccagcccttgagcatggagtggaaccgctgcaacagttgaacattgctgccgatggagatggaactgttggtgatgatgccaatgttccaagtgcactcattggcgacggcatcggcgtccgtgccgacggcgacgctggcgctatcaacggcacggcttccgccactttggcacaacaacaacaacagcagcaggcgttgatcacggcattggcacagctgatcgtggcacgacagcaacaacaacagcagcaacagcaacaacaggacgtgatgatggcacaacaacagcagcaaatgttgcagcagaagcagcgcgaaaaaatggcg

SEQ ID NO: 73233 - DNA, 628 bp, Heterodera glycines
tgaataatgcctgtcatatacttcgacgacgtgcttccgagggagccgatgtggctcatccaattggtacatccgttttatttcttcttttatttacactgttttgtccggttttcagcccttctacatcacttcctttcttgtgctgctcgtgtttatgctctgccctggcaatatgtttctctatactcttatcagtgcgttttgaggagagagtgccgtttttgtgcagcctctgctaactaatcgctttcctttgtttaagctgtggcctacccaatgtacgcgagcttgttgaccctcaacactcaaaacacatgtgggttttctgctgtgctttccctccgagtacaaagccaattccccaatttccagcggaatacacccagtggctcgtttattggtgcgtgttcgccgtgttgggccagttggactttctctttggctctatcaatggctgccttctgctgctgtacgtgcctttgaagaccgtctttctgctctccttggcctttccgcaaatttatggcgctcacaacatgtacgtgaagccggacgtattggacaagatgaagaagatgttgtgatcgaggagacaacgtatcactgtgtaatgtctgtaggatga

SEQ ID NO: 73234 - DNA, 200 bp, Heterodera glycines
gctggttatccattgccttttaagcgcccctcgggatgggaggagccctatcggagagataaaatggggggggggaagagggtaaaggccatttccggtcccggccttacacctccggccctccaaaagaccgtccctggtcgttaaaatgtaaataatttccaaatttgaatgaagtcctcagactttttctttctttt

SEQ ID NO: 73235 - DNA, 844 bp, Heterodera glycines
atggactcagtgtactctcgttggacaacgaggtaatcaatttttttgcccacggcttcgaattccgatgcaatttggctttgcagttctttcagtgcctgcagttggtccgaatccacctaaaaatattaatattcgctatatactacgattcttctcaagtttcaacgtagcacaatttttttcgtgcatttctacctatttttattgattatcgctaaaacatcaaacaagaaaaaaaaaatttattttcagatcagttggactttctggttaattttgataaaatcaattaagaaattttgcttaaattttcaaaattatggtttatttttgtttataatttaaatttgtcacttacaattttcataagaatggcgtgtccagcaagtcaagcacgcgaccacaagaaacattgacacatgtcgaaacatatcggcacaaattcggaggaacaaatggcaaaatctgacaatgtgtcaaaaagaatttaagaattttttagttttggaaataagaaaaatgtcggcaccttggttcctggggcctgggggggaggggggggtacgtaggacgtaccatggataggctttcttcgcattcgcgttttgcaatttagaggaatttcgcttctcgcatttattttatttcgcattttttgcttttgcgaatttcacgtttcgcattttttttcgatttgggccatccctggtacgtaccccgccacccctccccccgcctgggaccatccctggactggtgtgcctaatttttacaatttatattattagcttaccaaactaagcagtgctcctcttcacgaaataggcttttcttaaataaa

SEQ ID NO: 73236 - DNA, 1400 bp, Heterodera glycines
atggacgaaggagtgcgaaaagcaaagataagaaaatgtcttgagcgacaccaagacaaattgaacatgcccaaaaaacaacttattttggtaatacaataaaaaaaacatcataactttacaaattttaagtcggttcccacccgttggaattccacttatcacatgcttgctgccttcaaagagcagaaaaaagttctgttctcaatgcaatttgaacgtgaccaacgaaatgccggacttttgtgcttgtcaaagcggcctcgcctggcagagatggaaacaatacctgcttcattgcccaccattgcaccaaatgattttgaaattttgcgccacatttgtcctgtactaaagatatttgataccgagacacaaaaagtgggcgagatcagcaaataagcaattatatccaataactaatgaatttcagctgtcgcgcgaggtgtcaacggcgtcagtgattttgccgactcttaaacgacttcatgtttttttgcaagagggaaaatttccagaaattattcaaccgtttatcgacagtttggtggactcattaaatgaaagggtgaagaaattggtccagaatatgttaattcgtatttgttctctaatggacccgcgttttgcttatgatgaatctatgttttcaaaagcaaattggaatcttattgaagaagacttaattgattttgcaaatgggaaaagtaaatgatggattttttcaaaaatatttaaaataacattttacagttaacaatgaagacaccacaaattttgaagagcagaatgagacgacattgagtgatcttgagtctttgtcagacttcaatggagaacaaagtgatgaaagcataaaatgtaaaatttataatggttatggttattgttggttaattagtcctttatttttagacgacatttggaagccaaaatcgcccggatgtgtttcagttccgtctacaatttcaggaacttcgcattcgacacaaacgacgcgcattcagctacagttagctgcatacaaggcatttgatcggccgtcagtcaacgctgatctttttacttggtggagagaaatcggcaatcaatttcctgacttaattattttggctcggattgtccattcaattcctgccacttctgtttcttcggaaagattattctcaaaggcaggactaatttacagcaacaaattaagaaatcggtatttggagtataaaatcacaatttattttgtaaatttttattttagcctaggtgcagaaatggccgaaaatcttttgcttatcaaggccaatatggatcgagtgttcttggcaccgtctacggagccggatgaagaggagcaagaaatgttagactcggataatttggaagtgattgaagaagaaaaatga

SEQ ID NO: 73237 - DNA, 2180 bp, Heterodera glycines
  unsure (1)..(2180): unsure at all n locations
atggacgggttggacgacgacgagccaatgccgccaacacatcaccagcagcaacaacaacaagcgctgcagcaacagcagcagcaaaagaagaagcgtggccccgtggcgggcgctcgcaagggaagcgccgacggcgggccgggcgagccgggcacgtcggcgtcgacggcaccaacgaccggtgccggcggggaaggcgccactgtgccaaaacagcggggccgaaagcgcaagaaggcgctgcccccggaagaggaggttcgtgtgtgtgttttgggttgtagttcgagtccacggcacgggaattgggtccgagatttgtgagcagttcgttccccccccttcgaaatttaaaaaaaagattcgtttttagcgatttttcagaattttaaggtgcgtttactaaattattcttaaaaatgccagggttttttcgttttaattagggactggaagcgcgtcacattgggaatgtgtcatgaatgtcattccgaaactcaaaaacccggtatggactcccgaaacccggcaaatgccgtattttccgggcaaaatgggcacccccaggggatgacgaataaacaaacaaacaaattttataattacctaatacaatattgctaacttattgttagtttaggtgttgccgaagaaaagagaaacaagaaacaggaaaaattcctcggtaaatcccacaaaaaaaaacaattagcaaaaggcacacaattggaattggaggtgggaaacacacaaacaaacaatgaatgggttgaactgacaataaatgagacacggcacaagaacaattacgcatggcattggatttaccgtttttgcggaaaacaaaaaaaaatttttttgaaaattttaaacaaatttttccccctctccgtgtacagcaaagtcaggcggactcggacaatgatgatgcggcgccgaagggacgccgtggccctggaggcgggcccggaaagcgccaacgcgtcaccaaatcgccggccaaccccaaactgtacgccaagctgaacgcatgtttgaacacactgctcaactacaagacgaggtacgagggggagcggcgacggcgtgttttggttaccggtttcgagaaaatgggcaaattttctagaattatggacatacaattcagtatttcttacattaatgaccccggggttttcggtgtccagaaaattaattgcgatcggcttcaaatttatggatattttttcaattttaaatggcattaaataaatgccagaactgattacttattgccagagccatgaattttgaaaaagtattgatcccagatcgattttgccgtgatttagatcccgaacctggccatttttcctaatcgatcctttgagtttatccgaaatatccttcgaatgtttagcaatggcaaaaagttggccggcccattcgtgcagttgccttcccggcgtgaatatcccgactattatgaccaaattgaacgcccaatggacctgcaacggattcggaagaaaattgaggaggacaatacacaatgttggcccaatgagcgcagacgtggatttgctgtgcgaaaatgcacaggtacatatgctaacaaaagagtgtatgtgtcatgaaaactttttttgagatttatttttntaagaaaaattgtgactaaattcatcactatatgtntagtatagggaatttccattttacgttttatttaaatgcttagggatggcaattcaaatattttcgggcccgaaatttggcctatgtcaaaatgtgggtaccctaaaaattgcaaataaatagaaaaaaatgcacgccgtgcctccaattttttgtaaatggtataagcccaattttggattcacaaaattttcaaaaaaagactaaataaaaatcgcccccgaaatttgcagcgcttcaacatggacgggtcggaaatccacgaggactccaagctgttgaacatggtgtggcgtcgcatcgcggaggcaatcggtggccagggcggcaaggaggaggaggatgagaccacaggacggggtggtggagctgcacggcacacgccgcagcaggaagaagcggctgctgcaccgtcgacatccggccacgcaaaggcaccagccgaagacgatgatgtgccagtgtctgctgctgctgctggtccttccacttcatcg

SEQ ID NO: 73238 - DNA, 1358 bp, Heterodera glycines
ccaagaaaagaatccaactggtcaagttcaattgataccattttttaaacaaaggaaccttttttgtatcatccctttaaattgaaaactaggagatattttatccgaatatataattgtaagaaagtatgaagctacctcaattgattcaaccaaatcacgttcaatagcaaaatgtggtggggacaaactgtcgtcttggatatcagaagcagagcatccatttttggaggcgttgttggcatagaaattcatattggttgaatgtttgaagttacgattcgatgaagaattgggtagttgcatcaaagggttccggttggactgggttatgttcggataaatcaggtgacacaattgaaaaaagttttgaaggcgttcatcggtggtgaatactgacgaaacgagtcgaagtcgaacgcggaatagaggacgaccatattcaacaaatttgagatcaaaattgggggacacctgtcggttataaattgaaacaaatatttgttaaatgacgcacctctctcgtgccagaagaggacaatggcttaaattcgtagtattttgaagacaagttggcagttactggaagttcaaactcctgacttttgtccgacatgacgaagtgaggaaggccacgagaatccgttttgaccatcggaagccatgcataacccaccggagtctcaatgctccggtactcccctgtcccccaaaaaaaatttttcggaaaaaccgcgccacataaaaaacgggtgtgaaaagcaaaaaaaaaaaaaaaggtcgtcgcacggggggaggtgccccccccccaagccaaaatcctgggaccgtccctgatggtgattcctgtataattcctcattcatatatatatatattctcaggttcaacgcgcccttcgccgccacgggcgagaagttggagctgaaccaggaggagacgatgctgatcatccgccgtctgcacaaagtgttgcgtccgttccttttgcgtcggctgaagaaagaagtgcgttttgggcactttattttatgggttttggggcataaagccaaggatggcatgaaattattttcatttttgacatttttcatttcttttttccatttttctaattcctcccaatgtttttcagtgataaattcattaaaaataccatttaaatttgtaaataatgtttggcatgtttaatccgtcttccttccgtgttcaggtggagtcccagttgcccgagaagacggagtacgtgatcaaatgtgacatgagtgcgctgcaacgcctcctctacaaacacttgcagaagggactgctcattgacagcaaacatgtcagtgagcgaacaattacgcgaccttttc

SEQ ID NO: 73239 - DNA, 1421 bp, Heterodera glycines
atgctcaacaaatggaatgagctgaagaagcatttgttgggtcataagggcattttcgggtcgccaccaaagagagacaaacagcagaaaaagccaaaccaaacaatttgggaattcaacaaggaagtgaaggagcagatcaaaatcgacctcatggcactgatcagaacgaagtcgaaggccaattgcatgtgccaaccatgtgaagaaatgaagcaattggcacggaacttttcggaaaaggacgcaaacggcgaaggattgtcggcgaaaatattcaaaatttcatcgcaaaattcgagagtaatccctctggagataaaaaagaaaggaaatgagaagcggacggacgggaagagctgagcaaaacgaacagttgaagagcgaaaaagagggaaaagctaatcgaacgatcgatcactttttgtagagaaaacagtgaattgaatggttaattttaatggtagaaaatagataaatcattacctccctcgccaattaattaattagtgcctttaatttatttaacattttcaaagagtcaacaaaaactcgagttgttttttcttcattttatgcttggtttaactgcttctctctcttctccttttccttccgtttttgccctttttcactttgtcggcaccacacattggccacaattggccgtttcgggctgatagccctcaatttgaatggtcgactcgtgcacgttgaagtcgcgtcgaagcatcaaagtggtggccctcagaatttgttgggagtccgcagccgattcgacctccaaatggaccgaaattgcaactgccaaagaaacgattcaagtcattttcacatttatttatgtaaaaataagaaaaataatttaattaaaatttaaaaatttattttttcacaaaaaacaacctttgtccatagtgagagcccaaattcgaaggtcatgcacttttttgacctgaacgattaatgaaaggatcggtctattctgaccgaaaaaagtgcgaaaaccaattatttgttaattaattattatatttccaaaaaatttttattggatatttggtgcatattcgaagtttatatatttcttaaaattgcattttttttaatatagatataatatttatattttgcgattctattaattgttcttctctttatttgtgttatttattatccatttgcttcctttgtgaattattttattatttttttgtccacgagtaagcggaaatcttaggaaaaatcgaatgcttaattttgctgtcaaaggggaaggaacaattagtaacttaccccttcaatgtgctcaagtgcgtctgaaactcattaaaagtgttaattgtaagcaaaaaatttggattaccaaaaacatggcgaaaatcgatggtcgacggacgacctaaaaaagttgaaataaa

SEQ ID NO: 73240 - DNA, 1133 bp, Heterodera glycines
cggtggcaatcgccagacgcacggcacgcggagacagacgtacatcaacgtcagggcagcatttgtccatgtgctcggtatttgttgagaaaggcaaataaacaaacttcgaattttgaggtgatctgatccaaagtgtcggggttttgttcgccggattgctaatttattggaaagtaatttcgaattttatttggggcaattaactaattacagccgaattggcacattctcgacccaatttgcacgttgcttttctccgcaattgttctcagcaccaccatttatatcatccgcgatgcgctcgttgtccttttggaaggtccgctttttatatcttcttttatttatttcaacttttttaggtcgtccgtcgaccatcgattttcgccatgtttttggtaatccaaattttttgcttacaattaacacttttaatgagtttcagacgcacttgagcacattgaaggggtaagttactaattgttccttcccctttgacagcaaaattaagcattcgatttttcctaagatttccgcttactcgtggacaaaaaaataataaaataattcacaaaggaagcaaatggataataaataacacaaataaagagaagaacaattaatagaatcgcaaaatataaatattatatctatattaaaaaaaatgcaattttaagaaatatataaacttcgaatatgcaccaaatatccaataaaaattttttggaaatataataattaattaacaaataattggttttcgcacttttttcggtcagaatagaccgatcctttcattaatcgttcaggtcaaaaaagtgcatgaccttcgaatttgggctctcactatggacaaaggttgttttttgtgaaaaaataaatttttaaattttaattaaattatttttcttatttttacataaataaatgtgaaaatgacttgaatcgtttctttggcagttgcaatttcggtccatttggaggtcgaatcggctgcggactcccaacaaattctgagggccaccactttgatgcttcgacgcgacttcaacgtgcacgagtcgaccattcaaattgagggctatcagcccgaaacggccaattgtggccaatgtgtggtgccgacaaag

SEQ ID NO: 73241 - DNA, 1391 bp, Heterodera glycines
  unsure (1)..(1391): unsure at all n locations
atgaatgttntacagtttgatgcacttggatctggacgaccgcgatgccacnnaagcgaaagtccgtcgaccagcgtcgattcncaattccttccggtcaccaaatctgcttcaacaaccatcgcgtcggcacttggatctggacgatcgccgatgccaacaagcgaaagtccgtcgaccagcgtcgattcccaattccttccggtcaccaaatctgcttcaacaaccatcgcgtcggcacttggatctggacgaccgccgatgccaacaagcgaaagtccgtcgaccagcgtcgattcccaattccttccggtcaccaaatctgcttcaacaaccatcgcgtcggcacttggatctggacgatcgccgatgccaacaagcgaaagtccgtcgaccagcgtcgattcccaattccttccggtcaccaaatctgcttcaacaaccatcgcgtcggcacttggatctggacgaccgccgatgccaacaagcgaaagtccgtcgaccagcgtcgattcccaattccttccggtcaccaaatctgcttcaacaaccatcgcgtcggcacttggatctggacgaccgccgatgccaacaagcgaaagtccgtcgaccagcgtcgattcccaattccttccggtcaccaaatctgcttcaacaaccatcgcgtcggcacttggatctggacgaccgccgatgccaacaagcgaaagtccgtcgaccagcgtcgaatcccaattccttccggtcaccaaatctgcttcaacaaccatcgcgtcaaattcatctgactgtgcgctaactcctcagcagaaatattgccgcaaaagagcactgatggagccatcgcaacacgaagttagtctctctgttttttgttatccctacttcgccagggccaaaattcaggcgaaaagcttaactcaaacccagaattgctttttcagttggctatcatccgaaatgttctcagcttcgatgactactcacaatatcgcattattaccgtgcttctgcatcgtccgcagggaattaatgagggcgccgttggcttattattgcgcacgatggcagagagatcaaagccagcaaatgcgccgttttcaattttggtattgttggagagtaggaaaggaaaacattgcgaaatattcaggttcatcaagtaacgggtgggtccattgcgagtaaaaatggccatttgatgcaaggtgaccgggtaaggaattgcacaaatatttgaatttaaacatttattttttaaaataattaggtgttcttcatccaacatcagtcgacagtgaatgtatgtgcaaaattaaaatagtttactcgtcatttcccttcagatgtctgtcgccgaagcacgttctctggtaaaaagcccgtcgcca

SEQ ID NO: 73242 - DNA, 2986 bp, Heterodera glycines
ctcaaggttaagattcggatgaaccgaaaaccagccaaattgtatctcgacactggatcggacgtcataatcattgacgaagggacacatgccagcgttgggcacccaccgatcaaagagtgcaatgaaattggaaaaacattcgatggcaaaagagtccaattcatcggaaaagggactacaacgtttgaattaaacggccagtcgattgttgaggaattttatgtggccaagcaagggtcactaaatctactgagtcgccgagcaatggacaaatttgggctgttaagggaattaaggcagaaaatcagcaatgcggcagtgaatgcatgcacagccggcaacaaaactggacaaattatccctgatggcgcatcgcaaattgacggaaacgaagctaaaatctaggtactataatattgcttcaccgatgagacttctaaaggaaagtttatttgctttaactcttattcaaatatgaatttaatggatttcaattttacactgattaataatcttttccgttgatttactgtatttggtatgaaatagaccgataattgtttcgtgattattaaatgagagccataacaatatcctaccatatggagtgggcagctccaattttgattgcgaaaaaggccgacggatcagcacggatgttcattgactattcaacgggattaaacgacacgcttctcgactctcaacacccactgccaattccagaggatatttttgcaactctaaacggaggaaaaatattttcacaaatcgatctgcgtgatgcctatttacagatcgaattggacgacgaatcaaaattattatgcggtttggcaacgcataagggaaattatcgcatggagcgattgcccttcggaataaaaacggcaccagcaattttccaatcgattatggacaaaatgctggccggattgaattatgccaccgcttacctggatgacataattgttgtcagcgggacaatcgaagaacacactcaacatttgaaagaagtgttcacccgaatccaggcctatggactccgagtcaaattggaaaaatgctcatttttccgcaaccaaatcaaatatttgggacagattattgatcggaatggtcgccgtccagattcaaccaaaatcaaggccatcactcaaatgccggcaccaataaacatttccacacttcgctcatttctcggcatggtgaatcattaccaacaattcgtcaaaaatatgcgtttcatccggaaaccattggacgacatgctgaagaaggagaatgaatggaattggtcggaaaattgtcaaaacgcatttgagaagttaaaggaaattttgacttctgatttactgctcacacattacgatcccaaattggagattattgtggcagccgacgcatcagaatttggaattggagcggtaattcaacacaaatttccgaatggacaggtcaaggcaattgcgcatgcctccaaatctctctctcccgctgagaaaaattactcacagattgagaaggaaggacttgcgctcattttcgccgtaaaaaaatttcataagatgctttacggaagacattttacactgcagacggatcacaagccgttactaaacatcttcggcagcaaaaaggggatccgccaatgcagtgcaaatcgattgcttcgttggtcattgacacttttggcctacgatttcgcgattgagtacatcaacacgaaagactttgggcaggctgacgcactctcgcgactcattgccaaagacacaagcggtgaagacgaaagagtcatcgcttcattttgtgttgaaaaagaaattgaactcaatttcgacacgaccattgaaaaattgccgatcaaatttgcagacctcgtcaaggcatcggaaaaggatgaaatcatccatacaagtgaaaaatttagtcaggaatggatggcctgacgaacgccaattgaagactcgaatcggaggcaatccagcttttcaacagacgaaaagctgagctttcaattttaaaagaatgtctcatatacggagaaaggattgtggttccaaaaatttttcagggaaaaattatgaatttgctgcacaagggacatcctggaatgaagaggatgaagcaattggctcggcaatacgtctattggcctaaattggacgccgaaattgagcaatttgtgcaaaattgccagccttgtcaagacgcagcaaaagccccaacaaaaacgaacttgcactcgtggccaaaatcgacgagtccatggcaaagaatccatgttgattatgccggaccatttttcgggaaagaattccggattgtcgtcgactcattttcgaaataccccgaggttttcgaaatgacgaccaaatccgcggccgcaacaattgatcgtttgcgttatctcttcactcgtcatggaattcctgagacgctggtgtcggataatgggacgcaattcgccagcacagaatttgccaaattcatggccaacaatggaatcacacacctattctcggcaccgtacaatccaatgtcaaacggacaggtggaacgatttgtggacactttcaagagggcttttaagaaaataaaaagggagggaacggcaaataaggaagtaatcgaaacttttctgatcacttaccggacgactcctaatgattcgctctcggaatcaaaatcaccagctgaaatgcttctcggacgcaagccgcgtaccacgctggatctgctcaagcctcctccaccaaggccaacggagagagatgagaaaatggagcgaaatttcaaccgaagatttggcactcgtattcaaaattttggacctcatgaaaaagtttgggcccggcaccgtctatcgcaaaattggaaggcgggaaccatttttaaaagcgccggagtgatctacaaagtgcgatttggcgatggaacagctgggcgcttccacgcaaatcaactccgcaggcgtcag

SEQ ID NO: 73243 - DNA, 1151 bp, Heterodera glycines
atggcggcaaatgtcaatctccaagatttgatcaatttgatggcccaacagcaacagcaaatgcagcaacagcaacaaatggttcaacagcagtcacagcaaattgcgcaactgctgaaccaaaatgcaccgaatgccgcaggattggcacagccaaatctcatcaccatcatcccggctcttcccgacatttcgccgttcgaatcaaatgatgaacgcagtcgcgtcgtggaatggctggaccgtttcaagtttgcgctcgattgtgctgcaccgatggccaatgacgaaatcaaagtcaagtgcctgatgaacaagctgagcgaaaacgcattcagtgagtacagccgatcagtgcttccggccgccgtcaccgattttgattttgcgacaacaatccaaaagctggagaaattgtttgccaaacctcagtcaattttcattgacaggtacgaatgtttgaaagcggtgagaggggatggtgagaacttcagacaaatcgtaaatcggcacaaaaagctgctgtcggatttcaaattcgacgacttgaaaaaggagcaatttaattgtttgatgttgctgaccgcattgaaatcgccaaacgacgcagctttaaggcagcgaatccttgctaaattagcaacggatggcgacaatgtgaggtatgacggagtcgtcgaaggcaaggaaattccccgcaaaagtggtcaactgaaaagacacaaaacaacgcagctaaaatgaagtgctggcgttgtggagaagaacgacaccggccggacgattgccggcacaaaacaacaaaatgcaataagtgcaattttgtaggccatattcagaagcaatgcgaaagcgtccatgcgtggtggaaaaagatgaagtcaaagagggctacgacaagcaaagtcggtcatcttcgcattggcatggctggaacaacgaacaccccaaatacggcgctcaaggttaagattcggatgaaccgaaaaccagccaaattgtatctcgacactggatcggacgtcataatcattgacgaagggacacatgccagcgttgggcacccaccgatcaaagagtgcaatgaaattggaaaaacattcgatggcaaaagagtccaattcatcggaaaagggactacaacgtttgaa

SEQ ID NO: 73244 - DNA, 311 bp, Heterodera glycines
atgcattcgcaggccacgtctgccctcgctcatacaaacaatggactggaggtaatccatctgcattttatggttgttttaatttactacaggcaaattaaaaaatatatgtttagaaaggtctctgccaccaccctgcactctcggacttcatttgtgaaatcaatgaaagcaccgactgacgatggacgctgcccgatctgagctgctcgccatttcattcgcatgtgacgaaagcgatacaccatgcaggacgccgtcattatgagaattttggcggacgcgaaatgcaacaacaatggtgaaataaa

SEQ ID NO: 73245 - DNA, 1020 bp, Heterodera glycines
atgaacactgccaaaaagtcagaatttttgcatattttaatttataacttttttatttgtcagtatatctttgtgatttttaggaagccgatagagcttgttaagagctttcgaatgataccaattttgttggatttggtcaacaaagaaaaaagttatgatgctctaaacttggctcagacgcaactggcccgtttcgaattttgggcacaatagtaaggatttgaaaaataaacaatttaaaatttataaaataacacaattaatttgaagcacattaagtttttaatcaaattcggaaaataaaattttaacgacttgtccactcaaagaatagaaaaaatatttttttcgtcaatatttatctcacatatttagtaccaaacttaaaaagcaacataaatatttaatgaatagaggaaaaatgagcctgacaatggaggaagaatcgaattcaaagttaattgatcagagacaatacacttcgaacataatatttagcagaagaccaaattgtgacgaaaacaaaatttggaatgagtcagtgaaaattgaaacggaataataaaaactgacaaaatttttggtcgtatttagaattggaaatgaaaggtcaaagatgatcgcccgtataaacgaattaacaaaaattttaaaagcaaaaactgttcgtttgttgcgaacggcacaaatttcgtgttgtctgatcagaaaagaaagttgaagaatccctttgcggcctgtttaaaggaaaaaatcattggattaacaaacaaaaagcagaaaagaaaagaacacaaaattaatgttatatttcttgttaattgcatactgattcaagagacatgctcaactgaaccatcgcttggtgaaccgcatgctttaaaaattcgttgtccgaactgattggtgggtcgtaacgaagctccaaaacgtcataatgcttcttaaaaacaattaatattattttatcatttaatgcttcagctaaaagttataattgctcgttcccaccggaca

SEQ ID NO: 73246 - DNA, 1142 bp, Heterodera glycines
gcaattgacgccgatctcttaaactcgcgttaccacatgcgcgttcttgtgccacgaattcaccaggacccgcaaagattggccgaagtgtttgccactctttttgattacacgacgagttctccgcacgcgttggtcctattcattattaattgttcccttttatatattataaatgtaaagactatttacgcatttaaatctgttcataccaataggaccttttacgtggccgtggcaattgatccggcgctttgcatcggtgaccaaaccattattaaatcggtaaaataattttaattattcatgatatttgataacttaaataatttggaagaaatctattttcatctgcatttaaataacatattacaattcttttttatcactattttagtttactttgttataatcccttacagagaaatgcattagcaaaagcgatcagcaaaaaagtgaccggaatttcatttggaagtgctaaattcgttacgcttgtcgacaaggtcgtttgcactttttaatatgtatggcctaatgaagctttacagctgattaaatgctttttattattgtttactttttaaagatatttaatatagattaaattttgacattaaaaaaagcctttgcacggattttcttggcaaagaaagatccagagaagttgccgaatgagtcatgatttaaaataaaaaatcaatacctcaccattttataaaaaattgtgcctataaattttttgataattaaatatgtaaaaccaggttttattcatggaactggacttggaattatagtgttattcaccataattttcaaatggaattcctattgaaaatgaaccggccccggcttgatgcttggtccggaccgggatttctggggttaaaatatttatttcaccagtgttgccattccagtgttttttataaaatttaaattacattttattgtccggtgggaacgagcaattataacttttagctgaagcattaaatgataaaataatattaattgtttttaagaagcattatgacgttttggagcttcgttacgacccaccaatcagttcggacaacgaatttttaaagcatgcggttcaccaagcgatggttcagttgagcatgtctcttgaatca

SEQ ID NO: 73247 - DNA, 120 bp, Heterodera glycines
attaactttgaattcgattcttcctccattgtcaggctcatttttcctctattcattaaatatttatgttgctttttaagtttggtactaaatatgtgagataaatattgacgaaaaaaa

SEQ ID NO: 73248 - DNA, 773 bp, Heterodera glycines
atgattgccgaagtggaacggctgttgacacgaaaaaggtccgcaccggtgcatgcaagttttgggaacattgacgacgacgatgaggaggagggcgagattcttgacgtctcgtttgttgaggaggaagaagacaatacgggcgaagcgcccttaaacccactttcatatttgaccaagcaatcagcggctcaacaagaaacgttgcggcatgaaaaatgggcacaagaagagagaaagcgaagggaagaggagcagagaaagcagcgagaaaatgaacgtagacggcgagaagaagaggagaggcgtcgtaagacagaagaagaagatagaaggaagactgcagagaaagcagccaaggaaaagaaggcaaaggaagagaaagaggcaagtgaaaagaaggcaagggaggaaaaattggcacgggaaaagaaggaagagcaaagaatagcaaaggaaaagaaaggcgagaaagagaccaaggataaaaaggctgaggaggagagagtagcaaaggaaagaaaggcagaggatgagagagtggcaaaagaaagaaaggcagaggaagagagagtggcaaaagcggaagcggagagagcggcaaaggcggaagcggagagagcggcaaaggcggaagcggagagagcggaaaacgagaccaagaaaaagcaagaggaggaaaagcagttggaagagcttaaacgacagcaacaggccataagaaagcaaaaagagttggagctgctcaaagagttcagaccgtggcgaggcgg

SEQ ID NO: 73249 - DNA, 739 bp, Heterodera glycines
atggtgagtcgaaacgggaaaatttttcccctcaaaatgatgatgacgtaatcacaattggagacaacaacactcaaacactgcttgacctacaaccggggccctcaaaaaggggacgcaagcctcgcttggacaaaatccatgaggaaattgcttccgcaatgaagaaagcaaaagccatggaagctgaaggtttggctttttctgcaaatttctttgaattagccaaattttagtagatgaatcgcccaaaaaacaaccgaccaatgtgtttgagtacccgaccatattttggaaattggcccgccccaaggttttggctaatatttaatttgaaaacaaataggaaaatttcttaagtacggagtgttcacgttcatgtgcaaagagtgtcgtgatgacaatttccggcaggggaacagctgattcaaactcatcaatcagaatggcgagcagcaacgccttgagttcacccaatcgttttgccaagactgtgcaacgctgaactttgactgcacagatctgatcatgaagcaccaaaagaaggatgaaccggcaacgacgacgacgacgatggcaaagagtttccgctggatcaaagatgggggaaagtgaaccgagatggcacaccatgatataaggacgatctcattttgaagaatttatacttgttgatcaaatgacaaactctttctttgtaattttgccgagcaacacgcctggctttgttggaaataaa

SEQ ID NO: 73250 - DNA, 1262 bp, Heterodera glycines
atggtgtgccatctcggttcactttcccccatctttgatccagcggaaactctttgccatcgtcgtcgtcgtcgttgccggttcatccttcttttggtgcttcatgatcagatctgtgcagtcaaagttcagcgttgcacagtcttggcaaaacgattgggtgaactcaaggcgttgctgctcgccattctgattgatgagtttgaatcagctgttcccctgccggaaattgtcatcacgacactctttgcacatgaacgtgaacactccgtacttaagaaattttcctatttgttttcaaattaaatattagccaaaaccttggggcgggccaatttccaaaatatggtcgggtactcaaacacattggtcggttgttttttgggcgattcatctactaaaatttggctaattcaaagaaatttgcagaaaaagccaaaccttcagcttccatggcttttgctttcttcattgcggaagcaatttcctcatggattttgtccaagcgaggcttgcgtcccctttttgagggccccggttgtaggtcaagcagtgtttgagtgttgttgtctccaattgtgattacgtcatcatcattttgaggggaaaaattttcccgtttcgactcaccatttctttaaatttaaaattattataaaaaactcaaaaaatgattacttttgttctcaaacaccaattgatcattgatttttctcggggccattacgattaagaaatagtttatgattataattgttaaaagcataaaatgaacctgcgaaaaaacacgtaattattgattgatagtgagaggggtgttagcgcgcagcgacctccagacgggctgtcccttttaagcgataggccacgcccatccacaaacacatagacgagagagtagttgttagagaaagatacaacagggcgccaattcaaacacacagtgaaacccaagccaatttattgattttttacagattatggtactccctctgactgctgccctatccaaactgctaaactgtaaacctgaaaatttagcagaatatttgaacaaccccgaggcggtgaacaaagcgaacgcttacctggccggcaaaaaactcaaaacaacataccagggtcgtgattccaagaccaaagaggtaaagttcggcacattttcggtgaaagccgctacggaaacctacgcctttgagggatttcttggcaagtttccaaaaattcagtttcggtctaacacacatgcgttcagaggttaa

SEQ ID NO: 73251 - DNA, 1544 bp, Heterodera glycines
atgctgaaaaagctgccaaagccttgtctgattgtttacgatgacttgatgggtgacattgaggccaagaaattggccgatctgtacaccaaaaagtcacaccataacaatttttccgtgattttcctcacgcaaaacctgttcgataaatcaatgcgggtgccaaggtccaacgcccagtacatcttcctgatgcgggctcccaacgacatgcttagcattcgtaatttggccagccagatgttcccacgcgagcagggattcctgatggatgcctaccgacaggcgtgtgccctaccgtacggctacctgttggtgactctccacgcgaacagagacaacattatacgcctaaggacaaacattttcccagacgacgaggagagaagcatttttgcccccaaaaatggttaagcgagaacagaagatcggtgagcgggttgtgcacaactacgactattttaagaagttgggaaagacaacgtcggagaagaagcgccgtcatttgttgaacagtgccggttgtgaggaactgttaacgcttgtcgagatttgtctcaacgttttgaacgggagtttctgtctgagcagaaaacaaaagcagagacttgcgccatttgcaaaagacatcagacagttggcacgtgtgcgaagcgagaggggtgcgcgaaaactagtgcagcagtcaggcggatcactttttgcccctttgttggcccccattctgattgaggctgcccaatacctgctttcgcgcagcaataatggccaataaacttattctgctgccgtacgagcactacaaggggctggttgcagcgagggagacaaagaatgacgacgacgacattgctgagcggacaaacttgggctttgtcaaacgacaggtgaccgctgcagtacagaagcggaagggaaacgtcagcgagcggaacgcaatgtacaaccagcagctgcgccggtaccttaagatgcgcaaggaacataaggagcggcccgtccgggtacagctcagcaacggcgctcaactgctaaataaaacagtggagacgggtgtgcaggtacggcctggtccggacgaaccgaaggacaagtccgtgatggttaccgacgaagatgaagaggaagaaattgaagtgccaaagtttttaaccccaacaagccagacactgggaagcagccgatcacccaggaccaataagaaagcagcaaaacagcaaaaattgatcgagaagaaggaccacctgttggccatcattatgtctgatccgcagagattcggcgcaacagaccgtgggaaaatcattaacccaaagacgggccgagagtttatcgactcggacctggcctggtcaattgaacgcctggtggaccctcgcccggagaatgccccttcgccaagcggaaccaaagagttgaagaggaaactcgcacagaatccgcttgccagtagcctactcaatcgactgtttgttgggtctgggttcgtcggacaagtcaaacaaacgagaggatttgttccctcaaaatggacaagaaaataa

SEQ ID NO: 73252 - DNA, 2054 bp, Heterodera glycines
atgccgttgagccctcgcattggccacaacccgtcgtaccatgttgtcaaggaggtggagatcattcgtgaagtgatcacctccggtgggccaaccattcaacacgataaaatcattcatctgctcacttcgccaaataatgcccaggtacaattaataatttaaatttaaacaaattaaattttgtcaaatttttcagcgccaagaactgctccacaactaccgtactaagtacggtggtgctgatctggcccaagcgctgaaggaaaagttgccgccaagtgaagtggcgaccaacagcctgtatttggcactgttggacacaccggctgagcatgacgccaaatacttggccaaggcgatgaaggtggtaattttttcaaaaaattttactcgagacagtaaattcccgattaacaaacggattcgcacataataatagcttaactttggtaaaattattaaatccagggttaagaattttcgaaattgttttttttttgatcagcgatcttttaaaacattaaaagtatatttaatttaaaatcaaattcctcatatgatcaaaaatgcctaattaaagaaataaataatccatcaatcataattaattaatcaattaatattaattcttgctttcttccagggatgggcaccaacgaagacatgcttattgaggtaaccacataattttttttattagtttttttaaataattattttgcaattgcaaaatttgttccctagattttggtgacccgcagcaatgcccaactgcgtgccatcaaggcggcctaccagaagttgtacggtcatgggttggagaaggacctggcggccgagacaagcggcagctttaagactctgctgctcgacttggtcgaagcgaaccgggatgagtcgtaccgtactgatctggccaaggcgaagacggtactatcggattaaaaaaaaacaacttacattagccctcccctccctccctcccgaaaccgaaaaatcaaaaatttctaaccaaaaaggggaaattttttgacaaagtataccggtttctaacaaatttcgttaaaattttcttaggcggggcttgtttaaaatttttttagtccctgcccaaaatcgacaaaatgcttaatatcgtggacattaaagtcaaacaaaaatggctagctaattgaaaacaaagattcctgacaatcccgctaattaattaaattcgccacctattttattaataaatttaggatgccgagaaactttacaaagccggggaaggcaaatggggcactgacgaagatgcgttcatcaaagtgttggccaaccaaaacttgagtcagcttcagctgatgttcaacgaggtgagaatctaatttagatttaattaaatattaaattaattaaattttaaattaatttttaagtatgaaaagcttggcaagaagcacaccattgaacaggcaatcaaagctgaattcagtggagacgagctcagtgctctgttggcaattgtcagctttgtgcgcaatgggccaattggcgaaatggcggaaatgctgcacaaaagtttgacggtcagtcagcaaaatgccaaattttagaaaaaatattaatgacgtcattaaagtgcaaaagataaagtaaaatttgaaaacattaattaaaaaataaactaataaaggttgtttaatttcaaaaatgccatcaaaaaatagattcgattgtttcaagccaaaatttttaaaataaaatattttcgacgaccaccaaaacgccaaaaaacaagtatgaaaatgccaacaaaaaacaaattacctttcagaaaggtggtaaggacgatatgctcattcacctgattgtgtcccatgctgagcttgaccttggcgacattgcccacgaatatgagaagcgcttcaaggtgtgtgatttttgaaaattttagatttaaaattaaattccattttaattagactccgcttgaacatgcggtagagaccagtggaaagacgacgacgttgaagaatgcgcttgttcgcatgatcaaaggcaacaaataa

SEQ ID NO: 73253 - DNA, 991 bp, Heterodera glycines
atgagtgcactcattatcattgtgtacacattttgttggttctttgtgttcaaatttgcttcaacctcacaaagttggtttgacttttttgttggacgcgctttttttaaataaaaaattaattaattatttttactattctaaacagacgtgacagaaaacaatcgcaaactgaacaaatcgctgatgttcatcatcgcactaaacctgatcggagtgttcacaaaaatcatcattgatctgattttgcaagcttgttcggtggccaacgtgttcatccatataccgtactccaccgtatattccttcctcacaatagctgtgtacagtgcaaatgcaccggtgctttacataatgaggtagcaattagactgaaaagttgaaaacataggggccatataggttttatttatcagttttgtactaattacgccgattttggtgtattttatattaaattcatcttgattttccaaaattttaacggaaacgaaattttttatatgaattttataaatttacccgtattttaaaaaaaatgtttattttaaattacttgcaaggaattttgcaaaatatatgaattaatattaaataaaaatgcacacaaaaaaagggcctaaaactctctaaattttggaaaatacacataaatataacaaaatttgccaaaactaaaagcacagaaatgtttacaatgacattgttaataccgtagaattcttttaaagactcgaattctgtacaaagataagatatttaaactactttggcgttttgacgattaaaaaaattaaaaaattaaaaattcagctccgaataccgtgcgcggtttgaccaacatttcccatgggttgtcaaaatatacggcaaaattgctcgcagtacggcaacagtgatgcctttggcaacacctccaaggccatggatcatcattaacaatggcattggcccagcaatgaatggagggatcacaccaagacacatttaa

SEQ ID NO: 73254 - DNA, 467 bp, Heterodera glycines
atgtataggttaattgagaattaattaactaattctattttaaattttaattgtagtggtaccaatatttcactgcggatggtccacaatggctaatgctgctttttatgtacggtttccgtgcactttgggccaccattggcattctgttcgaccttggcattgtgtacatcacagtcaaaacgccgtaattaaaaaaaataaaatatttttttaatataattttttttatttagttgtttgcgcagcatttgcaacattttgatagccacagaaagcttttgtgcactggtattgaatctcggctattttgtcagcttttttgtcgtcgcttccggcacaaaattcatccgttatgagcactgtttttgggcactcattgtgccatgtttgtttggcactttggcacagccggtgatggtgttcaccgggttggaccgagtgtttgccgttgcgtgtccattttg

SEQ ID NO: 73255 - DNA, 1817 bp, Heterodera glycines
atgttatatggccttggggaatttgcaattttttgggtttggaaattttgcatgttttagttcagaatttttgaaaaattttctccaaaattttccaggggaccgtgttctttttcctggaatttctcaattacttggatcaactgaatgccgagccagagaacacggaccaaatttggcacaaaaagctgcgctcatggctcaaaaacacgggcggatcgaaccaatgggactcggacattgtgtacacggaaacgggcactttccgagcctatcggttacaggtgagaacggcactcattgattcgttgattttgattggagaattttcatgactcaaaaagtgatcaggcccgttgattgagactccaactgatccaaaaagagatcagaatcattgattgagactcccacttttctaaaaagtgatcagaatcattgattgagactcccacttttcccaaaagtgatcagaatcattgattgagactcccacttttccaaaaagtgatcagaatcattgattgagtccccaattgaatcagaaagtgttcagactcattgattgagacttaaactgactcaaagatttaagctgatccaaaaagtgatcagaatcattgattgagactcccacttttctaaaaagtgatcagaatcattgattgagactcccacttttccaaaaagtgatcagaatcattgattgagactcccacttttcccaaaagtgatcagaatcattgattgagactcccacttttccaaaaagtgatcagaatcattgattgagtccccaattgaatcagaaagtgttcagactcattgattgagacttaaactgactcaaagatttaagctgatccaaaaagtgatcagaatcattgattgagactcccacttttccaaaaagtgatcagaatcattgattgagactcccacttttcccaaaagtgatcagatccatttattgagactccaattgatcaaaaagtaatcaaactctgggctttcaggtggccatgaaaaatattgtggagcctgatcagcacaaattggcggccaaactgttgcgtgaaattgccgatcgacaaccatttcgcttggaaatttaccatgaggcgttcccatttgctgatcaatatttgatcattcttccgtcaacctatcggaacgtaaggctgaactgatcactgaataattctttcaaattttttttaaataagttttcaaaaaaatcttagaaaattgttctaagaaatttcaagaaaaggtaaaaaaaaatttctaacgattttttcaaaattttatgattgatgaatattaattttcacaattttccaaaaaaaaaaaaaaaaattaataaataaaaatttttcaagatttttttataatttaaaaaaaaagttttccgagggggatattgaccgatcaaaaaacacttgaaatctgatcaataacttatcccctttccaaaggtgttcatctcgttgttgtgcatgacgatcatcgccattttgttgatcccgagtattccgtccggtaataaaaatttaaaaattttcaaaaaattccccttcattttaagccattctgatcattctctccattgtgtccatctccacgggcgtgttcggctacatgacattttggggcgtcaatttggacgcgtaaatttaaaactttgaagaagaaaatacataaaatttccggcattaaaataaaaaatttcccaaaataaaatttatctttatttaataaattcagaaaattttaaacattatttttctctacgaataaacaattgtctgccggca

SEQ ID NO: 73256 - DNA, 1170 bp, Heterodera glycines
atgtcccaagatttgttcggccacagcaaaagtgaggaatggaaggatttggacgagacgggcaacgactcggacaaactcagccaaatgtatgtcggcattcgcccggtggacaaatgcctgcgaattgcctatgccaaagcgatggacatgaagcatcaggtttgttaattattcacacttttaatttacatttgatgacaatttttggcactttaccaagttagggtacccgaaaaaccaaaatggaggggggggggtgcctttgtagttcgaaaaaaaaattttttttttttgccattataagtcgtgcaaaatttgttcgaaaaggttttcggggttcactgacacgaacttgacatcagtttttgaccaattctttaattcgaactcgaaggaaaggtcaaaaaattccaactttttcctcgcccccccccatttttcgaattttttttttcaaatctcgtgaaaacttgtttctgggggtttcacgaattcagcacccatttcgaacaactagaattccagacccgaattcggacaaaacactgaaaaaacaattttaaaatctattttttaatttttgcgtcaaaaagtttggtggcataaatgaatttcgaaaatgcttttttttatttgagttcggaattcgaatagatgcacgcacgattaagcttttgtgggctatattttcgtttacgagaaaaatccctaatttcaaaccaaaaaatgaatccaaattttcaaaaagttttaaatgagcaaaaaaaaaaaattttttttttaacgaatcgaatgtaaaaaaaattatatgcccctcaaaaatggcttattttaatttccctttttttccccaacacagaaagtgattgtgatggtggagaacgacaacgattttcgcacctacgacacgaaggaagtgcccgtgggtgaaatcatcaaatgtgagtttgaatttgttgtggcaaaatgttgatgggtaattggtttttttttttgtttaattttcatttttgcactaggtcgtaacataattacaatatacttgatttagtttttgataaatatttagtgtatattgataatatgccattctaaattcttaaaaatgatggatatgcattattttggcgtaaaaacaagcattttcaaaatgtttggcgcaataaa

SEQ ID NO: 73257 - DNA, 1425 bp, Heterodera glycines
  unsure (1)..(1425): unsure at all n locations
atgaaaaaattcatgaaaatcctgaggattccttgcaaaatcccatggaattatttaaaatgggaaatgatgcttcaggttgacaatggtcatgggtttggtgcatgggctggtgttcattccggtgttgctcagctttttgcccatggcattcttccaaattcggcacaaaaaaccacaaaagcacaaagaacaacaaaaagtggtggcaaaaacgaattcgttggcggcaaatggcacaaaaagatgacaattctaaaaatggcactgatcagaggcatttccatatccggtgaagaaaatgactgaaaatcttcaacaaacacacattatggccaaatttggcacattttcattttgttttgtttttttttgacaaattttcattgaactttggtttttaggggtataatttccattttttccggcaaattttcatctaagtttaatttttaaatgagttatattttccattttccatgcaacattcttttatgaccttgaccatttttcatccaccaaatttttcggtggcacaattggccctcgtgtcgggtgtagaattgggtgttgttcaattggaacggcacaaaactcaacaaaacaagagccgtttttttgtgccctacaatttctgttcttttttccttttttttcttcttcaaacagttttttgccgaaacggaaaaacgaaaattgaatttaccgaatattattatttgttgcacatatatttttttgttgctcaaactcattgaaaaggcatttcttttttttgtttgatcaaaataaaaaaaattgattgatcgaaatgttgcaaatatccgactttttttggatcaaattcattggcatagcatggagggggactaaaggggctataaccccatgaaaaagaaaaaattttatataccgtatatgctctaattatagcccatgggggattatttttncacctcctcagaaaaggggggataattagagactgggagattatgatagagggattatttttcaaacacctcgtagactgggggataattggagactgcgggattaatagagactgggctataatatagcatatacggtagcctcctttcctgccgaaaacgaaaatattttttaactttttcctgactggcgttgtttatcggtatcgccggtccctacctccaagaaatttttgaaaaaaatgcggcaaaaattaaaagaggtcgttgttcagagtggttaacccccccccccagaaaaaaaaaaaaaatctcacacttagaaattaaaaaaataattggaaattttttcctcagaaattacaagaaaaaaaaaatacttttcaaattgaatttttcaatttcggacagtttattttattttttgaaaaattagaggcaatttgggttcgttcactaatgcattagacaa

SEQ ID NO: 73258 - DNA, 1575 bp, Heterodera glycines
ttgtttctgtcgtctgtgaggagcattatgactattatcatccaacagagtgagaaaagggcgaaaaattaattaatttaaattaattttttacttttttaaaatacaaaataattattcaaaaatcatccaatttttacagaaaatggcttctcggcgtcgtggcattgcctttcattctgtgcggcctttgtgccaatggaatgtccgtcgccattttttcccaccgccaaatgcgccaacagtccgtcaattggtaccttctcgttttgggtgcgattcgctttttaatttaatttattttaaatattttttattttcctccatttctctcctttttaggcttcagtgatttgatcgttttgctcggcgccttcttcgttctcactttgccgaggctaagcgaaattttgcactggtggagagggacggcgataaggtgaaatattcgaattcatttccatgagaaaaaatgaaattaaattttaaaataaaataaaatgcagttattattcgacccccttgatgtattcgctgatgacaatggcgcaaacgaccaggtgacccattaattcattcattcaatggcaaataaagcattgtcttatccccccccctttttcgcagtgtttggatgaccgtggccatgtctttgcatcggttggcacccccaaaatgccaatgtccgatttgaaaaattaaatccccccaaaggtttgtcggcgtgtgctttccctaccaatccggcaccgttttggccacacgaaatgtcaaatcactgattgttggcattctttttgtggccatttttttcaatggatgccgattttttgaggtttttctcaagtttccttcctttctccactttatccgttaggtcagcttccaagtgtgtcggatgaagccaataaatgtcgaattgcccgtcctccgaatgaccgcactcagacaaaacgaattgtaccgcaaagtgttctatgaatgggcgtacactttggtcagacaaagcgccaattgggcgccaaattgacaattcaaaaaatgagctttcgtttttcagattatgttcgccattccgttcactattctgattgttgtgaattcgatggtgattttggccattcataagtaattaaaataagaaaaatttaagtatatttaataatgattttttgaggtcacggaaaatccacgccaaaatgaacgcgcataacgacgggattcggaagcaagaattagccaaggagataagcacctccatcatggtacggtgtgaaaggggtactgtatatgcaaaactgtaatgagaccatcgtttagcttgttgccattgttatcgcctttctgttgtgcaacactttggtgagttgtttttgaataattatcatcgtaattattccgccgttttaatccaacattagaacaattaccgtacccaattattttaccgtaccttccaccttttctaaattccccccgcttcagactttcgtggtcaatttgatggagaagttcgacctgaatgagctgtacgtgctgctagtgccctggagcaatatgctcgtgctgtgcaac

SEQ ID NO: 73259 - DNA, 1149 bp, Heterodera glycines
atgacgggcggcacggaacgcggaatgaacatgcaggacggacaggtggaggaaaaaggacggaaaagggcaaaaagggaaggcaatgccatggcatttcaggaaaaaatggtaaccgaaatttacctcactcgcctgctgacgatgaaggggactctgcaacgattcatcgaggaactgctcgaggcggtgttctccgtctcctccaccccccaatgtccgttcccgccatgcataaagtacttgttcgacttcttggacgaccaggcacacgaacttggcatcaccgacccggaggtaggcaaaaatggacttgggcaatgacaggggggaggatttgcgatcacttaccattccgattactggctacttcatttcctatctctctcccttcccatttctcaggttgtccacgcttggaaaagcaacgcccttccgttgcgcttttgggtcaatctgatcaagaatcccgacttcatcttcgacatccaaaagcccaccaaaatcgaagggtccctcaacgtcgtcgcccaaactctgatggacgcctgctccacgcaagagcaacacttgacgaaggattcgcccagcagcaagttgttgttcgccaacgaaatggacaagtacagagaatgggtgcaacggtaagcggacagagggtacggtaatgcaaagcggacttttgtaggtattacgcgaccattgccaacatggagccgatcagtcagtcggacatgagcatgctgctggcggacgagtcgcaggagcattcgcaggagttcatgctgtactcggcactgaacgagctgtacacatacgtcagccaaaacaaagtccgttttcagagcaattcacttctcttccccctttctctccctacttctctctctcgctctctcctattaaatctctccctttactctaatccactctgatcacccctctctctccctaaggaaatgctcttcgacgaattggcccaaaatgagtttgccctccagcagcaattgcccggtgcgttgcagaaattgttggacacgattgagtcgccgcccgaatcgttggcaccgctcaacggcgcgcttctcgtcgacgcttacgccgactcaaaggcacgcctcgtgcagccaaacgcacagctcggcaacg

SEQ ID NO: 73260 - DNA, 620 bp, Heterodera glycines
atgaaacgcccgcagcgtcgcacccgcgtcggtcgcttcgcgcgagtgccctccggcggaactgccggtaccgccgccgccgacaaaaaatccgccggggcgatggacaggcgaatttgtggtggcagtgggagcaccgcggacagcggacagtccgcccgaggcggacgatttgtcggatttgtcggagatcagcgacagattgtaggaggaggaagtggcattgtgcggcacaagtgccaaagtcgctttgtcttccaccgaaaacagaaaaagacaatgccaaagcaaaccaaaggagtcgatatgccaaaactcactttgtaatgtgccaaagtgttgtagcgccaaaagccattttcacagcgcgaagtgccatccaagtcttggagaagcattcggtgggtggccgtgcgcagttccaagtcgacttcggagggcaacggccgttcggagtacggtgtggtacggtatttggcatccaaacagcgcattttgacctgaacagtgggatgatggatttgtgaaggatgccagtgaatataagtgcctggctgatcgagtcgcagtcgagcacgcgcacttgcgtatcgcaaatggcggaggaacagtccgccaga

SEQ ID NO: 73261 - DNA, 1430 bp, Heterodera glycines
  unsure (1)..(1430): unsure at all n locations
atgccaactgagcgcagggcgcagttgtccgtcgagcggcccatgaggctcgactttgggttcgacttggacggcacactgaccgggtccgtccccccttcgctttttcttccgattagtcttacaattcgcccccccccctccgtttagcaatttgactgctgatcgcgctttccccaagctcctcgtcttccccgaccctcgcctcgtccctctgcccgaactgctcgccatccgtcccggcggtgacctcgttttgaaagggcagaatttgaatttggccgcgtcgccgcgtgatgtgcgcgtgtcggtgggcggtttgccgtgcaatgtgagcgcactcgcgtccaacacattgacttgcgtgttgcccgcgcatttggacgacgcgcacgacgacgcggtggacgttttggttcacatcggagacaaaatgtacacacgaagctaaaatgttgcgaattttaaatgtcctttcagtgaaaaggttggcgaagcgtcccaacgcccgcggggccaagacccttcggaatggctcattttggcggtggcggttgcattcctcggcgttttcctcgccttggcactgttcgtgttgtaccgcagaaagtccacttctcacaaccgccagttgcgctatctgaaggcccaaatgaattccatcgaaatgcgtgtcgcgcaagaatgcaaagtgagcggaaaaaagagggacaattagagccaaactaattagttaatgatgggctaattaacaatgttactaacaaacaaacagcttaccaaagattaaatgatcaactgattgacaaattacggactgatagatcaattagcatttctgactcattgccttcccccttccgattcgcaggaggcctttcacgagctgcagaccaacatcaacgcactcgcgggcagcgtgccccagggcacctcttttatcccttttctgccgtacgcggattatgccgcgcgcattctgttcccgaattaccccggacacacccatcccgcgctgtgtcccctctcagttgaccaggaccgtgccttggccattgagtcgggacttcgtcagctgcactatttgcttcaggtggccaaagaatggcacgcaaattacacgctcaaaatgccatttcccgacactttcagaatcggcactttttggtctcttttgtgcgttccatcgacgccaacaaatatttgctggtgaaggaccgcgtctatgtgggctcgttgctgatggttatccttcaggtcgagcgaattagtgccaatgggcaggngttaccgtaccctttcaggagaagatggcatactgtacggaagtgttgaagcaattgctgaaggaactgatcagacgaaatgctgacggaaaattccatccgaagaatttgttcagaagagcggaaagcgtagccgaacgaatg

SEQ ID NO: 73262 - DNA, 414 bp, Heterodera glycines
atgggcgcttcttcttcgacagccgctggtataaacggaaaagaacggcggaaaagtacggaagaaagcggtgcggcacttttggaagcagacaaaagggcgcgaaggtgagcagagaaagggacagatcatttatttatgaatcaatttcagattacttcttcaaaacgggctccttcgacgcaaatcaaaggctggcaacaacaccatggcggaggacgaggcgggaggaaacagctggcagacgaaagcccattccatgtacgatctgcagcagatgcgcggaaaatcggcggaagccgaagagcagctgcaaaagggggacgacgctgcggggcacgaggcgacggaacgccaaaatggggcggggagcacaaatggcaaaaagcatcggttgaacaaaatcgtcataag

SEQ ID NO: 73263 - DNA, 1434 bp, Heterodera glycines
atggcaacaaatgaccggcagactgaaggaatttttggagtcagtggtacgaaaggtgagaagacgcgaattctgcaaattaaatccaacaattgcttaatctcaggtggacaacatcgaaatggtcgaacgtttgtcgcgcaaatacggcgaggagcacgtacagctcaaatgctttggcttcaagccggacttttgggtgagtctggcggacgcaatggtaagcggataaattgggaaggcttttcaagcccattttaattcactgcttttaagactgtcgaatgcgtcattttggaccaagccacgcatcaggtgaacaccaaaagttgacaaaacaaaacaaaaaatgggggggggagggaatttgtggcatttaacaccaagaaaagagatagtaagagaagggtgggactgatgtgccatctcaacatttggggccagaaagtggaacatttcgcttcatccctggtagtgaaaacaaaacgaagaaaagagacccatttggcccatactctcgaatatcgcctgacatcaaaaatgccctttttggaaatcaattttgaacactcatattctctgttcatttggccgatttgcttagccttcggacacgatcactgcttggtctctgctcgtctccgttatgttcagctccgtccgggacggctattaccaggcattgcgcgctgctcgcatctcgcaaaggcatcgcaatgtgcagcagcgcgaaaacactcacaatttgggcaccaaccaaacaccaaattccccctcgggggtaacatttagtgcactatttatccattatttttttctgttaaaaatgcaaacatttgcccttccgccacaggtcgaaaagagtgcgtcagccatcgaattgcagtcgcccgagcggaaaacttccggcaacaacaaacaaaacacattgaggcaacagatggagcagaagcgggagaagtcggcttcgccaaatggggcgagcggagtcattgtggaagaggtgggcaggcaattagcaattaattgcgcattcattaccaagccaatgctatctcattcattaagaagtcaattccggttcaattcttctgaagaacatttggattcaaacatacattttgacagcttttaaagtgcacgaaaattgggcacaaaaaggcaaaatataaaatgccaaaatttactttgataaaatggaaatgctattgctcgctttttggcactttttcgatattttttggattcctttggccaattagtgccgcccaatttgcgtgacatccctttgaagtgcgtgattgaacctttgttttgatctctgttcctaattattctgattatgtccattcatttatattttttcgtcattcaatcatcgcattaattaagattaattgatcatcatcactttccaatattttattgtctaaa

SEQ ID NO: 73264 - DNA, 1423 bp, Heterodera glycines
  unsure (1)..(1423): unsure at all n locations
atggtgttgaactgtgccatgaacgaaatggaggtgaacaaagcaaaaaacatgtccaaaattacaaacattccaattccacaaaaaggatttattaaagccaattttagaaaggatttacgcggttaccggtgccccaccccaaccgacggccttccaaaaaaccgaggaacagcaccgcaagcatggccaaattggcacctaagcaatggcctcggcttgtggccaaaaacggcgaatgcatcattcgaccaaacaacctacgcaattcgtacacaatttggtcggtgatttgttcagaattattgtttgcttcttctacagtatttcttcctcccccctaccgtaccctcttccccgttacagtatgcgcaactggttccatttgatcattgaacattcgtggcgtcgcattttcggtctgttcgcctgtggctttctgtgctcatggctcacttttggcctcttctattttctgatcgtccaatttttggttgagtatcaagtcagtaataaatttaaaaaaacatttagcgtttgaatttgatcagaaatttcgcagggattgcccgaagaaaatcaatgcattgccaacgttcaatcattcgccagtgcctttttattcaggtgatttttggctcaaataattagcagatcatttcattaaatgttcagccttgaaactcagcatacgataggctacggtacccgatacatgaccgagggttgtccattggcatacgctgtgctgtcccttcagtgcattttcggcgtactgctacaaaccttgctggtcagaatttataacaaaatcaataaagtattcgataatttgcaaaaaatcaatcaattaggctggcattgtgacggccaaagttttgcggcctaagaagcgcaagcaggaaatgcggtttagcgtgcaagccgtgatcggtccggtggacgacgaggacccacggccggcactaatgtatgacaaagcggaaaatatttatttcaaaaaagttttatctttttaattataggattcggctagccgatattcagcatcgcctttatattgccgagtcccacgttcgtttgtatatggccacaacaaaaatcaacaaagttgtttattcgagaaacaaactcattgaattaatgactgaaattaactagtaataaccttttagcgtggtgaatgcgaattgatcggtgtccaggacatgaacgttggctacgacacgggcatggacagggtgcttttactgtggtgggcaaattaaaaaatataaatccattttcaaaattatctgaatttaaataaaggcccgtcgtaatccgtcatatcatcgaccccgactcgccgttgtgggagatcacggaggacaagctgaattcgtgnccattgnaactgatcatgaccttggaaggaatgtag

SEQ ID NO: 73265 - DNA, 441 bp, Heterodera glycines
atgtcttatgcttttttgcacattaaacaagtgaactcactttggctttttgcgcagtttccacagaagcatttggtgcgcgagtgtcttcatttgcgtcgcaacgaaattcagaaattcaagcgcatggccacatggtgaatcgttaacccatcagctaagccttgcggtgtccgtttttgaaaagaaatccgaagagctcgtagagcagaccaagcattttccattaccaatcaaaaggaaactagcaaaatgctaaaaaatttactgtaaaagattagtttcagggcagtggaaatctcgacagtggacatttgtacagtgaattcgtttgtatagaagaggacttgaacagtgggcattacgccagtgaatgaatttttggaaatagtacggatggtactcccccccccccttttgaaattctaaatatgcaataaa

SEQ ID NO: 73266 - DNA, 773 bp, Heterodera glycines
atgttcgcaattgcgcctgcagcggcgagggtggcaccgttatttctatggtgcacaacgaattcggcacaaaaaatgtgtgtgtggcaactgttcgctgtgcttgcaatagcgtgtcaaaattgacttatgaactaactaagtggggacggcgtaaaaagcaagtttattttataagaaatatttggcaccaaacatgcaaggaaaggaaaaaatagaaaatcaagagagaacaatttttgactaaagttttggtactttttaattatcggtactcacaatcagatttcactttttttagcaatgaatttgttttaggggttttcagggtaggatccgatatttatttcaaccaattccggacccggactcgagcaaaagacaaatttattttaataattgggttatttagcaatggagaaccaaccaccaacatgagttgtattcggttaattgtgatgaaaaacattcaactggaaaatgttgagaagatatttttggctatgcccgaggactattcattggtgcgcatgaatgaaaaaatttgggccaataattttatggacgaaatagtgaagttgacgaattagttgtattttcttttgtcgcataaatgttatttgaagaatacccatttttctttatttctttttatttaataggtcgtgcaattaaaaaactaaacgttggaaattaggtgtgtttgtgccaaattgtttaaggatttcattgcaatgcttgccaaatttagtcaatacccgtatcttttttca

SEQ ID NO: 73267 - DNA, 1170 bp, Heterodera glycines
atgatcaatgcacggcgcagtgccaactccgccgccgttggcactgactgtgagatcgtgccattgtcaccactcacggtgatcgaccagtactacgaacggctggcggagcagcggtgagacattcattgcatttttcagtagaagataaattcagaaaatatagagaaatttcttaataattattgaaatcctaatttaaaagcatggacaagagcaagaaaaaaacttgtttatgtttcttttgtttcagttattcacacaagaccatccacgagctgttcaaccaaatttgtggcaccaaaagtgaagctgctgcagtcattgctggtgctgaacagcaacactcccatcgcccatcgctggtcactgtgccgaaggatttgctgtcccggtggatggcacaattttacggggacgcgacaacgctttggatggccaggaaaaaggtgaaacaattgttttttaggataagtaaatctttttctttgaaatttactgacctaatcctttttttaaaattttatttttaaccaaaatcttttgtaataaatggaataaataggctaaaaagcgaaatttcttcaccgagtccatgttgaaaagtatgggtttgttcccgtgcctttctagctcggaatgaccaaccattttcaatgccaagttctcatcgccttatatttttgtcagttggccatacaatttgctctgctcggtctctctgaacacgcgctctttctgtcctcaatgcgtcctgacgcgctgttcctggacctgtccaccggccaactctttttcaccgactacaaatttgacctgaccaaaaaagtgtgcgagacaatcgccggcaaagtgccgttcagtacgttcttttctttttactataaataacactaaagggttgcttcataaaaattgtttttctgttctgtgaaaatcgttcttttactgtttgggtcttaatttgtgtgaataaaaacgtttaaacaggcagggataatttcgagaggaaggggacaaaatctcgccgctgaaattttttaaaaaaatttttggggtgaacccattttaagaatttatttatttttgccaacatttttgtccattactatgtacatttaatttttgcagttgaacttgacgcaaatcgtcctgtgcccttccgtctga

SEQ ID NO: 73268 - DNA, 128 bp, Heterodera glycines
atggccaccggaatgatttggacccgttactgttttgtgatagtgcctaagaattactacttggccagcgtcaacttctttgtcggatgtaccggactcgctcagatattgcggattgcgcactatca

SEQ ID NO: 73269 - DNA, 484 bp, Heterodera glycines
gttttgcagaatatatgatcaaattctgcaccaaaacgtgtctaaagtgtggcgaggctacgacgagcaaagcgaacggcgcaaaatctgtggcggcggtcggaccaccgcccatcgaattaatcattgaaccgatgatggagacaaaccacgaaaaggggagaaggagcagtaacagaaacaacagcagcagcggggggaggagggaatgtgtggacagaggcgaaaggtaatggaaaaagccaaagggagggaaggaaaggaaaagcatgacggagggagggaacggcacgaaacgccaaaatgacagatgcatccaatggaagggcgatggactgtgcgatgccaaaagtgggacgactaaattcaacagaggacagcgaagggcgtgtgccaaaacgtgcggcgattgcaaatgatcagaagcgaaagaattacataaatgtacaattacttattgtgctttgcataaacacctaaaata

SEQ ID NO: 73270 - DNA, 1383 bp, Heterodera glycines
atgaatgaaaaaaagaaaaggtattctgccgaagataaaggcaaaaagaatctgaagaaacgaactccaacgagtggaaaatgggagaaacagaaaatcagtcgaagagcggtgggggaggaaaaaggacaaacggaggagaaaaaggtaaacggaacggaccacaaacattcgtttcggcctgcctttaagccattcactgaagaaccaatgggttttacgccaacgccgcaaattcgcatcaatacaatgagtggttggagatggacgacggtgccgaaaaggcacaattattggacttcgacaacaaaattaatggtggaggaccgaaggcaccgaagcgtttcgaaatcagtcgagaaaagtgccgaaaggcgcgaaaaggtaatttattagaaaggaaacgaaggcacagtaattagtgagagactgcgagacagagagagtgtgatagaaagagggagaaggagagagtgagtgcaagagagagggaggaagagaaagacagagaagagaattttgaataccgtattttactgaattagagcccccggctctgtttttcaaccccactcaaaaggggggctttatttcaggatggggggggggggggttctaattgagtaaaatgataaattcgattttcacagttaacaaatggtccctcttcgaaggatggccatcgcgtcgcaattagcagcagcaacaaaatgagaaaaggcgcaaaaacgccgaacaaaaaacaacaacaaaaaagtgaatgtgctgaaggggggaaaagaagaagagaaaattaaaagtgaaggccaaaaagaggaggagcccattttgcaaatgctttgggaattgggagaaaattttgacgcattttttaaccgaaattttgaggtggtggaaaagcgagttcaaattggcgcgaattgaggtggaaaagcgaatgaattattgggattgtattatatttttgctaaagttccactgaacagtccatttctctgatgttgcgctgccaaaacgtcgacacgcgccaattgctcccctcggcgacgacgtgtcgcaatttgcgaagtgataaggcaattaaaatgtcaaacgattgccaactgcttttttttgttagttcaggtgtgcaactatctgttcaaagaaattgacacacggacaggacaaagggacatcaaatgcaaccttcagggtggaaggggacaggggcagggaagtgctgaaaatggggcggggagggaatgccgaaaagtgggcggacggggaatggaagtgccgaaaatgtggcgggggagggaatgcctcttttttggttcattaggcgaggggcagaagggtgctcatttttggagagttcagtttatagcgtccatcaataaa

SEQ ID NO: 73271 - DNA, 3303 bp, Heterodera glycines
atgctcatccgttttcgagcgtgtcaagtgcccgtgatcgccgacgtggagaaggcatttctgatggtcggaattgaggaggcggaccgtgaagtgtgcaagttcctatgggtacgggacccattcggaccgttgacaacgagcaatttggtgccctaccgatttcggcggttggcattcggcttaacacccagccctttctgcctggctgcggtggtccgccatcatcttcgtaaatacggcacagacttcgccgaacaactcatccgggacacgtacgtcgacaacgtactcattcccgccgacacagtcgaagaagcgacggacaaggcacgagaggccaagcggatgttttccgaggcccaaatgaacctgcgggaattcttgaccaacgaccgaggtctaaacgacagcttcccggaggcggacgcattgggcaagacaacggcaaagatgctcggactcgaatggaacgcggagaacgacagcctgcgaattgtctttccgggagacactcccgacggggcgcaccgcagctcaagaaggacagtcctcaggaccatcgcacgattattcgacccactcggactgctggcaccagcaacactcaatgccaagcagttcttccaaaagctgtgggactccacccacagctgggacgcgcctctcgagtcggacgatgggcgagaatgggacagaattttggcaagttgggagggacaatcgatcactattccccgaggagtgcgggcggagggcggtcgcccggtgcagctgcacgtattcacggatgcctcggagtcagcttacgcggcggtggcttacctccgatcagaagggcaagacggaagagctcactcccgactcatcatggcgaagtcaaggttgaagccgaagaaggcggctgggacgtacaccatcccgcggatggaactgatgggcctggtcgtaggagttcggctcgcagcattcgtcagagcgcagctgcatcgcccaattgcggaagagcacatgtggagcgattccatgatcgcactgcattgggtgaggaaccgtaccccccagccccaattcgtcgcgaaccgattggctgagatacgaaaagcaaccgccttgacgttcggacatgttccgacaggagacaagcccgccgacgcagcgactcgggggttctcccccgcacagcttcagcaagccaatctctggtggagcggaccgacatggcttactaagccgtgtgagcattggcccaaggaacttacttttacagtggactcggaagacgggggaacctcgctggacgaacgagggctgaccacatttgttgcacggcgggaggacactcccgaaacttcgacagaacggactgactggctactcgatcggtgcggccggtggacgaaggcagtacgagttatggcgtggatgcgacggttcatcactgggacacatcgcccaagagatgacggcacgggcgaccctcggtgccaagacacgagtcacgggcggtgcccgcccgtcctaagcaacgaagaattgacgcgagcaaaatggcagctcattcggtcagcgcagagcgaatgccaagcacgggagggcatacggaccaaagtggacggcaacggagtgaccaggctgatcagtcggatcggctggtgcgcggaggccgaagtcagtaggccagtcatactcccgaagcactcaagggcgggagcactcatcattgacgacatccatgggcgacttcatcatctcggtgtagacggaacgctggccgaatttttgagggactggtggtccccgagcgcacggcagcaggtgcgaaaggtactcggccaatgcaggcagtgccgacgactcagggggatgccctaccccctaccgacaatgccgcagctaccgatggacagagttcggcggcgcatcccgttcgagtcggtgggccttgactacctcggcccgaccgtgaccctcgacgcgaacggacaacgacaaaagacgtgggtcttgctgatcacgtgcctgacgacgcgagccatttacgtcgacgcaacacgagacttatcggcacaaagcttcatctccgtcctgcggagattcatcgcgcgccggggtgccccgagtcggattctcagcgacaatgccccaaccttcacagtggtgggaaaaacgctgtccgacttcggcatggcgggagatgatccgcggcattttacggactcccgtggcattcagtggcgtttcactccccagcacacaccatgggccggagggatatttgagcgagcagtccagctcgtaaaacgagctttgcagaagacgctgggcagtgctgtgctcggctatgacagcttcgccacgttactagctgaagtggaggcaacggtcaactcccgaccaatcacttacgtcaacagcaaggcgggagagcctctcccgctccgcccaatcgacttcatccaagagaatgggcggctttgggtggacccacccgacacgactggtcaggcacaggacgaacggcgggacccgccgcacaagcagctagccaggcaatggcgggagtcacagcaacgactggaacatttttggcgacgatggcaccgcgagtacctaatgacattgcgagaaaaagccggatggaaccatgctcagcggcgtgtgaacgcacccgggacaccgaaggtcggagacatggttttggtggaggataaatttcacccgcggaacctatgggccatgggccgaatcgaggaactcagaggatcggacgggcacgttcggagcgtgctgatcagaatggcgaacggaagaatttgggggagaccagtgaataaaatttgcccattggaagaagcaccgccaaaaatgcacgaccaagctgatcaagcagtacatgaaccatgcggagacgacgcacgggcagttgagactcagagcgaagtgaggagtcggaacgaactctcggcagcaccaaaagaagaagaaaatgaaggaaatgtgagcgaagaaagtgccgaaaagcgaggacgagaagttgaagctgtacagcccgacggaagggttaatcgagaaattcggaacgacaattctctggggaatggccccgacgatccggacgagaaattcgatgacgcaacaacgacggaggaaatggcagttttcgaaaaagcggcagaagtgccttcggcagcagcaggagaaacgggaattttggcacacccgcattcggctccgagacatgagaaaaaatatttgggagatagttcgacggccccaggtctcctcgatgtccctacaaaa

SEQ ID NO: 73272 - DNA, 1336 bp, Heterodera glycines
atgcgcagcaccagcttttggcagaattcatgtgggctcccagcgccgtcctgcctcttctaccggtgggcagcggttccgtcgacgaccacagtctacgaggagtactcgtgccttgagtgggacatgcagataagtgcctgggtggaattggagacgaacagcggtcgcgtggagtcccagcgactgaccatccatccgggagtaccagagcagtgggggaacatgaccctatcggtcgtccccacctctctcccgcctatgcctgtgctgtccgctcacttcatcaccgacggacgggcggtggccatggggagacctctcccctccgatttgcattgccccgacgaggaggccgcacggggctttgacaattgccagctgtccatcagcgcatgccaaaaatgtgcgcctgaccatgacaacggcacggtgcattgccattgccgggaccttaccattggccgagtcatgaacgaccctgagcatcgtctaccattggatgtcgctcgacttcacctccacaacagcggaccagtcgtaaaggcggaatttcagtacacgcctgtgcaggtgcacatccaactcaacggattggagttggtcagcgagtacagcaacacgaagtgctgggtgacatcacccaaactcagcgggtgttatcgctgtgtcacgggcgcagcgctcacagcctcatgcaggacggaccacggaatggccttggcgaaggtcaaatgcgcggatggaactctgttcgcccttcattgcggtggcaacgactcgacaacgacggaggcaataccattcgaccgggcggaggtgttcacggagtgccgggtgaaatgccccgcggggatcacgaactttcggctaaaaggggagcttgcctttctccccaagcagcagcagttcggcttcaatcagcgagactcaaccggcgggcgggtcgagcccgggattagcctcagcctacccgactggcgaatcgaccctttcccccttctccatctcttattaagcgggaaaggactgctagtggcggtgggagccaccgcgatcggactggcagcgctcctcgttttcgtcaagttcagtccgcacttcagagtgtacagatcattaatggctatggccctaattacggtggtaatcccgatagtggggaccaattcagcgggtgaagtcacccgggccaaattcccggggacaacgaccaaagcggcgatcaatggactcagcaacggcgagctggacggggaaacgatgcggcattttcaatcggatatgggggcctacccccaccgtgccgtcgctattcttctgtttggcgcagcag

SEQ ID NO: 73273 - DNA, 315 bp, Heterodera glycines
atgtgccgcccgttgctgctgtttgtctgcttcactgtcgcttttggcattctgtccattgtggcgccaaatcaagcgctggccgagccggtgataggaggaccaccaccagcaccaccaattgaaggagtagcagcactggcaggaggtgttcagagtgattcgctggcgaatgtcaataatttagcagttgatccagcggaccaaccggttgcttctggtgttgcaccaccgaagcaaccagttgtagtggaagcgtcacaagtggagcaagcggaagtcgatcagctgccaaaaagttatggccgaaaatga

SEQ ID NO: 73274 - DNA, 611 bp, Heterodera glycines
atgctttattatgtgtattattttgggctgacatgtaagcctcggaatttccatgagaatctcagtggtaaaatttttttttttacttggctgaagtgatcggatgcatttaagcctcccaaattttcatttcagtcaaagcttttgcgcgtggtattcatttccctgcggaataatcagtgaatgataaacagtttcaattggttaaatggtctgactttaaaggtccaatcaaacaattaaacaatgatattaatgtactcaaaaaaggagagaatttcatgtttgacatggaatgaaaatgattggtgaagtgcccaatttggctgcgaaatgaacggctcagaacctgttttacggggggggaggacttttgcgtgatcatcgccgtcgccgccatcgccaaaaagcggcgaaacgaaaggaaagaaagaaatgattgatcggaggaggggggggggggggggggtgaattgctctgaacttggacgccacgaaattaggcatggatcataataagatataataatgatacaagcgataatgcaactggtccaatgtttaccaattaacgacaaactgtttgagccaaacaaatacaacaaaataaa

SEQ ID NO: 73275 - DNA, 691 bp, Heterodera glycines
caattgaaactgtttatcattcactgattattccgcagggaaatgaataccacgcgcaaaagctttgactgaaatgaaaatttgggaggcttaaatgcatccgatcacttcagccaagtaaaaaaaaaaattttaccactgagattctcatggaaattccgaggcttacatgtcagcccaaaataatacacataataaagcatttttttgtttttaataaacctaaaacagtgacaataaagacaataggtaaatgatagaattttataagtggtcagcaaattatattcattcttttggtgcctttcggttctgccccccccccccccccctccgaaacttatcggtgatttgattttctctgattggtctgatctgatatggttaaggcaaggtgtaaaaaaatcaatcgtccgaattaattttatttttaatgaaattttaattttcatttattttacgaaacgaaaaaaatattagtcgaaacaataaaatatttaaatcctttctttccctgcctctaaaaataagtcaacaacaatccctcttctgtgaaatgaatgctttagctatttttagtctctttgtccaaagcacaaaaagccgcggcccgggcgaaatattcagtgaaacatccatcagctgatgatgatagccaaaaattgagaagaaagccatcattttattcact

SEQ ID NO: 73276 - DNA, 371 bp, Heterodera glycines
atgaattcggtaataaaaaaatattatatgttatattcaacatttagaattttggtattaaatatccgacttaaaagaatcacagattcatgcaagaattaaaatttaacaatttttttcaggcggaagaaccgaataatttttttgcttatttttttacttttgaatgccgcaaaatatttttttaatttggatattatttaaaccttttttaaataattaaaataaaacaatcatatttttttatttcaggtccatcagttaatgtgcaaaaaagcgttgaaaatgaagtgtcctcacaacaaacacaacgaacatgaacatttttcaaatgatcaacagaaaggacaaaagttaacataattaaaaaa

SEQ ID NO: 73277 - DNA, 1035 bp, Heterodera glycines
atggttcaattcttagacagtttctcattcacttcgacttgtgagccgggcggaattcgggtgagtcactaattaatcactcttttttggaatttgaattttgcaattaaagtttgatatttatttatttattttttaatttaatatttcaatggaaatattgagttcaaatttggctactttctttatttaaatatttcaacaacaaaagtttttatttgttttttttaatttagaaataattttttatttcattatttgacttattttattcacacctttttccaataaattcaaccaaaagccgagtttttgtcattttcttattcacacttttatttaaaaatataaacaaaatttaaaataatttttttacgatcctttttaatctaaaattaaaaatttttaaaaaatattttaggtccgagtcgattcgcgcatcccttacactggcgcactctacggcttgtacgacttcttctcgtgccgaattgagcccaaggagtccaaactgttcgactttctttttccctacccgcacatttccaagaactgttcggacagcattcgcattatggtcaaattaaattaattgttgatcatctgattaattaactacaagaggaggggatgccattttacccttgaaacctggcatttggttttggggtcccgtgcccagttagttttgacagtcacccggttttttagaaatatcgcacaaaactcaatttttaaattttcatgattaaattcactaatttgttgagacggttgaaaaatggtgctaaatattctattttgatgcacgaaaatctcggtcctaaagagtctcgacatatttcttcaacaaaataaataaatttgctcaaatttttaattactacatataaaattaaatgttcctcaaatttgtcagggccaagaagcactgctcgaagttgtgctgtctacggacggagtggagccgctgtactttatcacagccgacgatttgacctatcagacaaaatgccctctgcccgagcacagcag

SEQ ID NO: 73278 - DNA, 979 bp, Heterodera glycines
atgctgcgggcccgcggggaacagttcgaagagtcgcccgaacttcagcaaattgctgttgtgctgaacagtttgttgggccgaaagggcgcattggccaatatgacggactattgggacgtggccacattcttcgaagtttcgggtttcaaaagccatttcggcgcagtgaaattcactgtttattcagttctggccgaagattacaacaaggcttgtttggcagcagagaaaatggcaatgtgagagaaaaataaaatctaacaaaaaaagtttattataccgaattccattgtacgaactgtcattactgtaacaccttttgattgactaatcgaccgattgattgctcttcaggttgaagccacctgtttggtttctgaagtcgaccatggagaacatcaaactgatcaatcaatgcaccgccactctccaactgtcccccgtggaacgcgacaagaaaacttttttgttttggaccgaatttttcatggaaagcatcgaatctcagcacatcgaaattacttcttcgcgcttcccagtgctaattcaggagctgaacaaaatgctgacgccgagctatttgaatgtgaatgcggacgatgtgagaaaaaaagagggggggggaggatatggagggattatttaactggaaaaagctgaacaaaacccctccacgaaatgtcagatcattctgtaccacgtgttggaggacagccaaagggcgcagatgaaacgacaaatgcaactgaacggcgggttggcgagcggaagccataggtgggagttcaaagcgaacaacatcaaagcggtcagtgcctccaaaagggacgaccggtgagttgggcactgccttggaccaatcggcacatgccatttgaccaattgaatttcagatccatgtttttgtatgtgttcgaaaattcggacgatttcaacttcacttttccttcttcaaaacattgtgcaaagtaataaa

SEQ ID NO: 73279 - DNA, 1357 bp, Heterodera glycines
ggccgccgacttttcgggccaatgtcttcaaacagtcgtcgcattcgctggacaaatacggcggagtcggctcaaccagcggcaacttgcgcaggctgaagacggtgctggtgatggacaaaaaggtgcagaaatgcctgcgggttcgggagatggcatgccaagagatagaggcgatggcggcgatgctcaacgtcaacctccaagtgcccttttttggtgaacaaaaccaatgctggcatttttagttgatcgacttcgaccggcttgacttcggcgagtcgtccacacttgacaagtaaaaggacccgagaacgaaattataataagcaaaacgccaaaatatttctcagcttttacaacgccgacattgccctcatagacttttccatcactcagcaacagccggtgagttcaaattcgaaaacaacgaccagtgaatacttttcatccccaccgttcagagtctctgttaccacgtggggtatttattcgttttgtttatttccgaattatataaaacatttggaaagtgtacgagaatcgatgggccaaacttacaacatcatcataatgtactcgcccgatttgccggacgaccaaaaggcggagatgcaaatcgaagcattgaaagttgggcaaaaataccaaagtgataattgaaagggacttaagaaaacgttggcacattgttcgctgattgtttactttctgtccaaagacgatttgcccacgttactctccgcggacagatcctcaaagtttggctcacaacacgagcgatatcagaaaatgttgaagaaaggccgaagcgattcttacgtactcatggcattgtttaatttggccaattttcaattttgaccaccaaataatttctccagggcacgttctctgaccgtattcggcaggcactgaacaatgtgaccatcgaggcgaatgcgcacgcccgcgagaagtttctcagcgacctgcgcaaagtgcgcgacatcgaatcgccgcccgaccaaaacaaatttctggaaaggatgcgcacgcgactggacaacccgggtgagactgactgactgatcggtggttgttggcctttccttcactttgaccgctaatcgctcgcttttggctcaccctttggcatttgccgttctttcaattagcaacatttgacccgcttctcttcccccgtcagatgttctctccgtggacactgtgcatcagtttctgctttgcttgaggtttccctcgcttcgttctgtccatttgcttcgtttgcagggacactcaagattatgacggaatcatcggacttattgacgacctcgagcgaattgaccagaagcaaattacccatgcgcag

SEQ ID NO: 73280 - DNA, 4822 bp, Heterodera glycines; identical to SEQ ID NO: 10176

SEQ ID NO: 73281 - DNA, 458 bp, Heterodera glycines
atgccaatttccctccaatttcttatcactcaaccattggcatttcaaaaactcacaaccaacacagtgccaacaaattttgcctccctaatgtgtgcaaatattgtacaaaatcacttggcgacggcggcggcacttcacacagacgctacaaaaaaaagaactgtgtgtgctgtgccgtccgtgccgagtgcaaaatatgccgacaaattacttcgttcagaacaaactaattaatgccaatttgtttccagacaaatgggcaatgctaattattgtcaagatgagcaaaatgacttttttgtggtcttgtttggctggtccttaaaatttgctgaattatcctaaattttggcttcgtgggaaaaatgtgaaatttttagccattttcgccaaatttggaaaaacaaaggcaattacatcaacaaatgatcagccaacagcagcagcagcagcag

SEQ ID NO: 73282 - DNA, 3030 bp, Heterodera glycines
atgcccccattaccgatggatcgagtgcggcgacgggtgccctttgaatcggtggggctcgattttctcggcccaacagccactcttgacgacagtagacaacgacagaaagcctgggtgcttctgatcacttgcttgaccacccgggcaatttacatcgacgcaacccgggatttgtcagcaaaaagcttcatcgctttactgaggaggttcattgctcgtcgcggagcaccaagccggattctgagcgacaatgcaccgacattcacgattgttggcaaaactttgggcgaatttggcataacgggagaccatccgctggaattcgcggactcccggggcattcaatggcgattcaccccgcagcatacaccatgggccggtggaatcttcgaacgggctgtgcaactcgttaagcgagcattgcagaagacactggggagctgtgtcctcgattacgaaggtttcagcacgcttttggctgaagttgaagcgacggtcaattctcgaccgatcacttatgtcaatggcaacccgggagaaccgctcccgctgcgaccgattgatctagttcaggagaatggtcggctcatagtgaatccaccgccgggatcctccgaaccgaacggccaacgacgcgaaccaccgcacgaacaactgacgagacaatggcggcactctcaacaacgacttgagcatttctggcggcgatggcaccgagagtacctcatggcactgcgagaaaaggcgggatggaatcacccgcagaaacgggtgaatgcacccggagcaccaagagtgggggacatcgttttggtggaggataaattccacccgcgcaatttgtgggcgatgggtcgcgtcgaggaactcaaaggatcaggcggccacgtccggagtgtgctgctcaaaatggcgaacggaagaatttggggaagacctgtgaataaaatttgccccattgaggcgggtcccgagacggaagaaagcgatcaacgagaggcgccggatcgtgatcccggcgaagcaaatgaagcggacggcgcagacaaggacaaaagggagagcaatactcccttcagcacggatgaacgaacgaaggaaagcacgcccgagcctgagcaaatgctgggggaagaaccgccagtgacgcagcggaacgaacaattgtcggagggtcgagcagtgcagggagatgaacgacgaaaatcacagcggaatcgcaagccacggagaatttggtcacctgagcatcggaaggtcgataaaagggggagcaaattccccctggtcgccttggcggtaatgatggcacttatctgcccaactttggcatgggggtgtcaacccaccccatcgctaccaccgttggaacaatcggacccggacatgcgcacgacgatgttgccgtgccacatggaatgcacgaaacgcggcgtgaagacaagcagcggtcggcggctacggaaagccgaaatttgctgcccagacggatgctgggcaactgtgccaacagcgacagtgatcagctacgaactaccggctgaggtactgattcatggctactcatgcagcggtcagtgttggtgggggtcgggcccccctttcaatgtcactcagcggtgcccagcgagagaggaatgtgaactcatcaactgctccttctgttgggagcagctcgccaacccaacgtgccacccgcggtgggcatccaccctcttcggttttggagcggcacttgtgctagccgttttcggctgctgttgctcattggtctcccgattctggtcgggagcaacgcttttctcccgagcaattgccttgggagtcagctaccccgtcaaattcatcaattgggcaaccggacgacggctcccacaaccaacagcggaacgaatcgagggcaaaatgcgaaagggagcaaaagttgcgcgggcagaaatacgggagttacagcggcgactccaactcggcagaagagctcgagcaatggcccaggcatggcagcatcccgaacggggccatggggccaggacgggagtagtggcggcttcacttctccctcttctgctcgtcttcggcaccacaatggctaccaagcccatctccgtaatggttcgatcggaggactgctcgagatcggcggaaggactgaaatgcgcgggaacagcggcgacagtgctaacactactgccatcggatcagacgaactcattcgtcattcgaacccaacaggacgagctgctcggagccgtccgacttcgcctcgcctcaatcacgatgatttgtgtgccaaaaacggaaagttggctgcgttcctactccatctcaacgacagccgtgaagcgatgtccatcggcaggatcgtgtcgcggaaacacgtgcagtgccattcgcaaccgggagacgattcccgaacttattgccctcaatcatcggcctgggcattcattctgtatgcgcagcaccagtttttggcagaattcgtgtgggctgccctcggcttcatgcctcttctaccgatgggctgcggtgccgacaacgaccacagtcttcgaggagttcacgtgtctcgaatgggacatgcagatcagcgcttgggtggaattggaaaccaacaacggccaaattgactcacaacgactgacgctacacccgggagtttcggagccgtggggaaacatgaccatctcagtcatacccacctctctcccgccaatgctggcactttcagcacatttcgtcaccgatggacgggctgtggccatggggagacccatgccgtcagacctgcactgccccgacgaagagacagcacggggtttcgacaaatgccaactctccattggggcgtgccaaaaatgcgcccccgatcacgacaatggcacggtacactgtcactgcagagacctcgacattggacgggtgttgaacaacccggaacaacgattgccattggacgtggcacgattgcaccttcacaatcacggctcttcgatccgagctgaatttcagtattcacccgttcag

SEQ ID NO: 73283 - DNA, 1401 bp, Heterodera glycines
atgcttatccgttttcgggcatgccaagtgcccgtgattgccgatgtggagaaagcatttctgatggttggaatcgaagaagccgatcgagaagtgtgcaagtttttgtgggtgcgcgacccactcgggccgctaacgacggcaaatttggtgccctaccgatttcggcgattggcgttcggcttaacgcccagcccgttctgcttggctgcggtggtgcggcaccacctacgcaagtacggctcggattttgcggagcagctcatcagggacacatacgtcgacaatgtgctcataccggcggacacagtcgaagaagcatcgcaaaaggctcgggaagccaaacgaatgttcacggaagcgaaaatgaacctgcgcgagttcctgacaaatgatcaaaacctgaacagcagcttttcagaggcggacgccctgggcaaaacgacggcgaagatgctgggactcgaatgggacgcggagaaagactcaattcggatggtcttttcgggagtgactcccgccggtgccggaggccacagttcaaggcgggcggtgctaaagactattgcccgactgtttgacccactgggactgcttgcgccggcaactctcccagccaagcaattcttccaacgattgtgggagtcgacacacagctgggatgccccgctggacgcggacgatgcgcgagaatggaacagaattgtggcaagttgggacggggaattcatcactatccccagagtcgcccgagcggaaggggccgaatattgccagctgcacgtgttcaccgacgcatcggaaaacgcatatgccgctgcagcatatctccgatcagaaggagtggacgggagcattctctcccgcctcatcatggccaaatcccgacttaagccaaagaaggcttcgggaacgttcacaatcccaagaatggagctgatgggcctcgttttaggcgttcgactggcagcgtttgtcaagactcaattacacaggccaatttcagaagagcacatttggagcgattcgacgattgctctccactgggtgaagaaccggacaccccagccacagtttgttgccaaccggctggccgagatacgcaaatccacggacgcaacattccactacgtgccaacgagcaacaacccagcggactcggcaactcgggggctctcccccgcgcatttgcagcaattcgagttatggtggaaaggcccagtttggttagcgacttcctgcgcaacctggccacatgagctcgagttcaaagtggatgacgacgaagaggaagcaaccccagcggaggaactcaccagcgccacgctcgtagcccaaagggagggcactccctgtcaaaaggaagaatggcccaattcgctgcttaacccgctgcagtaa

SEQ ID NO: 73284 - DNA, 1185 bp, Heterodera glycines
atggtcatcgccttctctctgagttgggtttggagtgtgctgtacaatttgcttcgcgactacgagtgccttcccctgctcatctctcgccaagagttcttcttcggcattctcacccattgcatcgctatgagttccaccgtttggtccgtaagccatttcaatgccattgagtcgcttttgactcattaaaatggctaattgccccgttaattcgcaggaatccaattttatacgctttgctgaacctccaactccgcgccgccttcctccaactcattcctgaatgtgcaaaaaatgttctggtcgaattatgcgggagggaacagacgcagcaacaacagaggaattcggccgagaaaagcaggtgggccaagcgaagcatagactgagagagacattggattgatcagtcaagaaggaactgatcggatactgcgggatgatcaaggaatattgattggactgatcgggattgaggctgatcagccaagacgggactgatcggatacagcgggataatcaaggaatgatcaaaattagagctgatcagccaattatactagttgaactcattaaattacattaagcaatttaagattaaaacataaaggatttttggttactgtattaatttttttttcaattttttcagacttttggacataaataatggcataaaagaatctgaggaacggacaaagaaattgctgagctgtttcctcacttcgcgtggttcggtcgaagtgtcgacaagcagcgaatttggcaaaatgtcggagggaaaagcaaagacagcgcaaaacgcactcaaactgaagacagttcagcagaagaagaagacgaagaaggtaaaggaaagaaaagacgagaaaagaaaagaaaagtgattggaatttaaagggcacggaaaaaagaaaagatgaaaacaacggaagaggggacgaaacgaaatgggagggaagtgatcggcggaaaggggacgaagcggaaacgacagaaacggcacaatgggagggaagtgatcggcggaagggggaagaagcggaaacgacagaaacggcacaatgggagggaagtgatcggcggaagggggaagaagcggaggaagagaagcggcagcagggagacggacatggcacagcggcagacatcaaagagatggacatggacgaacagatctga

SEQ ID NO: 73285 - DNA, 1509 bp, Heterodera glycines
atgtttttgaataaagctcgcgatgttgctgacctgctcatgccgtcatttaatgccagccctttcgggattccgatgtctttaatcaatttgaggaccggtcgaacagggaattacggttgggcaagcggtggttgctcaattctgtccgagtttggctctttggaattggagttcaactatctgtccagactgaccggcaatctgacgtacatgtcaaaatgtgctcgagttcgggagtatgtcattgaactccaaaaaccggatggactttatccggttggaaaacaaaaatgtttaccactttcaaacaaaaaaactttactagaattatctcaaccctcaaactgggaaatggtgtcaaagtatgttggtcttacttttaaaacattttggcaattaatttttgcttccattaattgtaagaacatgtttcggtcggagcgcttggcgactctttctatgaatatttgctcaaaatttggtagactttacggctgtgcgtttttcttatttcattctgtttaggattttcaatgggaaaagagacgaccatttgaaagaagcgtatcggaatgccataaaagcgatagaagaaaagcttttacacaaatcaactcaaaataatttgtggtattttgcggaaatgaaaagcagccgaattgagcataaaatggaccatttggtaattatttgggcaattagtttccttatttccatttcaggcttgttttattgctggaatgttcgcacttcagtcgctccaagagaatgatgaaacaacgcgcgtgaacactttgaaattggcagaacaaattggacacacatgtcatgagtcataccgaaagacaggtgcattttaaattgcaacaaatcttttgaaaactttgttttcagtgactggcattggacccgaggcatttcgcttctcatcggacgccgaagcgcaagcgacgcgcatttccgaggcgtattatattctaagacccgaagctgtcgagggatggttttatctgtggcgggccaccggggatgagaagtatcgcgaatggtgttgggaagcagcgcaggccattgaacggcattgccgggtggaggcgggctattcgggaattcggaatgtcaacgcccagcaggtacagccgtttaacaaggaaaccacccgaactgtctagtaaagtgcctataaatttggtaccaatgggcaaagcagtttatggcgaaaatcaaaaagttatggggcctagctggacttaatccgaatggttcccttgcaaatataagcaaaaacctttttagattgaacatgacgatgttcaacaatcgttcttccttgccgagacgctcaaatatcttttcttgatattcagtgactcaacagaaattccactcgatcaatgggttttcaacacggtaattcagagtttagagaattcaaacaaacattatttcttattctaggaagctcatccttttccgattgcacattctgctcaacaagttcagtga

SEQ ID NO: 73286 - DNA, 1063 bp, Heterodera glycines
atgttcaaatctgttggagatgtgttttcaaaaatcgcctttccgatggatgagaatgatcgttggttggttttttaacatggattctgaaatttctgctttcttccttatatgccatttccgtatttgcaggtttgagcaagtgcatagtcaggtggatgagttggaggagatgctgacccgtcttcaaacgcacgtcgattcgttggtcactcatcgcagggatttggcattcagcgatgatcagtcaagcaaagcattgtccatgttggcatcgtgcgaggagaacacagtgttggcacgaattctatcaaaattagcggagacccacgagaatttggccatagtggagaagcatgaagcggaacaggacgcacagcaattggaggaagtcgtcaatgtgagggggaagtcggtctggctgtttccgtgtcaaggggggcggggtggtcgacgcctaactctacgaaggggaccaagccatgtaaatcagataaaaacttatcgggattgggaggcccgacgttgcctgtaggcgccgccgggaaacttttatggaattttttaatgaatttattagcgacccccacctcctccccttaaaaaggtccggcatttttttcccacgaattgcaaatttttcaattactattaaattttcatacatttttttatataggagcatctccagctcctctcggtgcttaaagaagttttctacgaacgcgtgaagggttggcaaaactggcagaatcagcagcaaactttgacgcgaaagcgcgaaacgaaggcgcgtctgtgagttgtggcgtttattaaatttatgctatttttactcaatttcaaagggacttaaccggtaaaactgacaaagcggctcagtgcagagaggagctgaaagagtgtgagaacaaagcggaccaaatggagaaagactttctggtgatgagcaaagtgattcgcgaggagtacagccgactgttcaagcagcgtagagaggacattaaggcaaattgggggatggggcggaatggagggaaaaatgaataattgaacaaataaa

SEQ ID NO: 73287 - DNA, 1336 bp, Heterodera glycines
atgggcattcttggcttaccgaatgttgggaaatcgacgttcttcaatgtactcacaaaatcggaagcccaggcggaaaatttccccttctgcaccatagacccaaatgagagtcgagtggctgttgaagacacccgattcgattggctggtggagcactacaaaccgttgagcagagtgccagcctatttgaccgttgttgacatcgccggactggtcaaaggtggatgaagctttttcactattctcatgagcatttcaaattcaggcgcatctgaaggccaaggacttggcaattcatgtaatatttgattgattgtcgtccttcactttcgttgctcatttaatttttttagtcctttcccacgtcggcgcttgcgacgccctcttccatttgtgtcggtcctttgaagacactgaagtgacccatgttgaaggtgtgccaaaaaatcaccagaacatttattgaataattttaggtgacgtggacccaatccgtgacttggaaattatcaacagtgagttgcggttgaaagaccaggcatatttggtgggagcgttggacaaagtggagaaattggctgtccgggccaatgacaaaacgaagaagttggagcacgacactttgttgaaggtcaaagagttgctggagacaaagtttgtacggcaacacgaatggaatgagaaggtgagacagaaaggggcgaaatttggaagaattttggcaaagtttaggaaattgaagtgctcaacaaacaccttttcctcaccgcaaagccaatcgtttatcttgtgaatttgagcgaacaagacttcatcaaaaaggtaggacagccaacccaaccaagttttgttcggttagcccgaaatataaccaaaaacattttcagaagaacaaatggcttccgaaaatcaaagcgtggatcgatgagaatgacccgggcgctgtgagtaaacaaaattctaaactcccattccgtaaatggccctttacaggtattaatccccttttcgggtgcctttgagttgaagtcggttgaactggaccccgaggcgagggcccaattcttcaaagatacgggtgcttgcagcgcacttgacaagatcattaagactggctacaagaccctttgcctcgagtatttcttcacgtgagtaagcccttcaatttccaaaacaattaatcatttgtcaaattgaagagccggcaaagacgaagtcagagcatggaccatccaaaaagggaccaaagcgccgcagggggctggacgaattcataccgattttgagaagggattcataatggtgataatataaagggaatgatggttggata

SEQ ID NO: 73288 - DNA, 1200 bp, Heterodera glycines
atggtcgcatgtttcaattcaatcaatcaatcatttatacgcaaaagcgtgacgccgaaaaataaagaaataataatgtcaaaacaatcaattggtcacttttggagttggggtggcaaagaaatcaacaaattaagatcagatctttcaagaagtttggcaaactcatttggatttagtaatctcgtctctttaggtaaaagtctatagagacgagaggttcgaataaagaacgaattgtatctagcattggttgagcaataagctgttcttatagtgtattcattttttacagggtttttggaaaaagaaaaggattcattattttgtaaatttattttacctaaaattatttcatgaaaaagttttaagtctatttttaacctacgactctcaagcgacttttgatcataaatgtttaacaattcagcataattaggtaaatcagcagcataattgttacgtctaaatattactctcaaaaaaattttttggacattctccagtttttcaatatccttttttaaataaggattgaaaattggagatccaaattctaaaattggtctgcaataaatattaaacaaatttacaagtattttcgtatcacgagttttgattgactttagtatagcgaaagcagaacgtaatgcttttttcgagataatgtcaatatgttctgcccatttcaaatcattagtaaaataaatgccaaggtctctgactggttcgtttccgggatttttaggaatttgaaagtcatcaataaaataatttattttttggtttttgtgtcctaaatgtaaagttaaacatttatttgaagcgattttaaggccgtttaatttacagtattgattaaatttgttaataaaattttggagtggagaaaaggaaatatttgaaagaacatgataggccttaagatcatcggcaaatagtttaattttaacattttcagtttcgcagaattttggtaaatcgtaaatgtaaataagaaataacagtggtcccaatattgagccttgcggcacaccactgagacagggatattcgtcagagaaatcagacccgattttgacgaaaaactttcggttttctgagtaattctgaatccattttaataaggaattatttataccaatgttttggagcttagatattagccggttatgtggaaccgtgtcaaatcaaaataaa

SEQ ID NO: 73289 - DNA, 1104 bp, Heterodera glycines
aaaatcaattgatgtaatttattttgatttgacacggttccacataaccggctaatatctaagctccaaaacattggtataaataattccttattaaaatggattcagaattactcagaaaaccgaaagtttttcgtcaaaatcgggtctgatttctctgacgaatatccctgtctcagtggtgtgccgcaaggctcaatattgggaccactgttatttcttatttacatttacgatttaccaaaattctgcgaaactgaaaatgttaaaattaaactatttgccgatgatcttaaggcctatcatgttctttcaaatatttccttttctccactccaaaattttattaacaaatttaatcaatactgtaaattaaacggccttaaaatcgcttcaaataaatgtttaactttacatttaggacacaaaaaccaaaaaataaattattttattgatgactttcaaattcctaaaaatcccggaaacgaaccagtcagagaccttggcatttattttactaatgatttgaaatgggcagaacatattgacattatctcgaaaaaagcattacgttctgctttcgctatactaaagtcaatcaaaactcgtgatacgaaaatacttgtaaatttgtttaatatttattgcagaccaattttagaatttggatctccaattttcaatccttatttaaaaaaggatattgaaaaactggagaatgtccaaaaaatttttttgagagtaatatttagacgtaacaattatgctgctgatttacctaattatgctgaattgttaaacatttatgatcaaaagtcgcttgagagtcgtaggttaaaaatagacttaaaactttttcatgaaataattttaggtaaaataaatttacaaaataatgaatccttttctttttccaaaaaccctgtaaaaaatgaatacactataagaacagcttattgctcaaccaatgctagatacaattcgttctttattcgaacctctcgtctctatagacttttacctaaagagacgagattactaaatccaaatgagtttgccaaacttcttgaaagatctgatcttaatttgttgatttctttgcca

SEQ ID NO: 73290 - DNA, 871 bp, Heterodera glycines
atggcaatatcaggaagtacaacgacaatggcaacaacaacgacgacgacaagcagcacaacaaaaacaacaatagcaaaattggctacaacaatggcaatgccacaaacagaaatgccaacaacgacaatgacgtcaacggaaatgccaacaacagaaatgccaacaacgacaacaaaaggcatgggccagcaatgtcaggttggctgctgactgttggacaattttattttcgaatctcttttttctgtttgaatcttgaaaaataatttatgtccttcctttatgttttggctttttctggctttcatttttgttttcgactttagccttttccacttttgccggttcgtcgcgaggatataaattcgcgggcgatagcacaaattgcgggaacagctgcaaacaatgcatgtaaagcataaaaataatatgaatgaattaattaattaactaattgcttattccctccctcccttcggcagtttcgctttcactgcgatgcatcggccgttcgccaaactcggcactcattctaacggtacttattctttttaatcattttgtgattttaaattttgaaatttatattcacagtattttgggccaaatggtgccgacattgacagtgtattcggcacaggacaaatcagtgccgtgctcagttgtacaacggcgggtcaatgggcagtgggaaatgtgacaaatatcgtcgaattggaatgcatttcaggataaaaacacaatcatttaacaaaatataatcctgaattattttattatttgaaaacgaatggtaaaaagaagagtttacgttgttaatgaatttgagtttgtattttaaaacaattggcatagaaataattttaaa

SEQ ID NO: 73291 - DNA, 701 bp, Heterodera glycines
atgcctaaaatttctacgcacttaatacgcacagataagcacgaaaaacgcgttttccgcttggtatggggtgtctacaatgacttttgcaatgcctaactttgcctattttggactttttgtgcttaatgcctaaatgcctatttttgtgcctatttcgcaatttttggcgccttttttaggattttcgaaaaaatccttaacaaaaatgcaataaaaacaaaaaatacaccctaagaaatggcctgaaaatttttttagaaaaacacccctgagaattggaaaaattttcctaaaaattaatcgccaaaatttaatatattttttcttaataaaaatttttgttttaaagatttgtcacttattcgaaaaaactttcaaatatttaataatttcatttacaattgaatttttatgtttttatgtgttttgctacctaaaaagtgttaataaaaaattttatttgcctatttttgtgcctatttaatgcctattttgtgattttttctgcctttttaggtgtctatttcgcgattttttgtgcctaaaaatggagtccctaattataatcaatcaaacgcaattggatggattccgttgagagttgcgattcatccctaaaattttattaaatttttacgtcgtctgcttttttgaattcaatcgccctctcccaagcatttgtttatcctgctttgcta

SEQ ID NO: 73292 - DNA, 1781 bp, Heterodera glycines
atgccttccgatacggccatttacgtgccgttgttaaaagaattcccaacgcgaccaccgtactattatcggaccccaatgtcactgatgtaccgtattactgtgacgacattttccaaattacaaaattgcgccggttttttgaccggcattttgtttggactgattttggctgcttcggttgtgcattttgtggacaattttgaccattttgtactgatgcccaaaatgtcgaaggagctcaaagagttcagagaacaatttaggaaaattgaaaaaacatataaatacacatataaaagtaagagaaaagaggtggaaaatgaacaatcaaaagcaaacaaaaataccaaaacagagaatggaactgttgccgttgaacttgctaagaaagtgcgcgttttctgttggatattcacttacgaaaaattccacgagagtcgcgccaggtaattaattaattaggattaattaaatcattcattaataaattcattaatgaataattaatttatttattatgactgattaatggaagcaccgcccaattcaatttaacctcctttgtgcccttaaggcatgtccgtgccacgtgggcccagcactgcacccgctatttgttcttctcctcaaaggatgacccgactttgccggcgattgacgtcggaatgccattgggcagaaaatacatttggcgcaggacgcgatggattttaaaatatatttacgacaattttatggtaattaaaccatttgagtttaatttgtctttcttaagagcattccttttttccagaatgacttcgattgggtttttcggattgacgacgatgcttatgtgatcatggaaaatctgaggttgatgcttctgccccattcgccggacgaactgatttattttgggcacaaattgcatacaaccattttcaaggaccacttgttcccgcagggttagcaattttaaaattaattgaaaataaattgaaaatgattgatttttatatttaaattgtataatgattgattttcaaatatcttttaaggaggcgctggatatgtgctgagcagaagtactttgaaattgcttgtggaaaggggcctcaatgacagcacaaaatgttgggatggagatgactctgaggaagatcaggttgactgaatgaccgtcacaatttttcaaatattaattacaatttaattagtttgttgctgtctgtttggaaaggttgggagtgaaatttggcgattcgcgcgattcacaaggccggcacagatttttcggcgattttatcggcaaaaatttaccaccgataacgctgtgggatccatcttattattggatacaaaatttgacgtattatcccatgccgcaggtgatcattaaatgttattttcaattgctgctttttattcctttttttcgaattttctgcctttttagggacccgaatattgcagtgactacgccatttccttccattacactgatgcgcgaatgctttatctgcttgaatatttcatttaccatttcgatgcttacggcgcgcgaacattggccacagatcgaccaaattatttcgaagaagcgatgcgaaaggcatttgataatgttgggccgggcgacattttgagcaagtaaagagaaggaaaaggcgggaatatttcaaaaattggaaaatgggccggtaaatcatcaaaatgccaaaataagtagagaaacggataaccttttttcgataaattgaaattgcatcaaaaatggtgaacataaattttacaaa

SEQ ID NO: 73293 - DNA, 302 bp, Heterodera glycines
atgccgtcaaaagtcacagtccgtggaccaaccacaaggaaattgttggtgttcacaacaattgcggcattcagctcaagcgctgggttgggttggctaaaaaagcacagacaaacaaacaaaacaaaaaaagctaatttcagcaaaaagacaaataattacgagcaattagccgtcactcttgaccggcaaacgttgctgtcatagacaaaggtcagaacgccatcggcaaatgcggttgaaggtgacaatgtctggttcagaggaggacaacaacctgcatttaaacacttgcaattcaa

SEQ ID NO: 73294 - DNA, 3388 bp, Heterodera glycines
atgtccacacttggatcggcggcgacatggtcagttagttagttgttggttgaacgtaaaattcatagtatcaaaatggcacgaatagacaatcatgtgcaattttattatattttttagagcggtttgcccacggcacctcaagaccccatctttttcatgcaccactgctacatggactacgtacgtgcttaatttcaattaaatttacttgcttttcaaaaaagtttatcgacttatagttttagatttgggaacagtggcgcctgagatggcaaacgcgtgcccagcgcgagacgcaatttccatctgatcagcaagttgttgcggtgagtggccgtaaactgctaacaaattgctcttattattaccttaattaacctcccgactgcgtaaggcgttttacttttttactgtattttacagtgttccggttcaacaagctaccgtatcggcgaggtaatgcgtccattccaagacccggtggtgctaaatcgaggtcggtcataattgacagtgattagtctgatcaatcacactgcttttggcgtttagccggccttagcaacgattacaccgactttctgtacacttacgcccctcggccgacttgtcgcgcagcggggggatgcggatcgccgtcagtatccaaattcaaaaacattatctatttaataataaaaattcttaagctatttgttttgcgacacaacaaaacggactccgttgtgcgtctccaaaatacggcccgggggcaattgctcaccattcacacgaaacagtgggtgtttatttgatagaattgccaaatgactgctgataactgactgttgaacaattgtgcagctgaacaaccgtgctaccagtcaacgtgtaccaacggacggtgttccgcggcacgaccgagggtattgagaagaggaattaaatgcaaaattagccattatatggacaaaacataattttaatgtgccatgtaaggcaatatcataatgctttatcaaaaaatcacacttgacaggtggcgcgctccaaagactcatcatcgccagaagtggcggaacacagcggcgaaaaggccgaacgtggcgcaccacgaaaagcatacggacacagtagcgaaaggggcggacaaagtgccgaaaagcgcggacaaagtggcgaacagcgcggacaaagtggcgaaaagcgcggacaaagtggcgaaaagggcggacaaagtggcgaaaaggcaggcggcaacaaacgaaaaggatacggatacggcggcaatgttagtgaataagacgggttgtcaaacacctcctaagtaaatttgcagaattctccaacaacggcggaaccaccgaaaccgacgacagtgccagcggacgaatacacaactttggcaccgatggtagggccaaaaagggacaattaccaatgaatgccttaattaaagcaattaaagcacacattttaaatttaaatgcttttctcagtacacaccgccaaaagaacgtgtctgctacgataatcacgagtgctgcgcagtgtgggccaccaaaggcgcgtgtaaaagtgcgccccgttacatgaacacgtggtgtccaggcgcttgccgctacgatggatgtcttccgcaggcggtgaaacgcgcggcaggtgggtcattaatggattttgttggctgaccaattagtgaagcctattatggataaatgaaaaattaatgagttaaggccttgactattattctcaatgcaagcgttggtccattttccatgaaaaatactcccacgccgaggggtggcgttcgtacagaccgaacttggtgttacgaagggagaagttgcgcaacgaatgtgagcgcaacccgcattggatggcatgcaactgtccgcaggcttgcagcaaagtgaagcgcctaaaggaggactgcaggtggcacttggaaatggcattggcattttgatggcattttgtttaattaacctaatttagccaaaacatgccaaaggattatgtgctggaaccagtggacaatagttgataaaattgccttggttgtgatgatgatgccgcttaagcaaatgattttttatcgtagataaccgattattaaaacatatagttatttaattgaagaatactaaaagtaaatttaaatgctggaaattgttttgaaaattattggtaaaatattaatttggacatcaattcattttagaaagatttatttattggaaggtgaaactaaaaaagttagcaaaaaaaatatttttataattttctaaaaattgatatttaattatccgtaatttaaatttcttttttgcttttgcattggcacaaaatttgatcggaaaaaatgaagaaaaccatcggattaaaatcatttttctccctctgtgataatctttcggtttggcgtctaattattttaaattatctctaatggacaaacaacagtcattggtggtcactggcagtgacagatggagtcattcacctcaaacactgagctaatcacaacaatttgctatttaaccaccaaattttaataagtccgtccctcccttattattgctattataatacatttttttattaattaaaatttaagaaaattatttatttattaaattcattatgttcattaaacgtggccatttttttgcgatattttttctcacaacttttagtatatcaaaagcaatgtttatggtaaaaaaattataataaattttaattgaaaattcgacaaaatttttttaaagcccttcaaagtgtccgttcgtttgttggtgtacgataatgcaaacgatattttttgggacttaagcaaggggacattgcacgaggaaagtgtgccaacactgatcagaagtgccgaaattgaaattggaaatgatcggacgacagtccgtgaaattgtggaaaaagtggcgaacgaattttgcaagcaacagcagcaggtgattaaggatcgagaaccattaaataccaattaaacaatttttatgaaattttgtttattaaatttataatgtatcgatttatccttaattatttgcaaaaaaaaacagctgttggatgaggagggagacgaaaagccttatcggataatgacgatttttgaggacaaacaattgaacatgcaaattcagcgggagatggacgccgagccaaacactgaatacaccgccattttattgctcaaaaatgggcaaaaggattcagtgggtaaataaattgcaccttttatttttcaacaatttagtggcttttctgaagaattggaaataatgaagagattaagtgaaagacgatcgaatttttgaaaagaaaaaactcaaaatccgatgaaatattattaataatcaccgaaatatgagtattttaaaca

SEQ ID NO: 73295 - DNA, 750 bp, Heterodera glycines
atgcatcaatcgcttgctttcaaaattattgccattttggctggcattttggcattgttcgggcccatcgattgtcgcgcaacccatggcacgtgtgtccaccaaggcagacaataccgagagggcgaggaatgggtgagtttggcatataattcaaataaagcaaataaataggggccaaaatttggaaaattttgcgtaattaactggtataatttgaaatcctttctttaaaaaaacagattgtcaaccgtttgttcattatgcgctgctttgtattttacaattacaatcggtgggagacgcgggtaagaaaaattggaaaaatgagagcaatttgacactaatgattattaattaccccttttgaggtggtcggatgcctttcgctacgaggcgaccgaatccctttgaatggccaaattagggacagccaaggcatttggaagtgtgtgagggatgcgaagggcagcaccaaattggtgcagcaacagggatgagaagaacggagagagggacaatgccgggggggggggcaaacagagtgccaaacccacgaaatgacggagtacaaaaagacattgtgccaaattcaaaaaaggtgccggaggatagaaacaaagtgccaacagcatttttagatgccatttgctgctgcttataaaacaattatcatgaacatttacagtacaaggcttaaagtttctttcttttgcctaatgtgcttttgatttttttttacataataaa

SEQ ID NO: 73296 - DNA, 344 bp, Heterodera glycines
atggactgggtgaaattttcttgcaacacgacggaaacccagcgaaattcacccgctgcaaacatcgcaaagggtcagtgaaccaatggcattttatgctttttaaatgccaaattcccattaatttttcagatgaaaaatgtttggttgagttcatcgacaaattcgctgctgcgaacaattcgtatgtgacctgggaacaggtggtcgcattctgctcaaatattcacgaggggttgcaacggatggcattggacacgattatcaccagactgacggcaaatctaaccaaattaacgcggcaaatggaggcactgcgagaagaggcgccgccaagggacaaa

SEQ ID NO: 73297 - DNA, 1165 bp, Heterodera glycines
ccaccaacattccaatcaacgggactcaatccacctgcatttcaaatcactgggactcaatccaccaacattccaatcaacgggactcaatccaccagcatttcaatcattgggactcaacccaccaacattccaatcactgggactcaattcttctgcatttcaatcactggtactcaacccaccaacatttcaatcattgggactcaacccactaacattccaatcattgggactcaattcttctgcatttcaaacactgggactcaatccaccaacattccaatcaacgggactcaatccaccagcatttcaatcattgggactcaacccaccaacattccaatcactgggtttaatcactgggactcaacccagcaacattccaatcaacgggactcaattcaccagaatttcaatcactgggactcaattctcccgaattcatatcactggactcaatctcatcaatccttcagcaacacaattaccgggactcagttctccgacatttcaatcatcggaactcaacctcagcaacggaatacagaactatttaaaaggaatccagaaattgaaatataacccataaatcaaaacactatggtgtataattattgcccccaccccataaattcaaattaaaactgacctgtttaaaactttccacctaaatttgatcccgcaagtggcacgtcaatatcccaattgcatataaatattccactcgaacacaggcaaaacatgagatgtagcatttatattgctttttctatccatcaaaggctttttctttcattttttattactatcataacatgctttttattcaaaacaaatatcaaaaccaaatcagattcttttcatattataagcaaggaaaagtacaaaaaacttttttaagtaacaaacctttttcattcaaacgaattctaatgcatttttttaaccaaacaattctccattatcgtttacataagcaaaacaaaagctttcacatcaaaatcaaatcaattaacaaaaacgaaaatttagacaaaaaaataatgataacagcaaacccacaaattttttcttacacacaaaaacagaaccttcatataccggattttccactcaaacaaacacaaaaatgtgctcattattttattaattattttatata

SEQ ID NO: 73298 - DNA, 234 bp, Heterodera glycines
atgaagaaaatgaacgaggcaagtcgaagtggatcaaaattagtgagtttcattttaaacattttatttttaattgttcttatatgaatgctcaaaagggtaatactgcagaatagcggtcccgacgaaaaatatttttatctttcgtggggtaaaaattgtactgattacgaatctgaactcaaactttgaaaatcattgatttttatcacatagattttttcaaaagtttta

SEQ ID NO: 73299 - DNA, 226 bp, Heterodera glycines
atgggggtctgggtgagaaaagagaagggaattggtgagggatcagaaatttttgataaaaataaattaaattatttattttcatttatagcatctgtgcatctgcataagtggtcaagtggctaaactttataataatttttctaaaatctctttacattgtgaatttattttatttttattgaaaatatgtttattattttcgaatgagctccagtagaaagta

SEQ ID NO: 73300 - DNA, 639 bp, Heterodera glycines
atggatcaaagaatttggtcttcaaaaaacgcaaaatcctataaatcaaaaactgatgaagaaaaaattgaaattgtcaaaaaatttattgaactgacaaacgaatataagcaaaaaagaaaatattcgcacatcgaatggcaacaaaattatgccgaaatttgtaagaaagtcggagttagccatagaacaattaaaaattggaagaaacaatttggaattagcagtaaattaacggagaaagaaaaaatggagaaaatgaaaaaatattggcaaataaaaatagaaaatccgaaaatgagtgagaaagaaattgcaaaaatattgaaaattgatagaaaaagcattacaaattggaagaaacaattagttttgaaatgaataaatgacccaattctttcttttttttattaagaccaagaatttgttttgttgagtgttagagaggcaaataattcaaatatttgcaattccctctcttgggctctttgaccccatattgattttccccatttattcatgcccttcccttcatccatcccacaattcattctgttaattttccttccttttgtgtgctccccaatttgctccgtccctccgacaaatattatttgtattatttttccatttgtgtta

SEQ ID NO: 73301 - DNA, 1090 bp, Heterodera glycines
atgggggtctgggtgagaaaagagaagggaattggtgagggatcagaaatttttgataaaaataaattaaattatttattttcatttataggatgtgttcatctgcataagtggtcaagtggctaaaccttttactttcattatttgtctcttcggttcaattccccgatggaacagaaaatttttttatattttctttaccattattttaattgaatttaattaataaaaaatattttaatttaaaattattatttttttcatttttaatagcctaaaaacccataaactaaccaaatatttggtcattttttgacaaattctgttaaaaaatctcgctcaaaatttcaaaatttttccggcggtgcctatcggcactgccggactccgccccctcccactgttccaaaaaatttttttgaaaaaacattgccacaaaaacagcgatttaaaagcaaaaaatttaaaagattgtaaatttatttaaaaaatacagaattttgggactcagaaaattccaagaacccccctgaaaacaaaatttttaaaaattttcctcgaactcgtcccccaaaacgtaaatacaaaattttatgggtacatttttgaatattggcaattttcgtaacaaagcgcacttaaattttcaatttttttcaaaaaaaaaatttcacttgggaaaagtcccggttggtccccgggttttttcgcggtccgtcccggtcccgacgaaaatcgatgtcccagtcccggtcccgacttttctagtcccggcaagtcccggtcccggtttttgtcaaatttcccggtcccgctcaactctatatttataaaatttcgctcgtcaaattattacattagtaattttttttgcaattaataatttttatcaagctttatcattgagaaatatgaaattgcatttatttgcatttttatttttaattgttgaaattacaaaagttggaacaaaagagaaaaagctgcaacaaaagtcatttgccgaaatatttggagaaaaatggaagaaaaagaagaaaaagaaagaaatgagaagaaaaaaagagaaataatcagaaaattttataaa

SEQ ID NO: 73302 - DNA, 397 bp, Heterodera glycines
atggcaaaggaatataagcaaaaaagaaaatattcacgaaaagaatggaaccaaaattataaagaaatttgtaagaaaattggagtaagccgtgaaacacttagaaaatggaagaaacaatttggcatacgcagtataaaattaacggaaaaagaaaaaatggaaaaaatgaaaatttattggcaaacaaaaaaagaaaacccaaaaatgactgacaaagaaattgcaaaaattgtgaacacttctcaacagaatatttccaattggaaaaaacaatttgtggctgaataaaatcattcgatttttagaattaacatgaaaacttttttgataaattttataaaatcatttaggtttgctgtttttttcaaatgtcgtaaatataccgaattattaa

SEQ ID NO: 73303 - DNA, 699 bp, Heterodera glycines
atgtggcacattccctttccctcccaattccgaattccaattcccaacgccagcacgaccaccgcgctcggccgcgctactggtagcaccggatggttcacttttgtgaacttttcatcaacctgggcggaacaggaacagcgaaagggaggtgagtttgagtgagggacattgaggaggcgcctggtgtgaaggaaaaggagaagaagaaaaacgcttcggcgatttaaatgccccggggatgaaaaatgaaaataaaaggcactaaatatgagagaaatgtataattgttgcctgcagatgtactaattgccgatgacagcacaaaataaaaagcaaaaagtgccaataaaaaaattttagaatttttcctatccaaatgaagatttttgaagattttctgcgtttcaatgaggatttataaaattttaagacaaaagctccggttacgattatttaacaaggaggcactggtgaatgattttaaaatttaattataaaatgtttattaattcacaagaaaatccgccgtaaaaaacatgctttttattttattcaaaattttttatatattttttttctaaataatttgtagatagatttattatatggacagtcggaaatcataacaatgatggttcgttactaagaaaaaattatttacaatagaagcaaattcagcgtatccaattgagaaaa

SEQ ID NO: 73304 - DNA, 312 bp, Heterodera glycines
atgtcaaatgaatacaaacaaaaaggaaaatattcgccaaatgaatggtaccaaaattatgcagaaatttgtaagaaaatcggagttggctatgacacaattagaaaatggaagatacaatttggaattagctgtaaacgaataacgaagaaagaaaaaatggaaaaaatgaaaaaatattggaaaataaaaagagaaaacccaaaaatgagtgacaaagaaactgctaaaatattgcaaattgatagaaggaccatttcaaaatggaagaaacagtttggaggagagattttggaggatttaaatggatga

SEQ ID NO: 73305 - DNA, 1285 bp, Heterodera glycines
atggacatggaaatgcgactgttaaaattggaacaggaaaatgtgagaaaaattcctaaaaaataaatcatttaaacttgggacaaaaatatgaaccttgggtttttcggggtcactgatcacaaatcgggcacccatttcgacccattccgagtccctgacacattaataacaaaaattgaaaactcaaattttcgattttcacatttggtaactcgaaaatgtgagaaaattgttcatgaattcctcgaaatttgaaaagagctaaaaaaagcaacacaatttctttcctttttacagcgggcaatcaaagcgaaactgaaagagcaaaaggcggacaacaaattggcgttggaacatcagaagaatgagtttgagcttcgcatggtgaagatggaagctgggctcaatgagcgattaatgaagatggaaggcgaacatgtaagtttaaatttaacaaaaatcacatttaaatttgaaaaattaaattcatttcataaattccgttcctaaaataattcaaaggcacttaaaaacagaaaattcccttttacagcaagcattccaagcgagactggtcattgaaaagctgacaatggagaaccatcagttaagaatggaggaagcgaaaaaattgccattacaatttaaatattgatgatgagagtgattgaatagtggaaaaagtgtcttttttcatcgcttttttattattaagcagggctcggattttttaactaatacgcgaaaatatcgatttttaaagttttgtttatttctaatatttaaaatttaaatctgaattttttattccaaataacagcaaattttgccaaaagttttgcgccctgtttattgtttttaactttttatcataattttaatttgttttttccattttattatgaatttgttatttatttaattctcttttttgtttctttaattttttttaatcttaaacatttaattgtgtttaagtaaattttttttgtcttcagttttaatgattagtgaacggggggggggtaattaagggagttaaaaagttatgattagggcttcgatttatagttttttcactatttttttcctgagctccccgtagcctgaaatgcaagaaaaacatgtttttttcggctgttgttaagctacttttcgagtttttagcaactattttctagttttttatttttagcaactaaaaaactttaaaatttttgaaaaaactattttcaactattttggcgttttgcccaaaatttgttaacaaaaatgcaataaa

SEQ ID NO: 73306 - DNA, 1929 bp, Heterodera glycines
atgtggtgccattggatggccaacggaaaaggattattgatacaacggtgggcggtatttgctaattatcagagggtaattaggaattgatttgctaattgtcgccattttcctttccagccctttgactttctgtgtccctattccattttctgtgccgtcggctgtcagtgctgccaaatcaaccacgcagatgaccacctcttctcaatgccaatgctcgagtttctgctatgaaaattggtatcgtgcgcaggccccaaacctaaaaaaattccggagggaagatgaagatttttttttgctcttcggtcttgaaattttttctcttatttaattttaatatgtccagctattttcttccccattctcctgattcctgaattttttgagtctttgtctatatatatttttttaaattaaatatttctaataattcaaaaattacttttaaataaaatttgcataaattgccaaattcctaaattaaaatttaaattttgttgcattttcaggagccgtacattcctttcatggagaaagcatgccgtctctgtggctcggctgtcactatgctgtttttcatctttttggtcattgctttactgttcgacatcattgtgtaccgaatgtttttgattcgagtttttatgccagcacattttcaatgcctttttcgagattgcttatccgtaagtaaaatcaattcaatttcaaatgaatttagcaattttattttatttttaaataaaaatggaattagtcacaattaaaatcaatatgaaattgaactgttattaaccagggttcttgaccgaaacccacgtttaaaaaaacctggattttttcacgacccgaaattttttttgaacgtcactatccaaaccccatcttccacaattcctgacctgaatttcaattcgggaatattttacttacatcccgataaatcaaaaattatgaattataaatttttatgtttatttaaaatttaaatttttttaattttaaagaatgctttcctattgggttcgacgatggtgctttaaaaattccagcgacaaagaaacaaaaatgcgaacggatttgcaaagaacggcgtcaaacaattaaatgtatcaacccgaacatcaaactcagattatatgtgcagctgggtgggtggtggaagagaatttttcaaattttttaataaaacttaaattatttttattttttatattaaatttgcctaaaaaaattacatgttttcatgttcctaaaattagaagccctggggggtttaatttatattccatatgactcattttaaatgttttgaggtaatacaacttggctttgtcaccttgtttgttgccgctttcccattagcacctttgtttgcgctgatcaacaacatcctgggtcttgaaaattcgaattcctatggccgtcaaaaaattttaaattttacaaaaattcttaattaaaattaattcagaaattacatggtttccttcaaatttactttttcatttactaaccctatctaatgattgcttgatttcttttgatggtttttccactaattttttcaatgtttttatttatttaaagattactcaacaccttttcaatagaaattttatttttaaataaatataaatttttatttttaattaaaaaaaaaattttttttcaagacttctttgtcatttcccgcaatacaatcggaagcccagcagatgcccaactccgtcgctgctactccttgcgcccacaacccgttcaacaacaatcacttcccacaatcagatgcagaaaagtacaacaacaaacagtgttgaagtgcttcagaaaaatgagcgatgacaaaattttgctgtggttttgatggtcgacaaaaattccgaatgcttttttattttttaatttatttatttgatcgga

SEQ ID NO: 73307 - DNA, 906 bp, Heterodera glycines
atgacgaacagcaactacaacaacaacaattgcgatgacaacaaacaacgcgataattcacgttcatcccccaacgacacgcacaaaaagtgagaaataaataaaatgagaattttttcaattgtctaacttaagtttttctattaaaaatattaaatttgtttcaacactaaaaaaaatttttttccaattttttattttcaagaaatccaagaaaatttcaagggaacattgaaaattttttcagcagttgtttctctgctccgtctgagtgcccatttcttagccggtcttcatgcgttggaacggctctgacaactttccatggatgccaatgccatcggcggaggggcgaaagacaacgcaaagggcggagagacggcagacgccgaggcaaatttgttttaaaacttaaatttagttgtttattttttgtttcttcagctccctctgcgcagtgcttccctcgaaaaattggatctttcatccaatgccttgcgcagagtgccgaccaaattggtggcccattaattgcattccctcaaagttttgagtttggcggcgatttcaaccgaacggatggaaccgaaattaatggccaatttcagcgcattgaaacaggcaaaattaggtaatggacgttgaatggacaaaccaattatgtaatttggccattttcagttggacttttcccaaaatttcttccgttttttgccctttggaattttcgatggactcgacgaattgcaagctctgctcggattggcctcccttcaatgggtcaatgtcagtaaaaatgcaatgggaaaagagtaaatctaaatgaaaattcagttggaatggtgcccaattcttgccgaagctgaacagatcgaaattgaggcgaacggaaacgaaatgttctaa

SEQ ID NO: 73308 - DNA, 481 bp, Heterodera glycines
atgttcactaaaaacgtgaaatacaattcattttttggtttttacacaataaaacgtgaagttgcgattaggtaattttctgtgtttttatacactaaaaacgtgaaattacaattttgtgggtctaaaacgatttaacttttacgtgtatttgtacacgagaaaacatgaaatttaaaattacaattcatttttgggtacaatttcacttttacgtgcacatgttcactaaaaacgtgaaatacaattcattgtacgggatttctcacaaagttttgcaggtaaagaatgaaaaaaataaatacactaaaaaaataaatatatttatttagctccaaatatcatgaaataatgaaaaatgaatttccttgtgtcaaatttttgctgtgctcaaataatcataaaccgccggtcgttgttgtatccgtgtcataatattatgaattaagaatttagtttttttagcaaaattatgaataaa

SEQ ID NO: 73309 - DNA, 1750 bp, Heterodera glycines
atggcctcgattaacaccagctcaactgatccggtaacaaaacgaaaaacattttaaatttaaaataaaagaaattattatattccaatatattaattaattccagttaaatttttattttaataactgttttcagttttatttggcctaccgtttcgccggtccatccgccgatttgattgtgccggccgttgcactcaatttggttgcgttggttggcattgtgttgaacggcacagttttggtggtcactgtcaaatccaagtaaatcattttttaattaatttaaattttaatatttaaatttattttcagttccctccgcggctccgccaattttctgatggctttgatttgtctttgtgaattggtccaccaaattgggcacactttcttcctggttgttgtcatttcgggcacaaattttgtcagtttactcactgctgacttaattatgacggtaaattttgaaagttaaaaattatttttaaatattccaatttttagccaatgctatttgcatcaaattgtggcttaatggcaatgttttgtgctgcttttgatcgcctttttgccgttgcattgccatttaagtaagggaacgaattaaaaaatattttatttaattaacatccacaaaacactaattaaacctaattaattctttctatttaaaactttaattatttaatttttagacattcctccatttttgcacattacaaattcacatatttgcttggacatctgttaatttgtgtaatttacggtgcatttacactgaattatgtgctcgcttatgcattcgaaaatgcgggaaagtatggcgcaattataattaaaaataaattaattataaaattttaaatttattcagtccaaccaccggtgttgtggccgaaactttgctgggccccgttggttataaattcttcgccggcacattcattatttcattttgtagcacttgttgttatgtgtcaatttttgtaattatccgatgcaaaaatggcggtaattttttattggcattttgccaaaattaaaaaataaaccgaaatttttttacagtaacccaacagacgaacacacgagttttacggtcattggtcatcattttgtccattaacattggcgggtatctgaccaatttggccatgtatcagttgctgtatgcatttggctcaattttggggtattttaaattaattttatttaatttaaattttccaattttcctaaggcccccaattcgtgcatggcaatttggttttatttctggcatttttttaaatgctgctgcgggatcaaatgctgtcgtcctttattttaacaggtcagtataataaataataaataactaattttaatgaattttaattaatatatctctatttcaattttaataattatttattgaataatttatcattttaaaattttaattatatattcatcatttaatatattaaagaatatttttaagctctgaatatcgccgcgtgttcaagaaagcatttcgagcgttgaagggttattttggcaacaaaaatggtatttttaattaatgtttatttttattgtcaatatctagaagtagaacgtttttagctgtccacgccattggcacaatccaagtgcgaagtgccaacccaatcaataacataaacatgcgatcaagccaacagataaatgcgcaatccatccaattgaatcgcttctcgattcgattcattttattatttgtaaa

SEQ ID NO: 73310 - DNA, 203 bp, Heterodera glycines
ttttattgcatttttgttaaggaattttccaaaaaatgccgaaatagtgaaaaaatagtgacaaaacgccaaaatagtgaattttcactattttagtgacgaactcgccaaaatagtgatttctagtgacgaaaagtgacgtccaaatgaaaaaattttaacgcagaaatgcgttttttgagctcctttcttcaaaacaattg

SEQ ID NO: 73311 - DNA, 1125 bp, Heterodera glycines
cccctggggcgtcaatcccgttccgatcactgctgacaatgtggccgaaagggctcaacttttggctgatcagtaccgtaagaaggcccaactgtacggtcacaacacacttctggtgccactcggcgatgactttaggtggtcatttaccacaaattggcacatattccatgactttttgtcttttcagatttgacgaggacagcgaatggaccgaccaatatgccaattacaaattgctttttgagtttatgaacgccaaaaaggagtggaaaattaacgtgagaaattagagaggaggcaaagggtccacgtgtttaattttgactcttaaaaggcgcgctttggcactctcggcgattacttcgatgcgttggagcgtcgtttggtggaaaaacaggcggacgacctgcgacgtaaaggcattgttcggcacagcgttaagaaaccagaaaatcggtaaggaaaggtcgttttaaagctttaattccgggggataattttcttcgtttatttttgatgccgttttttgtcatcccatttgtgccgtcctccccccaatcgtgccatttcaattgtccatttgagtggtgccctttctgctgattcgccctcttctgccgcttcgttgtcgcttttgccgcttctgtccggcgactttttcacctacgcggaccgtgacgaccactattggagcggcttcttcacctcacggcccttctacaaacatatggaccgaacgttgcagcatttgctgcgagcggccgacattttctacacaatggcacgatgggagagcaaagggaacagtgaaaagggagaggaggacggaggtatgagaagggggggggcagattggcactttgtgaggagggcacttgaccaacaattcggtcatggatctattatcctgcaattagttaactgtaagattcgaagaacttttttgaaaccaatgaaatttttcgaaattttgaaggataatagagaacaattagagctatcaaatggtatcaaatttgttagatttgtacaactatcacagaaattataccccagcaactttcccaacaggcgacttcgacttgcttttcgacccattggttcgggctcggagggcactga

SEQ ID NO: 73312 - DNA, 468 bp, Heterodera glycines
ggcgtggaggacaatttgttgacggagagtcgcttccatcttctgctcgagcacttcgaccgcttctcctcccctcctccgtcttcttccgccgaggggacaatcgcttttcattcattggccgcccaccattcgtcacttcgtctccattatccgcccatttcactcgccggacaaatggacgacgccaaaggtggacaagtggcacttcaaacagagacaatttgacaaaattcagagtttaaagcccgtcgtccatttgggtccgtccttcgccattccttcccctgcaactttcacccggtgactctgcgaacgcttagccatccgacggtctactcgcccaattcctcctccacgcggccccgggacgaagcggcgctaattttgcaccgattcggcatcgaatgtcgcctgggcacgtcgttgggggagagcagttgcccggcaggaatggcaacggcagaa

SEQ ID NO: 73313 - DNA, 1171 bp, Heterodera glycines
atgaccttttgtcaggcactctcatgcgcccgtacaatttctgcttgtcttggctcccatctccatttgattctgccgccaattctgtccgtattggacgaccgcaaaacggaggaaaaagtgcgtacgtcggcactggacactttgcttgagttggcccgtcgacattccatcgaggactacgctttgcccgtcatgcaaacatggcttcgttgcattggcatcaagtctcaacagccgcgactgatggagttactcggcatcatcgtcagagtccgtcttcatttaagctttttggcggaaaaagttcatttccccttcattttcagaaatggactcagttttctgtgtacaaagagaatgtaaatgccgccttggtgcggtgtcgtgtcgaaccaatgctgtgccatgagtaccaggaacagttggcacttctccaggcgccttcatacgcacgccaacagcagcagcaacaacagaatgccattggcagtggtggaggcgtttaccaacaacaacagggcacattcagtgccagcacttcatcaccattattcgcgcgtcaagtgtcttttttaccaccaccgccgacgcaaaacggcggggcgacaacggacacttcgcccttgcccgacgcacacaacggaattgtcgggtttttacccgggcccggcggaagcagtgcggacatgtctcgagtgcacagaatgtcttcgggtaaggcgaacaggaaaatgccgggacgaatggttgggtttaggccgtgatctttcccgcttggccatcaatttggaccaattgcgtcgcttttggacggtccaaccactgctctcgcgtgaggattggcttcagtgggttggcactttgcgcaaccaattcatccgtcagagtccgtcgtccgcacttcgcgcctgcgctgtgttggccgaaatgtgcgagtcactctcaaagtcgttcttttttccccttacttttctatttttaatgaaataatttacagggaattattcaatgccgcttttatgtccgtttggactgaactgccggagcgggaacagaacgaactgaccaatcagctgatcgatgtgttgaggcactgcccccatgccgaacccattcagaccatactgaatttggccgaattcatggaccattctgagaaggcaataaa

SEQ ID NO: 73314 - DNA, 92 bp, Heterodera glycines
attttacacggcgcttcaattttgggctccaagtacaattaagttggatttttcgtcttagggtctgtgagttagtcaacaaaaaggggtct

SEQ ID NO: 73315 - DNA, 4274 bp, Heterodera glycines
gtcgaccgttttccgtcgatgtactttaatgaagtgcaaaatgatagtcgacaaatgaaaatggttgcatatttatacagaaagaaaaatcgaaatgtcaaaatcgaaggaagttcaaatttcaccgaacactttttgaaaatttgtttgtgcacgtttgttttttctttagtataaaggcgactcaactcaactcgcattatcatttctcgactttgttaaattcaaaacgctttttagacccctttttgttgactaactcacagaccctaagacgaaaaatccaacttaattgtacttggagcccaaaattgaagcgccgtgtaaaatttaacaaattcggacgattttccctaaagcctcattttgaaaatttagcctcattgatctatcaaaaaaccacaaaatgaggctaaaacctcagatctgggccctgatataggtacctaatcacagccctattaatgaagataagattttgtgtgttttttaatcttttgaaacttattatttcaattcgaaattctcaacccattattttaattttgttttcctttaattaatcatatttctatttccttttctgtgttattatgcaaaattcgctaccttcgccaatgcttgcacccattccaataattgagcccgcaactgtcactgttccgcccaatgaagacgttgtgggctcagatgctgagaatcagcaaagagaagaggaactcctggtcaatgaatttgtcatcaattcggaagcgatcaagcgcatattggacgacccgcgctacgctgacaaaaaggtccacaatattttcaattaaagtgactctgacttaatggaattttttcattaataatttatccaaacttttttttacaaattttggtaaaatgtcgatgagctctatttttcggcaaaaaaatcattaaaaaggtgaaaactatatggctaaacacaaacatagcatttattttagccctattccgaatttcacttcttaaaattggaacaaatgccgaaaatatttatttacggataactcgataaatacaatctcaaattggctgtgattcggaacaggccaaatgaatgtcacatttgtcttttttgccatataaaagtaaccatttgttttccttttaggtgtgtgtagtcagcgtggcgggcgccttccgcaccggaaaatcgtttattttaaacttttttctgcgttatttgcgttggcactcagcacctgttgctgacagaacaggagattggttggaaatggaactgacgttggggggattcagttggcgaggcggtgacgaccgggacaccaacggtattctgatttggccagagccgttcctactcgaagaccgcaacggagagcaggttttggcaggatggggttggatttggagaaacagcacacccaaaatttaattcccgagaaattcattggtctatgtatctatgtatttattcggatgatttttcaggtcgctgtcctcctcatggacacacaaggcattttcgacagtgtcagcactttcaaaaattgcgccaccgttttcgcgttgtccacgatggtttcctctgttcaggttttaaactgaaaaaaaaattttcgagtcaaatttaagggattccatccgttttttcattcatttgcttcccagattttcaacatcaacaagaccatccaggaggaccatctgcagcacttgcaactgttcacagagtacgcccgactggcgctggacgagtacaacaacagcaatccgttccaggcaatgctctttcagctggttgaccatttcgctaatttcagtcgcttttgttccttgtccgtgactggagtttcccttatgacgcggagtacggccaaatcggtggccaacgcattcttgacaaacgattggaggtactcaatttgactagtatataaaatcggatgcgtaaacggatgtactacatccccaggatcagttcccccgtattttattcacggcttgtcgatggatttgttaaaaaatatgtttaattttgccaggttacgccccgacaacacccggaacttcagcagctgcgccatcacattcgctcgtccttcgacaacattggctgctttttgctgcctcaccccggcctcgacgttgccacaaatccacacttccgaggcgaacttgacagtgtgtttgtttgctctttttgtgtgtccactgaattcaaagcatttcggttttccctttaggaatggaactcgacttcaaggcacagctccgttcgctggtgccccatctgttctaccccaacaatttggtcgtcaaacaaattggcggtcagcccatcacttgccgagagcttgccgtctacataaatgtgctctttttgcgttgaattcaaatatttaagttcaaatttttaggcttatttcgaggtgttcagcaaggctgaactgcccgagccgaagacaattctaaatgtaagcattttgatgctttccctccttatgaatgccaattgcttttatttttattaggccaccgctgaagccaatcatctcgcggccgtggtgagcgcaaaagcggtgtatatgagggagatggaagaagtgagttttttgactgattgttggggcgaatgataccgaaaagcaaatttttttgagatggcattgggtacacggcatacatggaaaaaagggtcgaccctattccctctttttcatgtacggttggcagggttccattcaataaacagaccaaacccagaaacattcacacgactcttcccaccccactcattcgaactttaaccaattcagtcgtgcggtggcgacgcgccctttatgagcggcgcggaactgcgaagcgagcacgcgcggtgcagggcggaggcgatgcgcaccttccaaacggcgaagaaaatgggcggtcccgagttggcggagcaattcgcacaaaaattggagcaggacatcacggtgggctttcaaattcttccattgaaatattaaattgctgaaagttatgatatttttgttaattcgctttctgtgcttttcaggaggcatttgaatcgtttgagcgcgttaacaactccaaaaatttgttcaaatcaatgcgtacgcccgccgtgctcgtcgcttcgatgattgccctttactgctgttcgttttgctttccctgggccattgtttgtgttcaaaattattctcaccaattaatgcaatgtttcaaattggtattttggaaggcccgtaaccaaaaaagatttgataagactttgtatgaggcaaaatcggctactttttttcctttatttttttgctcttcgcctgtaaaaattatcattgtcaatgttagtttaaccgaagaaaaaatgcattattatctcagttaattgatttaatgcaaaaaatttgacaaatttttaggtttttgtcccacccctatgctcattttccaggccaagaatttttccaactgctcggcctcgacaccatcgcctccattttctccctcttccacatgctgatttttgtcgcgcttggcatttggacatattcacgctacagcggccaattccgccatgcccaagtgttcatcgacggacgggtgcacgcgttgttgcacaatgtgttggcgcgggcctttttcaaggccttcaaggccgctggtcgcttggcgctgaacatgacggtgattagccatattttgttttcttatattctctgaaccgttttttaggcgaaacgcaataataatttgaagcgaaaatgaacggacggcgaaagcgggtcaaagcaacgaaacttatttggaccgaccgtaacaatttatttgatgctcatttatcccataaataattgttggttgattctttcgttcgaatatatgtttgtttttgtgaggcaatttcgactaatacaaccaaatttaaaaatttgaataacttatttttcgacaaatttaaatttaagcctttttttatcacaattaacaacattcaatatatacaaacaaaactgggatttgttagaattacaaaatgtgagtgttcttttgcgtgacttattaaatgcgaagatgaaagggattgaaatgatgtgaaattaaacaataaattggaattattcattggaaaagagagttgccgccttccccaattccgctcgcgtccaacagattggccatgatgcgcgacatggtcgcttttctggagttcgtcgcgacggaggacgagctgttcgccgccgccccagccgctgcatttaaaattgcgctcg

SEQ ID NO: 73316 - DNA, 1394 bp, Heterodera glycines
atggccaccgttttgcggtcgtccgctgaactctccgtcgagtcgattgtcgctttgttcaattgttacgtccattcggtaaatttttcactttgcgtttttcctatcgctcattcctctccattttgtttttctcttcagattttcacatttttttgctcggattttgatgcacaacaacaacagcaaatgttcggcaccaatttcgtcacttttcgcctccgccaatttgtgcaatcaatcgaaaagaaaatgaatggcccgggggcgacagagggtgggcaagacagtgtggaaaatgcggaggtgacagacacacagaaacaaaccaattattacaaatatggcacatgccaacgttttagctttcgttgttttgccgtcggtcgtcgctttgccacgcgttggacagaaacgactcggacaaattgtttttgctcgtcgaaagaattgttggcgttgagtcagtgtatgttttcctttctgttcttttgatttttatgcatcaaaatttggatgctttccgcagtgttttcctcgccaaacaaatggaattgcttcggcctttcctcgaggcgcttttgccaaaaagcggcggaggcagcgacagcaatttgtccttggactccttctatcgtgtttgtttgatttaaacgtttatactagagctcgattggacctggacccaatcctggggttttcctggacctggttttttgcccaagtccaacattgaatccaggtccaggcccattttatgccacaaatttgttttttcccccatatgcattttaccccattttcagtcccttgcggcggtgttcgatttgggcgacgcttcgtttggctgtgtggcggccaaaattatactctttcagtcaattctgaagcaaatttcggcgaccgattggacaaccggggaaatccattcgcaacattcgccttatgtggacacaattgtccaagtgaatggggaaaacagaggggggggggtgaatattggccaaaagcaaaggaaaaaatggccaaaataacaattgtcagccttttccataaggtgttttactggtgttcctttttaggaatgttcgcaattcaaacaaaagttcgtccgccttttcccctacgttcacatttccgacgaattgtacgccgccatttggtccatgcttttgctgtgcattttccgtattttggtccaggggtacgcggacgcccaatttgtttcagtggcaccattgacaaaaacgtaattttttaggtacgccgacgtaaaaaagtgcagcattgagggaagagcactgcaactgttggatgtcgagcaattatgtggggaattggaggagatcaccggactgaggcaatttcacaatcatccctttattttattgtaa

SEQ ID NO: 73317 - DNA, 436 bp, Heterodera glycines
atggaggaagttaaaatgtttttggagagcgaaacgttcactctttgcccggtgcccgtccaattcacactgtttgaccttccggtgagaaagaattggtcgtttttaagtcaatgattgacacttttgacggggttttccctaggttttcccaatggattgcattttaaaaaatgcttttcaaatttaggaatttttcttcctcaaagagttgcaacagaaacagcaaaatgatgaacaaacggaggaagagactgaacagaactcagtggagacatttgtccacggcaaatccatccgtttttcggtgtttcgacattcttcggaaatggacacggaaatattcccttattcgcctgaacaattcgacgaaagtgtgaggagaaaggcacaaaaaatggacatgaaaaacttttttgcgaagagaaagcattaa

SEQ ID NO: 73318 - DNA, 1354 bp, Heterodera glycines
atgacaccgcccattggtgcttggcctttacagggcgccccggtgtttagaataccccaaacatttccaccaagagcacttggaactaatcagcaattctcgcaaccgtatgacaatatttgtttaattggtattgttttaatttctcactggttttagaacaaatcaagcaatggcaaattacccttttatgctttcggcatctgttcctcttcctcaaacgcagactttccctctgccaaatgctttgccatttgccatgaattctaatggcggttctttaacatatccaacccaaatgaattacgcgcaaatgcctgcgcctgcacagaacactcattctgaacaagttccaaagaagaaaaaaaatacttcaaaaaagcaaacgaagtagtaagaaaaaggcttgagtcatgatgagttagtttcgatcttttgacaaatgctatgagaaggaaacgaattttagggcaaaagccgagaatgttttaggccgctttagcactgtttcaatgagccgagcttatagttcaatccactcaaatttattataagcccaaaaaatgcgtttccttaatgatttatcattcatttgtgtaattttttcattcttttttagatcattttcttaacgtatgtaaatttttctctttgtctacagatgaaacttcggcttcgaaaagttcggtcttcggcttagggtaaactaggcgaaattaggttatatgacaattttggtccggtcaattgttgcctgttggaagccagacattgcggccgcggtcggccattgcattgatttcatgagagccactttcggacatttgcgctcgatttcataagggctactgatgtgactgagtcctagaccttttggctaaatggtatatgactcagtcacaacaaaaaggaactttgtttttgtctctgaactgagcacgtagccacaaacgaattcacaaaatatgccccaccctaatgatggggatcttgactcgatttttcggtgtcgaaatccgattacgcacctacttcctcccctttacacaccctactctgtgcttatcggcaccacaatgctgccatggcggccttgtagacattgctgacctatttcgcgatttttcttacataaaaaagaatgccctaattatgatatatttatatatattatgcaatatacatagaaatacatgtacaaaagataaactaatttatatttttttatttcgcgggatttctttgacgcggcgggatttcgatgcagcgggattttgacagcgcgacagactcaacattttcaaatgctttggcattttttcttggaatatgcttaaatgataatttatcatta

SEQ ID NO: 73319 - DNA, 720 bp, Heterodera glycines
atggcggccaacgaatttcttgagaccgggaaaatgcttctcgacgaactcccaggaaacaaacaggcggagaataaatctgatgatggacttaaaccacaaaaagcgaatggaaaggcattggaggcgaaaagtgacaattttcagcaaaaagcctttgagtttttgtgtggaatcgaaatgaaagcaaaaaatgatgagaaaggaaatgacaaaacaaagaaagatgacaatttgttagcttttaaagaattagaagaaaagcgactcaatttttgtcaaaattggaaaaatggcaaaagcatttggaaaggatggaaagaggcagggatttcaatagtaacatcagtgaacaatttgaaactgaatcagcaaatatacggagaaagtcttcgaacattggcgaaaatggaaattttcaacagcaaaaacaaagaagaatttggaaattttgcgaaattaggcattgatttactaaagaaagtaactgaaattcttaaaggtaaccaattaagttattctaaacaaagaattttattccaaatggggtaattaaacatttaattgaagatgcgagaattagttcactggctctggctgatcagtctgatcatgaccaacggaaaggcaacaacacatcacgacgaaggaaaagggcttttcatgggatttttcgccgagagtttagcttggaaaagtgttttctgtacttgctgttga

SEQ ID NO: 73320 - DNA, 1768 bp, Heterodera glycines
atgagtccattgtccttttcgtcaagtgtttccatggggagaatgaacaacagcagcaggtaaacgaagcaaacactaaatgccgggtgtgcattaaaaaatgccaaatatgcccataaaatatgcattaaaaactgtcaaaaatggcttttaaccctcaaaaaagccagtacttgtgtaaaaattcagaattgactttaaaaaggtcgataaatacaaaactataatatataatgacaattaatggacttaaaataaattccggctaaaaatgtgtttttcgtattttgtacattaatttgataaaatccttcttttctaatagctctaaaatttcaaaaacatcgaaaaattttttgaggttccaaaaatgagggaattgaaataataaataattaaaaataataccaaaggctgtacaaacaacgacggaggacattgctgaaattaaagcagatccgtccccaaattgttgggatgccaccgcgtgtcacagtgacatcgaaatctctgattgcggtcatttgactgccgaatatacgggacaaaatttacacggtaggattactgtaattcatttgtttttaaacaaatcacatttttgtcaaaaggttggcgttcggtgttcgcaaaacagccagtgttgctgggcagtgactcttccggcattttttatttcgaaatttccatcataaaaaagaaacagtgagtgtcatataactagggcccggatttgtatggatttccatatttttttttgcacatttatttcggcctaaaaaccacgtaaatccccatattttggtattttcactaaaaattccaaaaatacaccccctaaagatagaaatttttggaaaatatgcccctaaaatcgaaaaatttcggaaaaataacaaaaaatgtgcaaaaaaatttcatgcaacttttgctttaaaaaatattttttacaaaaaaaattactaatttttgcttttttttactaattttcagaaaattttttgtccatattttcatgtttttttctttcaacgtttttgtccatgtttcgtctatattttgctatttttcatccatattatataatccatatgttggatttttttgtccatataaatctggatcactttaaattcattgaattttctctatttttgcttattggcaccgcagtgtttaaatttcaatattttttaaaaattctctaaatttgctaatttttggacaatctattatcaaaaaatgaccaaatttttaaaccccattttttcttaattaaaatgcctaacgttgaattgtcgcgtttcatcgccccaaaatatttcttttgaattttgataattaaaaattttgattttcaaaatctcagattttttgaattcaaaatccgattgcgtgcatttcctttttattttaatttcaatttttcacaattttcagctgggctaccatcggaatttgccccaaacagtcgagcgaattgggagaacgaatttgcaatcggaccggcacttatgcatacgaaagcgatggcactttttggcttagtggctcattgaaaataagaaacgccgaatatatttatggtgccgatgatgttgttgggtttggcgttgacttggccaacctgaaactgattttcacaaagaatggccaacatttgggttttaaatttttgaaaattttatattttacaacgcttaaacaccatccatttgttcgcttcgtcttccgatcaccaattatttcctttcgattctttgaatag

SEQ ID NO: 73321 - DNA, 751 bp, Heterodera glycines
atgaaagagtgagaacttttttgccaattaatccaaatatatatatattttttgcatatttttgtttttttttaaatttaagttgggcaaccattggattcgcccccaaacgaaatgccaaattggacgaacgaatttacagtcgcatcgacacttacgcatacgaaagcggaggcactttttggatttcgcgaaaacggcaaaatccatatgaatttttcgggaatggagacgtggtcggatgtggcatctattcagagaaacggcagatttttttcacaaaaaatggacaacttttgggtgcgtaaagtgcgaaattaaaatggaaacgctaaaatttgccagaaaatttctttgttttttaaaagattttccgtggggggaaaataatgaatccattttaatgtgctttttggatgttttaggcctttttttaattttccatatcatttattttccgttaattattgttttttacagaaactcccgactttttcattcccccttctgataatgatgatgattacgatgataatccgctgtttccatttgtcacattgtctaaatttggcgccaaaattgaggccaactttgggccggaattcaaattcgatttggacactttaaaggtgaaaacagcgcaaagaattttttcatatcgtaccgtaaactgcaaaaagtacaacaagtgtccgtttttctggtgtacggtattggactgaaagggcggcgaattgccaaaaaaattaaa

SEQ ID NO: 73322 - DNA, 588 bp, Heterodera glycines
atgaatttaaaatttcatgttttcaaatcagcacaaaattgttgggatgcaaatgcgtgccacgacgacctcacaatcactggcccaaagtgtttggcggtcattttcaaggaatttggaaatggtaattttatcagacaattaccaaaattatcaattcttaaaatgaattaaaaaaaacaattcaaaatttggactgaattaatcacatcgagtcaaaaaaggagagatcaacgaattgagagagagagagagggggagcagagaaaaatactaatcacctctcattttggagaactatttctttatctctgttaattgagaaaaattgaatacattccgatatgcattggatattccgaaaaattccccattttttgaaaatctttcaggggtcataaaaaattgtccaataaaaataattatttttttttaattaaattacttctcattgttcaaatattttaaattcaaactttgttttttcagaaaagcattgttttagtcaattaaacaattgagtttttgagtaattaatgtcttccgaaaaatgagtaatttctaatgtcaaaaatttagtgaaataaa

SEQ ID NO: 73323 - DNA, 1296 bp, Heterodera glycines
atgcttgatttgatggataacgagcaaaattatggtccgaaaaatcttccggtgacatttcgactcgaccccccgagatttttgggcggaccggtaaattggacaccaaatttctcacttaaaaaatttgtttacagaaaaaatccataaattagggctaggcctagcgcttaggcttgcttggtttaggctttatttagtataaattttatatccaacagtgtcaatttatcgggaaccgttttggggtgcacccgtcccccacctcattgaggtgccccgctgataggagggcagcgtcaaattgtcatcaaattgttcgggaatggtactgtagaaaaaaaaaagaaatttgggattttccgggattttttaaatttttgttcgacttcatttcgaccgactcgccgcccccaagcaaatcgtccggccgacaaattcgcaaatttttttgccaatcgctgctgctgctgcctccgtgcgccgaaccggtggaatccatgcggcgcaactgaaaatttccaaaattttagcttaaatatactcaaaaatggcaaataaattattaagaaatttaaaaaatattaaatttattaaaaattcgtaaaaataattgtttattttataaatcatataattaaatatttattttatttttgttttttgctggatttaagcgcagcggaaaatttttcaatattttaaataaaaatataccaaaaattgaaaatagaaaataaattaaaaagaatttaaaaatatattaatttattaaaattccctaaaaagaaattaaaaaattatttattttttatataattaataattcaatattttaatatttttcttaatttaaattgattattttattaattcttaaataaaattattttttctgactaaaaataaaataaatttttaaataataattacagtagacaaacacagtacagtatgcttttcaaaatgattacagtgaaattcctccggaatgttcttcgggcaaagttgccgacagctcctcctccccctccgccaccatatgatggcttatgatgactttcactctcatcatcctcctcatggtccgaagcggcttcctgtggagaaaaattgaaaaatattaaatttttttattttggaaaaggcactaattaattaattaaatttttaatgacaattttcagtaaaatgatttttgaaatttaaagtggaattaattagaatttattgaaaaaggcgcccatttttgttttgttttttttattttaaatatttaaattcccaaactttgga

SEQ ID NO: 73324 - DNA, 4847 bp, Heterodera glycines
  unsure (1)..(4847): unsure at all n locations
catttttatgcccaaaagtacggacccagtgtaagcagcaatataaacagaacgccaactcacgcaacaaaaacagcaacgccaaaataattgttgccaaaagaacgccaatttcaaatttgttaccgtttcccattggcgctgtacttttgctaacaatcagcactcaattctatatcaatttttgtgccgcgaattcaatcgcaatgccaatcggctccggtgaaggtgatgatgaccgaggcaacaaaatcaccaatgattttgtttaaaattttaagcgctttttcatagataaaatcactgattgattattgattgataggcaaaatcactgattgattgttcagtaatcagtggcttgtcccaattttaatggcagagaattccatgggattttaaccaagtttaaaagggccgtgggttcgagtccgtcccgccggggcggtgctcccttttatgttttacatgaaaaatcaatcacttttctttttggtcagcagcattggagattaattatacttaattatgtcatgttttttctaaatttccagctgccgacctggacgaatttgtcgccagttcctcaacggcgccgttgtacgccccgccaatgttggcatcggacaccggcagcagtacagaatgccaaaagtgtgatttgcgttcttcgtactgtaaacggcggccgacagccgacggtggtgccaaagtgagctgcgaatgccgacaggtgagagagaatggcgcggaaagtgtgaattttggaaggcttgtattacagtaatatttttaggtgaagggccaaatttcagaaaattctccaaaatttaaaatttataaatacagtaaaaaagtaggggaggtgtaatccgtgtttgatgctgtactcaaattaataagcattacagcgttttaaatccttgaaatccggtccgagtccagtcccctaatcgtgatcatgattcaaaattttacaaattcctgtctcgatagcttttcgattaatcccaatagattttatgggcttgatcagttattgattggatgatgatgatctctgttcgatcactttaccccaaatttcccctgcatttttcaaagggtttccatcgctcaaaagtcagcggcagttgtgtgatggtgaggactccttcgccggccgaattaccgtcaaaccggttggcattttgttaatttaaaaaaatntaaaaattttagttacggcgattttgccacaaaaattggcccctcgccaatgtccggcgttgacggcggaccgccgatgatgatcagcgaaatgatgtacgaggagaacgaaagtgatcagcaatgtgtgctgggacaggcggaaaagcacgcgacgaggtgggaaaagcaatcaatgaattaattgcattaattagcaattaattaacaaatttacacgtttttaaatatttttcaatttattttttcatcataaaatatagaagagttttattttttatttatttcattttttttatcatttaacattagaaaatcttttctttgcttaataaaaaaacaaattttcaattctttcaaattaatttttttttgtcatttcttttattttcaatttttacaaactaattttattttcatttattaattgttccaaaatttaaggatactctccgacattctgaagaggtacgaccgcaatttggtgcccagcataaagggcgtggacgtcgaaattgaactgctcattcaaaaagtgggttatttattagttgttccctcattaattaattagttaattcattaattacttcattaaggaccattacttttttgaaagaccctaaaatattaatattattttatttcaaaaaaattgtgactaaaatccgatttccgaacctcgaattgaatgaattccatttttaccgattatttagttttattataaataaatttttttttaaataaatgatttattcaataaatattctttaaaatttttgaatttaaaaatatttgatttatttgataaatattatttaatatttttgttatttatttcatttttaaatgttcttaggtcagcgaaatgaatgaaattttgtcctcctccaaaatggacattatgctcagccaaatttggcacgacccgggcctcaattttgaggtaattttttaaaatttaattgctaattttaaaatgttttagcaagaagaaggtgctcaatgcttgaccaatttatcattgtcatatcgaatggtaaattaaagtaaaataataaattaaaatatgttaaaaaaaagatatatttaaatgatttttaaataatataaacaatttgttgcaattttaaacaaatgttcaataatttgaaaaacattttctaactaaaaaattaataaacaaattaaaaattaaaatttagaaataaataaatgaaaataaaaaaaaaattgattttataaataaattcaaaatttaagacaacattcaaattttggattatctaatttaaaaaagtgaaaataaataaatcaaaaaataagacggcaattaaattttaattcaataatttaaaaatgagataagaatcaaaaaaataataaaatttatttttttataaattgcaaatattagacaacattaaacagataaatttttaaggtggataacatttggatcccaaatgtttgtctggtcaactccaaatcctcattcatccattcttcgcccacccctaacatttttctcggtataaaaaaattattttataaattaattattaattaatttttaagccatttttcccaatggtactgtttggctcaattatcggtaatcgtccaaaagttaatttgttatccaattttaatgcttttagcattgccgtcgaatcgccgtgtgattttgaattcacaacatttccagtaaaaaattgaattttgaaaacttttcttttttaaaaattttcattttataaaaatttttaataaaaatttaaaattttttttagaattatttgtcatttttttagaaattttcttatgtttaaagaaaaattatttattacgaaactcttaagcacttaaaagacgcaaattttattcatttagctgatgaagaattttttcaattttttttgttaaatattatttaaacttttaattacattttatcgctaattaaccgttaattgtattattttgttgagatggaccgtgttgagtgcacaacagttttcgagagttattcattcaatgtgggcaaagttcggctgcattggaaacggcaaggcattccggtggaactgatcgccaacgtaattaaattaaattaattaaattaaattaattaaaattattttattttatttaatttttaattttatttcccccttttcaaggtcagtttgcccgatttttatctgtcccattttctgtttgaaaaggccacattccattacccagctggtgtttgggatcaggcaaattaataattttataaatattgatcattaattaatcgagtaattagtaggataattaggcctataccttgcacagcaattaaattgttaaacaagcataaactttttaacttaaatattaaataatttacaacagaattgttgtcaaaaaagttattaatccaaaaatattaatattaaccttttaaataattataatatttaataaattaaaaataaattaattaaaataaaaattttaataagatttaaaattcttatataattttagctgaacattaaaatttatttccgacgtgcctacggcttttacattctccaaatttatatgcccacttattgcatggtgaatttttaattagactataataaatattcccccatttaattaggtgctaatttcatggatctcattttggctggaccggaagtcattgccggccaggtaaaaaaagtaaaattgaaaaattttattatttttttcaaattttgccagggtaactttgggcgtttcttcaattttggcattaacaatgcaatatgccaatgtggcaaggagcttgccaaaggtggaacaaacacaatttgttcactcatttattttataataaatttaaaattgtttaaaaaataattaatataattaaatttattaattattttcaagcaaaatttttttaatttgagtttattaaaattatttaaaattacttttaatactgtaaaattaataaaatattttttgcaattatttttattaaaattgcttaaaatatttataaaaaaaaatataaaaattattttttgcattttccactgttaaatattattttaaatttgtttttcccatttttaggtcagttacatcaaaggcgtggattggttcatgatgggctgtgtcacttacattttcttctcaattgtcgaacttgccatggtcggcattttggagaaggtcggcacagttaaaaaattaataatttaaataattttaaataaatttttataccattcaatgtttcaaataagatattgatgaaatttattccaaagtttgggaatttaaatatttaaaataaaaaaaacaaaacaaaaatgggcgcctttttcaataaattctaattaattccactttaaatttcaaaaatcattttactgaaaattgtcattaaaaatttaattaattaattagtgccttttccaaaataaaaaaatttaatatttttcaatttttctccacaggaagccgcttcggaccatgaggaggatgatgagagtgaaagtcatcataagccatcatatggtggcggagggggaggaggagctgtcggcaactttgcccgaagaacattccggaggaatttcact

SEQ ID NO: 73325 - DNA, 285 bp, Heterodera glycines
atgacttccactgttccacaaattgtgctccgtctgttgctctttgctgtcctcattttgaactgcttcgactgttgccatgggtaagctttcggaatcggaagcatttggcctcacttttttgcttatttctcggtcaattattttcccatttttcagcagagttcattctaagtccagcacagttccaacgactacgacgaagtctcctccagctccaaaaaaaggaagtattctcgacaaactcccaatttgggccaccattgtcatcgccgttttaattgg

SEQ ID NO: 73326 - DNA, 1314 bp, Heterodera glycines
atgacgacgacaacaacgacgaccactaccaccaccagcagcacgccaacgacgccaaaggggacgacgacggaaaattggagcgaatcattagcggctgctgttggcggaaagaccacacttgtgctgatcatcgttgggtgcgtttgtcatcattcattggggaccgaccaaccatgacgaagtcgtgtttttttgaatgtcgacaatggcacgaaattccggcatttttggatcgttgggggaccgatcctgacaaatgagtgtttggagtgccggcaatgggacgaaattccggcattttgggttgttgggggaccgaccctgacgaatgagtgtttttgggatgtcggcaatggcacgaaattctggcatttttgggccctgggatttcatcatcatcacagcagataaaaagcagtagtaatttcacatttttccccatttgttttttcagcgcactgattgcaatcattgtcctgctcgtggttgttgtgtgctgctgctgctgcaaaaaacgcaaacgccgccgccgccacacttctgccgacgacgacaacgacaaggaggacaacaaaaagcgcaaacgtcgccaccacacttctgctgacgacaagaaggaggaggaccaccaccacattgaccagcacaataaggaggaggagcagcacggaaaggaggacaacaaatcgccgatacaaagcgaactgaaagtgtcgacgatttccgccgtgccaagcgactacaacacgaacaaacggctgggcgcaacagatttggacgtggaagcggaagaggtgccgaagacgaagccggttcccaaaaagccgaagtcagaaggaggcacaaagcgcaaactgtccaatttcttttggtccaccggcaccacggagaagcgaccgagcgcggcggaacatggcgtggaagtgccggaaacgattcgtgatgatgaagattgaagatgcttgaatgatggtgttgtattctgtatatacctatattatatattgtatccagtattctgtgtttagccatgcatatgtttatgtattgtatgtgcgtattattgtattatatttacggtattcaaagcgatgtatcatttaacacattcattgttggtatataaattttatttgtgttgttttgtatgtatggtctgaaatttcggaaaattcgcatagttctcaatgattttgtttttccgatcgactccctcagcttgtttaattttgttggcccacatttttttgacaatttcagctccgccgatttttcagagaaattgcacgaattacaatgactgtatttcta

SEQ ID NO: 73327 - DNA, 676 bp, Heterodera glycines
atggaagggtattgcgacgctgtcaagcagtacacggacaaagacgggtgaggattggtgggatatagaaaatgtaaaaatttaattgaatcgttttttcagccgtttggcagcggagaaaaagcgtttgttgagccgaatcgacgcggtgaaagagcgcattttcacattgctgttgcgaatacgcaagggtgggacccattacgactgcttatatgtgctgggacgatgatgaaatcccagggcccaaaaatgcagaatttcgtgccattgccgacatcccaaaaacactcattcgtcaggatcggtcccccaacaacccaaaatgccggaatttcgtcccatttccggcactccaaacactcatttgtcaggatcggtcccccaacgatccaaaaatgccggaatttcgtgccattgtcgacattcaaaaaaacacgacttcgtcatggtcggttggtccccaatgaatgatgacaaacgcacccaacgatgatcagcacaagtgtggtctttccgccaacagcagccgctaatgattcgctccaattttccgtcgtcgtcccctttggcgtcgttggcgtgctgctggtggtggtagtggtcgtcgttgttgttgtcgtcatagttgaacctgttgatcccgtcgtacttggacttgttacactgaaataaa

SEQ ID NO: 73328 - DNA, 853 bp, Heterodera glycines
atggaacaaatgtgagagaaaggaaaatgtttttgaaaattttgttttttaagcggcactttcaccgaccaaatttggctggacacattggcatggcttggacgtgaagaaatcggctggtactttgcgctggtcaatgcccgcttcgccgccctggtggacacgcagttgcagcagaggcgatggtacttgacggagttgcacatcaataagcgcaggtcgagagggagcggcgcagaagtgatggtcttgaacagcgaaggcgccttcttctcattgccattggcaaccacaccgatgccggacagtgtcgtcggcttcaacggcacattcaacatttggtagtcgccgcccattttctcaattttgaatttaatggcatttttgttcacccccacattttttctgcaggtatttggacgtccaagtgatcaagttcctgcgccgaaatcgccgcctgttcagcaccaacatctcgctgcagttcaaccatctgattacggaatttcgcgcttggcaagcgatggcacggcacatttggcccctgttgaggaacggactccgcacgctggtcagcctgaagcgcaaacaactggcactgatgcgcaaacacgtgtcgccaaccgtcctcttcgactgtccgaaccttgtcgaaatcctcaccccgattttgcccgaacgtccgaccgttgacaacaccaattatgctgctgatacatcggcccgtgacctgtacatgtggctgcacatgccgcgccctgacggtcgtccgaaggtgttcaaattgaccaaatgtaacaatggatgggaccaattcgtcaaccaattgctctcggtgggtatcgtgggatga

SEQ ID NO: 73329 - DNA, 946 bp, Heterodera glycines
atgcctcaactgcttcgccttgttgctggagttgctccgctcgctttgcttctgtttgttgctgctgtttgtcagttgtcggctcttccttctgagtcacttttgcttctccttcttccgatgatgcttttgattgtgcagtgcccagttttgttgtttgttgtgtcgtcaatttgtgcacacttctgcctgtgctcagctgccgttgatttgatttgatggcacggacggaggagaacagcagcggcaataaaatagaggaaaaattaatattatttggaatgaatggccggaaatgctaacatcactcccttttatactgctcattcattcgaaatttgaaatcctttttttaccgaatcagagccccgagcccctataataagggtcgctgatcacgaatctgacatcactttcgactaccggattaagatttaaaaaattggatatttcgtggctcagcgaaaaaaggggccgcttaaaaaaggcgtcaaaattttatgcgcaaaattctctccccttataagggggtttctgtgttcactttcgtcatttttgtttttgtttcaacttcaactacaacaacaaatgatgccgtcgcgttcatttttcatcaaattcaaatgggaatttgcctttgtcgcgtttctgctgctgctcagtgaatgcttttgctcggttggcgcacaaccaaccggcggccgaaagtaaaaatgccatttttttttgcaaaattttccattttcacctcccctttttatttcagtgtaacaagtccaagtacgacgggatcaacaggttcaactatgacgacaacaacaacgacgaccactaccaccaccagcagcacgccaacgacgccaaaggggacgacgacggaaaattggagcgaatcattagcggctgctgttggcggaaagaccacacttgtgctgatcatcgttgg

SEQ ID NO: 73330 - DNA, 1180 bp, Heterodera glycines
ttttcctacaaatcgttgggaaaatctggcttattgttagaaaatttttttaattctttggggaacgaaaacgatctgggggaaatgaaatgcactccaaaattcattggcataaatatatgctttgttgcgcttatttgaccatattttcactttcgacagacgcgttacggtgacgcggccattcgtcgcgcggtgccgttggccctggcgctgctgaacacgtccaacccgcagttgacaatcatcgagacgctcagcaagtacagccacgacgcggacacggagacggcacggaatgcaatctttgcgctcggattggtcggcgccggcacaaacaatgcccggattttggcaattctgcgccagcttccactccaatgaccaggtaattattgaaaatgcagtaataaatgctaagtttagtgcagtaattagtaacaaggaggattttgtttctttgccactttttataaacgggtacttgggccctgacaaattccaccaaaagatatttcaatgatgatgatttttcatgtagagcatggttgatttactattgccaatttcggcttttttggctccgttgccgaaagtgatcagaaaaaatcgatcaaatgaaaattcaaccaaaaatgccttaaaatttagtgccattttttcttcttacgttcaaatgaccatttttcatgggtttgggggtccgttcggcagacgatgaattattttgatttttcttctaagtattattccacctagcatcttttgatttagtattttatttaatttttgatcctattataatagaaaaatttacgctgaacgtttttacaaaagatttacgaatcaagcataaggttggatttttaagaatttttaaaaaattaaccattttccaaaactttggtcgattttttctgatcacttttggcaccagagccaaaaaagccgaaaattggcaatagtaaatcgacactactctacatcataaaagtgtcagaaattaatttttccatgaatttctcttattttttaaaaacattattttgcataattgcacatccaaacacagaacacgatgatgctgctgcggatcacccatggactgatgcatttgggcaagggcactcaaacgttgaacccattccactccgatcgtcagttgatgtgccccgcaatt

SEQ ID NO: 73331 - DNA, 395 bp, Heterodera glycines
atgaccaattcaagcagtaaaaatgccgaaaaggaaggaggaacgaagcaagcccgagagcggcaccttcaccgttctaatgtagaagaagctgaagcagccgttgtggaagctgaagcggaggaggaggaggacgacgacgacgacattcattattcgaagttcgccgatgatgccaagctgctgccagccctgctgaagcccgccttccaggtcgagcagttcacgctcaaggtgaaaagctgcctacacatgcccttccgttggaaatacaacactttttgcagaccttctttgaactccacttggaagtcatgggccgacgcgactcccgggcgggctgcttgcgcacattcaacatgacggtcggagacttcgagcccgatgccacctga

SEQ ID NO: 73332 - DNA, 970 bp, Heterodera glycines
atggagttactatatacattgaaaggtggcggtggatcaaggttttctcgaatggttccgggtgtcgtgtgataacgagagcgcattttgaggcatatgcctttcttctgtgtgcaatagttccgatatattaagcataaaaaacgctgtttccgcttggtctgaagcttatacttcgacttttattttgcctttttttgcctttttggcattttaccgttttggtgtctttttggagttttttccgaaaaattccattaaacttcaataaaatcgggaaaaattcggtggtttgtaaataaaagtattttataaaaaatcaatataataaaatcatttattttttatttatttttatttttatgagagttgttgatcggtctatgtcagttcgtcccccacggttcggccccagcatgtttttccactatagctttctataacttttttctttgtaatccaaatccaacattgttggtatcattcgaaagcttaatctgtttataagctttttctaagctattgctttgcgatacaattgcgaaaaaagttatacattaaaattgcgaaaaagtcaaaattttcaatttttttcttaataaaattttttccaggcttgaactattcgcttttggtaggctaatagagcatgttaagagctttcgaatgataccaagattgatggatttggataacaaataaaaaagctatcgtggaaaaacatgctggggccgaaccgtgggggccgaatcgtgagggccgaactgacgggttccgttgttgatacctttttatacacttcgccaaaatactatttaatttgtaacaaatttaaaaatataaaacaaagaaaaaagcatccaagagatgaagttcattaaatacggcgttacctttaccataagctgcagcatcttttaatacgcgattaggttaattaaaagctaaaatataatattagcaacacaaa

SEQ ID NO: 73333 - DNA, 2091 bp, Heterodera glycines
atggtcagcagaattaatattattctagctaatgaagatggagaaagtttagcagagagtgtgaaatcaataagaattgggcaaagagaaaaaattgaaacagaaggaaatggcgacaatgaaaatttacttaatgcaaatactaatttttttagaataaataatcagggccaaagaaatgggaatggtagtgataatgtgaactaccctaaggcaccatggccacattttgaaggggatccattaatgtggccggcattttggcaacaatttagtgctaatgctggagacaaaaatattccggatgttcagaaatgctcttatttacttatgagcctaagagggagagcagaaagagcagtaaagggttatttagctacgggagaaaattatccgttaattgtaagtactttgaaaagacaatttggggatttaaaggtaattagggaatcgcttcaaaatgagttgttgaatctaccgaccgcaaatgaatcagttatgtcactgaggccatgttttgaagaattagaaagaatttgtcggcaattgcataattctggattaaatgaaggagaagatagtgagtttatgttaatgacattaaagaataaattcccaagagcaattgtgttggaaattttgaaaaaggagaaagattctgggaaaaaatggaaattaggagagtggcgaagaaatttgaacgatgcgatatctttaagagaagaagctgcccgatgtactcggagcttaaatttaaatccaagcgaattcagaagagtttttagtatacaaacaagtggtcggaggcctggacaaaattctgaaaacccaagaacgggaacaatcccaaattgttttttatgtggtaagacgcattgggcagcaaattgcaaacaagttattggaagagaagcaaggcttagaattataactgagcaagggagatgtcataaatgtttaagaaaaggccacagtaaaaaccaatgtactggaaaaaattgtattatttgcaaccataaccatcacaaagtcatttgccctaagggtcaaaataaccatcgaactggagccaatgcaattgaattaggaaaccaaaataatttcagacaatcatctcgcatgagtactgaaatgaggaacgggaacataattgcattcaccaacgtaaagaatggcaaagaaattctattaatgacaaggagggtaaaaatatttgcaggaatgagttcagaaaggtatataacagtactattatttttcgatggcggcagccaagtttcgtttattacggatgaattaataaggaaactgagacctccgcgtattggtgaaggatattttggatttatttgcctataggcagcaaacaccgacaagaattattcacctaaatattatgtaaaggttgagttagaaaacggcgaaaaagaaggtataatagtgagcaggattgataacataacatgcaaattaaaaaggcttaatttaaagtcaggagagattgaattaattgatgaaaaaccagatattttgataggaatggcagaattttggaaattctttaagagtgtttctccgataacagataaattgtttcgggttaatacgacagtgggtcctatagtttgcggtcaattggactataattctgaaaccccacaatttgggggagttgttgcgactgaaaaatgtgaagaagaacctaaccagttttggaacttagagacaataggtgtctgggataacccggaggagaaagatgatgaaattgcattgaaaatgtttaatgaaacggttgagaggaaaaataacagatatgttgtcagttggccatggaaacggccaaaaggagaacttccaaccaatttttcggttgcgtatcgccgtttaataaatttgctaaataaattaaaacttacaccaaacgagttgaaagcactaaatgatgcgtttcaagaaaatttaaaggaagaaattgtagaggaatcaaagattttgggatttaatgagcattttcttccacatcattgcgtttttgcgtcaggaaaaaaccgaggattgtgtatgacgcatccgccaaaatcagaggag

SEQ ID NO: 73334 - DNA, 519 bp, Heterodera glycines
atgacagcatcgacaaggggacaatcaccagcagccccagagtaagtaatgccgtcaccgccaaggccaatttccgattgcttttcattgtcagttggtcgattgctgacgccgacggcatgcttcagcgcttctgagcaatttttttcagcagattcggcgaaaaagccggcccggcacgaatggtgttgaatagagtccggtaaaaaaaaatttccgggagcgggagcgggatcgggagttcaaaattttccgggagcgggagcgggatcgggaatcccgtgaaaatcccgctcccgttaaaatcccgcagaaattttacgggagtcccgggcgggagcgggagtaattcgaaaatttaattaaaaactaacaaaaatatttttaatgcacaaatttgaaggaaaatccttttattaaagaaaaaatagatagaaaaatttagtaagcagaatttgaaattaaaaaatcacatttatgggtcgaaaatcagtattttttcaaattgcttcaaataaa

SEQ ID NO: 73335 - DNA, 1038 bp, Heterodera glycines
atgaatgttggtaaaagtgctgcttcaccacgtccatggtcttcacatagtaagtttttaatgaattttttaatttagatttttttttgaaaaaaaaattttgcttacatttattagtttttgtacaaacaatatttgtctctgatcagcgattaatgcgttcgttgctttagcagacaaaagtgagcgaatgaagcagcgatcaaaaacaattgacaagcgaaaaggtggtccacaaatgcaacaccaacaacgacgagcagcgacaaatttccaaaatggtcgaaaaacgacgacacaaattcaggtgagaaaaaaacaacaccataaatggtgcacaaattttagacatgaattttatgtacggtttgtatgtccctactaaatggtgtcgaacggagttttttacaatttcttccataatttttttttcattttttagcaattattttcaatcatttactcagaaaattgtgttttttttcaattttggatgtccaatgttttaacatatttgtgatttgtcctcatttttgaattttccaaaatcatgcacattcgttgtgtgttgtgtatagggaaaacgcggacttttatgttctttctcttttccaattgattttcttttctcttccattatttgtgtgctcaattccactgtcattcattcattttcttttttcattttatttatgtggcgtttcgttccaaaagcgctgttttaaatctttattttctcctattttttcctgcaaaaaatgaccaatttgttctctttttcactcacttttttttctaaattttcttctccttattttaaattcttcaaaaatttgtatcttctactatagtttgacggaatgccaaatttaaaaaaaatgggaaaataaaattatacaataaaaaattcaatttgtcttttcagctcactcatcaattcttgtccactgggctccacgcgttgttcccctcgctcaacggcactcttcccactgcgaatggtgccgaccgaggcgggttggcactgctcgagcgtga

SEQ ID NO: 73336 - DNA, 898 bp, Heterodera glycines
atggatgtcggattcataatcaactactccgaaaaccaagtaattaaggtttttatttgcaaagtgaaaaaaaacactaaaaaaatttggggcctaaacggaatacatatgtaagagtccgtgtgatttgactttttaatttgtttgataatttggaaggaataaaaaatgttgggaaaagcacccaattttgtttacagattccgagacccaaactgtttatgacaatgtacatacatataagcgacgcctaaaaattcgaaaattagaataatttcctgacttcagaaatttctggaatttggaatttaagcatgccgagtcccaaaaaaactgtgaattttttaaacaaatcaattttgttcgataaggctatgtatgcacagatacgcaaaattttagtctcaaaatctgtacgtatggtgccaaattatgtcatgaggattcaatcaagaatggaactcttgaattgaatgctttcatttggcacccgcccttactctgcacgaaacatccaattgactttttgtatcgaaagttgacaaaatatggaaaagcttgaaaagtcgaatctgttataagatgtgctaaattagaatatgaaatggaaaaggtctcgttatttttacttcaagaattatgcaaaaaaatttatttaatattttcataaaaattttttgaattttcaaaggcacccattcgaatgtactaatttggtatgtttattagacttggtggggtaaagtcaaattagtatttaaaacacatacttgatgctaatgagtttctttttatttgtgccgaaaaaaatgcaattaattttttttttgcccttaaaatgtgccaattcagtatcattcattatttgctaggctaaatttattccgacttacataaa

SEQ ID NO: 73337 - DNA, 965 bp, Heterodera glycines
aaatggccgacttccccgattcgggaaagcattgctccgtgccggactgtcgacaactcggtgagaaaaacggaggggacgggggagtacggcatggatttacgcccaccatttttagactatttgcccatcacttgcgatgcttgttcgcgcattttatggtaaattcatagggcatggtattacggaggagagattcattttgggccaatcgtattaaaaaaattgaatttttggcttaaaggaagatgccaaccgaacccataatgaattttgatttaattaacaaataagagttgtttaagcaaacagcacagaacgtacgactcccacggctgcacagagtcatacaaaaaggcaatgtttgcaaaaaccattttacgtttcatattttaccaatttcagaatgtccaatttccgatttgtccgttgtgccaacaaacggtgccaattaaacgtggcgaaaagcccgacctgcgagtcaatgagcacatcgaacgcgactgtcgttctgagttggcaaaaaagggacgttgggcacctaaatgcggcgtgaagaactgcttccggagagaggtgaatttcggcaatttgaaaaatgccgcaaaaataaaaaaataaatgctttccccatttgccaactttcgcagctcgtgccgatggtttgcaaagaatgtgccgtccatttctgcctcagccatcggcaccaatctgaccaccaatgccccaaaatgttggcactttttgtttaaaatcaataacggaccattttcatattttaggccaatggtttcccatcggacgacaaaggtaaaaataaaattaaaaaataaatggaaatttgtaaattttatttgattttttaatttgtttatttttcagccaaaaaatgtctcctcaaaaagtgccgctgaacaaatggacgccctttttgctgcgcaattgcaacgcgaagaatacgaaag

SEQ ID NO: 73338 - DNA, 297 bp, Heterodera glycines
ttcgaagcattgacttctcgagattgagaactttctgaggcttaaggccgagaatggcctcaagactgacaatgggccctgatgagtcccgggctacgcacggttcacagtccggaccaacaaaaatattttaaagttcgattcacacggagttcagttaaatcgaacattttttcgggattcatcatgcacatcagccaaaagttaaatcacttttgaaattgcatatcaatttgagattaccactccatccatataattggcaattcatttttctaatttttgtatatattaact

SEQ ID NO: 73339 - DNA, 678 bp, Heterodera glycines
atgtttgcccactgttcaaccaaaacaacaacaaaaccaacaccattctcgagaacagacaaagcgtaagtcgaagaaagtgccgaccaatgattctcattctttttgatcactgatttgtgggtcgcgtccgtggtattcttgttgtcttattgttaggcttggttctgctctatccccccccccccttcagcttatcttctcgtttccgttttccttctccattaatccctgtatttttttggatcccatcattcaacactactcattaattaattaaatttaattaattattaaccttacttttaataaaatataatttatttcgaatttcccctttcccaaaggctttccttcgtcccccgtcggccccgcccgttccgtcattcgtcgcgcaccgttcatacgcccgcagaacgaacaaatgcacacaaaaagtgcgccggtcgccgccgcttttgccgtccatccgccggcgattcgaccgccgaagggaatggcaacgaaactgaaccaagccaaactgaaggacttcttcagtcagatcagaatgaagttgcaaaaagcatgacgaagcagcagcaaaatggacaaatttgatcagagggggcgaagagaaaagaaaagaaaatgatcagaaaagtcacttttgcaaaagttcgattgcacaaaacataa

SEQ ID NO: 73340 - DNA, 623 bp, Heterodera glycines
atgcgtccaacggagtgcgatgccgacgacggcggcttcagcgccgccttccgcctgggcaccagcggcgctaaagcgcccccaccgccgtacaggtgagtacggagcaccgcaaagccacaaggcatacaaatcaggatgtttgccgacgccctcatttcgaaaagcggaattccgacatctcaaatttcggcattaaatcggaattcaaacggcttaaaaaatttctgaagtcatatccctggggtgctagcgcgtttgttaaaaactgccacccatgcgcgtttgttaaaactgacaatgggtttgaaaacaaaaaatgggtaaaataattaaattaatagcctggctcaaattcaaccaaattaatatttcgtggtatcattcaatagctttaattgttctctttcagaatataattttcttatatttttaacttaagtataaaagaagttatggtcacaaaattgcaaaaaatcttaagtcagcattttttgttcagaactgttttgaaactcaatgaaattttctaaaattttaaatatcaatagagaattcttagggctatcgaaacataaattacttctggctaaattgcattctaaagagtttacgatattaaa

SEQ ID NO: 73341 - DNA, 163 bp, Heterodera glycines
cttaagttaaaaatataagaaaattatattctgaaagagaacaattaaagctattgaatgataccacgaaatattaatttggttgaatttgagccaggctattaatttaattattttacccattttttgttttcaaacccattgtcagttttaacaaacgcgc

SEQ ID NO: 73342 - DNA, 1293 bp, Heterodera glycines
gccggcggtggtggtaatgggcagctgcaacaacagcagatgcaccatgtacagctccaaggccgactcgtcggcacacagtgcgttttgggatagtttttcaaaaatatgtgccctgccttcgattttggcacactacatagcctaaaagtctcgagaaaaataagtctcgacaacgcaaagttttatggcggcattttaccctatttatggcacattccgacaaaatatttggcactatttttttggcaattacctttccgctcccccaccccttcctggcattttttgtgccacggaatttatccaaaaaggcagtcattgacgttttacacatcctccccggccaccccttaccaagttccattattcattggcatttttctctttttcttactcattccgtggcactttttgtaccaaccattaatttccccaaaaagactgtcattggcattctccgtcacttgtcgtggaccacttttgggccccggctgtgacttggcatgcaacagctcagcagccaatccgtccacggcaatttgccaaagtcgtcgtaccggcttcttctcattgtgccgatggataaatggcggtggcggcggaggcattgggcaacagcaacaggtgggataaaaataataaaaattttaaaaaataataaaattttttttacttttttttccttttattaaaaaaaattaaagctgctgatcccttcagaaattgagacatgattttgttatttcgagaccaattaaagaaattaattacaaatttgatttaaaaatatcatagaaaaaagctaaaattccaaaaatttaatttccgaattaggaactaaaattcaatcatttttgacttgctttttttatatacagtacaatttgatcactctttctgacaaatgatcatagccaaatagcaattaaaaataaataaaaattatttaaaaacaaataaaaaattattttattttatttttttgctgtgaatgagtttcgaagacttttttgcaagtttccaccagaaatccacgacaaattttgtcggtgaatttcatcctcgattccccgacttttctctactcgccgaagggttggggcttaagcctaattgcatcatttaattgtcattcattattccttccattctcggcagcaggtgtccgactgcaaaaactgtccatggggcatcaaagagaatgcgtattgtgcggacggagaaggcggcgtattggagccaaatcatgcggtgattttggatttttggaaatttagagatttccatttt

SEQ ID NO: 73343 - DNA, 254 bp, Heterodera glycines
atgcctccgccgccaccgccatttatccatcggcacaatgagaagaagccggtacgacgactttggcaaattgccgtggacggattggctgctgagctgttgcatgccaagtcacagccggggcccaaaagtggtccacgacaagtgacggagaatgccaatgacagtctttttggggaaattaatggttggtacaaaaagtgccacggaatgagtaagaaaaagagaaaaatgccaatgaataatggaacttg

SEQ ID NO: 73344 - DNA, 66 bp, Heterodera glycines; identical to SEQ ID NO: 59916

SEQ ID NO: 73345 - DNA, 146 bp, Heterodera glycines; identical to SEQ ID NO: 56264

SEQ ID NO: 73346 - DNA, 146 bp, Heterodera glycines; identical to SEQ ID NO: 56264

SEQ ID NO: 73347 - DNA, 146 bp, Heterodera glycines; identical to SEQ ID NO: 56264

SEQ ID NO: 73348 - DNA, 319 bp, Heterodera glycines
atgtggcacggcaccgccgctgctggtcagcagaggttggataaaagtgtccacaacagtgacagtgttcgtctcgtacagcgagccgtccatgttgatttgtgggcccaaattatgcacaacgacggcgatggcactctgtgcgtggggtttttttggtggttcgagtccgttgtgcaacatgaatatttttatttatttttgtccaaaaaattaaaaaatgacgatttttaaaaattatttttggaggtttttaccaaccaaactggacaatcttgtaatcattcgaaagcccttgattaggagaagccttttctaa

SEQ ID NO: 73349 - DNA, 1068 bp, Heterodera glycines
atggataaaaatttgaaagaattgcaaaatgaattctgtaaatcatttaaaactggaaattttcaaaatgcgatggaaatgtttcaaacgacaaaaattgaaaagaaagaatttgacaaaagccaaatggacacagtcttggcaaaagatcaaattctcaatgagaacaacaagcgaatgtttgcaaaatttgtcaatttttccagcaaaatgatagaaattcttcaaaatttaattgaatgtaaaattttattttttaatttaaaacaatttccgttttcagcaataaagttgcccacattccaacaaaagccaaactttttcatggccagaaggaaaaagcgtgcttctgtcttcggtggctgcttctttggattgcttttagcactgatcgctaccgtacccttttatggctacaacagcacttttgtaattttctataacaatggttattctaagttagtgatcgagggcaacaatttacgttctaatgaattcactgtctattctgatcattatcctgatcacaacaacattaatccgtggcacactttgtttgtcattttcgcactcctattaaccattggggcgatctttgcattgatgttttgttcatgtttctattgtatctaccgtgttgggtcacgcatattttctgcgtgagcacacaattacggtagatctgactttagtgccaaagtttttctcaagtgtttcattttaatatgccagcggtcaactgatcaattgatcaggtgatcagaaaaatgtctgacattatccggttatttaatcatttttaattgaaacacttgttgttggttttcactgttctgtcagtttccaaattgggcctttctttatcttcatttttggacattgtgtttttattcgctgctagggcgaaccgaaaaatagtctcagtgtcaataagaatatttaaatttaattatttaaatcaatgtttttttattgcacattaattataattttcaaataacaataatataatttcgaggttcaacttttcttcaatgttttttcttcaaatattccgctcaaaataaa

SEQ ID NO: 73350 - DNA, 496 bp, Heterodera glycines
atgccaatcgcattttcctgtatccattcaatggccgaattggcaccaaagtttcccttttttatttggttaaacaaactcgttgcttggtcaaccagtttgttagcttctttgagttggtctaaaacagataagagcagtgacgcgataaaatcgaacatgagtatcagggctgcacgcaagtggatttacaattacggaaatccgcaatccgcaattgcgggggtccaaaaaccccgcaatttccgtaatccgcaatccgcaattgcgtgcagccctgatgagtatagaatgtcataattgagacctcctatttatttattatttactgaaaaaattgaacttagaaaaagcaaaaaactaaattttgtaaaaaaaaacattacgcgaattttgctcatcaagaatttttgcacaatttttgtattctttccgaaatttttcgatttaagggagtccaaaattttaaaaccctgaaatatggaaaaatatggaa

SEQ ID NO: 73351 - DNA, 588 bp, Heterodera glycines
atgtccttcccacttccattgcgcagttttgaaatgggaatttgcaaagattggtcaaccagggccagtgggatgttgcactttttggataattttaaatatttattttttaatttaatttccaacataaagagagcattactatcatttcattatctcaatgtaattcgcttaaattgtccgtgtgaataaaagaccaacatcaagtgtgccatctatggttttccccgacttttgggaaagaaaagtcggagacaaattctcgtcgggaattagtcttgtgtctcatattttggcacgagataagggggaaggggggggggggtaaaaccttcatatgcatttgtcaattcggaatttaaatcaaaatttcagctttccaacatgcttattttggccctcgttttgccataccaattttggccctcctattattatgccaattttggctgaaagacagatacaataatgaaagagtggggaaatggagaggaagagaaaaacacaaaagcaaaacgaaaataatgcaaattctcgggggaacaccacccgaatagaacaaactttgtttaaaaaaaatcaattaaa

SEQ ID NO: 73352 - DNA, 408 bp, Heterodera glycines
atgggagacgcatcaatccaacgattgacggatattttgcagcagttgttgaatgcacaccagcaaaacgcgccaccggcagagaatgcctctcaattgccaacacttccggacgtggaatgttttgatgctagtcagcatagtggctgtgaaattgaggactggctcaagcgatttaagttcgctcttgactgtgccgcgctgaaccttcaggacgagttgaaggtgaagctgttgatgaccaaattgtttggaccgacgttcagcgaatattgtaagtccgtcttaccgagagaagtgaccgacttcaattttgtggagactgcggagaagctgaaggcattgttcagccgacctcaatccgtctggattgacaggtatgagtgtctctgcgtctccgctcggtga

SEQ ID NO: 73353 - DNA, 924 bp, Heterodera glycines
atgtcgacaggaactcggagcagcaaccgatcgcagcgcgaatgctggcgatgcggtgggaagcattcgtcgagggaatgccgacaccaagaaacggtttgccgaaagtgcaagaggaatgggcacttggaaaggatgtgtgccaagcaccaggcatggctaaagaagaacggaggaaagaaggaaaaagcggtgaacaacatccgagttggaggagttttcctggttaaagatgagaaccagaggaagaaaggaatgatcgaagttccgattgatgtggacggaacgaatgtggatttcattgcagattttggcaccgaaggaactattcttcgtgaggacaccgtgcgaaaaatcggagctttgaaattgagccgttgtgaagaacgtgctctgtaccatgatggaacaactcgaccgtttgttggcaaaggaaatgcaacattttcgttcggaaatcgttcagcatttgggcatttctttgtttccaaagacggatcaaagaacttactcggaatggacatgatggacagactgggattgtcggactccatcggtctgaaggacaagttccaaactgagactgccaaaatgaacggagtgagcaagaagaaagtgaagaaattcttcggaaaacacggacgtggtaagaagcagaacttcgccgttggagcgaatgtgatcgccagcttgggagacgagccatggcgcgccggacgtgtgatcagccaaaaaggaggcacctacgacgttcagttttcggacggcacgaccggagaattcccggcaaagagtgtacagccgtacatgccggatgaagatgaaaattttaattttcttcttgacggatttggactgaagagcgcctcatccggtggatctgtcgggaagcaccaaatcggcagtgacggccgacgagattaa

SEQ ID NO: 73354 - DNA, 1683 bp, Heterodera glycines
atgttggcacaagtttatggcacacatcttggccttttgcaccgcatgaggaagcaatggcaaagtgccaatgccaataccaaaattcatcagaataaaaatgagcgctgtcaatttcaaaagtgtttggatgctttgtatgaatatttgttccgcgagcacatcggacacaacggcgcggtgaagcccatttttctctacagtacctatgacaattcggacagatgcttcgctacggtatttgatgacatcaaatgcatggccagagtctcgaaaatccattttaattggccatttggtgaggacaatgaagaacggatggccatgatgtttgacacatgggaatcgtttgatgaaccgccattgattttgaacgagtcggcgctgatgggctattttaaggcaacgaatgccaaacggtcgcagcagaaagtgcagcagaccgaacagagtcagcacagggatggcccccggggttcgtttagcttggagaagctaccgcccccgggcggaaaacaaaattttaccaattataacaaatttgaccaaagattgttaatttgttggtttttggaaaaatttagcaaacttttttgagaaatttgggtgcaggaggtctaggagggtgtaaggagcgagcaaattgtggaggcaggagagggcaaggccggtagtttagcttgtacaacattggtccggaaagccggagacgccggttcaaacccggaccgccccatagattttgcctcaaaggcttcccaattcagaaacactaattctgtttgaataaagttcaagccttttttgtctatatcttaaagctttcaaactttatgagtgaaggtaattttttgcttgagaaaaaaactgtggaaagaaaatttattttcattttaaatcaaaaaaaaacttagcaattgcacgtgctaaatttgaaaaaaccatggagaaaatgtacagaaaagccgtagaaaacaaagaaaaaatggaacaaaatgaaacgaatgagaaaatatttctacttggcaatggacaattattagacatggaaatgggacaaccatcatcatcatcattattggcttcatcaacatcatcatcattggcatcaaaaagtgccgacaaaaaatcaaaaagtgccgacaaaaaccttggcaagaaaaaggatgcagcaattttgcatttgctagtgtacaaagtggaaagcgtggtaaaattaataataaaattgtaattaccgcctgcaatttatggacgtaaaccagcgaaaaacggccataaattttgtagggtggtcggcattatgccaattttttaattccattcatatctgtaaatgtttttaactttaattgttttttttattagtctaaaaatttttaagaggccattgaaagacacaaaatttgttcacagcttttttcatcaaaaattaaatgatattattattttttcttaaaaataataaaaataaaagataaattcattgaaacatagattgatgatgaagcattcctcatgtttgtgaaagggcaatccaattttatgtatgtgttagagtatgcctttgatacggtaactcggcacaatctgaggcaaactgtagatgaaacaaacaaaatattttacacacaaaaatatgtaaagcaccttggcagtttgcatttgatgcgaagggattga

SEQ ID NO: 73355 - DNA, 394 bp, Heterodera glycines
atgttttgggctccaccggcgtgccccacccgcctggattcggggtaggaatgtttaggcagggattaatcgcggccgcgggattggcactggggctggggtgaagaacaaaaagcatttttttgaaataataattttcaaaaaaattccgtcaaattaattaaatcttgcccaaattataattaccggagatgaaaaagcaattgcgtaaactgacaaactaataataataataatttgagcaaaaatattggaaaggaaaaaattcatttgtaatttttcagagaattaaaatatgaatgaataaaaaattttatggatgtatgcttttccaatttggtgaatgaatttctcatgtaaaaagccttaaattttttctttatttggcaaatca

SEQ ID NO: 73356 - DNA, 67 bp, Heterodera glycines
atgaacacaatgccatcatactgtatcatattctttggtgttcttctgttggcggtccatttttacg

SEQ ID NO: 73357 - DNA, 1005 bp, Heterodera glycines
atgtgcgattttggtctttttccatctatttcatcatcaaatgttatcccaatggaaacttccgcactcccggatatggacgaactgcttgataggcttgagaacgaaccccttcaacttgtagtagaattgccagctcaatctgtggccatcaaaaacgagttttctcctaacagtaacagcaattcggatcaacaaaactcaataatagaacaagaacaacaacaacgagaaaagcaagttggggtgacaacatgcgacaataacgaagagtctgacagaaacctccaaaacatcgtaccaaaaagggaggagaagggtgcatgccttgaagcacatggtcaaattgtgccagagcaagacaaggaaactccaattcaattccaatgtctaagacttgttcatgacggacaaagcgaaaatcgaatacatacggcagaagtaaatattgtaaacaaagcgtaacggtcaattcaaaattttaggaatgcatattagcttttaaagatggatatgaaacaaacaaaaaaaatgacgaggatatttttgaccaaattgatcagatggcagcgcaaataaacgcggaagaattggaccaagaaattgaagagacacgtgacgaagaaattgtgaaaaaatctgatcttggtaagccattgaagctgcaataacacacttataagaagaatcttcagaaagtagttattatcatgatacttttcctatgaaaagtcaatgtcttgaaaaatttgtggaggaaatggtcgattcagttctacaaagggtaattaattcaattttcattttggtattaaatcaaaggaacaaataatttaggtgctggaagaagcgatcgatgtaaatgaaaagaatgggcaaaacccaacagaaataaaagaagaaatggaacaatgtgatggagaaacggacagaggccaaaggaaagccgacgaagcgcaagaggcaagggaaacggaagccgaaaaaggtgccaattttgaatga

SEQ ID NO: 73358 - DNA, 870 bp, Heterodera glycines
atgtccagacggtcgagggaaaagcgcatggaagaggaagcacagagtttactaattttaaaagccgatacaaatcaaacgcaaaatgaatgccgaatttggtcggttgaattacgcagtgatgggttcgaggagttggtgaggcgagaattggccgaagttgcaagagaattgtgcgacacggagaaagagagaagggaatggacaattgcattgcgacggaatttccatttacgcattgaacgcgggagaagtgagtccatttccattttaatgtttcttttttcacggtccatttttcaattcacagtttgtgccgaggaccaattcccaactttggccgtttccactcgtggcttggcttcactcggcgtcgatgaactgtttcttgcgtttcactttgacccctcaatttttgcaccaaatgaggtgagtttttacggaggtaataaaatgcatttcaaaaaaaagttggacccaaaatcggacctattggtactgctgcaacagtacgaactgatcttccagcagtggtttggtggacccgcaggaagtccatcagatcgaccataaaatgggaatcagaaagtagacattgggcttttgattttcaattttattcattttacttcctcaatgtcagatgcgtttctcggatgactcggctttatccatcgttcacaaaggatcagtcaatatttggccataaagcagcggcacttctgttccatcgtccacacttcaaacaggtgggcagggacagttgaggtgttgggataagaagtactaatttatcttatggtgattccaattagctccacagttatttaaaaatgttatagattttgaacagacagtatgtttagttaa

SEQ ID NO: 73359 - DNA, 539 bp, Heterodera glycines
atggcgcgtctttccggttgcattgttgcaattcgtgaaacaaccaccgtcatcattctgtcttcttgggctttggatgacattcgtcaaatagtggcgggcaatcgcaatatggtcggatgggcattggaccaattgagtgctgcagccgacgcggacgaggaggacggagttacggaagtgagtggagggatggatggtgggcttgtgcaatgaacaaccgaacatgttgggtccttgtcagatcgattcccatttggtctgtgtccaagaagaaaccgacgacggagtgacgccctctttcagcactcgcgtcttctccagtagcgaaagcaactcacaatcgacgccaattacgacaaaaaagggtgaaagaattgtctaaatacagttgcattagcgatataaacaattgggtttcttcagtcattggtgtttcatttctgatttttgacggtgcccttcgcggcagtgaacagctttcggtcagtttggttgaggatggactcgtcgttcgactaaatgccgatctgatggag

SEQ ID NO: 73360 - DNA, 505 bp, Heterodera glycines
aagcatgtgacagcagttagagacaacgaaaaggtacgcctaatcagcgacatttacattctcctcattcaaaaatttaagggtaaacgaaacgatttgaatttgttggcgtccagctatttggtacaactggcgaagcggaatgtgaaattatgggaactaaacgaattcgcagacaccaaaatgacggtgaaacattcattaattgccccaattatgatgctttaactacatacagaaaacccaatctctagtaaaagcgaatgggaccgccagcggtggtggtggcggaacgacaagaaaagcggtgacagcaccgagtgagttgcgcaattatgggaggatgggccaattccttcttctcctaactatgcttttttaggttctgaacgaccctcgtcaacgacacattcaccgcgaagaactgccgacgatgccacttcaccgccctcgacaacccccgctaaacggagtcgaccgtccgtacgcagtggtggaagtggag

SEQ ID NO: 73361 - DNA, 344 bp, Heterodera glycines
  unsure (1)..(344): unsure at all n locations
ttgctttgcgagtccatatcgacggcgaagtgattcctcacaaactgagaaatgggtggnattgccggaacaacaccttgggtggacggtgacacttgatgaacaagtaacactgatgacaaatcacccttttatacacatatattcatttttagcttatcccttttctatatgggctatgttcctggttaccaagcgtttttttcgttgaattgcacacatttattgtgtccactcggccgcttccggctcttactgttcctgacagtcccggcgattcataacataaaaatcacaattctgtctgatttaaagtgaccgaaaatagagcccggaaattttaa

SEQ ID NO: 73362 - DNA, 315 bp, Heterodera glycines
atgcacctcggcaactgtccctgggaccgtctcggctgttctaaatgcatcgtcgtcgctatgtccaaggacgacgagtcgtctgttgatgaaccgaccccaccgcccgctgttgtaccaattgttgtaccagccgaactgctggttgacgaaacatttgtatggtgccgctggttggagaaacgccgtcgcagaatgactgccgatggcatcacatcgcaagcgaattcagaagcagcagcggttgctcgtctgccaacggcactttcgtgggaagaatcttgggagtcggagcaattgccaccacctaagtag

SEQ ID NO: 73363 - DNA, 2520 bp, Heterodera glycines
  unsure (1)..(2520): unsure at all n locations
atggcattgaacacgtcaaatttaatgtttttgattgccacgggttttgttggaggtttgtctaaaaagctattcgtctttataaattcacatttttggcacgacctttgttctcatcttcggaaataagacgatcgaactcaccagaaataccccacaaaatttgcctgtgggctcgaacatgcttaaaggtaaaaatgttatgcttcgagaattctatctgaagtgtatgccttggtttcgccaccctcgtcaaatacaaacaccaaatcagcaacggacccagtcaataataaatttttaaaacgagttgacacggaagacatttcaaaattaattgtattttaaaatatgtttgctcctattagaaaattgcaaaagaaattagaaggaacaggcaattgcaaaataatgaataaatagagagaaataacaaatggcacagagaatgaatgactgaccccaatgaaagggtcaaaaattgaaaaagggcagagtgaaaaataaagtggggaggggcggggggattgaacggacgtgggaaagcaatttgcaatcgataagaactttattaatcattcgtattttttaatctatgcatgcatatgctttatgtgcctgcgtcattttttttattcaaggagtatgtgcatcaacggaacgaaaagggtctttttcacatgaatttaccgtattggtaggatggcattctaatgcccaaagattgggcagagcttacctaaatattgccactttattttaaaaataaatcagtcgaagaaatattgttttctaggagaaaagcccattgcttaatgtatgaaagaaagttgcttaatgagaattgttctgtgaaatctgcttattttactgaccacagaaacgagtcaaactttcaaaaggacagagtgcaaaataaaggggggggggcgggggaaggaggagggagaggagcgagggggaggggttgagcggacgtgtgaaaggcaaaattaattggtaatcggtaagaaatttgttaaacattcgatttagggcatttttttgattttagcggcacgatggttttctttcgaaaacactatttctccggattctttatgagtatagaggtccggggtcaacctgatcatgaatttgacattttttcaacagttctgtacagaaatttataatattttattggaattgggttcgtggtttaatgttggttaatataaaatgtaatattcatgcccaacgaccccgaaaacccctagaaacaaaaaaataacaaagtgaaatgttttttttgttaaaaaatcgttccaccttgcatttttaatatttacattggagagtagacggaaacaacaaaaaaacctgataaatagggcgcgaatttttaagtttctacatattttttatgcggcttgaactcgacgagaaatgcacaaaaacacattttttgttcgaaaaactttcgttttaacgcctctattcgacccagttttttgctcatcgcaagcaatttataaaaattaatctcttcgaataaaaaaataacatttttaaataattatctaatattttaatgaaggattaaacaaaaaaaaataaaaataaaattgcatataaagcaagaaaaaatcttatttaaataatgccactcaattatcataaaaataantatattgggggtgttcggaaagttctttcatagcggtcgttttatgtaaattagaattttttagcacccaaccgcaacctttggccaaattctttctgttctatggcaaggagcagattttgctgcatatgttacgagccatttcattttcctttctttgtaaattgattttttaaaattatcccaatggagcacccaaaatcccaaatccgatcacttttattgtacgggtcaaaactttgctttgatcagttggaaatttattaaaagcagtttggccaaatcaagtccggagaatccaaatctggcctcagatttgatctctgaattttctctggcattgtactgctccatgtcgttgacaagaagttgaagcagtacagggtcatagaacagcaactgactaaatctgaggcgatattcgcattctccgggtttggtttgccaatgaaaacatcaatttcattttattatgtcttttcagaacaatgttgtacaaagtggatgctgaatcttggcacttttgagcacccattttcagacaggacaatttaaaaaaataacccgtcggtcttggtggctctttttcagcttgtcagatagtcccaactttgctctacaaaaccataatttgttttgtacctttagccttttcttggccaagaaatcagtggttgaatttgtccacttttttaagtagacccatcagtttatttgagtctaactatcttgaatttaatcgatagatcatttttaaaatctcacaaatgggagaagatggtcgagaataatggtgcgtattttgattaaaattggtttattggttaatatgttatgaattttcaaataaa

SEQ ID NO: 73364 - DNA, 1475 bp, Heterodera glycines
atgagcgaacttgtcgccgaatgtctgcaatttgacttctccgaaattcccaacatttttgctgtgttttccgaatgtctcaagctgaaaggacctaatgtgcgttgctatatataagcaaatatttataaaactcattttacattaagaaaggattaactgtatttgacttaactcgctaattaggggaaaggagcgtttcggcgccagcccaaatttttgtgctataattttttttagtttcaacgaaatcaaaccttctaaacatgctatgagttcgaatgatgccaaaagattgttgattcattgaaattaaaaataataatagcccaaaaacttgggatggcctcgaaacgacccagccaataattgtttttatttagttcgaacattttgcgcagaactgtctccgttttatcgatgccaatgccaaatcactccttttttccgacgaatttctgcacattgatcaaaaaatgttgtgcaaaattttggagcgtgatggacttacaatttgcgacgaatttgacgtttggaaggcggtaatcatatgacaattgaaactaattgcatatttattttattgttaggcaattcgttgggcgcaaaatcagtgccaagaaaaagaggatgaacaaaatgcttcggcattggatctccgcagaatgatgggagacgcactttacaaaatccgttttccaattatcgcagaaagggacttttcggactatatttgtaacaaattattaattagatttcgtttttttttgtgacatgagtccaaaaaatgacgagggcaaatgacttaataattatttgttagataatttttgtagttcccactggcgtgttggacgctgacgacgcgttgagcgtgttcgtttcgtattcgaattcgggccatacaaatgcaaaattctcaattcatccgagagttatgcaaaacactggcggttcaagaggccggctcacgttggacatcgaaaattttgaagattttttgatggaagatgaaggaaaacgagaaagtgtggtcaaagtcatcagaggacttccttggcagtttactgtaactgcaaaaggttttccggaggtcgtcgtcaaatacttggacatttcgattcagtgcaatgcacaaaacggtgatttttgcgttttgggattaattcaaaatttttgaggggaattaggtaccaccgtatagagcccccaacgaaatttattaagtaaaataatcaaaaatttattttgctatgaagataaacaaaaggtcgccgccaaagcgggccatgacaaaatggcatcgcaaaaaaattgctaaaataaggaaaaaaattatcaattacatacacatattttacgaaattttttaaaataagtttgcgattattatttttttgttaaaatgactatctgaacgacattttgtctcgatgaacttttggagtgcacgtgccgaatgcacaaaattgtta

SEQ ID NO: 73365 - DNA, 212 bp, Heterodera glycines
atgagcaaaaaaggctgtagctcgggggtaagggctcgctccatatctcaccctcgaaaactttttaaaaattttcaaacttagaaaatttcaaaaaaattcaaaaaaaaatgaaaaatttttagggaatgttttgtacacccacgcccttgcggttatactataataattactttggacgtgacgaaatcgtcaatgtgaaaaagatttga

SEQ ID NO: 73366 - DNA, 504 bp, Heterodera glycines
atgccaaatttcgatcttgcagcattgatattaactgataaaaagcattcctttgacaggtgcattgaccaaaaagtcgtcgaatttctccgtttcaatcatcaaattttcgatgaaaaaggcaccgaattaagtttgaaaatttattcctcacaaaatgccaatgtcactccgatttggagtgtttttgttcgtgaaatttggcccatttttgcgacaaacattcgccacttcgcctttcctaatagtgatcatctcagcaaattgcttttcctcacttcgccaacaattctcaccgatctcaatcagttgaactcaatccaatcagttgatctgttcccggacgtgcttggtgatgatgatgggccaaatgcagcttattgtgctcgccaagcattgttcaaatggttgcacactccgagaaaagacgagaagccgaagcgattgagttgcattatttatttcacatcacaaattaaaaacaggatcaacaatttcaaggag

SEQ ID NO: 73367 - DNA, 1550 bp, Heterodera glycines
atggaacaagaattatccaccgccgtcatttcttctgccattagagaaaatcagcagcagcagcaaccgttgtgttcatttgtgaaaacatcttttggaaggcgacggcattggtaaaaatctgtcactaaataataaaaatgctcagttttttatcggaattttaattttattttttttttacctttttgcatgtaaattttaaaaattttgtgcctaaatgtccgggatctatctattagattacaaatttttcatcatttcctttttaagttatcacatttttggtgtgattatgaaaataaatcaattagtaaaaccattttgtgccttttttatatgttaattgcaaaattttttatttccaaggttatttttttcacaatttcagttggatttgcagcgatgttttgatggacattttcccctttttcgaccatgctcaacttggtctaaaattggcactgatttcgccacgtttcgatgttttagtggacacgcatttcaatggcaaaaacgaattgaaaatttggagaccaatcgcgattcacaatatggggacaacaacaaaaatagagaagcttggcatctttaccaaatttgtgcaatttccaattccgcagcgtccgctgcacaataaaatccgctttgaacttcttgaaattgagtaagttcaaaattttattgaccaatttcggtaatactgtgttttgttccccccccccctttttcgaaaaaattttttcaaaaattttgatgtcataaaaacaagtttcctgggcttttcaaggttgttgatcacgaattgcgaaattcgaaaatttggaattccgactttttgttagaattcgggtccgggtttcggaattggccgaaatgtatgccggattcgtgatcagcgagctcgaaaagcccaggaaagaaatttttgaaatttttttttcgaaaaaggggaggaacaaaacaatattaccccaatttctcccatttaaagaatggcaaattaaaatttttttcttttaaaaatatgttttttaaaacatcaatattgacgttgatatttttttaatatcaatattaattttaaaatttaagtaaatgtaaaaactattttggcgctaaaattattgtggagagggaaaacgcaaaaatgagagagtgctaaaattctgtactatcatattactttaaattgttttaaatattaatatttaacacggcgagtcaattttgggctccaagtacaaataagtttattatttatttagtaatcagaacgccaaaactttgcaaaacttaaaatttattggggattttcccttgtaaaaatggaagagtcgatctcgagttagaaaagaaactttcaaaaaacaaaagagaattcgatagagagggccgaaaaactagcctaggcaaaatttcaagaaaatcgcaactttggaaaaatttttacgactgggcaaagttttttctttttctctcattttgacgcactatttccatgtctctaacatataagataacacatggttcatttttttgccaataaa

SEQ ID NO: 73368 - DNA, 672 bp, Heterodera glycines
atggagcacagaccgcatgctgatgaacagaaacgtcagcgagcacgggatagtactattcaacgtttgagatggtttggagagcaattaaataattctttttttattcgttatgtttctatttttaagccgtcttcagcgtgaacaggttcacgcacgacgtgtggcaggggcttggacagcagcttgtaattatgatggtcatggtactaatcaaggagatgtgaactttgaatgtgcgcgcaatcgtcctagaggacgttcatgggggagttggcagctagaaatgggaacatttgcaacttttgttccgcccgagaattacgcttttccaccgccgatggttaatggatgccagcgggcaggggccgcaatggttcgttcccagagaacgtcggcgccgaaaagtacggctttgaagcgtagtaaaactatgtaaataaattgatattaactttattggtcatccattgtttgattgacacaccctaattttaagagttccaaaatgttgcccaaacacgttattttggaatgtctgtgtctgctaccaaattggagggaagcagaaatgagtgtcgacgcgttgtgccaagtgcgcaacgttcaggggcggggcctggcaatgcaaacaagttcgtgcaaccaattgcttttgtttgtaaagtataa

SEQ ID NO: 73369 - DNA, 387 bp, Heterodera glycines
atggcacggtgcccgttcctgtacatcatcctcatccctcttctcctgctggtgctcatcaatttccctccaattttggcatggatattgaagcgagacgatgtcctcttagcttattctccaaatgaacttaccacagatgaaacgaaaattattggtgaaaagcaattgtgcccagccagagaatggtctttggaaaaaacttttgggcttcccattgaaccgaattctgaatttggcaaaatgttgcctggtctttctacagaattcaaccatgcacttcccggcattggaaaatctcttgaatacatattatgtacctttgacaagatgcactgtcgtcaggtgaagctagcgagtttcttagaaactgccaccaataaatag

SEQ ID NO: 73370 - DNA, 873 bp, Heterodera glycines
atgccattttgggccgagtctgttgacggaggagtagtgacaaaaattgaggtaattcatcatacccactcaaacggtgctaggtcgtttcctaaaaaccgccacattgggcgtttcctaaaaaccgccttctataagaatattatttttcaaaattttttaatatagcataaaaaagttatggttattaaattccacaaaatcttaagtcggaattttttttcaataacttttttaaaactcaatgaaattttttgaaattttaaaggtaaatagattaaataaagtacttgaaattctaaaaagaaaatttaatttaattgcttttgaaagaagttataaagtattgaacaggatatgctttttacgatggtcatgcgaacatttaaaaatttttaagtcaattaaaaaatacaattaagtcaaaatgaatttatatattcgattgtcctaagaattctctatttatggttaaaatttcaaaaaatttcattgagttttttaaaagttctcgacaaaaaattccgacttaagattttgtgcaatttaataaccataacttttttacaattttttaaaaaaaatttaaaattaatattcttgtagagaacaccttgtgctatcgaatgataccaagaattattaattaggttgaacttaggccaagttatgaatttatatgtcttacatttttggttttactaccacttggcggtttttaggaaacgacccagcacgatttaaaacgaccgacaaagctaatggaattgaattcattgcttaagatcacaaaaccaggaatgactaaaaagtcaaaaatgaattgatattccaataagtaaaaaaattctggaaaatcacaatcgaagtaaa

SEQ ID NO: 73371 - DNA, 688 bp, Heterodera glycines
agatgcatgccatgctgcatggatcattttcagtacacatgtgtcaacgattggaaggaggtcatttttaattgcaaatttcacactttaaaaaaaatcatttgtcattttttgattatttaacaattttttttgtctatttattattttattttgtgcggcacgcgcacggtttttttaaaacgatccccccccccccccccccccctcctacaaaaaattaagaaaaatttcttatggtttgaaaaatatttaaagaaattccgataactaagtttaattttttcaagtttatgaaaaactttttcgaaaaaaattttaaatgagtatttagaattttttaaagaaaaaatttttttaataaaattcaacaatttaacatttctttgtttgatttctatgaaattttatttttcatttaataatttattaatttaaattttcggatccgctgcgcaattgaaactcaaaatttttgctaggccgaatatgattaacccacaaatccgcatttaaactacggaatcccgcgcagggattacgggattttgaaatattgaataaattttacattcttattcagcttagaataatcctttgttttttataaatttcccatcaaaaggttgaggcaatgtttccgaccacaaccacaactacgaccacaacaactacaacgctggcccca

SEQ ID NO: 73372 - DNA, 2325 bp, Heterodera glycines; identical to SEQ ID NO: 10225

SEQ ID NO: 73373 - DNA, 1501 bp, Heterodera glycines
atgaaagagacattagccaagcaggaacagacacggaaagctgtcgaagcggagcatgccaaggtggcggaagagcgcaaaaagttgcaagaggacttggaacggacgcggaagggcggaagcgcaatcgaatcggaagtgatggtgagtcatcggtgttttaaaaaggcggaaaatagggaaaattaattatttcaaaaaatggcagagaattggtaaaattaattaattatttaattttacgctacgcgaatgtaagaatggaaaatacaaagaatttagaaatatggaatttccttaaatttcttaaaatattttgttgtagcaaaaaaatttttgattggtctacgaaatttcaataattttttacatattttgagaagtattaatataattttaattcaatattcataggtaattagaggcaaactttacattgacaggcaataaaattgaaacggtttattttataagtagaccaaatttaaattatttatttaattgctaattgttttttaagtcaatttgaattaaattagttttataaaaaatgtttcaaattcatttaaatgatttacaataaaataaatatattcaaaaattttgcccaataaaacatttagaatttaaacacggcaaaagtgcaattggagcgccaattggaggatgccaaagatcggctggaggaacagcgccaacgcgcggaagagacacaacgcaatttgaagagggcagaaaaagaaaaagacagtcttaacgaacagattgggtcactagagcataacttgaagaggtagagaaagagacagaaacgccaaaaattaggctcacaatcattaaaaaatattaattttacttattaattaaaaaataaatttaaaatcccgccaaagaatgagcgaaattcgggttcatacacaaaatggttttatgtttcgaattctgcgcattggacagattttttttcaatttttattaaaatttctgaaattttaaatttaagtttatattttcattaaaaacaatcgcattataaggagctcaatttttaaaatatattttttaatatttttaaaaaacaatttaaaaagaactttttcttttatgtcgttgaaaaatattttatcggcatttttagcatattaaaatatctcgaagttctcattaaaaattacagggcttaggttctgtgacactgattcaaaaaaaaaactaaatattattttgatgaaattattttttaattttaatttaatttattttttaattttaaattaatttatttttttagagttgaggaagacaaaaagaaaatggacgaccgcatcaaagaaaatcatgaggcaattgcgcagcaggacgaggccattgccgcggcaaataaggagcgcagaagggcggaggaggaaaaccgacggatgggcgaggaattacaggcaaattaatgaattaattaatttaaattaaattaataattattagggctgtgaattttatgtaa

SEQ ID NO: 73374 - DNA, 937 bp, Heterodera glycines
atggagaagaacaaaaagaaattggaatcggaagtgcatctcgttgagggtaattaattaattaatgagtgtctcattaacatggacaattagagctgattaatgcacaacacttttaaaaaaattttgtggtttttatgtagtaaaatttagtttgtttatattattttattttttacattttccaattttttcaactggatcttttatgaaaaataattttaaacattttatctgcaaaattgaatttttttttttaaagttcttaaattatttagtatcaaaattttaattattactgaattttgatatgggtcaagaatttataaatggacattttagcaacgaaaaaaaaaatatttgtcgaccagtaggaaaattttcaaaaaacatattaattctatggcaaacaaatataactctttgtagagctttctaattttcaatgtccttgaaaaatgcttcgactcaaatttattttgtcaacatttaattttatattttcaatctaaaataatttatatttctgcagaacatattgctgaaatgcaaaagcaaaaaggggacacggaaatgcgacagcaacgcgttgagggcgaaatcatggatttgaatggcaaattggaggaacagaacggcattgtgggcaaactgcaacggcacctgaaggatcgccagactcgtctcgtggaattggaggaagagttggagcaggagaggaacaggcaagtgccaactgtgaattatttgtttttgttggcattttttgattaaatttaatttgaattatcttaattgttccctaaattttgattattaaatttttaaataacagaattattgtatatgaatattgagtattggaatttcgtgatcattaggcatttcatttcttgccaattcaaaattaattaaattttttaattgtcaactaata

SEQ ID NO: 73375 - DNA, 108 bp, Heterodera glycines
atgaaactgatttggctaacctttttaccttatttttgttttgcggctgttgaggtgcaatacaagtgcgaactttttggtgatgatacggcattgccaaaatcagag

SEQ ID NO: 73376 - DNA, 552 bp, Heterodera glycines
atggaaatgccaatttgtgcttttcttcgcgcccggaaaaggaccatctcattatgcggatgcacatcacatattcaagctgaacgaaaatttaggtgagagtaagagtatataggtacacagagggacatgctgggattttttaagcaaaaaaagaccaattacaacaaatatactaaaaaatctaaggctactgaatgataaattgatgaaaaaacaactataaatagttcgcaacttttataatttaactattttttaatcatttgttttgaagaaatcagcgcaaaaatttacgaacaatgaaatttttaaacctaaaatttttatcaagaaaaacaaaatgttgctgataaatttttgaaaaatttttcttagcggtgtatttctgaaactttttcagttcattttcttaggggagtatttcctcgattttattgcattttttaatggaattttttggaaaaaacgtcaagaagcatcaaaaggtcaaaatgccaaaaaaggcatttataaggcattaaaataccgaaaaaagggaaaaaaagcaca

SEQ ID NO: 73377 - DNA, 1405 bp, Heterodera glycines
atgactgagattaaaaataaattcaaacaccaaaaaatttgggcatcggttgatgagacgactgattctcgtggcagatatgtcgcaaatttgatcattggcattttggatgggaaattgcacaaaccgcatttggttgcggccaaatttctggacaaaaccaaccatgaaacaatcgctcgctttatcaacgacaatttgagggagctaatttcagctgacgaccttttgttacttgtcactgacgcggcacgttacatggttaaggcagcacaggttaacaatgaaaaatttataaaaagtgctatctatgtaaaccaatttttttaagggcctcaaaattttctatccaaatctcattcatctcacatgtttgtgccatgggctccatcgtgtgtgcgaggaaattcgtggcctctttccaaatgttgacaaattgattgcaagtaccaaaaagactttttcaaaagcgccatcccgcttggccaaattccgcgaacgttgtgatctccctctcccaccgcgcccaatcatcacacgttgggggacttggctcaacgcagcggattattactgtcaaaatcttaaccaaattggtgcgattattcgggacttcaacccatccgattctgatgctattcgccaatcacaaattgcctttgactgttcaggcattcgtggagatttggcctttataaaatcacattttgacattttacctggagcaattgaaaaattagaatcacgcaatctcacactcattgaaagtttgtgaaaactcgatattttctatgcaaattttctaggtttggacttagtgagcgatgttggaaatgaattgcaattggtaccgggcaatgtgggcaaattggttcgagaaaagtttaacacggttttgcgaaacaacccgggatttgatagaattttggttgggtatatatacaaacagtttttaaaactcaattttttctaggaaattggtatggtgcttcgaggggaagatgttcaaacacgtttgccgccggacgttattgcaatgttcaaatatgcgcccattcagtcgtgtgaagtggagcgttccttttcagcatacaaaaatattctggcagacaatcggatgagctttactccggaaaatctcgaaaaatttctgatttgtaacacgcataaaaagaaatgaccatttttactgccctaaaatcgttgataaaaattttttatacttatttttgtacttgtttgatgctattttggcatttttttttaacatattttggtacatatttgaagatttttgtacatatttcttacatattttggcattttttaatacatatttatgtacatattttgcgatttttcttacatataaatctaagccctaattataacaaaatgtaataaa

SEQ ID NO: 73378 - DNA, 1715 bp, Heterodera glycines
atgtgtggagaatggatgagaacagggatgggaagggatggaaaaggagcaataaatgagcaaaaagcaaagtaaaacgcaaacatttttatcgacatatttattttgttttatttttcagtttatctaattagtaaatttttaactttagattttaaaagtttcatttgaattgtaaattgtagcctgccaaattattacatcatgacgcccaaacgagtaaaagaaaatcctgaaatcttaaaaaaatctattttctttttttcatactttggcttaaattttgaagccaatggtgacgagtatgttcttatttaaacttatcggaaatttgattttttaaaattataatcttttatttaatttaaatatttgtagagtacaaaataatcataaagacaatagattaagagcaaacataattaattatcaaatttgcaaaaagattgttctaaataaattaataaatgttatttctatggcatcattaaatttaaacttaatatttctaaagtaacttttttatattgaattagataaaatattaatgaaaattctctatgattttttgttttattgtttatttcaaaaaaattctgaataatatataatgtttttcaaaatggaggtaataatttatgaacttggtcaagtggaatgaaaatgaatttaattatttatgagctatgttcaattatttttgataaatataaatatccttaaaaattatgtttaaaatttcaatttaaatatcaaatttaaatggaaagctctaaacaatgtcatttcacaatctataaatgtaaaaactacaacggagaaattataagaaaggaaattacacagtaaggattaacaaattttattaacattttaattccctttaaagttctctcaacacaattggctaaaattgaaaagcagtataaagacattcttaagcaaaatgtaataaattgcattaaataatattataattataataattataattaatattataacatttaatgtttgattttcaagaaggaaatatatgtttgccagctaattgtaagtaacggaagattatatttatgacgactatgttttaacccgaaaaatacaaagaattaatcataactctgtttcaacataaatcaaaaaaataaaaagcaaataccttttatatttccaaagtaaaagaattataaaaagactaaaagaatacatttcttcagatgaattaatttttatattttaaatcttcagagaatcagaaacgaaggtgagagaacattcaaagatagaagcgagagagtgtagggatggatggatgagaggtggaatgccacactgtgaccagtggtcacaatgtagcgtcggtttgagacgggtgatttatttcagccaccaatacaaatgatttattttattttttaattatttttataaatggaattgcgtaaccgaaaaattaaattaacaacaaattcaagcagtacaacagacaaaaagcggcggcattttccccgtgaacttctcaacgaggtgtcaaaatggctaacatgctgactaattataaattaaatgacttttaattacagcaaaataattcttaatgtaaatcccatttttttaatatttcccgtatattaaaaaactcaaaaactatgtgtactcattcttaaaatgcaattacatgtaaggtggtgaatacaacagtatttaataaa

SEQ ID NO: 73379 - DNA, 1179 bp, Heterodera glycines
atgtcgaataagtaagttctcgatttaattgagcgaatgaaatttattccatttaatttttaaataataaatcaactcatttgctgtaatttaaatttaaaaaaaaaatacaattaattaaatttaagaattgactgttggaataattgaaaaaagttattatctaaaaatgagtatattggaattaaaaaaaagtgattaataaaagcaacccagcacttgcattataattaaaatgttttcgagaaaacaataattattatatttaaagttaaataaaatatgactaataattataatatttttatattttatcttttgatagctataaatatgatcaaaaatatacgatttgaaaattggaattcattcaatatttaatcttactttttaataaacgatttccttaattatttaattttaaaaccatgattgtaccctttttaaccattattgtagcttttcgacagtggttgtacttcttctaatcacagctgtatctcttctaatttttgggaggccagaaaatttcatgataatataatttattaactttatgaaaaggaaaaaattgcaaaatgatcgtcataattaataagctatacatttttctttatcagaattatctatgtaaaaataataattaatttataaataatttttcattatttatcaatttaagcaattgtttaatttagctttcatgatgttttaatcataaattcattttattattaaattcattattgtttctcattttatgtgatttttgaagtgaaaagaacaaccaattttttaatttaattgtgaagcttatttttttataacaataatattaaatttggttaaattaatttaattactttttttaatctttatattccataaatttatttaaatttcttcatccttaaaaaaatatataaaataatttattaatataaatttaataattacttatttagtttatctctgtatttaagagatcggtcatgtgccgcggccaacaatgaggcggtgttatgggatggtgatgtagatatttacaagtatcataatttattataaaatgtatttaatgcttttattgtccttgaaatagtttacaaacatttaatttttagttttttaaatttttgttttgcttcttattttaatagaaaagaataagataataaa

SEQ ID NO: 73380 - DNA, 504 bp, Heterodera glycines
atggtagagaaggggaccgaaattcaaacataccgaaatgaacttaaatcttttcaagatgaagtagataaagccaaaaacacaacattagagcatgtggaaaagaatgacttgaaagaagcaaagaaatcagctgacgtcgcaaagggaatagccaaacaggcaaaaagcaaatattcatcaactctcgaggaatataatgataaatcggaaaagggttatatcggaatagtgaataggcttaatgaggctttgggtgagcatattaaacgtaaagatattgaaaatagacaagtatctgaagctgagaaaggaccacaaaaaagagagagactagccaatgaggatgttcaatttcaatatgacagcattgatcaaaaatttattgtctatctttccgctgctgtctcccacatagatttgtcaaaacacctcgcctatgtgcttggttttaagaacacaggttatttcatgcggaagaggcgaattatatgccagatttga

SEQ ID NO: 73381 - DNA, 362 bp, Heterodera glycines
atggcagcaaatccgacaattgatgaattgacgaaattgctggccaagcagcagaaactagtggaacaattgctgattgctcaacagacgaatgccgcgccagctcaatcaactcaactcccagctctttcaaacgtcgaatgttttgatcttgatgatcaatctgggaagaacatcgaaagctggatcgaccgttttgtgttggccctcgactgctcttcaccaaacatccaggaccaactgaaagtgaagctggtgctgacggaattgagcgagggagcatacaacgaatacagcaaattttgtcttgcgaagaaggcgaccgagttcgacttttcggagacatcggcacaactgaaaaa

SEQ ID NO: 73382 - DNA, 4426 bp, Heterodera glycines
atggcagcaaatccgacaattgatgaattgacgaaactagtggaacaattgctgaatgctcaacagacgaatgccgcgccagctcaatcaactcaactcccagctctttcaaacgtcgaatgttttgatcttgatgatcaatctgggaagaacatcgaaagttggatcgaccgttttgtgttggccctcgactgttcttcgcccaacatccaagaccaactgaaagtgaagctgatgctgaccaaattgggcgagggtgcctacaacgaatacagcaaattttgtctgccgaagaagccgaccgagttcgacttttcggagacatcggcacaactgaaaagtttgtttgccaagccccaatcggtttggatcgaccgatacgaatgtttgcgggcatcgaagcaggacgatgaagactttcgttctttcgtcaaccgccacaagcggctgcttcgcgattttgattttaagaagctgaacgaagagcagttcaactgccttatgcttctgatcgctctgaaatcgccgaaagacgccgaactgaggaagcgaattttgggaaagctgacagcagacggcgacaaagcaaagtacgaaaatgtcgtcagtgacttgcagatgttcctgtcaacaattgctgaagctaaggccattgagcgcccatcccattcgaatgttttggcgatcaatcggagaccatttcagaagagggaaccaaacaaaagcccaactcagcctacttgttggcgttgtggcggtggacatgaaccaagatgttgtcctcatgcgaaagcaacatgccgaaaatgttcaaaagttggacatttgcaaaatatgtgtgcgcgtcatcgagaatggctttcgaagcattcgagaaagccgacgcaaggaaaacagatgaatgctttacaactgggaggtatttcagtgaacgcactgaaccaaccgagccgtcttgtggaggcaccagttgatgtgaatggcaaacccattaattttgtgttcgatccgggagctgagataaccgtgatcgacgaagaagcacatcttcaaattggacgtccccgactaattctatgcagcgaaagtgccaagtaccacgatggaactgaatgcaccctgctggggaagggttttgcgactttcacgttcggaggacacacacaccaaggacaattttatgtgaccaaaaagggttcactaaatttattgggaatcgacattttggacgcttttggcttattggacacattcagagccaaagttaaaatggcaatgaaagtgaatgtcgttaaagcgggagggaaggaccgaatgaagagtcaaatcccaatgaagaaggacacgactttgctcgaccttcagtcaaattttccgcatgtttttgcagaaggcctgggccactgcaccaaagccaaagcccatttggaactgaaggcagatgctgttcccgtgtactgcaggccacgtccagtgccattcaacacacgtttgattgttgaggccgaattggaccgattgttggcgcagaaagtgatcagaccgatcgatcacacccgttgggccgcacctattgtggttgttaagaaggccaacggagcagcacgcgtttgtgcagatttttcaacgggcttgaacaacgcgttgcttttgaatcagcatccattgccgttgcccgaagacattttctccaaattgaatggaggacgaattttttctcagatcgaccttaaggatgcgtatctccaggttgaattggatgagaaatcgaaagaactgtgcacaatcgccacgcacaaaggaaatttccaatatttgcgcttaccatttggggtgaaatcagcgccagggattttccaatcgatcatggattcgattttggccgattgtcagttcgcttttgcttaccttgacgacatgatcgtggtcagtcgttcacatgaggagcatcgaaaacatttgaatgaagttttcaaacgaatcggaaattttggattccggattaaacccgacaaatgctttttcaatcagagacagattaaatatctcgggttcgtcatcgacaaaaatggaagacgaccggatccatcgaagattaaggcgatttctgaaatgcccgtccctacaaatgtttcggagcttcgatcatttttgggaatgatcaatcattaccaacaatttgtgaagaacatgcgatttcttcgacagccgttggacgaacttctgaaacaggacgtggcttgggtctggtcaacggaatgccaaaatgccttcgacaaaatcatcgaagtgctgaaatctgaccaactcttgacccactacgacccggaaaaggacatcattgtatctgccgatgcctctgattatggaatcggagcagtgatctcccatcgttttccggatggcagcttgaaagcaattgcacatgcttcttgctctttgtcgcctgccgaaatgaactactcccaaatcgaaaaagagggattagctcttgtctttgcagttcaaaagttccataaatatctttttggaagacacttcgtcctgcaaaccgaccataagccattgttgaccatttttggtaacaaaaagggcattaaagcgtgtacagcaaatcgcttacagcgctgggcactcatacttttggcgtatgattttgagatcgaataccaaaacactgccgattttggtcaagccgatgctctttcgcgcttaattgcaaaaacgccagggcccgaagatgaatttattgtggcaacaataacggaaagccctaatttggcaactgtgaatgcctttacggcacaatttccaattgtccacgaggacattgtcaatgccactaaagccgataatttgcttcaggaagtgaagggattcatcctgaaccaatggccaaacaaagcgaatatgtcagaggacattttacaattccatcgaaggcgagaagctctttcattcgaaaacggatgcattatgtacgccgaccggattgttgtcccagcatcgcttcagacggaagtgcttaagatgctacatcgcggacacccgggaatgaagcgcatgaaaagtctcgcacgccagcatgtttactggcccggaattgatcaccaaatcgaagaagtggtaagaaaatgtgagccttgtgccaccgaagcgaaggcgccaaggaaaacggagctaaattcttggccaaaagcggaagggccatggaaacgtgtccacatggactacgctggtcccttctttggaaagatgtacctgatcattgttgacgcacactccaaatggccggaagtgttcgaaatgcgttcgaccggatcagcagcaacaattgaacaattacgttcattgtgcgctcgttttggactgccggagactttggtcactgataatggcacccagtttagctccaacgaattcaaggaattcgtcaaagaaaatggcatcaaccacctcttctcagcgccatacaatccgatgtccaatggacaagcggagcgctttgtcgacacctttaagagggcatgtcggaaactgaaaaaagagggcgcgcaaaatgtggtgaacacatttttgacgtcataccggacgacgccgaatgacgctttgcccgatggcaaaaaccctgccgaacttttccttctgcgaaagcctcgcacaacattggatttgctgagagcaaaaccatcggcaccactgatcagagacgaggcgatggaaaagcagttcaatcgtcgttttggtgcaaaacctcgaaaattttgtcttggcgataaagtttttgctcgtcatcgccaatcgcaatcatggcgcgctggaatcgtcagccaatgtcagggagtcatttacgaggtaaagttcccgaatgacacttccaaccgattccatgcaaaccaaatgacggcccgtcatacggatgatgatgaccatggcaacgaagcgttgaacattttcaacgacgcttttggtcttccgttggcaccgccggatggtcccaacgaaacagctctgccagctgatcaacaagcggcacctgcacaagagacggacgaagcaaatgctgaacgaggccatgtccgtgtcgatcgcccgcaacgcaatcgacgtcctcctcaacgctattctccgagttgagcggactgatcactgatcaacggaccgatggatgaggacagacttttattttttttaaggggggagatgttgggaagggtactgatttgtcccgcttaattattatttaattcctttctatctcttcccctcccactctctctctctgttgcctcctccataaatacccccgtccctttgaccatccgttcattccctcatttatttgttgtatgtgcccaactccctcaatcgatactcctgcccccatttctcttctttatttaattgtgtcttcaccaaaattgga

SEQ ID NO: 73383 - DNA, 922 bp, Heterodera glycines
atgactaattgggcaccactcacaatgcctttcagaggtatgaaatggcggtgcaacagcttctggaacagaagggcgtcgtcaatggtatcaggtgaatgcacttttctggttatttaaatgaccaattctttccctctctcgcttaattatgcaaagttcgttcagggatgctttggtcttcgcggctggtgccagcaaatcatcagaagttcaccatggacgttgtgcgagtgaggataaaatgcgtgttgcggtttgttaaagtaattgagattaagcttttaaacaaatttatttcagatgagggacagcggttcagtcatcacatgctctatatgcctttatccaatttacaacgacgaatccgtctttttcctgtcatgtggccattgttatcactcacaatgcctttcgaactggatcgttaaatctgtgcctccacagcgtagctgccctctctgttacccactgtttttatgcaattgttgtaaaatacgttagtcctcatcgttgccaaatgatctcttagaaattaaacctcacttcatcactgtctgtcctttcaatattgttgttgtcttcgcccatttataaacatttatttatcaaaatataaattttaattaatgggaatataacaaatgaaaaaaaacataaatgttttgaaactctatccgtggtcactgccaatcgttgccccttctcccgaccaccgatgcgtccatcgtcaggcacacactttcgtagttcggtacccgaacaccgtcacgccgcgcgagtgataccgaagactccgttttgagtcgcgatttcgtcaaaccgcgccttgcactcgtccctcacggcgcagttgggccaattgcacatacgcaaaattttgagtcgtttttcgttgacaaaaatccgaaaagaaaataaa

SEQ ID NO: 73384 - DNA, 271 bp, Heterodera glycines
taaggttcgctggcgttaaacaattttgaaaggcacaagtccaattcgaccatcaaacaggacgaaattacttacagaaaccgagtgagtggaccaacgagattttttggttacgtaaatatttattttcttttcggatttttgtcaacgaaaaacgactcaaaattttgcgtatgtgcaattggcccaactgcgccgtgagggacgagtgcaaggcgcggtttgacgaaatcgcgactcaaaacggagtcttcggtatcactcgcgcggc

SEQ ID NO: 73385 - DNA, 1526 bp, Heterodera glycines
atgtgcctttctcgattgggacaaatcatttatgggggactcgctcttgtcacgattgttctcatttgtgtgtcgatgttcacagacggtgagtgaggagcattttctgtgatggtcagagaaagatttgtttgaatgcaatttaaaaaatggaaaaacattctttgtttgggttccgtttttgtcaaaattttttcttttattgaaccattctgagaatttatttcaccaggcatttctgaatttttgggggaatttggtgcattttataaattctttttacaattttttgctgcgtttttcaaaagtggaggcgcccggtggtgccggaaggcgcccccgggaaatttttggtttattgtgtttaaaaaataaacaaataaaattttactgtattatctatgtatctcgagatcaagttttactaaattcaaatataatgttaaacaaaatacaaaaataaattatttttttaaaatgtgctgctctagttcagtttatgcttccaagcatatatgaatagaatatgacgtggtttatcataaaatagcaaaaattccttgtgttaatttgaatataccattcgaagagaaaacttaagccaaaaacgatttcgaccaaaacattggtcccattttgacattatgtccatattgacattttcccaaaaagcctctattaaaacggcctccttcagctaaattggcctttttgctcctaaagataggaagattttccgaaaaaataattttttaaggaaatttctcgagaattttgttaggtaaattataaattttcttaaaagttggtaatgtgccaaaaataagcaaaatatctcaacaaaagctttcgaatgatgcctttatcaggcgacttttctaaaaatctccaatttaaatcaaggggacttttagccccgttctttcccgataatagtcaaatcccggtcacattcttatttgttgtccctaattactaaaatattcaaaggatggcgcaaactcaattcttcctcgaacgccaccggcactgtgatggattttgttgagaatccgacggtcaatatggggctgatgttctgcaaagggccgacgatgggcgtcaacggcagcgcatcggccgacggtgcgtcggtggcgcacaacgaaaaggaattggtggatgtgtgcaaggaatggttcctggtcagctccgttgaccaattgccagcacaatttgtcccttcaccacagaataaacccgactgggagaaattcgttgtcggtgcgatggtcgtctctttggttttggcctgcctcgcgttcatttggaatttggtcactttctgcgcctgcttttgccactcccacgtgatgaaaccgttgcccgggttggccggactcaccgccatgtgtttggcagtggcactcactgttttctacatgaaaaaccagcaatacatccgtaactcccgttgtttgaatttaggcataaaacaatgctttggttttagcgatgatgaaggacaaacagttcgacaacactga

SEQ ID NO: 73386 - DNA, 685 bp, Heterodera glycines
atggttatgtgcacatcttctgacatcagtgggaagggactcttctacacaatttcgtttaatcgatcagtgataatgcacattctattgatcatcatatacatcgcaattgttctggttttaaaattcaaaaacggtaaaaaaataataaatatattgtaacatattctaattatcacccatgagcaaagacgaacccttcacacatttccctttttggccaatcaatgttattcatcttttccacattccccccgttcaccattttattcactatttctcttttctctaactctcacaaatccccgcaaatccccgccccttttccgttcaattgtttcccccaccaatcagtcagtcgagtcggaggagatgagagtcggacgtcggagcgatcaaagacaaattaattatttattaatcattcatttattcgcgcatttaatccgacataataaaagagccatacgaacgattggaccctttggacttcttggggatcagggcccgattcctaagattaagacccttcagtcctgggacaatccgtctcctcccatcccgctctggcatggatcctcacgtcttactgaaacaacgaacagcaaaaactttattctcgaatttattgaattaacacccaatgaaattgctttttaagcacacctcacaccgtctgggtaca

SEQ ID NO: 73387 - DNA, 648 bp, Heterodera glycines
atgaaaaaatgtatgaaaatacgacagaaatgccatggaattagaaaaagttataagaaaattcaccaaatgttgaagaaaagaaaaatcgaaatgaagaatttggtgagaaatttggcactttcatttcgtcgccattttcataattttgttttgatatcagaaaatccgctctctgcagctcattatattttctaagtattttggtattttatagcgtcgggagttaatctaacaaatatattttaaaatatgaagatgactttcgattttgattaaattaatttaagaaatattccctatgctatagaaacggtcttcttcttcaattttggtcattttcaacttattttgccatttttcctttttttagatttttatttgttaggattgtttaaattttttcgaaattcatattttctttctgatcgataatctttttttaatttttctttttaaattatttatatctgtctgtttgttctgccacccataaatgtaagtaaaaaatatgctcacatattcgaactattcaattgaaaataataaatttattaccaacattattccagaaacactcttcacaaatcgtgattccttgaaactaaaaaaaaatttttttaaatttaaatttctaaaattgtataa

SEQ ID NO: 73388 - DNA, 1847 bp, Heterodera glycines
atgtctgaggcgaaaaaagcagaattggatgctgataatgaaccgaccaacgagaagacggcgctaagtgaggaattgaatgatcaggaaatacttttaattagtgagttgttaatggagtgggagcgagtgcatagccctaaaaattccggggggagaatccgaaaacttttttgctctccggtccaaaaaattttccaagattcatgaaaacctttgggttcctagggatttattagagcactattgcatgtttttacatatattttttaaaaggtacacgtgaagctctgcattgtttctactgccaaaaatcggaagttgcaacaccaacagaagttttgataagaaaagatggcacaggaattgtaagttttcgtttttgtagattttaaaaccatggaaaataataatttgacattatctttttcgggatttatcctttgtttagggggtttatagggtctgcaaaaattaaaaatgaaccactaataattatgtaaattacaaaaatcattattttacgcagcatttggcaaaccgtgcataatttaagagaatcagccggcgatagtgactatttaaagttcaggcaagaaggcggttccataatccgttgatgctcggccgggacgaacatttattcgaaattgagtttgcgctgactgcgaccattggtgaaaaaatgatattcggccagaacttcgatgggtgcaaaagtgacattgaacaggcaacaagtgtaagaaaatatttaatgttgaaattgactgattttgggcattggtaaaaaattttcctttttcagaacctcaaattaattctggaagaagatggcttgaaaaattttggaagcatgatcgacacaaccgtaattttttttttgttgtaaacagccaaaaaaacaaaattatttggcatttaattcaaaaaatttgcagaaaaaggatcgccacatagaattaattcggttgttaattgctagggatgcgatttttaggtaagaaaaatcccagaataggtacttaaataggtaaaaaaaaatctcaaaatgggtaaataaaaattttttttccaattcttagggtgcatttttgaaaatttttttggtcgattcttatgggtatattttttgattttattgcatttttgttaagaattttttgaaaatcctaaaaataggtaacaaaaatgccgaaataggtataaaaataggtacctaggtaataggtagaaaaatcccgaaataggtaaaaataggtattataaaagtgggtgtagaagctccaaaccaagctaaaaactcgttttttatgcttatctcaacgttacaagtgcgcaaaaattttaggtatttaactaaaaatcgcatccctattaattgcacttgtttaaggtttacaccggtccaagcataaaggaaaattttgacaaaaaattccgagaagcaatggacgaatgcgtaaagcgagtcaaagagctgttggaagcggagggcaatttggtaacaaaaccaaacaaaaaatgaatggaatattaaaattttaggagattgtcgaggcgctcgctcggcgcatttccaaaagcaaaaattggacaatgtccgaagaggaaattaaaacgtttttcgagaatccgatggcggacaagaaacagactggccgttgaatgatttaacatttgccactgccggaaaagcaccaaaatatttatttacatttctatatatttttacaaacaaaatttctgataaagatttctttattttatcaacacccctctttaaaaaagcgtaatgtaaaaagaaaaataggaggagaagaaaatggctcgtcacacaatcacaa

SEQ ID NO: 73389 - DNA, 1552 bp, Heterodera glycines
atgggcagccaatcgcattcgtccgcggtggcgtcgtccaattcgggcgcggctagcagcgactcgggcggcgagaaggcggagacggaggacgacgaactgagcggcggaggtgcggcgggtgatgacgaggaagacgacgcgtcgccatgcgagtgcgttcaatgcgaggtctttggcatttttgtgctttttgggagccccagaaaaaattcaaatttcggaggtttcgactgttttttaggtttgtatggccgagaattggtggcgtatggccgcctaccaaaacacttttcttcaacagcagcagagccaaacggacggtgacacttcgggcgccacgtcagtcaccgattcgaatggtttagcaattttgaaaaatgcaatatcgtctgacaaattgttaccgaaatttttttcccgtaatgaactaattttagggattttcagggcctgagaaattgaagaattggtgattttcagtcagaattggattcctgacccagaaaacccctaaaatgaattgggttttttttcgaaaaagtgtgctaccatgccactattacccgagtttccaatccacacctttaaaaaattgctgccatgtattcctttccatccttttcatacgaattccccacgccccctcaatttttccattttcttcggttaatttagtcaatccccaacaaggcttcgacgtgccctccaacgcttcgtccgccggcttggatttgatcggctccgccgccacgctcattctcagccagcagcagcagcagcaaatgatacggcagggcgacgccgccgagcccagcgcggacgaccttttgcgcgccgacttttctatgccaaaactgcgcgagtttttcgagtgccaaaaagcaatgggcgtgccgaactttcccgaggattttggtgcgaattttatttttgtaattcttctgttggacaatgccagttctcggtgattgcctttttaaatttgctttcgccgtaacaaaatttgtccaaaattatttcattttccatttcctatgcttttatcagcagttttttgatgggagcttaggaaaagcgaaacatttattttaaatacttatttttcccgattttcattccaaaaatttatctcatttttttcattttcagatgaattttggctgctcgtcgtcaaggcgcgtcttttcaacgtgttcaaataccgcggccccgaggcgtacaatcgaattgtgctcaaaattcgtgacattgcgcaccaattccgagcccaagtaaaacaaaaatggatgagaaaatatccaaaaccccggggattttaatcggattttgtgatataattttttaaatttaaggtcgaagaaaatgagcacagcgatgggacggagaatccgaaaagagggaaaaaggtgaaaaaggaaatctagaaaaaatgaaaagaatttattcatttttcccttcagcaaatgaccaattaattaattaacaaattgaccgaccgatgccaaaggcgaataacggaggcaaaaacagacaatgaccaaacaataaa

SEQ ID NO: 73390 - DNA, 95 bp, Heterodera glycines
agaggcgaaagaatgcacaggatcactttctaatagggaaatattgacagaatattcagctaaaaacgggtttgatcatttttagcgcattttta

SEQ ID NO: 73391 - DNA, 776 bp, Heterodera glycines
atgccttcctccctttcttttccctccactttcgccactcttcctttgttctcgtttgtacgcgctcaactcgtccaaccatgtcgccctcggttccggttccgatgtccgacttctcctgggttgggaaatggtgaaattggtccgaaaaggggtgtgtttcggacaccaagcgacagaaaattaccaaccagaaaagtgcttgaaaatggatcatgggccagcgatggtgcaaagtaccctcacttttgcgaaccgattcgaaaaacagaagttcttggagttgaggtgtaaataatatgtagagaatgatttgacttgaattttaggaacgacggaaagtgcaagcagaactggcacttgggtccagagaaaacattgcatcggcgaaagtgcgcattgaatgcatcgtggaagaaaattacaaacttttacctactcaggaaaaagcggaaatcagggacagcgcttgtggtaatgcagtggcaacaaagaaggtaggaactcattttaagtccatttaatttttaataatatgctcgtttaaatctcaataggcgttgtactatgcccaatcaaagaggacgatgaaaatccggacattacaggaacttcagcaagaaataagcaagcctctgtggctgacttatcgtggaagaattgcacacgaggaaagcgatcacttccaagaactttttttgctagagtgtacggacgtgatggcactcttttcttcgccccgtcagttggcgctttttaaacgaacggaaacgatt

SEQ ID NO: 73392 - DNA, 452 bp, Heterodera glycines
atgaaattatttccgctacttttattaattatattatttttaattgtcaaaattggatcagaaaagaaaaaattgcaacaaaagtcatttggcgaaatatttggagaaaaatggcaagaaaaagaagaagaaaaacgaaatgaactcaaaaaaagagaaataattggaaaattttataaaataaaagagaaaataaagcaaaaaggaagaaaacattcagcaaaagaatggaataaaattgatggaaaaatagcgaaaaaaatggggacaaatcggaaatatatttataaatggatcaaagaatttggtcttcaaaaaaataaaagttataaatcaaaaactgatgaagaaaaaatcaaaattgttcaaaaatttattgaaatgtcaaatgaatacaaacaaaaaggaaaatattcgccaaaagaatgggagaaaaatttatgcggaaattt

SEQ ID NO: 73393 - DNA, 787 bp, Heterodera glycines
aaaaatgggaagaaaaagaaggaaaacaacgaaatgagaagaataaaagagaaataattgaaaaatattataaaataaaagagaaaataaaggaaaaaggaagaaaatactcagaaatagaatggagaaaaattgaagtaaaaatagcgaaaaaattgggggcaaatagacagaaaatttataaatggatcaaagaatttggtcttcaaaaaattaaatgcgatgaagaaaaacgtcaaattattcaaaaattcattaaaatgacaaatgaatttaagcaaaaaagaaaatattcaagaaaagaatgggaccaaaattatgaagaaattggcaagaaaattggagttggctatagaacaatgacgaattggaagaaacaatttggcataagcaataaaagattaacggaggaagaaaaaattgaaaaaatgaaaatttattggcaaataaaaaaacaaaatccaaaaatgagtgagaaagaaatcgcgaaaattatgaaaattgatagaacgaccatttcaaaatggaagaaacagcttggaggagagattttggaggatttaaatggatgattataagaaaaattggataaattttcaaacaagaaaattatttacgacataaaaactgattaattcttacattttatcgaaccattgtcaaaataactggcataaaatccgtttatttttctcaattggatacgctgaatttgcttctattgtaaataattttttcttagtaacgaaccatcattgttatgatttccgactgtccatataataaa

SEQ ID NO: 73394 - DNA, 295 bp, Heterodera glycines
taatgacaatgttttattgtgtaatttcaccacatcactgaatagagcacatcccaacaaatgattcattgttcatttttttacaaagaccgaatgaataaattaataaatattgaaaatgtacaaaatttgtataaataaaatagcatacataaattatgtaatacatacagcaaaagaatgaaccggctattacctactatagtttcggagaagcttatcaaagtaattaaatgccaaagtcgtccttcgtgaacttcacaagtgccatttcccgtccattttcttgcatttt

SEQ ID NO: 73395 - DNA, 1284 bp, Heterodera glycines
accgccggtgaacaacggatttgcggtgaacgcgtcgagaaggcttccttttggggcatttgcgagtgaagcgcccgcttctgctgacggagcggacgaagaagaagggaaaatcgatgaaaaactattcatttgagcaaagtgctaaaggactaattaaaagaaaaggagcatattcatattctcaattcaaaaatagcctaattgaatgaaatagaaatgcttaaattatttaatttttttgtttaaaattaaaaaattgataattaatttggcttggctttgcaatttcattaattcgggattatctatacatttagggcagtatatgtatctattgttttgagatgaatactgaaaacaatgaaaatcacaccaaagagacttatttctcgcacaaagagcgaatgttcccggaattggatggaacggacaaacgacttatacccactgaacagtttttaatggcgtgccagggaattgcggaattcgtcggtcatttgcggcctcatttttattgaccgtttatttaaataggttttctcggcatggcttttgtgccggtgaaaaatgacattgccggaaatgtgcacaaagtaaggacaaaatttgagacggaccggaaaagtatggaagtgctccaagacttggtggacattgacttgatggaaaacggtggaaaaattggcaccgccacggaaggtcttttgtggctgaagcggtgcgttttattagtaatagaccaacaaaataatgtgattttaccaattacaaaactttccctaaaaaaatttttttttttgagaaattgtggatgatttttatccgaaaacaaatgtgcatccttttacagggggcttgaatttatgttggaattgctgaaggcgttggtccgtgactacaaaaaggcgcgaacggatgtcggcgcagcaaccaaaacggagaatttggcggacattcttaacgaggcttatgaaaagacgcttaaacggcatcacaattttatctccaagcaactttttaaagtgtgttatgcgaatgaaagtgtgtggggggataagatatgcctttttaatttgtcttaattaaaaatcaaaatgtttgtaggttgttctatatgccgctccccgccggcgcactttgttgttggctgttgcatacggccacgaaggacttgaagaaatttgtgttgaacacatcgctgagctgctcacgaacttcgaggctaatgtcagtgcactggtcgattattaccattcaaaaaagttggaaatacctccccca

SEQ ID NO: 73396 - DNA, 1138 bp, Heterodera glycines
caaaaatgcacaggctgcgaaaactgagattgagaagatgcaaggtcgagaaaaactcagcaaggaggagttggcaaagaaggcaatgcatgcattgttggcggttcgggacgagggcgcggcggggcaacgtgtggagatggcgtgggtgggcgaggacagcgacggtctttttacggtaagtgttccgaaaatacattacgaacaagcaatcaatttacaagctgaataagtttatatcatcaaataagaataattcttcgatttaaattatttaatcgaattggtgcatgaatcacaataaacacagggaaaacagttccgcgtatttgttagagttttcataccataaaagtaccgttcaactgatttttttaaagtttttgaacgaatttcgcattttagttattatataaaagtgtttgtttctttcaggtggttccaaaagagagcattgacaagtgggaagtgactgtgctggccgagatcaattcgatggagcaggatgattaagttttaaaatcataattgttttttttttgctcagtgttcccttgtttaattgtttctttgccccccccccctccattttttgtcgtaaaggggacttggtaccccctttccttccctaattttgtcataggggactttgcacccccgtttttgtcataaaggggacttggtaccccctttttaaaggggactttgcacccccgttttaaaggggacttggcacccccgtttttgtcgtaaaggggacttggtaccccctttttaaaggggacttggcacccccgtttttgtcgtaaaggggacttggtaccccctttttaaaggggacttggcacccccgtttttgtcgtaaaggggacttggtaccccctttccttccctaattttgtcataggggactttgcacccccgtttttgtcgtaaaggggacttggtaccccctttttaaaggggactttgcacccccgttttaaaggggacttggcacccccgtttttgtcgtaaaggggacttggtaccccctttccttccctgatttttttgtcataggggacttggcacccttcccccgtaatatgcaaaactcattacacttgggaacactgttttctttatcgtaaataaa

SEQ ID NO: 73397 - DNA, 199 bp, Heterodera glycines
gtccgccgcttcgccccacgtgaaaagttacgtcgcgttggacgccgctggcgagtgccaatggctgctgctgaccagtgccaatttgtcccactctgcctggggcaagttggagaagggcggcacccaactattcatccgctcctttgaacttggcgttctgatatgtgcaaaggaccatcttcgccgacaatccccc

SEQ ID NO: 73398 - DNA, 1306 bp, Heterodera glycines
atggactcggatttgctcaatcccgaaccctggactcaaatcggaatattaaatttgattttgacaagggtttgttcaaaatttaaaaaaaaattccaaagtggctgcgccaaagtgaccccgacccgccccagcatgcttttccgaaatatagcttttttctttttcatccaaattcaacattcttggtatcattcgaaagctcttcacatgctctattagacttagaaaaagcgaaaagattttcaagcctgaatttgttattaagaaaaaacttaaaaatttcgaccttttcgcaattttcatgtataacttttttagaaattgtctaatcgcgaagcaaaagagctaagaaaaaaggaaggtacaagcattttcaaatgcggcccgacagcaccgacattttgtgtgttgcttatttgttagcggaaacggggaaacagcagcattcaaagcgggagagtgtagtaattagtaattaggataaattatttataattatttgagcatttcaaatgaggattttagatgtccaaatgagaataccactaaaataaatttggtttttattctcacaaaatatttttccataaatttcatttaaatgaattctgattttagccaaatctgcagaagaaacatgctctgatgttctttaaaattgatgaaaacaccttatccgccttttcaattcatattgaatacattttttaattctatattgatttttatttgttattttgattttgatttatattgaaaatgtttgtttgaaaaagattattaaaaaggttggtgccggaatggacaattatctattaaattgtatattatcagcagggcttcgtttttaggcacaaaaaatctcaaaataggcaaaaaaaaattttattaacccattttagccagcaaaacacgtaacttaatcaaaaaagttaatttgcttatatttcaattgtatatgaaatattaaacttttcgaataaggacacttttttctctatcattaagggaacggaaatctcatcgaatcgttggcatttttaatttaacaattactgaaaatttctatcggatttcaattgccctttcactgatcgaacgatttatttttcggcattttctttaatgcatttcaaattttgccttaaaagtgagaaaaaaacataaaaatcccaaaaaggagaaaaaagacaaaaaaaaactaattaaaaatttgacttaagttcccagccctaattatacaacaacaaaaaaaagtaaatgtaaattttacaatttaaattaatccaattaaagaaataaa

SEQ ID NO: 73399 - DNA, 511 bp, Heterodera glycines
atgcaaatcactgggactcaaatctccggcatttcaatcattgggactcaacccaccagcattacaatcacttgtactcaaactcagcaatccatcgacttctaccgcattacatcactgggactcaattctacgacattccaatcattgagactaaaacctaggcatttaaatcattggactcaaatctccggcatttcaatcaccgggactcaaatctccggcatttcaatcactgggactcagaccaccagcattccaatcactgggactcaaatctccagcatttcaatcactggactcaactctccagcatttcatctccgggactcaatctcaccatacgaatgtaaaattgaaaaaatgcaaatgacaaattttttactgatttaaacagaaatcaaaatgaaaacgaatgtacaaactgaccttataccgttatttgtaaatccattttgtaaaattaactcctctgccaatgagaacagtaaataagcgataagtccaacca

SEQ ID NO: 73400 - DNA, 1249 bp, Heterodera glycines
atgccaagggcaaatgattttgcttttgctgtgttggcatgcgattcactgctgatcacggcacagacttcaaccttttcttggtggattgcttatttgatgccggacgatgcgaccattttgtacaattcggactttattcagtgtcagtttttccatgtttttaaaaatttaaaattattttaaccaaatttgccaaagttttggccatggctttaaaaaattgtattttttctttttaaaaagtgtgaatatataatataatacaatgaatgttttatttgcttttaaatttagctcttcatcatcgacaacatttttgcctgaatgggttccgattaaactgatcgataaaattttttaaatggtaattttttgggtaaaaattcttcgtaaaaagtgaaacaggcacaaaatgccacaaaaatgaccaaaataggcttagaatcacattttagtacattaaatattaatttttgatatctcattttttgaaaaaaaaaatcgatttttagggatgcattttcaaaatttttttttttcacaaaaaattttatgaattctcaaaatatgaaaaaaaatgaaaatgtgtacgaaaaattgcaatttttttggggaatctaaaaattttccttaaaaaatcttcaaaaattgcaaaatatgtacaaaaaatgcgaaaaagtccaaaatatgtataaaaatatgtacatatgtaatatgtataaaaactccgaaatatgtaaaaatatgtaaataaaagtcccgatttttgttcgcaaacacaaaaaagaaagtgtttttcctactaattaggctatggagaatccaggaaaaaaatatgtatttacataaaattagcagccctagttatgggtgtcgaagcgatggcatttttggcagcagtggtcccaatcggccatatacaaagccaactccgccggcaatgttatcactggcattttccactagacgtggtcagatgtggtgcttatttggagcattttcacgaagaatggacgacgaacgagcaatttttttttactaaataattaactttattatttgttttcaagtgcaaaaaattatagtaaaataagggcgtttttttaaatataagataaccaaaaaaaattttaaaaattcatccatttaagcaataatcaacattaatcgaaatcacttattttcaaaatttttaaagaaaaatgagaaaaatcaattatttaatattttagtcttatataataaa

SEQ ID NO: 73401 - DNA, 637 bp, Heterodera glycines
atggatgtaagcctttgttactgtattaaacatgataaaaatgaattgttcagggcgaatcttgtctccaatcgtacaaatactttgaaagtcggaggaccgaaattcgtcaaatttttcagtttggaaaaggcatttgtaaaagagttacggcattcaaaaatgaattatttgggttggtataaaaaaataataattaattatttttaaaatgaacaatattttattacgtacggtcattaattacacttttaatacattttaaaaaacgtaaaattaataaaataaaaatatattgaatttactagtttaatattctgtttttcttcttttcagagatgatcattcgcacaaattttgcgtgcacattcgaatgggagactttgtcaatttcggttgggaatcgaaaaaggattttacggagaaaggaattgaatttggatttgaatatttaagggtttgttcgttaatgagcattcattcactgttttaattatgcaattaaattcaagaagaaatttggcaacattttcgtttctgttgttttgctgggagaagaaaagcaatttttgacggatttatcattcaacggccaggcaaagaatgatttaaatatttgcttattaaattaaataaa

SEQ ID NO: 73402 - DNA, 141 bp, Heterodera glycines
aaattcgcataaaatgaccggaccgccgttgagccgtaaacggcgtggggcggtgcccacgcgcatcgaacaattggagcgcatgttggacatgacaaaatttatcgaccaattgaaacgcctgatcgactagccgattaa

SEQ ID NO: 73403 - DNA, 319 bp, Heterodera glycines
atgggtgacgtcaaagaatatattaaattgttcaacacaattgctgagccgtccggagacttcggagacgccatgcacaaaattggacgaatttcagaaaaagcggccggcctaattggactttctgccccggtggccaatttgttggcatcgattgcgcacactgaagtaaatttattcatttttctctttaattttcagcttttttctgagcttttcaagcactcatatgtacaaatttaaactttttatcttttgtcaacttaaatttgatttgcaaaatttttgatgaattacgtttagttaaatttttccttaa

SEQ ID NO: 73404 - DNA, 82 bp, Heterodera glycines
ggaggaaaaaggggatattctcatcgtcagttcaattggtgggtaaattgtcctggtgcgctgaagggcgtcgaaggattcc

SEQ ID NO: 73405 - DNA, 225 bp, Heterodera glycines
atgatagtcctcagtccggctttcctggttcatgagaaactggtcctggtattaatggtagcttattaatattcaaaatatgccttttagccgcacgaagaagttttgttggcattgtccgaatttcgtcgagacattttcaaacgcctggactatctggaaatgaaaaatttccacttgatgcgcgacttcaaactttctcagtacttgacgcaatatacgttt

SEQ ID NO: 73406 - DNA, 1179 bp, Heterodera glycines
atgttttggccaatcgttgcaaagctctacgtaaatgaaacattgaagaaacaacaaatgcccattcaaatttcaaatttcaacagcactgcccaaattatcaagcaagcgcttgaccaacgtggctcgtacaggtaaatcgaattaattcatgatcgaaaagagaaccaaaaattaaattggataaaattttataggtttagtaagattattgtgaaatagatttttttgctttgcgttgtatgaaaaaacctggaaaagagataataaatataataaattgacataggtacattaggagttgctaattatttctaagattttttaatgcttttaaacaaatatttctgtgtcgatatagaagattcttgctttgtaaatggatgattttaaaatttattaacaattaacaagctatgtcgattagaattttgcttcggtaaaataagtaaaggtgcttacttataggggtaaatttccatttattgtttgcctctatattcggaaaatgataaaaaataaatttttacttttaattaaattaaaatccagttttataacatttccatcgcctaatcttcataataaaaaatttttatacaaatttagcttcttcaacaacattctgattggagaaaattggagtggtgatgaatggatattcacagattttgatggttctagaggatttaccattattaatgaatatggcatcaatgtttatgtctttcgttgcaaaagcgattatgtgcgcctgctaaaagcaaaacagtggcttttagaccatcggaaacagatagtttccgtcattgagtgggtctaattttttttaaaaaagtaataaacattgaaaaaatgaagcctgcaaatggtttagggtggctgagtctcaacaaatttgtaacaataatatttttgaactttattttacttattttcagtatttttaaaattgaacagctgagaataatataatgaattcttttttgtgttgaaatgatatttcgcccttttctcaaaatatttgtttaggaaaaatgaaaggtttttaaaaatttattaacgattaaaaatttttgaaattttccaggcggatagtatttatttcaaaaaattctccctgtaaaatttcatcattctgaaaaaaagaattaaaaatttgatttgaaattttcgcaa

SEQ ID NO: 73407 - DNA, 319 bp, Heterodera glycines
atgacgtcatcaccggctgagcaattaagagaggcaacagacgccgcatttgactcggtggccaaagctgtggaggccaaatatcaccagcgtgaggagcagaaggtcaagcagtaccaggaagaacgggaggaatgggagcgaaggatggcggagacgagacgcaaatttgagacggaacgccacaattttgagcaaaaaatgcgcatgaaaagggaacaacagacggaggaattggcacaaatggaacaacaaatggacgaacagagacacaaacattgccgagagcgagaacaacaacagcaacgataattaaata

SEQ ID NO: 73408 - DNA, 849 bp, Heterodera glycines
cgatccattttcgtttgatattcttagaaataaagaagagacaaatttgagcaaaagctttccaattagccaacggattatgcgtacggacagcacagtacataagtccaccgatacattggtaagaaaataattttcgaaataattcatttttttaaattaatttttatcatttttttttcacagttaaaaatggccaacagtttcaacgggcaaagcatcattgacctgtttgacttatcaatgtgttttaccattgcaaattataataaaaattattttaaaattttcattaattatttgattgtaatatatttcctttgaaaatgatgacaaaagggcgttaaaatctcaatattacctaccaaaaaaagttttctttgaaatttttaccaagtttttcatagattccgttataaaatcatccaattttagggttttggaatatttgaaatttcttttttaagatttggtccatttcataagattcagattctcaaggacaaagctcgtaaaaataagaacaattggcaattgccctggaaaatatttaatattttatttttaagatgtgatgagcccgttcaaaaaatgccgagcatcaaatcgttggcggaacgtcgtctgaaatttcagcacgaattgcgctggagtttcgatgtgcatgagaataaaaaattgagctacgaagaccgaattgttggacgaaaaccgcaaacggccaactcaacgccaaccacaaactcatcgtactcattcagcggctatgcaacggcggtcaaaaaaacgttgcccaccgatgggtcagccgattcaggactgaatataaggtgaaagaattgaaataaa

SEQ ID NO: 73409 - DNA, 385 bp, Heterodera glycines
atgtggcattattgcttaaatagtgcatatcttttatttttgatcaccttaaatacaatatccggttcggttttgactcggcaaaggcgacaaaatgccaaaataactgcttacaatgaacagtatgccaaaacaatggcggcactgtcggccggggcttatgccctatcgccaaatgaatgcatccggcggtaaatatgaaaatttcaactaattaagaattgttatgcatgtttcataaaaataagaaaaattttctctgaatttatttttttaaatttaattaaattgtgatttgagacaattccgaattgaaatgaatatttgaagaaatttgttattattttctttataataatcaaaattcacactttttatttaaaaa

SEQ ID NO: 73410 - DNA, 559 bp, Heterodera glycines
acttttccggtgacttttactgggcattcattaggaggagcattagcagccatcgcagcagccaaatgtgtcgcacttggacttcgaatgtacgaatctaatggagtaaaaaaaattttaccaaaagaacagagatgccagttgtcctgatttcgggaattcatttttatctaattaacaaagctcacttaaattttcaaaaattccctggcaccatctgacattagatcccttaaatttgggtaaattcttatgaaaatttctgaaattggaaattcaggactaaaaaaacgtagctgtgaggataaaaattgataatttaattttaaaatataccgtatgcctcctaagggaatttgcatcaaaaattttggaattaaatttttatttcaggagcaatcaggtgacattgtacacatttggtgagcctcgtgttggtaatgccgcctttgcttcaagatttgatcaacttgtgccgaataggtgagtgggcattcagcaaaaacatttaaaattgactaaaatatttttaaaaaatgtttaaaaattaataatgcaa

SEQ ID NO: 73411 - DNA, 927 bp, Heterodera glycines
atgtataagaaaaataaaatcaatagaagccaacaatataaagatgaatgtacgtcatacaaaaaaatattgatttgatcaatattatttttatactttttcattttcattttcatttccattttattttattttaatttttctatttttatttccatttttattttattttcattttcttaccattcctcaaaaattcataggctgacaacaatgcttcttctgttccttcttatgctagtgctaaatcgtatgttgaaaaacttgtaaaaattttagtagcaaatgaaaaataaaattttataatttaattttcaaataatttacaaattatggataaacttagttccccatagtctgaaacgcacgaaaaacatttttcttttcggttgttgttaagctacttttttgagtttacaccccctaagaatcgaccgaaaatttccaaaaaaacaccgctaaaaatgaaaaatattctcaaaatcgtctccaaaatttatttattttttttgataagaatttaaattttaaaaattatttatttagcccctattttggggttttttagactatttttgcagtttttagagtttaaaatcgtcgcccctactcataacatttgtctcattcacaggcattcatttggcttacgcggataagcttgatccaaacaagtgtgttgctgatgttcaaaaatattgtgagcaatgtgcccgaatatgcaaagaacgggttgaagaagtaaagcataagaaaagggaaaattgcgaaggtggcggacctgtcaaattgacaaatgccgtaaattgcatctgcaaatgggaatctgttctttttgtacattattgtgttgcaccggaagcggttcggatggcattgaacgcggcacataaatacggcaaaattggtgacaacaacagccgatga

SEQ ID NO: 73412 - DNA, 2864 bp, Heterodera glycines
atgctggggtcgaatcgtcgaagccgaactgagcaagtccgaaaccacacacattgtttccctgttcatcatcggctgttgttgtcaccaattttgccgtatttatgtgccgcgttcaatgccatccgaaccgcttccggtgcaacacaataatgtacaaaaagaacagattcccatttgcagatgcaatttacggcatttgtcaatttgacaggtccgccaccttcgcaattttcccttttcttatgctttacttcttcaacccgttctttgcatattcgggcacattgctcacaatatttttgaacatcagcaacacacttgtttggatcaagcttatccgcgtaagccaaatgaatgcctgtgaatgagacaaatgttatgagtaggggcgacgattttaaactctaaaaactgcaaaaatagtctaaaaaaccccaaaataggggctaaataaataatttttaaaatttaaattcttatcaaaaaaaataaataaattttggagacgattttgagaatatttttcatttttagcggtgtttttttggaaattttcggtcgattcttagggggtgtaaactcaaaaaagtagcttaacaacaaccgaaaagaaaaatgtttttcgtgcgtttcagactatggggaactaagtttatccataatttgtaaattatttgaaaattaaattataaaattttatttttcatttgctactaaaatttttacaagtttttcaacatacgatttagcactagcataagaaggaacagaagaagcattgttgtcagcctatgaatttttgaggaatggtaagaaaatgaaaataaaataaaaatggaaataaaaatagaaaaattaaaataaaataaaatggaaatgaaaatgaaaatgaaaaagtataaaaataatattgatcaaatcaatatttttttgtatgacgtacattcatctttatattgttggcttctattgattttatttttcttatacattttatgcttgaattaaaatctgaaactcaataatatccatctaacattaccttatttttttggactcaattttcccgaaattgtccccaaatatcagtccgcaaatgtcagtaaggcgctatgaccgatcaaaataagcaaacaatactttgtttcgatttatagaaaattgttttttggtttttgcacaacccaatcaaatacccaatcaacttagtaaaaatttatttaaaaaataaaatttaagagattgaatcttcgtgaaagttttccatttctagggaaagttgggttttatggaacttgatgaattattggtagaggaaatcaatcaccctgttccacgtggacagttcagaacctcacagccatttcggcgccaaaatacttttgcaaatcttttaaaggggaggcgcgaacgccgtcccccgcactcaaaaatttagctgtgggcctatcccagttcgggaccgccctgcgggtcagccccgaccgaaagtgcaatggtggagcctcgccacaggagccctgcctttgtgatcgcaggaactccccagccaggtaagtttagagagcagcaaccagtccaactgacaggcaaattaaagaagaaatgagagatggggtggaaaataggggagagatgaagaggattgtggaaagagaggacactctctccccaggcacactcgtttcttttccaattagctgtgcactatttccttcccatgatcgtctgtcagttggctgaaattcttcactctttttacacgtcgtccttattttctttccctcaaagaaagcgtaagacacatgcacagatgggcaaaaaagaaaagagataataataccaattacggtttcagaaaatcttaaaatgttttaacgaattaaaactgatttttgtttcacacccacaaaaaagacgaaaactattccatttaaattaaagtacagcggaaccgggaccaaaacacggacaactgagtaccgaagtcccgattttgaccgggactagtcccggtttttccccggttttcccagccaaaaattcccggtttttcaacccgaaaaggtcccggtcccggttaagactaaattcccggtcccgctgctctctcatttaaatttaacttttgaatatcattttcccgcttgaatttttgtaaatgaatcctggcacttttcagtgcctatgcatccaatcagtcagtgatcatcctcagtttcttgggccatagcttttttccataattggcattcatcatggttgaaatgaaagcttaatacaattctttgtgattaagaaatacacgaaaataacaaatgctgacattgaacaaagattgaaaagagaaaatccgaaattctgcttttttaaagtatattcacaaattgttttttgtctgttggctttagccctgaatttagctatacaaaaacttggctaaactccaagctttcaattgatacccaaaaatgtgggcattgagcaaatgaaaaaaaagttttggcctaagaaactaaggatagatcactgcaaaagcaatgtaaaagcaaaatcccaatttcaatatcaattttgttttcccttttcttcagcttcatctccggcgattgttggctggcggtgtacgatttgctgccgccgtcacaacttggactgggaattgcgacgatcagcctccgttatgactattacgtggacgaaaatttcaagacgcgcaaatgggcactgaaatttatgcgaattcaaagcaaaattggagcaaatgggatggaaatgcaaattgtcaattcagttggggaagaattgccaattccacaatttgacgtgcctcccaaagtgaccggcttcgaatgcatcgt

SEQ ID NO: 73413 - DNA, 1002 bp, Heterodera glycines
  unsure (1)..(1002): unsure at all n locations
atgttggaacggaaaaaggagtcggataatggaggaggaggaggaggcggaatgcacggacctttgtgtgggttcggtttttgttcttttttggcacctttttccattctctcccccccccccccccctcccntcccccgcctctcctctttttgttgtgtgtttgtgtgctgctgcttctggtgggcgtgtcgcgttgtttccactacctactcatttctctcgctttttctttttttattatttgtttttccgtcgtcgtttccatcatcgataaatattcatttaaaaattttcaattttttcagccctcgggggcgatgtgtgtgaggagacagacaattttgggagtggagttggtggagaggactgaactgacagacaaggagtgctcaaatcaggattcacacacacgggacgggggacaaaaattcaaactcgaggagcacactcactcactcattcgggattctcgaggaatgggacgggactaggagcaactagcgaaccatcctctttcaccgatcacgccaatcagtggatgatcgggacgggatcggacacaatcacactcagacgggacaggaatggaacggacggcaaataaggacaaattattgccttttgaatgtgtgaggcatttcaaaatgttggcccatttttagcccaactcgggccattggaggatggtggagtggactcgatgaggggacacacacaatttgtggatgggacgggggatcaattaggagccacagaacgaattgaaggacactgaggaacaaaaccgaattgaattggacatgtgcacactttggagttgcatcaagaaacggactgtgactcccttttttggaatagaacgggggcagggcacataaatttttaggtcggttcgaagtggactgcatttcgttttaaaatggcatggaatttggtggcgcttcattcgtcagggagttgaacgcgtacaaatttttggctattttatcggctagtgaa

SEQ ID NO: 73414 - DNA, 572 bp, Heterodera glycines
gttttgaccaagtggattgtgcagaatggcaccaaggatgagtgggcagtggtcttttatgtgtcagcagttgttgctgcactgccggtaaaatttaaatttgacgagaaattcaaaatgtaccaataagtttaagatttttacggcttttcggcatctcttcaaattttgccaaccccgaggcttggtttttggcataaattccaatggattcccattttaaactcctgtcataatttttcaatttttatttggatcgacaaaagcctccaagagaaaaattgttcattagtgatatttatttctcaaaataacattccactgacccatttttcaatactcagaaaaccaactttgttttaaaatgtgcattaatttttttaaataattattaataatttggtctatcatttaaggttgtcgtcttctcaatgtggggaagtgatcagccccaactgtgggctcgctcatcatcaatgaaacggacacaaaacagcatcgcatcaacaatcacaacagcaacaacaatctcagtgaagcggaaagaatgcccagacacagcaaaaatatga

SEQ ID NO: 73415 - DNA, 2615 bp, Heterodera glycines
accaaattatatttaaaataatcaaatatatttgtagcgcagtagcgatcggttgcatcactggcggccgtcaattgggcacacttttcattttgccggtggccggcgctctttgtggggtaatttattatttttaatttaaatatccctatcttaattgaggacactcattaatttaaaatgtttacgtttttttttttttgattgtggctgaaagttgaaaattgcttgcctaaattttaagcataagcgaatttttgaaaatactttcccttttttagcgcattttcccgaaaaattttcggaattatccggaaaaagaatatttgctgttgtttttgtttgttattccgcctgcatttaattgcctaattaattttcttcttttttttcattttaattggttacacagaaattttaattccttttttttttttgtttttcgatttttcgctgctttttaaatttccatttttttcagaattggcctctgattttccatttgtcttctttggtcgccgctttggcggctttcctttggcttccaattggtgccgacaaaccgtccaaacagtgctgcatgcccaacaaagaacgcctgtacattgaaagcaggtgggaacaaaaaattttgaatagaaaatttaattattttatgtatgcaatataaaatcaaattttggcaatttcatctttttaattaaattttttagcatttattttataatatttcaaaataaaataaaaaaataaaataaaattatttttttttgaaatattccaaaataataaattttaaaaaattttcttcaaattcatttttaggtaatttttaaatctttttttttggcagtttttacattttcaattaaaaatttagcatctaattaatttgcttttccccaggatcgcctgtgaacacatcggcaaacgcactcagtccaggcgtgtgccgtggcacaaaatggcacggtccgtgccgttgtgggtcaacgtgttttcgctgatttgccatgtccgttttttaaccggcttttcttctgagtattctggataagccatttatgtagttgaggataaatcggctttctttttgttgtaaaatccgtatttaattacaacaaaattttatacgctaatcaaattacctaattggtgttaattaattggctcctaatttcccttcaacaggaatatccgctggtgatcatgctgcagtttttgcccaattacatgcgcgacgtgttggagttggcgcccacccaaaacggggtgagtagtagagaccggacaactggggtcggagggatcccgaggtcgggatcccgaatttaatcccgcgggatcccgaagaaatcccgcgggatcccgatcccgtccggtctctagtgagtagtcaatggaaaagcaaaaacaaaaaattgaaaaataatttaggtatattaaataaaaaaacaatttaatttcaaaaaataaattcaaaccaattttcaaaaacattttttatcctgagtatataagggcgggcatagattatcccgtctattaataattgaaaattatttattttaagtatttaatttagaaaaaatttcggaaatttttttttatttcaattaaataaaaaaaactaataaaacaaaaacaaaaagaataaattgaattttgaatttcgaaataaataaaaaattaatttaaattatattaattttatttaaatgaaaaacttcaactaattaaacttttattttatttgaattaaattaaaagaaacaaatttaaattacaaatttaaaaataaatataataattcagattggatataaaaattggtaataaaaacattttttcccaaattcagcttctttccgcgctgcccattctgtttttgttggccagcaaatgggtgtcctccagcctttcctcatggatcagctcgcgacgcgaagctgcgtcctctttcgcctccggcgacgaccaaacggcggtcgacgcgtgggaggagcggaggcgcggcacgcgcatttgcaaggtgatcagactgatcagagcccgagaaacacaaatcgattgcaacaacatttgctaatcctttggatttgtttgatcggcacaaggaatgtgtgccgacaccctcaaaaaattacggcaatcggcccggaattccaagcccgaaaagtcggcacacggaaattggcattccgacactagtgctgctgttcgagaccaaaaatttcccgagacttgaccccgagactcaaaaaccccgagatttttctcgagtcgtcgggactcgagagtctcgaacagcactatctatccgacgcatccctggttggcactgatagtgatcggaaacaatttttaaaacctgaaacaatttgtttcgtgattggaaaccgttcaaaaaatttattacgaaagcatttgatcatttgcctaaaaggggtgtacacctctgcgatcatccctgggaattttccggcattgaacgagaattgattgatcaattgcgattaacgcgcttaggcatcacgggtgagcgattcgcggcgtttttccgcgatccgcgggcagaaggatccgttttcgaaatccccgtgattttttgtgtc

SEQ ID NO: 73416 - DNA, 522 bp, Heterodera glycines
atgcaatttcatcaaaatgaaacatcggacaaagcgcatcggatggaacaaccgcagaagcaagaaggtctgcaaattggcgcgttggagtttgtcctaacaatggaaagattccctgagctgaaaggaacggaaggaccgaacgaaatacggaaatttttcaaaaaaatttcgtcagcaacaggaggatggccggaaaatcgacgcatttcagcactggaaagcaaaatgagtggaaaagcacagcgtgcatttgacgccgcgatgaaacatcggccgaaaaatttcaacgaaatttgccgcggaatggaaggaattttgagcgaatgggactgcaccgaaatgcgggctttcaacgaattgtggaatgaaatgaagcgacgatcggacgaatctttggatgaatttgcggaacggctgtacggcattgtcgagtgcgcttacccaggtttgccctcaaatttcgtcgacgactttgcagtcaagcacctaattcgtgctatggaaaatccggaaatttcg

SEQ ID NO: 73417 - DNA, 889 bp, Heterodera glycines
atggacaaattaaattcagtggaaaccgtcggcatgaacaaagtaaattattttttataattttaaaaggggtatagaaaagaaaaaagaattttattccatgtaaaaaaatttacaattgaattaggttgctcatttttgataaacacaatttaagggtcaaaatattttaccaaaacttttggcgaagcaaagccgtggcactggtgtttttttgccgaaaaatgcctaacaacgcgtggcactgctttacagtatacgtcgaaggcgaaaatggaagaactttgaaaaactgtaacagtttatggtattgtgatttgtaggaaaaccttcaattacctgtgtggtgttctgttatttttctttcttttatagacaaaaaagcgacatttggggactttttattacaaaaagtcggatattcaaagatcagcaggtctcaaaatattagttagactcctaaatatctttttgtcttcaatagtacttttatcatgttgtgtaaagcattgagtttgttttttaaaaatggctaactgaacattgtgtttgtattccttttaaccgtatttacaacattaatattctcccctataattaatagtctctccccctaaaaaggtactcctactgaaggagtcacaccgtgaaaatttttgagaattcagttgagtttaacaaaaataagaaatatttttgatctgagagaggggggagggtgaaaaatagtataatattttagaaaaaatttactattcataggaattgaattctcggtgctatgtcgaagcgacaaaaatatgggtgtttgtaataattaatttaattattattttaattttattttccaagtaattaatcataacttagcttaagcttagtcaaatta

SEQ ID NO: 73418 - DNA, 586 bp, Heterodera glycines
atgaattattattttatttataaaattttcgctttaattgcccttcattttacatttgccattccaaatgttgtaaaggcagcggttcgtttttaattattattattaaactaaaacgagaataaatccttttttgagtaatttgtagacaaaaaacaaatttgattgttgaaatggaccaattaattttatttaaactacttaatttaatttaaaaaattccctttgatcagttgaaaagcgatgacaaattcgtcacttttgtaatgagtttgccacatatgccaaaataccatgacgagtggaagaaggaaattttggatgaaatttaccgtacccctgtcgctgaaaattcctacgattttgaagctcaccttggcattttgtttttgatgaaagagcattggcattgtgtcgaactcagaaaagaggatggagaaatttgcagaaaatatcgcagacaggcgcttgttttgtacgaatatttcctacgagtgtatcaccaaggtcagagaaagctccaaggcccgaggtgtaattctgctcgagatgaaattgctcgagactcgagagcaaggctataaga

SEQ ID NO: 73419 - DNA, 789 bp, Heterodera glycines
agccttgcacttcttccgccggacaacagccgaggccgaggacaacgagcagtgcaattggtggtggtggtggtactgctgacgaactgcaacaggagaaaaaaccaaaaagttggttggtcttccctttggttttttaaaaaaaaaatcaaccgccccaactaaaaaagtgacgattttgctataaaatatggcaaagttttgtgtattttgtggtcaaattattgtaaatattcaatgaaattttaagaccaaacaaaaacttttgaaccgaatttatgaggcaacacacccaggtttagcaaaatttaaaaaatggggtacaattttttaatactttcaaatgccactgacaatttttacaatttttttataaaaaagtataaattccataaaaatcgaaattttttttgaaatatttggaaaattttgtaatttttcgaaaatcactttaaatttctctcagaaattgggatttacttcatttcttcgttttctccaccgaaatttttaaaacacttaaaattttcaaagattttttttaaacattatctaaaaaattgtaagaaaattgggaggaattggattttccaaatttttttttaaatttccgttttaggcttaccctctccctaaaaaagttcccattttatttatttttcagtgatttcaagcgacacgccaatcccgcggaaagtgcggcgcgcattggcgacggacgacggcggcggtgacaaaaatggggcggctgaacggcaacgggaacggaggaccaagttcgatttttag

SEQ ID NO: 73420 - DNA, 264 bp, Heterodera glycines
atggaaacatttggacttttttgtgtgccattttacggttgtaccccatttttcggacaaaaatcgctgcggacgacggaaagccaatgccaaccgatggaagaagccattgccgacatgccaatggatgatgatgagaaggaggatgaagacgatgatgacatcgatgtcgaaagcgtgttggtccaccagaaactgcaacaacaacaacaaccaattgcatcaccaccaccaccacttatatgccgtcaattgcaccgactc

SEQ ID NO: 73421 - DNA, 73 bp, Heterodera glycines
caaattcaaaaaacgggcgcaaagcgcccgtcttgagcctcgatgtggactaaaaacccctaataatttttta

SEQ ID NO: 73422 - DNA, 737 bp, Heterodera glycines
atgcaaaaagtacaaattcaattttttaaaactcgggaaaaaggcgaaaaattaaaagtgcgaggacaaatgtacttcaaagcaagaccacttgcgaacggaagcatttcttggcgttgcacagagtacaaaactgctaaatgcaacggttctcttcaaacgaacgacaacaaaaaaacaattgcctttttcaaagaccacactcatgggccaagcaatggtaaatttaatttacgaaaataattaatttttaataaatgggttaagagtctataatttattatatatattattaattaattcgtgttcgaattaggggtgggcgaaacttcggcttcaaaaagattggcttttggtaaatttatatttaatatatacatatatatttattaattagtgcactttgttctttcacatagagtggtcaatttaatttttggcccaaaaagacacaaagttggcattttttggtgaaaagaaaccggttaaaatttcaaatacttccccggggcgcctaccgaaaccgccggtacccaaaagttttattttattttcaaattgaaatgctttaagaatttataaaactttcaaatttctaagcacattttgatcaaaaaattcaaaatatttgttttattaaaagtgattaattgatctgtagccgttctgtcaattgattaaatttgatatttaaccgaaattttgttatgaaaaaatttttggaattaaaaaataaa

SEQ ID NO: 73423 - DNA, 157 bp, Heterodera glycines
agcaaaataagcaggttaattgaatttactatgatttaaattaggtgattgcaattacagacaattaaactatttttatattttaaatccttaatttggtgcccaacttccctctcacattcatttataattttgctacaatattcattaaataaat

SEQ ID NO: 73424 - DNA, 56 bp, Heterodera glycines; identical to SEQ ID NO: 68623

SEQ ID NO: 73425 - DNA, 980 bp, Heterodera glycines
  unsure (1)..(980): unsure at all n locations
atgtgtgccaagcatcaggcatggttgaagaagaacgatgaccgcatcaaggatggaaaagcgacaaattttgtaagaattggctcattaatgctggaaaatgggacgcagccgaagaaattgattgaagcggcaattggagtgaacggaaaagacgtggaatttgtgatggacatggggacggaagtcacagttttgtgcaaagaatcccaccgacaaattggaagtccgaaattgggccattgcaaggaaaaggccatccttaacgacggatccacgcgccgatttttggggaaaggatttgcaaaattctcttttggagggcaaatcaagaaaggacaattttttgtgtctgagaatggatccaaaaatttatttggaaccgacatgatggaaaaatttggacttttggacggatttaagaaaaatttgaagggcgaagtccatcgaaacatttcgctgtcggagcgaaagtgatcacaattggnaggatcacaaccgatgcaaattggttacgtcattagccgaaagggatgatgtacgacgtccacttccaagatggatatacgggacggtaccatgcaacaatttggaggagtattcaccggccaagtatgaaggacctggatttgtggactccgaatcgcaaatggaagcgatcgccacgcgaactccaatggcaaacgttgaatgccgaagaagaatggacgtgtcggacagacgtgtcgagaaaaagaatggacgtgtcagatgaaaaagatcctttttaagggtgaaatgttagggatgggactcaaatggccgccccaattatttatttgtttatgtccttcacctctgtactctctctcgactttcctccccataaatagtccgccctttgacccattctttcacttgtatcttcacttcatttatttgttgcatcatccccaatcgatattccccattgcttcatttgttatttaattttgtcttca

SEQ ID NO: 73426 - DNA, 196 bp, Heterodera glycines
aatcgaacgctaacggacgacctaatggaaaaaaatccccgaaggagagaatttaattaaatccattccttcgggggaccgtgccgggtgccgcggggtaagcagtgctggttcgtttcatcacggcaccgaaccttttggctagtcagcaatcgttgcttaacttgccagatcggacgggtgcgcatgactttct

SEQ ID NO: 73427 - DNA, 620 bp, Heterodera glycines
atgaccagtgagtgaaaagaatcattaaaaaataaatatttgcttttttggggtcactgactcatacaaaaaatgttgttgaaaatattaaaatatgaattttcaattaaaatgccataaaataatttttttaattttcaaaaaatgttgcataattttgtatatgaagtgttactttgttcagaaaggcacgggattgtcctttaatataagtacagcagaaattagaaacggaaaagaatgccccccaatttttggtaaaaaaaattatttcaaatgacgcccttagaaatgcataaacactcatcccatattctttgccaaaatagctagctaatctacagagttaaaaaattgcattagcatcgattttcccaccatttttcaattataacggcggaaaatttaattaatataattcattaaaatgtttttatttagattcagaattattaatttattttcagttgtgacgcccctttgggttggcgcaatggatggccacttcgaagtgtgccaagcgttggtcaaacacagggccgacgtcgacttgggcgcgccgcaatttggcatcacaccactgatggccgcatgtgagaacactgctcgactggacactg

SEQ ID NO: 73428 - DNA, 803 bp, Heterodera glycines
atgctccttgctctctttctgctgaggacaacgaggtacagcgcaaaagtcacctgctgcagctgttcgctcgacgatgacggttctatggaccaaaatgcgaacgtggtggtagttcagtttattatttttgaacatttcattaggctagcaacagttcacaggcatcctcacggcgtgtcagacggcaataagctgcagctattcgtgctcctcccaaaaacggctaacctccaacataatcagccgcttcaatagtcggctgcagttatgtttggatggacgactaacttacaaagtaatatttcaaaaagtgagtaaacagttaaaaagtataaattttcatcttaggtctcggcaagtcgctcttcattaagccccatactgaattgcacccattcaaaaagacaattcgtgaaaacagtacaacgcttggatagctcacggggcgagggcgacaaacatcgagtggaaaggcaattccaaatggtttcgcaaggctgaagcataaatatgtccaaaggatggtgatagcttccaacttcttgtattatttcttgtaagttggatttttgtaaaaatacctaaatgtaaaagctttattttctgaggtttaaaccaattttacggccctttttgctatttttcttatgtatttcgacccagcggaatttttggattctttttggaaaaaattttttgcttggaggggggggagggttataatacagagggggttttaattcaagggtgggttctatttttcaacccccctcagtgggaatggaatggcggaaattaaa

SEQ ID NO: 73429 - DNA, 97 bp, Heterodera glycines
ttaaagctgtctccgcttttgcgaatgattaatcagacaaaatatatattcaaaataaatggtagctttggtcgcacatcctttcatgccattaccg

SEQ ID NO: 73430 - DNA, 248 bp, Heterodera glycines
ggcgcccccacaaagtgtccaagccacgaaatgtccaaaagagtaaaaacccacgaaatgtccaaaatttttcaaaatttataaaaacaaaatgagtctaatttaggatttttagggttttcggggtcgctgaatacgaatataccctttatattaccccttgcctaaccttaggcccatctgaataataaaaaactcaaattcgagacttggacatttcgtgggctggacattttgtgggtcagcga

SEQ ID NO: 73431 - DNA, 760 bp, Heterodera glycines
atgaatgacataatacattttatgaaaagaatacatcgaaacgagaattataaaataattgaagttggtatgttatataatttcgtacatatttcgcaatttttgaggaaagtagtgtaaggccccttaatccgttgtaaacccccccccctgaaaaattccgccccaaatttcgccccaaattccacccacaaatttctccccaaatttggcccaagcgcatccccctcccttcctcccccaaattccccactcccctctaacgaaaagaagaataaatatgatgataaaatgaaaagaatatgagaaagaaatactatcaaaagactgttttttacttaattttaactaaattcgatcaatgttattttgtcatcagcaggtgaacaaataattgaactattaaaagataaattatttaaaatttgactagttaaagaaacaaatgcatatttttaattcgattagggcataggaaccaatttataaaataacataattgaatcataaaaaacgattattcgtcgacaatgagatgtcaaaaaacaattaaaattgattacaataaaaactgatactttagtgagggatgcgcactgtgccccccagaccaaccgcaccgtctatcccggatggaacatgggagggaatagggaaagccatgaccagtgactaagccacaaaatcccaacgactcattgactgtcgatatatttattcactcgttgttggatttacacgaagcgagaaaaggaataaa

SEQ ID NO: 73432 - DNA, 1442 bp, Heterodera glycines
atggatttccatgtaattctattccctagtcataagaaatttctatcaattctcaaaaattcgaaatatgtaatacaatgaaaatacatatgtaccaaaaaagtcaatggaccttttattttattacgccgacctttgggaaataatagtccaattaaagtataattgttcgcgaatgatgtcctagtggcaaaaattgtcaaattctcattaaattacttagtcttgttaatgtcatccaaattatccaataaaataattttcctttttcttttctaaatttattaatttcaatttttataggacttcctattagaaaatttttatggagaagcagcttccattcctgaagctcaaaaaaaattctagatttccggccgaaaaacaccaaatttaaaattgcattttatctgcaacagattttgtgcaataattgctttaattacttttagaatgtaagccatataaaattaaaaagattgacttcatagcgacaattaggcatctgaatttgtttgctgtgcattgtcggaggatccattcttaagaagaaaaaaaaatttttaaataataaaaatggataaaaaaaaataaaatatttcaagaattaatacagttttacaatttccaatgagcaacacctgactgtgaatggcttctccaactcgtgctccatttccatgtaaaagcatcgcaaatcgtaaaccctgtccaatttggagaggtattgggcatgaaaggcgaccaccaaacgcacactgaggaaaacgccccggggataatcctcctaaattctaaaattgacaaaaaaaaaataataataaaaccaaaacagctaatttgtttattgtccactttaaatgaccctttttgtgtgctttatgccgcacgtgccaaaggacagtcggatttgcgcattccgtgccgccccgcgtccaatggcactctcatcgacaaacgcggaacgacagcgcggctctttgaattgaccttcaacaaacacaacgccaacgaagggattgcgagtgtcaaaacgctgaataaagtgcgttttgactatacgtgagaagtagagaccggacaactgaggtcagcggaatcccgaccgaatcgcgatcccgaatcggagtcccgtccagatcaatatcgatcccgaggcttttttcggcatccagcgggattataaggatttgcttaaactcaattttctttcagttttgtgccaaaatttatagtggctcaatcccgcgggattggcgtgaaatggtcgggagggatcccgactcgggatccgaggaaataccgttgctaattattcccgatgaaatttgaaaaagctcaggacggattccaatgatgacatatatataagaatgcgaacattggttgtttataaagccaattatgactaatttaattatatatcgatgatttgcagaaaa

SEQ ID NO: 73433 - DNA, 972 bp, Heterodera glycines
atggcatcatcggcgaaccattcgtcgactgtggtggaaattttattgaagtggcaagtttattaatattaaaaagcaccgtaatttatatattaaataaataattatttaaaagtttctatttattttcatcatgttgttaaccactttcatcgtattttatttctttatttttctgcaaatcatcgatatataattaaattagtcataattggctttataaacaaccaatgttcgcattcttatatatatgtcatcattggaatccgtcctgagctttttcaaatttcatcgggaataattagcaacggtatttcctcggatcccgagtcgggatccctcccgaccatttcacgccaatcccgcgggattgagccactataaattttggcacaaaactgaaagaaaattgagtttaagcaaatccttataatcccgctggatgccgaaaaaagcctcgggatcgatattgatctggacgggactccgattcgggatcgcgattcggtcgggattccgctgacctcagttgtccggtctctacttctcacgtatagtcaaaacgcactttattcagcgttttgacactcgcaatcccttcgttggcgttgtgtttgttgaaggtcaattcaaagagccgcgctgtcgttccgcgtttgtcgatgagagtgccattggacgcggggcggcacggaatgcgcaaatccgactgtcctttggcacgtgcggcataaagcacacaaaaagggtcatttaaagtggacaataaacaaattagctgttttggttttattattattttttttttgtcaattttagaatttaggaggattatccccggggcgttttcctcagtgtgcgtttggtggtcgcctttcatgcccaatacctctccaaattggacagggtttacgatttgcgatgcttttacatggaaatggagcacgagttggagaagccattcacagtcag

SEQ ID NO: 73434 - DNA, 1446 bp, Heterodera glycines
atgttgacaaacccgcaaaagtacaaaatcgaatccaggcctgggtttttccttagtccggtttcaggtccaggccatttttcggaaacctggggttttcctggacctggactttggtccaagaaacacaggcccaggcatgtttcaatctaatatttattaataaacacaaaaatatgtttttagaagaattcaaaaatttttttccatggaaattcgcccaaataataacgattgtctcaaggagcgattcattcgattaacgcgttacgttgcgtacctccttttcgatctgatggaggcaaacgaagtcagttttggggtgactgtgcattaaagtaaacgaaacttaccaattcacatcttcattatttgtttttttagctattttcagggtttccaaaaatggattagtgattctgaaaaacagcattatttttgggatataaatgcaacaatttatgataaaatcccgtcaaatgggtcaacctgagaattgagtcgtgtgaatttgcgtgcttttttgttcatttttttaaattttcgtttgcgatttcaaaataaggaatagcctatttttctccttttttaaatttttttgtccttttagacaacgtcccttcgcctgtccgccttttccgcactgctcagtcagcagcatatttttgacgacgacgaaaccgatgccaacggttggctggcgccgtcgcgggcgaatgcgactcgcagacgcaaacggacgggcaaattggtggcgcaattggttggcattgtgtccaccttcctcgacgcccaatttgagttggcttactgtaagtggtcgattcgtaatttgtaaattttagcgaaacaaaaataatttggaaatgtattggacttttcaaaaaaaaaaaaaattttttttttgaatttgtagaaagttgacgggtcgttttgcattcgaattccgtcgctccctccctccaacctcaactgcttcttcgtcatgtttcatttggtgtgtttcagtgtccgatgtcaacgattatgtcattcggctgcgcgagtggtcggcgtcgtgcagcgaatcgcaactgtccgccgagggccgtgccgacccgacaaacgcgtggtcccattgccaggccattctgttcctcaaccgaattgggatgcatttaattgacgagaaaacgagcgacgaattgagcgccgcgattggacggaacggcgcggaggaaaacgaagtgcaatgcccatttgaacagctcgacgaagacgacgagtgaatgtgatgggaggattgcgccatgactgaccactaacccctcggggttatatccctccgttaaatgaattcgtgaccaaattagaccattttattcattgttttgtttattaccaatcccatgcttatataagctattcgtcttatctataccaatgttattccactcattaaataaa

SEQ ID NO: 73435 - DNA, 1411 bp, Heterodera glycines
atgccgaaacaggcggaagagaccaaaatgttgttggagcggaaaatgcgcgagactgaaatggccgcacaacgaatggctgcgcttcagcaccaacaacagcaaaaacagcagcaacagaatggcatcacaacgcccgggacggcaacagttgcgcagcaacaacaacagcagcaacaggtgttttttgtggttgggcacaaattgcaaagcaaattagccacaattaatgacccctcaaactgaatttgatcaattaaacgtggtctatcggaatcttcacagatgcagcagccacctccgtaccaagaagtggtcgagaatcggcaacaaacgcagcagcagcaaatgccattggccaatggtgtcggcgccgcagcagtgccattgaacagaccgacgacggcacaatcgccgaagaacaacggcgggacaaccacacccaataacaacaacaacaacaacttggtaaatacttttcacatcataataataaaagcggcggactcgcctgcttttctgcattggccaaaaagtgccatttttaaatcgaaatttgggtatttatcattgtgaaattgcaaaaaaaaaaataaatctaaattatatttaatttataattttttatagcggtcaaaattcgttaagttcatattttctcagattgtcgtcacttcgcctcagcaaatggcgcctttgtatttcggcggctgtcaatatgaaatggccacgacaatgtccgactcgcgcacttccgtcgccgccgaattgcagcacattttcgctgagctggaaatgtccaggtggggaacataaaagttactgtggtatactataacagtaacaaactgtttttgcactttaaatcaaaattttgtaatcattttttacttaccgtaaaaattggcaaattttaaaattaaaaaaaacatttgacctttttgagtaacggatcattggcattgagtgagtgtattgatttaagtcgttttctcacaaagtgtaaaaaccgttgggaaaacatgaatatttagtcaaatataaaattctcataataattttaatttttgtttggctattttttgccaggagtgagtacaacgagcggaatcagtcgctgcgagaccgtttggccaatttccgtgccgagttggactcgctgaagcgcgagggcaccgacacggaaaatgatcggctgttcgcccaaaaagtgatggccggcgacgcattcgacaaattttccacgctgcgaaaggtgggctcactttgtgcaattaaatcctccgattgattgggccatcggtgttaattttgagtttgacccatcggcaaatttttaatttaaaattattgaatttttaaattcagtcgaattcggccgtttggctgagaacatttcgccaaaattaaa

SEQ ID NO: 73436 - DNA, 517 bp, Heterodera glycines
atgtttcagtcacttctcgacctctgtgtgggcacgcataacctttacctgcgcagacgacagcccgacctgctcgaggtgcaacagatgaagcagcaggcagacgagcagcgaaggcgcagaatggtaaagacaaaactgatcagagaacagtcgatcagcaaaaagtgacagtgggaaatgacaaataaaaaacactaatcatttattgattggtttagtggtcatttggatttggaattttattaatgattagctattgctaacaaataagcgattattgtacaagcaataaaaatgatatagcagaaactcataaaacaaaaagttccctgattaaatccgggttttttaattttttttgtatgacttttttaaacctttgcaggaggagcaggtgcggttgcaccgcgagcgtgagcagcgcgcgcaggcggagcaggagagggaccgctaccgcgcagaactgaaccatctgtcggaacagttgagcgccatgcaggtgatcgagctttaa

SEQ ID NO: 73437 - DNA, 902 bp, Heterodera glycines
caaaaccaaaattttgctattctgtttttacacagtacgagttgggtaatttagtagtgctgttcgagaacgaaaatttcccgagactcgagaccaagacttgaccccgagactcgagacccaaaaaacccgagactcgagaccaagacttggccccgagactcgagacccaaaaaacccaagactcgagaccaagacttggccccgagactcgagacccaaaaaacccgagactcgagaccaagacttgaccccgagactcgagacccaaaaaacccgagactcgagaccaagacttgaccccgagactcgagacccaaaaaacccgagactcgagaccaagacttgaccccgagactcgagacccaaaaaacccgagactcgagaccaagacttgaccccgagactcgagacccaaaaaacccgagactcgagaccaagacttggccccgagactcgagacccaaaaaacccgagactcgagaccaagacttgaccccgagactcgagacccaaaaaacccgagactcgagaccaagacttgaccccgagactcgagacccaaaaaacccgagactcgagaccaagacttgaccccgagactcgagaccaaaaaaacccgagactcgagacccaaaaaacccgagactcaagaccacgacttggccccgagactcgagacccaaaaaacccgagactcgagaccaagacttgaccccgagactcgagacccaaaaaacccgagactcgagaccaagacttgaccccgagactcgagaccacaaaaacccgagactcgagacccagacttgcccacaatcactcaacaccacttgaacccgagactcgagacccagacttgaccacaatactcaagaccactagaacccgagactcgagac

SEQ ID NO: 73438 - DNA, 764 bp, Heterodera glycines
gcattcccggcacaacgggacaccttggcgagtccggctaccctggtcaacccggctttcccggcgagaagggcattcaaggcttgcccggccttcccgggctggagggcatgccaggatcgtctggtccgccaggtctacctggcttgccaggcccagccggaccaagcttcagagacggtaagtaaaattttaatattttcgttgaaaaataactttaaaaaaattttatatcgtaatcaaatgccaactaaaaattcaaagaatttgacagtttttgaaatcaaaataaaatattctaaaaaattcattgagaatcattagtaggtcaattatttttaaaacttttttggatcaaattttttcctacaaatttttttaaaataaattttaaaataaattcatctattattgtcattttgtaaggttttatcattgtcacccactcacaaactgctcaagtaccgcaatgtccacaagacacaacaaaactgtgggacggatattcactgctgtatttggaagggaacgaaaaggcccacaaccaagacttgggtatgataattaagaaataagcaattccctttaaatattaattaaacgaattaaggtcatgccggctcatgtttggcccgcttctccacaatgccattcctgttttgtgatttcaacgatgtttgcaagtgaacaaaagaaaattcttgaattttccaaaatttatatattatttaaattaaaaattaaaattatccagtaataattaa

SEQ ID NO: 73439 - DNA, 980 bp, Heterodera glycines
atggtctattgtgagcctggtgatatggtgcaaggtgaagtgtatttgctcgctactcttatcgtggttatttttactttggctacaactgtaatttatattatcatggctattatgctaaagggtaaatttaattacataattaaaatacataaatttaaatgactattttacaattgattattaaaacaatagcttttcatttctcagtgatcagaagtgatcagaacaacagcaacaattcttcacagtcccaaattgaaatcactcgtcgcattttcaaatcattggctgtgatcatggcagtgatcttttgcctttggttcaccagttgtctggtggttaacattgtggggcgcggactgatcacaagtgatccgtcatctcaatttctgatcacacgattagtggtacaaatggtcacaattgcaggggcgatcaatgcaccaatcctatatatttgcaggcaaatttagaattaataataaaatcttttttttaataaataaaggttttttagcaaagaatatcgtgatatcttgaagagtgagttcggttgggtcattaaattgtggtcaattcgaattcaaatttcatttgcccatccaaaaaccaatcaaaatgcttctgctgctgttattgttgtgtcaagaactttgaaaaattcaaacgaaaatcgagtgcatatccgatgaaaaaaagaaaatgttttaatagcaaataattgagccatatttttacaaaattagattaatttatgcctttttagaactgaccatctaaccaattaattcttgtaactccgaaaaacaattttaataaaattattatttttaggatatttttcaacagctgccatttccatgctcttttccacagtcaagtcgtccacaaggcatcccatccacagacaactcatccacatttttctcggataaaaattaaaattaaatgggtgcaaaatgccgatgaaaaataaa

SEQ ID NO: 73440 - DNA, 376 bp, Heterodera glycines
taattttataatttactaaatttagctctcccggctctcgtttggaagatttccgaacaactccgttcattgagtgcaatggtgcccggggatcatggtgctagactttaaatttatcttatcattttttgaaaaattttcagccatttcttcgccaacaaattcagtttctggctgacaaccattgaggaccagcaacagtttactgtaaagctactgtatttttaaaaaattaccatttaatttattcgtaatttacggtttatccaccaaaattcctttaagatcccacaaagtcaaacactgaaggcgggcaatcaacgttctcggatttcgcgctgccaagtttgtaccaaaacaactcgataaacgccgt

SEQ ID NO: 73441 - DNA, 146 bp, Heterodera glycines
tcctcatttttcttcgcaaacggattcctctgttgacttgtgtttatgcacaattctttgcaccactttcatctttaaattctgcactaaatctgttttggataagcattgatcgttttgtggcattggcattccccgttttgtaa

SEQ ID NO: 73442 - DNA, 1374 bp, Heterodera glycines
atgaggctgttaatctgtgacgaggagctgagtttgttcaacctgaacaacagtttgaccgttgcactgctcgacactttgtggcgtgtttccacgtaattttgtttttccataattttaattaattgttcatttacctatcattttccgagtcgtttatcgtgggttagttatgtaattagccatgaaaatgctacttaatgagctaatcccaaaaacaatgcgtgggagggagtgggtgttaaatgtaatttattttgttattttaaaggcatcccaattccgatgaattcattaaaaccaaaagaataataattatggggccataaaaaatctaaaaaatgccggctaaatttaatttaattggtgccatgccattcattgcgcccgcccttttcagcctgtacaacaaagtgcactgttggcttggcctgttcatctgcgtgttcggctcgttggccaactgtgtgcacatttttgtgctgtcccggcccgccatgcaaaagtgtgcggtcaaccgactgttggccatcatcgcattgtgcgacatcgccacaatggcctcctacacagtgtttgttgtacgctttgagtttgccgtggacaacgaagagccaccgctgggctacgacttcttttggtccgcaaattatatatttttttgtataaataaggaccatacaaatagtcaaggacatttggactagaattaagtttgtgagaacatgcgtgcttaaatgtggaaaatccagggatattcaaggacaaataaatgctcagaaaaatttcacggcttaaattatttaagagcattttcaaatcgagatcaatctaattgatgaagttatttttaagaataaggacacaaaaaacccataaaataccttaatgagattatttatgatcgatttatcgatagctttattcgaatttatccaagtttatttgatcagccctgcttttacattcggctgatcaatttgatcaaattcaggattgtcttcctgttggcccatgttgtctgttcaatcgcgcttcacacaatcaccgtgtacttgactgtgatcacagcattgatccgctacaaaacgctgaagcgtgtcagctctttgtggaaccatgagaacattgcttggtaaaccaaaaatgcttggcattatgtgtctaactttttattcaatttttaaatttaagtccaattttcgtcgctgtcgctgtcctgacagtgttcttgtgcattcccacttttctgatccattccatcattcccgtgtctgccgctgatccgatcacccaccaaaatctcactttgtacactgtgggactggccgagttcaagcagttcgacacatgcttgttcttcaagctcaacct

SEQ ID NO: 73443 - DNA, 1695 bp, Heterodera glycines
gtgggactggccgagttcaagcagttcgacacatgcctgttctttaagctcaacctgtggctgaccggcataattttcaaggtgggctacactatttcgaattatagaatggatactaagacttacaatttccgtttataatttaaatcccatttatttttttatgtttttttttttgcttttcttggcacattaaatattcaccccatacaatttcgaagtgccgaattaaatacagtattaattaaattacagacttaattacctcaattaacattctccaaaaattcaagcttttcttttgattaaaagatttttttcgatttcgaaccctttaatttttaatttaacttccttctaaatttgatttgcgtcatttcgcgcacgcgttttagagcaaccctataaaaatttactggcttatttgtgtttttttattgctttgtgtgcggacatgtgccaacggcggaatggcgtgtttgctaagtcccaaaatctaatattgctaatccggcaccgaaatgccaaaagctttttccgtttccgattaaacagtaattatttgggctgcccaaggccgattatgactaattgacgtaattatttttgttattattttcggtgccacgacatgccgataccaaaataattgtgttgagcatttagcggatgaatggataaaaaatggattttgacgtggataatagcaacactaattaaagcaaataaatagaataacagaaatttaaatgagtagaaattaattttaattttttgaattatttattatgttgtccttatatgtaaaaaaagaaaaagaaaatttattactattcataattaatttctgtattaattaaaaaggctttgatttaaaaggatttggatgtttaagttttgctctttggtcaccaaaagggcataagataattatagtttagatcaaaagctttagagataagtacttctggcaataattagttgacaattatttgaaacatcattaaacattgaacggcttctccttcttccattatgtcatttattcgttttcaaaacgtcataaaataaaaatataattaaattttaattttagaaattttttaatcccggatttttcaaggtgatcccatgtgttctgctactgttgttcacattggcactgctgtacgagctggagaagaacagccggaagcggaaatcgatgtgttccggcacaacattggcataccgacggcattcagcccaatctgatcggactacaaaaattttgttgatccttctgatcgtctttttttgcaccgaatttcctcaaggtgtgataaaagcataaaacaatcctagtatttgagaaattattcatttttttatcatgaattgtgccttgtttattggccacttttgaaatttcaaagcctttttatcccgtcattttttaaggcattttggcaattctgaacgggctgttccccaacgacatccatcagttcgtctacctttcctttggtgaactgcttgatctcctttcgctgatcaactgcaacacatgcttcattgtctacccgctgatctcctcccaatatcgggcaacgctgcgcaacttggccgattgcattcgacagattgcgcagggccggggatggcaagcggcgaccgcaaatctcaggtagcaaatttaataattgcagcagatat

SEQ ID NO: 73444 - DNA, 298 bp, Heterodera glycines
atgaagctcatctcaatgttcatctttgctgtcttgttggttggcgttatggtcgaagttagtgaagcacaattttacggcggctattggccatcactttacggcggactgtacggatatggatcatatgggtcatcatggagtacgttttgaaatttaatgcattttaaacatgctgaaattgtttaaaaatttttttaaaatcaatttaggctggccctactatggctacggtttctatggaaaacgatcggctggatttggacctgatgaattgaaaaacgagaagccacaatga

SEQ ID NO: 73445 - DNA, 724 bp, Heterodera glycines
atgatgcttaattacccatttaaccggcggattggtccgatcggaaaggaaaagcttcaccttttgattaagcatatgtttattcatcggatttatttaggtatattttttctcgccgagttgtaaaaatgtttctataagaaaaggatgataaaataataaaaataattcttttaaaatatattctggatttttcattccaaaaatattaaaatcttttatttaaaatctttttttttacgttttttgttttttgtatagataaaaaattttataattttttttattcatatcttctttttcaaattttttattcttttctttttaataagcccttgctaattttagccattggccttggaatttgttttttttttgtttgctttgccccttccgtttcggccctctctaaaatgcttttcacagaatttggcggaaatgttcatacgtagtttggagaaagcacccatcattttgtgttcagaaggactaattgatttgaagatgaatggagaattttaaagaatttggagctcttgaattttgatgaattaatcaaataaaaatcaaaatgcatacaaatcaaattaaattaaaaaaaaaataaaaatttaacaatcatatgcaaattttaggaaaatgtacatatgatgcgttgctttttcaagatcgtcttggcaattttgacgaatttgtaacccgcattggaatattaccacattaa

SEQ ID NO: 73446 - DNA, 1141 bp, Heterodera glycines
atgaaattcgccgttgtctccctgctgttcgtcatggcattcttcgtcggcattgccgtcattgaacagtgtgaagcacaaatgtacggctacggcatgtatggcggctggccctactcctcatacatgtgtatgtctttatgttccaaatttactaatttcagcttaattataacagaaaactgatacaaaacatacgccgttaattatttcgtaaaagcaaaaaatttcggaaaaaattgctacgacttttcataaaagaaatcaaatttacttttttttcgtatcattcagtacggtaaagctaaaagtacggtaacccagctctgaaattcttcctatttttggaaaattatttttttcttcttctcagacccctactacatgtacggcggcattggcaagcgtgaagccggctttggcggcccaagcgggcgactgccgctgttggcacgaaagcccaattagatcagttgcttaaagggcaaaatatgtgatgaaaatgatcggcttacatttgcccaactgaaatgtcgcattcatcagaaaaaattttaaatgcataaaatgtttttaaaattatgaaaaatgaccccatcccaatgaccattttataatgagcgcgggggcgggggttgggaccatggggagggtggaacggtaatgcacaccatggttagtgctaggtcatattatttttttaatttccaggttttaatctattttcgggtttagatcgctatgatgattggtcggtctgtttaagttgatgaaaaaaaaaattttacgatacaaaatagctttagcagaataatctgcgttcatcttggcataagagtaagcaaactattatcggcagagattcggtttaaacataaaaatttttttgtttctatatttttgcacctgactgtactttgttaaagaatcaaaaaattataaattaaattaattttaattttaaaatgattaacaatccgtcctgtccctccctccctcttcacccgtttgtacaaccattctgttgttgctttgcctaatccaaattcaaaatcaaatttttgtcattaatgccctttttgggtcacaaatttacctcggaccaaaaaaagagaaaatgacgtagagaattttggatgaa

SEQ ID NO: 73447 - DNA, 932 bp, Heterodera glycines
atggcgatatggatcgtgcatgaacaccttcggcaaaccgtccggacgaggcgtaaaaagccatttggcctaggcttggtcatccaatgcattggcactttcgtcgggtggaaattcgggaagagaaaatacagaaagaaagcggagcgatggacaattggacagaatggacggggaaaatcgacgcaaattgcatatttcaattatcatcatattccaaatgttgtcgttgagcattggccaaatattgagcaaaatgaattgcataaaatggtcagaacggtgtctgtgttcaaacattagcaaaaaaatttggccagcgtttaaaagtggacacaaatggtgcagaaaagtgctaacattaaggtcgaagtaactgaaaaaagggaagatacaacctctagtgcactttatgagtacaatcttcagtttatttggccataacttttttcttacttcttgttaaccaatacctaaattcttagtattaaaagaaagttttaagtctgtagcattttctgtaaatttaaattctcggctaaaagcaacagacaaaaaattattcatgaatatactcgaaaaatgctgaatttctttttaccattgcacatttttgatgaatttgtttgctcttttcttgtatttatgaattcccagtacttttagctttcgttcgataccaacaaagtaggcattggccaagttcgaaaaaagttatggccaaagaaattgaagattagactcataaaagtagattggactttataatagagatttattttcggtttttactcaatggtaatgcttctgaaccatccgaattgttcaatggcacttcatttaggccgtcagacattttttttattggccaccaattaaacggcaattatattttgagataaaattgtcaactaaatattccacacaataaa

SEQ ID NO: 73448 - DNA, 524 bp, Heterodera glycines
atgatcgaaggaattcaagcggtgattaaattctaattttgaaaatttgaactttcgactttttgttcgaatccgggtccgcggttcggaattcagaactttcttatagaatttccttttttatactgcaatacttaatactacaaaactttatttaaaaacatttgtatcactcacgctttttccactgacgcattttccgccgcttattttacattttcagccatttctcagcgcttcatcgcctgtcaacttcatcattaccttttgcgttatagttcaaccgtttgttgctttgaccgtgccctatgaattgatcaacgaattcactggggagcgattggaactgattaaactaaatgagcatggcagtcatatggtgatgatccgttctccgatttcacgtgataagccaaatggacgcaatgggaagaggaggccattgaatgggaatctctgactgagtggaacaacattgaagtggaatttggtgatgacgacgtcggcgatgggtaaagcaatta

SEQ ID NO: 73449 - DNA, 789 bp, Heterodera glycines
atgtcttcggttcatcttcttttggttctgttactgctccaagcagtcctttcacttccgtcatttacatatggcaaaaagaagaagaaaattgaaaaaataattacaaaattcaatttcgacggggcggtaattggcgcgacaaatcaattcgaagtgcaaattgactatgacgacggcattccaaaggcgaaggaaacggtgacgagaggggaggacggctctttcaccgtcgaattgccattggaacgcagtgacaccgtagaaaaacttaccgtaaccgtcacgtccacagacaaattaggcggactgaaaagggtgagcaaaattcaacaacactaatttaagggaatttctttaaaaattaaatttatttagtgaaaaacatttaaattaattacaatctaaatttgttatttcagagaaaaaaatgggaaattaattggcctgatccgagcaaacatttcgtgtttttcatgggcgaattcgaacccgaaaaccgtgcgccgctgttccttcgcgcactttttacaagggaattaccaaataaaggcgaaagcattgtttatttgctaaggtgcgcatttgttgcatgaaaaaaggcaccaaagcattagacgagagacgttcctaattagctcctaattataaatttgtcgagattcgggattgcttctcgttcccggttcatggcgtctcattctccactctcgtgatcaattctcaggcttgagtctcgagactgggaaaatttattctcagtcagcctataattattaaaataataaa

SEQ ID NO: 73450 - DNA, 1584 bp, Heterodera glycines; identical to SEQ ID NO: 10283
  unsure (1)..(1584): unsure at all n locations

SEQ ID NO: 73451 - DNA, 260 bp, Heterodera glycines
atgagaaaaagcgattttttgacagttcaattcgggctcaccaaaggtgagggcttttaacacaattaattgttgaggggaaatgggcgaaatttcaaaatggaggtcttaaggctttttgaaggtttttcagacgtcgccgatttgtccatgcgccgattgtccaccattggatttatatggttgtctcaattattatttttggatactttgtaaaatttgtaaaatgagcaaatgtttaaaaaacgagagaggtaaaa

SEQ ID NO: 73452 - DNA, 1453 bp, Heterodera glycines
atgagcattgagttggaagggcgcaacagcgcttaccgtttcgtcgcttatgcggccgtttgcttctccgtggtggaggcgatcaatgagtgcgttacactgcccatggagtacaactacggacaccacgtgcggcgtaccatgcaggaagagattaattattgtaaggtgattcttagattttattcttttgtatgtgcggccaaatgccattggttggtcaaaattcccaacggagggacgaatagacatcatttgtatgattcgttaaatggccaaatgctggcgattcaaaagtggcatggtttggtattgaccaaatggataatagagaatggccaaatgttagccatttcgagttggggatgacaagcgggatgagtctcgttttcacttatctctttaacattgaaaattttgaagagctcggcccgtgacatttggatggaggtcaaccaaatccgcaacattccgtcagcgtttaacggcaatcggaccgcgcgtgcgtctggttatgctagcggaggcggcggaggcggtggcggatacgcttccagcggaggaagcgggggtggaggcggtggcggatacgcttccagcggaggaagcgggggtggagctggtggatatgcatcagcgacgagtggcaccagcggaggcggcggcggaggctgtcaaccgtgctgtaaccctggcccgccaggcccacctggcacgtctggacgaccgggacgccccggaaagcctggctcaaacggcatgccaggaggcccaggcaagccgccgtcccagccttgcgagtccgtcacgccggttcgttatgcgcgctttgattgcgtagcaaatgttattatgctttttcccatttagcctccttgtaagccttgcccaggtggacctcctgggccgccaggaccacccggacctcccggcgacggtggaggacccggacagcccggccagcctggcagtgactcgggtgcaggttctcctggcccaaagggcccgcctggcccacctggtcagcctggacagcccggctctcctggagagcccggccaacctgcgcagtcacagcccatcattcctggcccgccaggaccaccgggtaaccaaactatattttttgaatcatttattctaaatgctcttttaggtgattctggaccccctggacctcctggtcctcccggaaaccctggcactgatggaggcgctggtcagcctggccccaagggaccgcccggaccaccgggaccgcctggcaacgacggccaaccgggctcgcccggccagccgggacaaccgggcggacagggcgagaagggcatttgccccaaatactgtgccaacgatggcggcgtgttctttgaagacggcacacgacgagcataaaaagacgaaattcataaatgttaaatgaaaaaatgaagagaaaaatatgaaattggaa

SEQ ID NO: 73453 - DNA, 524 bp, Heterodera glycines
atgttcaggacgcgtacattcgctgtatggaattgttttacgcagggtgaaacgcttaaaataattaaaaaaatgaattatcaaaattataaaaataaattcttttttctaatttaaattaacatacaattcaaatattttttagaaaattattaaaatttctctgttcaattgtccttaatttatttttttcccatttagcaaatttctcaatcggattttggacctccataaagccgaccaaagcccaacgaccataacggagcagccaaagagtgagccgactgaacaatttggtgctgatctgacctgaaccgggaagtacaagcgggattggcccatttcagtctggtgagccccaaattaggaggggactcaatttgcattctctcatattacaaacatttaaatgattttatttgttgctaaatttttttttttttttgggctttttttggcttttatctaaaatagtcacataaaaaaatacttacctcaaaatgtgttttttaccttcaaataaa

SEQ ID NO: 73454 - DNA, 68 bp, Heterodera glycines
ttgttttgaagaaaggagctcaaaaaacgcatttctgcattaaaatttttcgattctaatgtcattat

SEQ ID NO: 73455 - DNA, 1287 bp, Heterodera glycines
atgggcatgttgcagaatgtcaatgtgggttctacccaactaatgaaatcaaagcataatcccttagtcatttagggaatgcgatttttccgtaaaccgcacagttcagcaccgggctacaatattaataatatccagtcccaaaactcatttttttttaaacgaacaaatgccttgaaatttggcacgagcttttaagtgttgccagtaggcttacattggagacaaataaatcgaaatgcaaattgagtgggggatgccttatttttttaatttttaaaaattttaacgaattttcactttcggtttttttgcgcccattaatgaacacttttgcccgtttttgtagcacattgagtttgacaaaacgttggcccgactgagtacgaatggcgattatcgtaaggcgtttccgtccgctgccgacctgctcgcattcatcaccgtcaattgtccgaacatcaaggccatcaaagtgtccaagcaggatgtgcgtttttcggttggggtggcttgcgtccggcgagcatttattattaattttggatttcaatttcactaggaaaaataggaggatgaggaatttttgctcccagaattttagtggagcttccaatttaaacacaaaaaaaaaattggaaaaaattttccggcgattttttaaaattatttattaaattttttccatattccaacaggtggcactgttgtggagcgagcgcagtgacgagttggtgtcgctgctgttgcaacacgtgggcaaggtgatcctgaagaagagcgttggcaaggcctacgattactaggacatctcatcatcatcatagcgaacggcacattttgtttttggccatttttctttttcattgacactatttaaatgttttgttgcttctcattttgaccttttgtcgccttatatctctctctcattttcatcacagcacttcgtcccgtacattctatacacatttaatgcatttttgaatttaatttccatggattttcttttgttgttttgtctcattaaatgctaaattaaattaattctctctctctctctctctctcattaaaatatttgccatctttgcttctttttttttatttaaattaaaattggatttaaaaaattacgtaaacaaattggctcaaaatcacaaatttggtcatttatccctgcaaaatttggtgagcttctgatcaattacaaatcagttgtggaggatgatcaaatttttaaaaattaattaattaattttgaataactctttctatgattaataaa

SEQ ID NO: 73456 - DNA, 209 bp, Heterodera glycines
aggaggaggaatatgacgaagaggaggaggaggagggaccgatgatgatgatgacccagaaaaaggagggcgaggaggacaacgacggggagttggacgacggcgcccaccaccatgacacaacctcgccggaggagttgcaggacgaggagacggagcagttctaccagcaattgtccgtacttcctgctgtacaaataatgttgtag

SEQ ID NO: 73457 - DNA, 910 bp, Heterodera glycines
ttgtacctcttctaatcacagttgtacctcttctactctagatgtacctcttctaatcactgatgtacctcttctactctcagttgtacctcttctaatcactgatgtacctcttctaatcacagttgtacctcttctaatcacagttgtacctctcctaatcactgatgtacctcttctaatcacagttgtacctcttctaatcactgatgtacctcttctaatcacagttgtacctcttctaatcactgatgtacctcttctaatcacagttgtacctcttctaatcacagttgtacctcttctaatcacagttgtacctcttctaatcactgatgtacctcttctaatcacagttgtacctcttctaatcaccgatgtacctcttctaatcactgatgtacctcttctaatcacagttgtacctcttctaatcactgatgtacctcttctaatcacttttgtacttcttctaatcacatttgtacctttttaatcaccgttgtacctcttctaacatttgttgtagctcttttaatcactgttgtacctcttctaacatttgttgtacctcttctaatcacttttgtacctcttttaatcaccgttgtacctcttttaatcacttttgtacctttttaatcactgttgtacctcttctaatcactgatgtacctcttaatcacagttgtacctcttctaatcactgatgtacctcttctaatcactgatgtacctcttctaatcacagttgtacctcttctaatcactgatgtacctcttctaatcacttttgtacttcttctaatcacatttgtacctttttaatcaccgttgtacctcttctaacatttgttgtagctcttttaatcactgttgtacctcttctaacatttgttgtacctcttct

SEQ ID NO: 73458 - DNA, 702 bp, Heterodera glycines
atgaaattatgtctattaatcttttcaattgtatttttaattgttaaaattgaaattggagcggaaaagaaaaaagcggaacaaaaaacatttgacaaaatatttggagaaaaatgggaagaaaaagaagaaaaacgaaatgatcaaaatgaaaatgatcagaaaaagcgggaaactgttacgaaattcaataaaataaaagagaaaatcttacaaaagggaagaaaatattcaaaaaatgaatggaataaacttgaagaaaaaatcggaaaaaaattgggaacaaatcgagacaaaatttaccaatggatcaaagaatttggtctccaaaaaaacaaatgttataaatcaaaaacggatgaacaaaaaattgaaattgtgcaaaaatttattgcaatgaaaaatgaatataaagaaaaaggaagaaaatattcgacaaaagaatggaagaaaaattatgccgaaattgggaagaaaattggagtaagtcatagagtaattggacaatggaagaaacaatttggattgagtggaaaaagaatatcggagaaagaaaaaatgaaaaaaatgaaaaaatattggcaaataaaaggagaaaatccaaaaatgagtgacgagaaaattgcaaaaatactgaaaattaatcaatcgaccttttcaaaatggaagaaacgatttggagaagaattaaatgagcattaa

SEQ ID NO: 73459 - DNA, 1484 bp, Heterodera glycines
atggaagaagcaatttttggtatatatgaaaaattaacggagaaagaaaaaattgaaaaatattggcaaatgaaaggagaaaaccaaaaaatgagtgacgcgaaaattgcagcattggattcggttccaaatttttttgttcaaaattccgggctttaaggtacatatatataaatactagagtgtcccaaaggtaatgaccgtttttagtagtttagatttgtcaaactgtgtctttccgtctaattagtcaatcaataagtttttggtgtcattttgcctggtttgtcgattcctaaaaagtgcaaaattcaaaaatctggttttcaaattttttttatcaatttttaaattataactatgttaaaatttaattaaattaaagcctaaattcgaattttcatcaaaatcgcaacgaaaaacatttaggcttcaaaacaaaagatgcagtaataaatctcagaataacttttttattcgtacaatcaatgcgtggaattgcttacccaaaacagctatggaaatcggaagtttagctaaatttaaaaatcttgtgaaagaatttttttcataaaataagtccagagtggtagttcatcccttttttattttattttatgtattttttcagtattgaccataacatatttttctaattgtattcattactgtgtaaaaaaataaataaattttttgtaatttgactatagtgcaccaggagaaatttgtatagaaaaagtgaaagcgtttatagagcaaaattgtataatacgtatgttttctgaatgtaattgttatgtctcttgcttacacaatttattaaaagcaaagacaaacagaaaaataaaatgataaataacaaataaataaatgacggaggaaagacaatcaataaatggaaatgaaggagagaacggcaagtgacccgaatgactgaacgggtccatttaaataaacatttccaattatgacacagggaatcgtgtcaatattaaaaacattcaaattgttcgatccttaacagtaataaacatgtcaataatttaattaaaataaagaatttataagcgaaaatataaaattcatttttaagaaatattaattattattcctttattttctgtaaaaccgaaatttttgcaaataaatgtcaacaatgaaattgtgcctattattcttttcaattgtatttttaattgctaaataaaaaagtttaatcagaaaagaaaaatttcagcaaaaaagatttgaccaaatatttggggaaaaatgggaagaaaaaagaaatgatcaaaatggaattggaataggttatggaacaattcaaaaatggaagaaacaatttggcatgagtcagagaataatgaaacaaattcattgcaaattaaaggagaaaatccaagcaattaagagaagaattaaatgaggatcaaaaaagtgataacttacgttccattgttacttttttctatatgaaaaataaa

SEQ ID NO: 73460 - DNA, 290 bp, Heterodera glycines
atgatcagtagcagcaaattttgcacaaactttgatcagctttttaaccatttgcgtttattgtgttcaaatgacgccggtgcagcgcattacggcaccgaactgatgccaattatgtaaagacaaattgggattttgcttaaaattttcatttttaaatctaaattttttagcaaagaaaatccctttttcggtgctttatgttcagtgatggcggaagagaagcaaaaaataagtaattttatttataaaatgaaattataaattattatttaattttaaaaaataaa

SEQ ID NO: 73461 - DNA, 510 bp, Heterodera glycines
atgaacgactcgcgaataattcgtggcaaaaagtttaattgctcattaacatggcttttggagcgctacaaactttcagacaaatacgcaattaaagagaaaattgaagtctgttttttaatttatttttattatatttttattaattttaatcatttttatgtcaaataccatggccatcccaaatttgtgtttgtgacagccgccaatgacttttattatccttctcttcggacagtaattgcaaatgtaaaagaaacatttggatgcaaacaaaaaataatagcttatgatttgggaacgattactaaaaacaaagaatgggtaaaaatgtttattttattaaaattaaatcgtaaattatttattttaaaattaaatattggtgcttttcagttttgctcttacatctcaaaatttaagaaagcaaacaaaagggcgcgcggaaagccatttttaagcgcacaccgttattttgaggcattgaggaaagaaattttcacgatataa

SEQ ID NO: 73462 - DNA, 524 bp, Heterodera glycines
  unsure (1)..(524): unsure at all n locations
atgaattggattcggtgtgcaatttcgaatggcgaattttcgatttcggtcaaatggtggaaggacgggttcgccaccccaaaagttacgcgtggaaaatttttgtgtgggcggtaaattttttaaatttaaactnagagtagagcgggaccgggaattttgggcttaaccgggaccgggaccttttcgggttgaaaaaccgggaatttttggctgggaaaaccgggaaaaaacccgggactggtcccggtcccggtcaaaaccgggaccatggtactcagttggactcagttgtccgtgttttggtcccggtcccgctctactctaatttaaactattaattaaatgtgtaattcaaatgattaagcatgttttattggagtatgacactgtcgtttggattgacacttcagtggttttccataaaaatgatttcaaacgattttttgaaccgatgcaaaacggcaaaattggcactgtgcaaatcccaagctgtgagtgataagaatggagcacagcattaa

SEQ ID NO: 73463 - DNA, 887 bp, Heterodera glycines
  unsure (1)..(887): unsure at all n locations
atgttttattggagtatgacactgtcgtttggattgacacttcagtggttttccataaaaatgatttcaaacgattttttgaaccgatgcaaaacggcaaaattggcactgtgcaaatcccaagctgtgagtgaaaagaatggagcacagcattaattaaaccgtagtggggacatttgcggaccaacatttattgattgcctactttaaaaaaaattgaaaaaaattaacaaaataagtagagcggtaccgataattttcagtttaaccggtaccggtaaagatatagtgaaaatttaacgccaaatttttaccctattaacacacctaattaattttttctaatagctatattatggggttgggtcaagaaaattatcacattttacaccaaaattacttccataatcttttttcattttaattattcgaaatttttatttaaatgtatctatctttttcatttttttatttaataattcatcctgtaaattcggttcgcaaatgttgattacccaataaacgtttaattgtgaaaataaaaagcaaatttaatcaaaattttattattttatttctttagttgcattgcatgggatgaacgtttcgactcacccgggtaaaaacattttataattcaaatgaagcaaaaaaaattaacttttttaaaatttttaattgatacgacatttggttttgaaaaaaaaaattcttcattaatcttagaaaattctgaaagcgaatatattacagaattacaaaaaactcaaaaaaatatctgcaagacacataanaattccccggcactttaattcgcatttttccaggaatgtacgaatttttgcccatgtacaccaattttgagcctaacagaacatacacattga

SEQ ID NO: 73464 - DNA, 266 bp, Heterodera glycines
aaaattccctcaaaaataaaaggtctattgcgcaccgccctccctatcatgctcgagagcatttgtatgtgtataaaatttatcaaaaaaagagatagccatttttctgggataacctctaaatataaaaatcctctgtgaaataaaatggcgattgtgcacagccctccgtctcatacgcaagcgcttttgtgaggtataaaatttctcataaaaagagatagccatttttctgggatagagtataaatttaaaaattccctcaa

SEQ ID NO: 73465 - DNA, 1190 bp, Heterodera glycines
aaatccggccaacacaaacgcaattaattgcgccaaatacgcggccagcaaaattccggctaagaattttaggtaaacctttcatggtttgtttgtaatttcctttcaattctaagtgccatgactcgtcttgaccacaacccgtgccatggcacaagtggcacaaaagtgcgcagatggaaccaccgttgggatggtgaaaaatgtgatcatttggggcaatcactcgagcactcagttcccggatattcgacatgccaaaattgccaaaggttttagcaatcaatctaaacagcaaaaaagcaacaacaatcaaatacctaatcaaaattacaggtggttccgaaactttggcctatgatgcggtcaaagacaccgcgtggattcaggaccaattcatcaaggtttttgatttttaaatcattttcaatccattttctccccaaaagaccgtacaaaagcgtggcgctgtgatcatcgaaaagcgcaaattgtccagcgcaatgtccgcatcaaaagccgcgtggtaagcgaaatgatgtggactgattatggaggaaatgcccttctgcatttctctctgattttttaaaccgtctttctgacagtgaccacatgcgcgattggtttttcggcactccgtccgacggtcgttgggtgtccatggctgtgccatcggacggctcttacggcatccccgagggattggtgttttccttccccgtcaccatcgatgcacagaaagagtggaaaattgtgcagggtctcgacctcgacgactttgccaaacagaagattgacatcactaagaaggtgggattgaaggaagtcgtaaagggaacaggatttggagccgttttgcaccaaaaataaaaaattttcggcattttgtggtcaaattttacaaaatatggtaaaatgcaggtccccgactgtgccgataggtcaccgctagggagatttttggaaaatttaatgatatttttatgaaaattgtgcaaactttcaagagaacttacacatcttttcttgaaggatttataaattttcatttcgtagagggagaggttagttcattggtgccaaatttattatgtcaattctttttcttcccaaagtgcccttttcccgcgcaggaattgttggccgagcgcgacgaagcactcgcagcatgcaagtaatggaaaagg

SEQ ID NO: 73466 - DNA, 929 bp, Heterodera glycines
gttctgcaaatcgccaaaggggatgtttttggcaaagatcaggtgtgttgcttttggtatcttcggctgtaattgttttcccattttcgcccattgtcctcgtccttctcgacatccctccgcttactgaagtgctcaccggcgtccattacgaattggttgactgtgcgcttcccaacctcttcggtacgtacgtgggctaatcattcattcatttctttctgcttttgtgaatgggtgtcccttttcccatttcttccgactcattttttcctttttttaaggcgtcgaggcagtgaccacggaagaggcggccttcaaagacattgactacgcttttctggtcggagcgatgccccgcaaagaagggatggagcgaaaggaccttctcgcggccaatgtccgaattttcaaatcgcagggcgaagctttggccaaattttccaagccaacagtcaaagtgtgcatttgttggctaccgatgatttttcatcctaaaaataaacttttaggtgctcgtggtgggaaatccggccaacacaaacgcattaatttgcgccaaatacgcggccagcaaaattccggctaagaattttaggtaaacctttcatggtttgtttgtaatttcctttcaattctaagtgccatgactcgtcttgaccacaaccgtgccatggcacaagtggcacaaaagtgcgcagatggaaccaccgttgggatggtgaaaaatgtgatcatttggggcaatcactcgagcactcagttcccggatattcgacatgccaaaattgccaaaggttttagcaatcaatctaaacagcaaaaaagcaacaacaatcaaatacctaatcaaaattacaggtggttccgagactttggcctatgatgcggtcaaagacaccgcgtggattcaggaccaattcatcaag

SEQ ID NO: 73467 - DNA, 498 bp, Heterodera glycines
atgtttgatgcaatggtaatgcatatataataataaacatttaaaattttaaagtctttaaaatgaaatttaaccaaaattaattcatatttcgattgccctaagaattatctatttatatttaaaattttagaacatttcattgagtgtcagaaaagtaatgaacaaaaaatgcagacataagaactattgccattttgtgtccataactggcctcatactcaaagctgtatatagtagaggcacaagcatcatcaagtggtcattctttatagaaacgaacataaaatgaattttgaattttcaactttttgttagaattcgggtccgggattcgaaatggtcaaaatgaatgttggattcaggttcaccgaccctgaaaacccaccataatcatgttttcacgactttttagaacaaaaagaaattttttccaaaaagggggcccaccatctaaagtattaccatttattcaaatttaggcgaagacaaaattaa

SEQ ID NO: 73468 - DNA, 839 bp, Heterodera glycines
atgtatggcattgggaagccattcggacgaaagccaattttcaaagagaatcaaaactgcgagaaaacaaaggcaattcatgagtcggaaggaaatgatgagattgaaaagcttttcccggtctatgccagccaaataaaatacattgtaaattcaaaattaatttaaattaaatttcaaataaattaaaaatttaatgcgtttagaattcgactgaaaagcaaaacgaaaccttttacttgagggcattttctccacctttttcttatgacaacccacaaaagttggcaatttcctgaatacattaaaaaacagtaaattttgttttaaggtatgccattccaaggatcaaagaaaaatacttgaaaatcgatgtaacatttttaaataatttatttatttattattagatttgaagggggctgcattccaatcgtttaaatattttgaaactcgacgaacggaaatccgtcaaatttttcggattggacaaaaactctgtaaaactgttgacgaatacaaaaaagaattgtttgggttggtattttaaacaaattttaattaaaaatttttagtcatgatcaatcacataaatattgtgtgtatactcgaagaggtgattttgctaattctgcttggggttccaataaagacttcactgagcagggcattgaattcggatttaaatatttgatggtaattaaatcatttaagtattaatggtaattaaatcaatttacgttttcaatatttttatttaaaattaagggatcatttaaaaacatttctgtcgtcttgttgggagaagacaaacaatttttgaaggatttaaaaataaa

SEQ ID NO: 73469 - DNA, 227 bp, Heterodera glycines
agaagagtgtcagtaaaaacatcgacgatctgaaggagggcgcagttgtcgcgcagaaattggtgaaggcgaagaatgcgtacgaggaaatggtagcgaaggcggaggcgttgctggccaaaacgaacaaatgacggatgaagaagacgcgtcaattgagatggaagtcatgtgatggaaattgtactgatttgttacaattaggtaaatgattttatttttctttc

SEQ ID NO: 73470 - DNA, 521 bp, Heterodera glycines
atgatgtccaatattctttcgtccaaaatcccatgggagaaaatcaaatatttttttgctgctttgatatttatattaatattttacattatcaacaaaaacgaagaattttcatatgccggttcagctttattcaggttttttttgttttggaaccgctttaattaggctgccatcggctgggctaaaatttcaaagtgtataatatgtacgggagaaaaattgtgaaggggacagcaagggtcaggttgaaaatacaattcatgagaattcataaatataattttaaaaaaagcataaattatttctttttatccaactatattctttgaaaaaatgcttcaaattttcaaagcaaaaagatatgaaaaaagcacggcaattttgaaaaagtacaaatggcacccctgcttatatcaattaattaataatgtatgtctaaatgtttttttgaattttagactttcgcattcggagtcttgcaaagcaaatttaacggacgaagaatatgaaaggtgaaa

SEQ ID NO: 73471 - DNA, 4519 bp, Heterodera glycines
  unsure (1)..(4519): unsure at all n locations
aaaatcatcgaccgagacaatggcctgctacgagaatgttttgaccacattaagctgctaggcgacccgtttctgaagcaggcggaggaggacctcctggccgcactcccgaccttcgacgacgagcaagccgacccaaatgtcgaagaatggccagtcatcactcttctctctaaagcccagctcatcctcgacggcctccaagtctacatcgaggctcgattcgacacgacggacgccatctcttctcgcagcagcagtcgtgtttctgatcacggggccgacgacgaaaaccggatccaccgccaacggcaatccaccgacccaccgactcaggcacagccagcgaatgcacatcagccttccaattcggctagagccgatcaaaacctattcaaccagcgaaccccggcattcccgcttaatctcacatttccccgagcatcgaatcgccccacccatcgatcggaacctcaccatggccacttccgacagtcgaccagtgacgacgacgcacttcgggtcagccgaatcgaaatcccgaggttcagcggatcggcagaagaatgggtcacattttgggccgcctttgactttgccgtccactcacgccaataccccgccttccaaaagcacctcctcctcctacagtacctcgagaagggatcgccaccacgacggatggtcgaaggttacccaccgtcagacgccaattacagcacagtcgtgagcattctccgagatcgctacggcgacgtcggcaatcgacgagaccaactcaatgcccagcttctccatctcaaacccgcccggaacaacctcaaggagttgcgccagctacagcaggagatcgagcagatctgcactcaactctgcagtctcgagcccgagggggaactttcgccaattgccaatagctcactcgtcacaaacctcatcaaaagcaaactcccacccccggtactgcttgaactgatccgaatggagcgcgagagctacacctcttggacggctcgaaattggcgtgagggatttgcgacaatcgtcaccgacaaagagcaggtggacttgtgcgtccgcacattccaggacatggacatccagccccgcgaacgtcctcccgaacgggctccccctcgtccgggtggtcgttcttctcggccaacaccaccaccagcgccggagcgacgttatttggagaacactcgggcctttcctgctctcgcccaacccgtctctgccaatggcatcagttgctccctttgtgagcaggagggacaccgtccgagtgcgtgccagcgatacaccaccgtcattcaacgccggcgacgacttgaggaacaggggcgctgcctgcgttgcctccgtcaagaccacgtcactcgcgattgctctcgtcaagatcgatgttcgaaatgtcaggcgaacgaccatcacttcctcctctgcccgtcaatcgaccctccggggcgaaccaaccttcgacgagagaatcaagagcggaatggaaatgcgtcccgcaacgtcagtcgtgccacgggagccaacgccgaaccggtccgaccgagaacgactcccaccacaaccgcactgctcgtgtgcgacgagggcgaaaacattcccgaggcgttatgcgccgccgcctttgaccccctccccgtcgacagcggcagttttcccgtccccaaatcgacgagagtagctcatttgatgactcagacccttaaggcgtcatgccaagggggcccacccgacggaattcctgcttttgtcttccacgaccctggcagccagtccggctacataagccgggcaatgacagagaagctccgtccccctcgactctcagagcacctcctccgaattcacaccttcggagactcccgccctaagaccgtccgatcagcaaaattcgccattcaactgcagcgcctggacggaggctgggagaccctcgagctcaacgtaatcgacgagatcacgaccaaaatcaaggccctccaatgggacaccaccgatggacccctccccccgaatgccgtcctcaaggtcgtcgaaaaagcgccggacattttgatcggcatccgggaattttggcaattcttcattggccgttcaacgcttcactccgggcttcacctcatccaaacaattttcggcccaatggttggtggtgaagcggagtttcccgagaccccacggcacaccccgacaattgccatgctgacgtctcaccccagtaacgtcgagtcattcccctcgtcccgcacggtcaatgacttttggagtctcgaggcgattggaatcaccgacgaccccaatcagaacgacgaccaagttgccatgcagcaatttagcaataccgtccgccaattgccgtctggccgttactccgttcgcctcacttggcgggaacctcggcctcccctcccctcgaattgggccatcgcatatcgccggctcctctcaacgaccaagcgtctgcaatgctctcctgagcttctcgaccgttactccgccgaactgacacggcaaatggacgccgacattattgagctgaccgggcgagacaacgacgagcattttttgcctcaccacgccgtcatcaatccaaagaaactgcggatcgtcattgacgccagtgctcatgccaagggcaccccaagcctcaacgactgtcttcaccgcgggccagtgttgctccccgacctttgcgggattctcctccgcttccgttcagcgacaattcctgtgttggccgacgttcagggcgcctttcatgccatcgaagtcgaacccgaggacaggcgcttctgcaaaatgctttggctaaaaaatcctgcccgtcccgtctcaggcgacaatctcttgatctaccgctacaaacggctagttttcggcgcgacgtgctccccctttatccttgccgctgttctcctccaacacttcgacaagcacgagcacccattcgcccaagcgttggccgcgaatatgtacgtcgacaatctcctcatcgagtgtgagacggaagaggaggccatcgacaagtcgtccatcgccaaacaaatcctcaaagacgccgacatgaacctccgggagttcctcagccactccccaaacgtcatgggacgaatccccgaggacgaccgactcgacaaaacgccggccaaagttctgggactgacctgggacacccccagcgactgcatcaccttcagtctcccaaaagacacagacatcactgctacacggcgttcagtcttgagcatcatcgccagcactttcgaccctcttggactagtcgggccatgtcttctgcccgccaaacggctcttccaacgcctgtggggagaaggaaccgcctgggacacacccctccccgagaccgaggcggaaacttggaatcaaaccctgtccctatggcaaaaccaaacgattgtggtcccgcggcattccattctcggcgagcaaagccgcctgcaactccacgtgttttgcgacgcgtcggaacacacattcgccgccgccgtctacattcgaagcgagactgccgatggctctgaagcgaacctaatcttcgccaaaaaccgcctccggccacgaaccgcgaaccagcgcttcaccatccctcgactcgaactcctcgccattctcgtcggaattcgcgccatgcgcttcgccgagaaagagctccgacgtccgatcgacgagcggcacttatggtccgactcccaaattgccctctcatgggtgaagtccgacgaacccaaggcccaatttgaacagcgaagactcgtcgagatccgacaagggccgcccaccacttttcatttcatcagaaccgaccaaaatcccgccgacgtagccacgagaggctgcacaccggcggagctccgaactcgccacatttggtggaaagggcctgagtggctcacgagtccggaaacggaatggcccgacgagttaacgttcgcaacgccagccgactccccttccgccgatcccccgtttgaaaaatcggagaccaagaccctcatggccaaacaaagtccgctgccccctcccctcattgatccggctcgtttcggtactatgctgacccttctcggaacgaccattctcgtcctccaattcatcgggcgtcgtcgaccaaaatggctcaaaatcggcacctcgtcaatcccacggagtggccctccgacgggcgattcgttcagagcagccaggactttcctcatccgacaagaccaacgaagctcgctcgacggatacgacaaacaccccactgttttcaatgaggatggccttttgtgcctcaaaacccggctcttgcacgcgaacggtccgcccactctcgcctctcccgttcttctcgaccgccactcatctctgactcggctaattgtccaagaaatccacgccgacctcagacacgccggcgttgactggactctgactgagttccttggccgttattggatgcctcaagcacgacgaaccattcgtgtatccntccgag

SEQ ID NO: 73472 - DNA, 515 bp, Heterodera glycines
gtcagagtccagtcaacgccggcgtgtctgaggtcggcgtggatttcttggacaattagccgagtcagagatgagtggcggtcgagaagaacgggagaggcgagagtgggcggaccgttcgcgtgcaagagccgggttttgaggcacaaaaggccatcctcattgaaaacagtggggtgtttgtcgtatccgtcgagcgagcttcgttggtcttgtcggatgaggaaagtcctggctgctctgaacgaatcgcccgtcggagggccactccgtgggattgacgaggtgccgattttgagccattttggtcgacgacgcccgatgaattggaggacgagaatggtcgttccgagaagggtcagcatagtaccgaaacgagccggatcaatgaggggagggggcagcggactttgtttggccatgagggtcttggtctccgatttttcaaacgggggatcggcggaaggggagtcggctggcgttgcgaacgttaactcgtcgggccattccgtttc

SEQ ID NO: 73473 - DNA, 3214 bp, Heterodera glycines
atgcccagaagaaatttctgctattatattaactgtcagaacgggcgacgactggaagacgtgttcggactgatgagcggtgcaaacattcgcaccgatttgagagaatatgacgcggttgtctatgtgccgattgtcgtggactattggaatcggaaatacgccaccgcaaatcagcgatttaaggtgttcatctttggcgctacaggcacctatcggccaaaatttcaatatgggccggacaacttcaacattgaaatcccgctctaccatcacaacgaccatttcgacggaattcgatgtggggtgggcaaagcggtgtttgggcgtgactactactgtttttcgtgcgaatgcccatatgataacgccaatgatcacacgctacaatgtaaagcaaagtgcataaactgcggtcgcataggagtggggcgaccgtgccgagcggatgacaacaattattacagagaatgtacagcatgcggcaaggatttcatgagccaagactgcttcaatcaccatttgtcgagcaatgtgtgccgacaattcaacaaatgcaaacagtgcggaattgtgtggaatatcagacaaaaccgacgaaaaggacgcagcggacacgtttgcggtgagaaattctgctacacctgtaaatgctaccataagccggagcggggctgcttcatacagcagttgaagacgcgccgccccacaaagtacagactgatcgcctttgactgtgaaacaacacagaatacacgaattgagggcagcggcgaccgccgacttcattccgtcaacttcatctcatgccacgtcgcctgcaccaagtgcataactgaaaattcgtggcgaaattctctacaagcgccatgtggcatttgcggtcggcagcgcaccgtcacattctcccaccgcgcctatgaacgcacacaaaccgatgcccaattcatcactccttgtccaatggcggcctttgctcaatggctgctcagcgaattcgatccgcgctatcccacaatgctcttcgcccatttcggtggtcgctttgacaacattatgctgtttcggcagttcttcctcaacgggttttgcccgcaaatgatccgtcgtggcaacaaattatacgaaatgaaaattgcgaggggtgaaaaaaacccggaaatcatcgtaagagacagctggaaccttatgccggtgccgctcggcgctctgcccggagcgtttggactcaatgtgcaggataaggagttcttccctcatttggcgaatgttgaggcgaattatgggcacattctgcagtcgctaccgccaaaagctgactacttatacggtggaatgacgcccgaccgacagcgcagatttgaccagtggtacgcggaacaccaccatcaacagttcgacctgtgtgaacagctcgcggcctactgcaccaacgacacgcacatactaattgaggcgttggttgcttttcgaacggagttcttggcgatcagcgatccactggagcgacatggatgcttggatgacgaggacgacgacgaggaggaggaggaagaagacaacgacaatgcattcgaagtgattggcggtggcattgacataacgtgggagccgatgaccatcgccagtgcctcaatgaggcactttcgactcaatcacctcaagcgagatcagctcgcgattgtgcccgagtgcggctacgacactacaaacacgcaaagccttgtagcgctcaaattcatggattggtacgccaaaaagaacggggtgagcattcagacggcacactcgcccggcggagagaaaaaaattggccagtacactgtggacggatacatcgcggcgaccgacaccgtgattgaggtcaacggctgccactggcacgctcacgaccacccgcgtcaccgttttcagccccaaacagtgatggcgaatgggaaaacggcgcagcggatacgggaggacgatgcgagacggatggccttcatcacatcccaggtgcaacaagtgctcgtattttgggagtgtgaaatcaacgcggagaagcgcgacaacgacgaaatgaagcgcacctttgcgcagtacaaggacagcggccctatccgtttgaaggactgctaccatggaggacgtgtgggtccacaacgactacactacgaggtgccggaggggtggaggatgaaatattacgacgttcgttcgctctacccccacacgaatgctgtgacagcataccccgtgggtcacccaacacgagtgaacatcattggtgaggcagagcaggcggttgactggcgacgcgccgaccaagtgccggtccgaggcattctcaaagtgttcgttgtgccgccccatcacattgatgtgcctgttctgcccgtgaaatttgatcagcggcttcttttcccgctgtgccgtacgtgcgctctgcaacacccgcatggagcggtcaatgaggactacgaatgcacgcatcgcgaagatgatgagcgggggtgggtgtccactgtgacgtcaatcgagttggaggaggcgcttcgcaacgggtatcggtgtacggcctattatcgctccgttgagtgggacgacacgcagtggagcgaccgcgtttttcgaggctacgttgcagaattcatggccatgaaaacgcatgccagcggcttcccggacgaaattggccaaaccgaggaagatcagcagcaattcatagaggaatgtgaggaaaaattcggaatccgaatcgagcgggaaaagatggtgcacaacaaggccaagcggaccatcgcaaaactgtgcaacaactccctgtgggggcgcttctctttacgcaatgggttgtccaaaacgattgtgaccgactcgcccgcggaactgcgcgctctgcttgacaacccagcggtggaggtcagctccattgaccaactcaccgacgaatgcgttctggtcacctatgcggccggaaacgaatgggtggaggaacacgagtgctcaaacattgtgctctctctttggacaacatcggtggcgcgcctacacttgttgcggctaatgcagaaggttgttcgcgcaccaaactctgtgctcatctacaccgacacggacagtgtgtgtttcgcccatcgtgaggcggacgggtgccctctggagacgggaccccacctaggcgacctttcggatgaatggccggaccacgaactcgtggaatttgtttctg

SEQ ID NO: 73474 - DNA, 1587 bp, Heterodera glycines
atgaaagtgttttttgatgacttggcaaacgaacgtggccctttagaccctagacttgcatatagcggtggacgcacgggtccattacgactttttgctgaaccgtccgcggatgaaaagatttccgtcttcgacattgtctcgttatacccgtgggtcaactacgacacggcttatccaattggtgttcctaccattgttcgtcctagcgctgaggagatgattgtcaactggaccaaacctgagcatctaagctaccgtggtctttatcgtgtgcgtgtcatccctcctcgtggtctacgaataccagttctaccgatgaagattgatgagagactgctgttcagctgttgtcatcgatgtgcggctttgtttcgtaaaagtgtgacacgctgtgcacacaaatgcgaacattcggaacagcagagagccttcactggaaatttcactcatattgaattggaaaaagcgttggaaatgggctacgtcatcgatcgattttggagagcatggcattatgatgaatggagtgatcaggtgttcaaaggatatgttcgccaattcatcaggcttaaggttaatcgttccaggaaatatttcattccaaattattttgacaggtggaatcaagcggatttccagatggtgtggaaacgttagaagaaaagcatcaatatatccgcgagtaccggcgcatatacggagttgatttagaatttgggagtattaaaaagaatccaggactatgattcatcgcaaaattaatgcttaatagtctatggtcagtttaaaaaatttttgtttggcattttagcttatatttttcaggggaaaattcagcatgagaaatcagcttggctcgaacaaagtgataacgagaccgcaggagttttatgatctagtgctaaaccatagaatggtttggttttttctacatatattgagttatttttgaaaattaaggaaatatcgtcaataatccccatatccgatgcagctattcgagtgctgtataagccgaagaaaaacttcatcgtagaacatacatcaagcaatattgtcctaagcctttggacaacgagtcgagctaggctgaaactgcttgactatatgctgcaatgttataatacaccgggcaccgagttactatacactgacacagacagtgtaattgttcggcataagcgagaccttgttccagttcacacgggcgagtatttgggtcaaatgagcgaagaatacgccgattacgacattttaacttttgcatgtggcggagcgaaacaatatgcaatgaaaatggtgcataaacagacaaaagcagttaaatttgtgcagaagatccgaggcattactttcgacgtcaacaattctcaggagcttcagtttgatcattttgtacgcaaagtgatcaactacggaaaagaggaggagcaggaaaatgcagcaaccttcaattataataaaatacagccgacaaaggataatcgaattataactcggaaacaaaataaaaagtatttacctatctgccagaaaggcattattagtcaaacccttgaggttttaccatttggatatgaatga

SEQ ID NO: 73475 - DNA, 2992 bp, Heterodera glycines
atggacttagccaaacgagtaacggaacaatcgtggaaagagaccgttaaattggctgctaatgcagccgatatcgcggaaaaggctaaaacagccctcaaccgagctgaacaagcccgcaaacgggcacctaatgctccacatgtaaagaaatggttcgacagtctatcaaatatggagaataatttgcgtgaacttgtggaaaagatttcacaagagtcgaaaaaggcggccgaagcaaaacggaaattagatgtacattatgattccaagaacttgaatgaatgccgtaaacacgcagatatgtcaaaacaagctcttaaaaactcgaaaaactacattgctcagcttacacccatgtattttagcacagtacctgaggatcagcttggcgtgaatgagcttgcaaatcgtgtagtgacggcagtgaacaattttttaaatgcagaattaacggttccaaggccggtcgaagaccctcagctccctgccgggcaaccgaaacagcagcaagaaaaacaaatggaaaagctgaagccaaccgtagaaaaggaagttggaagcataatcaagccaccagttccaaaactgtctgatgaaactgaaacgaaacgcgaacctacaaagccaaccgtagaaaaagaaatggaacgagaaccagtaaaaccaccggaaaaagaattggagcctgaaagcccaaaaaaagcggacaaagagctggaacctatggtaaaacaacagtctacgcaagaagacaatttgttagaaaaagcaaaaaaagaaattgaccaaacagcacagaatgcagccttaaaagctgaatatattcgcacactagttgccaactcaaaacataatagaggcgttgcagaaggtaggcttaacacatattcaggtgtccctcaattctacgattggcttgaccaaattgttgaattagataagaagatagacgaattggcaaaaaaggtaggaaatgaaccgtcaaaggtaataaacgctaagcagcaatttgataaaccttatcgaatgaaaaatttgacagaagcgcgaaagctaatcgaagctgcaaaaaatgcgtttgaagttatactaaactattcactggaaataaaacagttgaataataaaatgcatgaattaaatgacaaattcactgttgcagtcaaagagaaggaagaagaagaagccaaaaaaggtgcggcgattaatatacaacaagaaaagaagctagtaaaggaaattcctcaagtcttaaaggaactggagcgggaaaaaagtcagcatgatattaacaccactgctgagaacacggaaaccgaatttccctcctccgaatatgaaattgacgacagctctgagaagcagccggaacgaacggaacaacaggcagaggtatcatatgtattgaagaaaaaggaaggaaaattggaagaagaaaaaattgaaaccaaggatgataccgccattaatgaatttccatctacagaatatggaatagaagagagtgaaacggaggagacagagaaatggtcgccggatcaagctaaacaaaaaatattgaaaggaaacgaggagccgtttgagcagcccgatggccaaaaagatgaagagacaattttggttatcgttaccgataaaaaaggggaagtatttccatctaaccaatatgagattgaagataattattcatcgtcatcatcatcatcatcatttattgcccaaaacgaaccatcggtaacgaccaaaggtgaagaaggattgttaacggtccaaattaaaaaactaccaatgacaggggataatgagcaaaaaacaatacaaatggtaccatcagattttccttcatataatgacgatgatagcagagatactattgtcaatgaattgtcagaagaacagcttgcttctactgttctcgaagaagatatgccgaaatcggagccttatgatgtagatgagctcccagatctgcctgatcctcaagcgctttctgccaaggggagaggaggtgataaaaaaggagtaacttctgtgtctgacaggatgaaaatgctcatgggtcatcagaaacagcaaaggaaagcagtagaatttcttttcaatgagataactcaaagattttacattaacataggtagtggagtacaacatgttgatgcgagtagccatcttgcatatgtactcggatttgagaacactcgattgtactataatcatccggccaaatacttaccagatctgtcgggtggtgtaaggcaattgtatgtttatgcaccaaagttggtggaagatacaattattggagaccgtatggctccattgttgcgcgttgtcaacgtgtcaggcacagttcctctggacgtgccagaggttatatataccaatgagttttttaaaccgatacagaacaaacgaatttccgaaatcaaaatcgaaattcaaacagcgtttggacgttacattaaatttaactggggtaattgcgttctaacacttcattttaaacgaaaactattttaaaatgactcatgtctttttcaaccctgactccattgaatggtcaacatttctagcctcgcagcaagaaggaagaggcgaacagcagtattttgttggtacacgttaccaacgcggaggcggtcttctgcaaaatgtagcccgatttttgatgccagtggcatcaaatctactctccagtgcttcgaaggagggaattgctgcaggaacacgcgttcttggcgatttgtcccaaggtaaagcattgaaagaatctcttgaaacgcatgctaagcaaggtttcgaaaacctggcaggaaaattacaacaatgtgggaaaggtggaaattatggtgccgatggtagaagaggacaacgagtgtcaaaggttaaaaaagctagtggcatcagctccagtgattctattattggcagaattgggactgttaaacgccgacggaacaaaatcatggatcagttaagctccccttga

SEQ ID NO: 73476 - DNA, 2290 bp, Heterodera glycines
atggagaataatttgcgtgaacttgtggaaaagattttcacagagtcgaaaaaggctgccgaagcaaaacggaaattagatgtacattatgattccaagaacttgaatgaatgccgtaaacatgcagatatgtcaaaacaagctcttaaaaactcgaaaaactacattgctcagcttacacccatgtattttagcacagtacctgaggatcagcttggcgtgaatgagcttgcaaatcgtgtagtgacagcagtgaacaattttttaaatgcagaattaacggttccaaggccggtcgaagaccctcagctccctgccgggcaaccgaaacagcagcaagaaaaacaaatggaaaagctgaagccaaccgtagaaaaggaagttggaagcataatcaagccaccagttccaaaactgtctgatgaaaaagaaacgaaacgcgaacctacaaagccaaccgtagaaaaagaaatggaacgagaaccagtaaaaccaccggaaaaggaattggagcgtgaaagcccaaaaaaagcggacaaagagctggaacctatggtaaaacaacagtcaacgcaagaagacaatttgttagaaaaagcaaaaaaggaaatagaccaaacagcacagaatgcagccctaaaagctgaatatattcgcacactagttgccaactcaaaacataatagaggcgttgcagaaggtaggcttaacacatattcaggtgtccctcaattcaacgaatggcttgaccaaattgttgaattagataagaagatagacgaattggcaaaaaaggtaggaaatgaaccgtcaaaggtaataaacgctaagcaacaatttgataaaccttatcgaatgaaaaatttgacagaagcgcgaaagctaatcgaagctgcaaaaaatgcgtttgaagttatactaaactattcactggaaataaaacagttgaataataaaatgcatgaattaaatgacaaattcactgttgcagtcaaagagaaggaagaagaagccaaagaaggtgcggcgattaatatacaacaagaaaagaagctagaaaaggaaattcctcaagtcttaaaggaactggagcgggaaaaaagtcagcatgatattaacaccactgctgagaacacggaaaccgaatttccctcctccgaatatgaaattgacgacagctctgagaagcagccggaacgagcggaacaacaggcagaggtatcatatgtattgaagaaaaaggaaggaaaattggaagaagaaaaaattgaaaccaaggatgataccaccattaatgaatttccaactacagaatatggaatagaagagagtgaaacggaggagacagagaaatggtcgccggatcaagccaaacaaaaaatattgaaagggaaagaggagccgtttgagcagcccgatgaccaaaaagatgaagagacaattttggttatcggtaccgataaaaaaggagaagaatttccatctaaccaatatgagattgaagataattatccatcgtcatcatcatcatcatcatttattgcccaaaacgaagcatcggtaacgaccaaagatgaagaaggattgttaacggtccaaattaaaaaactaccaatgacaggggataatgagcaaaaaaacaatacaaatggtaccatcagattttccttcatataatgacgatgatagcagagatactactgtcaatgaattgtcagaagaacagcttgcttatactgttcccgaagaagatatgccgaaatcggagccttatgatgtagatgagctcccagatctgcctgatcctcaagcgctttctgccaaggggagaggaggtgataaaaaaggagtaacttctgtgtctgacagggtgaaaatgcttatgggtcatcagaaacagcaaaggaaagcagtagaatttcttttcaatgagataactcaaagattttacattaacataggtagtggagtacaacatgttgatgcgagtagccatcttgcatatgtactcggatttgagaacactcgactgtactataatcatccggccaaatacttaccagatctgtcgggtggtgtaaggcaattgtatgtttatgcaccaaagttggtggaagatacaattattggagaccgtatggctccattgttgcgcgttgtgaacgtgtcaggcacagttcctctggacgtgccagaggttatatataccaatgagttttttaaaccgatacagaacaaacgaatttccgagaacaaaatcgaaattcaaacagcgttggacgttccataa

SEQ ID NO: 73477 - DNA, 2722 bp, Heterodera glycines
atgaagcacacaaagaaaatggtcatggttccggaaaccgaatacattgcgcttatgaacatagtgaagagtatgggtagccgaggcgatcctatacaagatgaaaaaacatcattagactcaaatatacataaaaatttgaatgataaaacaatcggagctgatattaaaatgaaacgacactcttggctgtacaaacggagacgtcaactcaaagagctgatggaaaataaaccacagaaagtgatcatagaaggaaacccgagttctgcaataccaaacgttgctccatatatgggaattcataaaataccaaaaatagaaacagccgtagaacaagagaataagcgtcagccgttacgattaataagagcatcacgtaaaaagaaaagtgaaaacgtgtttgaatcatcggcagattattcttcggctacagaaggtagcagtagtacgccaatacgttcccaagacgtaaaattaagtcagaaaaatttttcaaaaattatgaatattattggaaaaaatccggacaaatttggaatcgatatgcaatcaggacaggttttgaccaattttaataagccagtcaccggatcgaattatactgaatcgctgaaattattatcaggtgaagatatttctccgcctcgaggtcatacattttttgttcaacgtttgaagagggaaccggaaattgcaaaatacttatttaatttacaacagggtaaaggaaagaagagaagaactaaaagaaaactagtccttgtccaggttaaccctataaaaacccaaggattaaatagagaaaaaccgccatttaaaccagtgttatgggcaaaactatagaaagtcaacttgaacaggtttattacaacctaaattcgccggccagctacgcaggaatgcaaaaggtgctagcagaagcgcgaaaacgtatccccaacctaaagcttcacgatgtacagaagtttcttcataaacaaaggacttacacacttttcaaacccaaaagaaacaaattcccacggttaaaaactgtcccaagtggtttgcatacggattggcagtgtgatctttgcattatggactcgctgaaggagcacaacgatggataccggtatattcttgtctgtattgatgttcttagtagacagatttatgtcgccgaagctgagtcgaagaagagtgagcatatgattgaagcgtttgaaaaagttttcaaaaaggcacaagtgctgcctaataaaatgtacagcgacagtggcctagaattccaagccaaacgaatgaatgagtactggctttcaaaagatatcattaaacatgtaatgtacagccctcatctacatgcaggtgttgtggagagagcaaatcgcacaattaaggaaagactttaccgttattttagcgaaaaaaacacacacagatgggtagacattattgataaaatagttaaaaacctgaacaattcggtgaaccgtacaacaggaatgcgtcctgttgatgtgaattttcgcaatgcaacagagctgagaaatcgtctatataaagacatggaacaacaaaagcgaatacaaaaattcaaaattggtgatatcgtaagaattaccaaagagaagggagacttctccaaaggatattttccaaattttactgacgaattattcaaaattgttcgggtaaacccgaccaatcctccgtcataccgaatcagtgatttagaaggtgaaaatataaaaggtattttttacgatcaggaactggtaaagactgttgctgctgaacagacaactcatcgagcagaaattttgaaatccagggtgcgaaacggtgttaagcaacattttgttcattggataggttattcagaaaatcacaataagtggattagggattcagatctcgttcgttaggcatggatgatttttatattgtactaccattaaatgttccctttccgggaaatacagcatcccattttaccgtaagactaccacacaccctagagctagactcaaactggtccgttgcactttcctccatcatctatccacactcgttcccttccgtaggggtggatgaggacgactttgtcaacataaaacttctcaatcccgactataaatcagacggtacaggtccgactactgtaactctgaaggtaaaaattccaggcatacagtttcacagcgtagagcatatgcaaaaatcattgaacagcattattcaatcggcctatgatgtaaagtttccaaaagaaaaaagggtaaaaagagcggcggctgcttctgcagacaaagaattggaaccagaaacgcgacgagaaccggataaggaactgtcacgtgaagtgccttcatctaaaacattggataaggaactgatacgtgaagcgcctttaccagcaacacatgacattgaactaccacgtggagatgagccaaaaccatcagagaaggaactaggacgtgaaacaggaccagcgcaactttctgacaaacaattgggtgaattagaaggtgaaaaaccgcaaaaggaacaactgccacccactcccattgttgatcatggtgaaatatctacgatataccaagagcgcatggacttagccaaacgagtaacggaacaatcgtggaaagagaccgttaaattggctgctaatgcagccgatatcgcggaaaaggctaaaacagccctcaaccgagctgaacaagcccgctaa

SEQ ID NO: 73478 - DNA, 348 bp, Heterodera glycines
atggagagaagcatacaagtagcggttgataaagaactagagcatgaaacatcaccagcgccagacaaacagttggaacgtgaacaaccgctcaaactaccgaagaccgaattgtcaggtgaagatttcacacaagaaaaacctccaccaatacctactcatacctatgaaaacgaattgacaggcgagaaatccaaaacatataccaaaatatccgaatcagacccacagactctgcttaaaaaagccattttaacaacagagtgctcgtggaaggaaacagtagaattatctggcaattcgactgatttaacacaatggatcgaatacgtcatgaaagccgagtaa

SEQ ID NO: 73479 - DNA, 763 bp, Heterodera glycines
atgccctcaatgaacaccagcgccgaaaatgcggtaaaataaataataataattaatatatataaaaatatttaataaatataaaaataatttataaaagaaatattgaagttaatacaaatattttttcttataaaaagaactttaaatttcatcataaaattattataaaattaattaaacattcaaataggaaaattcgaaatttattttataaaattattattaattaaattattttaataggtatttgaaaaaatttttattgttttcagctttatttggcctaccgttctgtcggcccgtccgccgatttgattgtgccggccgttgcgctcaatttggttgcattggttggtattatgttgaacggcacagttttagtggtcactgccagatccaagtaaatgccatggcattttcttattttatttataatgatttaaatgataaattaaattaaactttctatttttaattaatttaattttctcatttttcagttccctccgcggctccgccaattttctgatggcattgatttgtttttgtgaattggtccaccaaattgggcactcttttttcctggttgttgtcatttcgggcacaaattttgtcagtttgctcactgctgacttaattatgacggtaaattttgattttttcaaatttaattttaaatttcaaatttttttagccaatgatttttgctttgaattgtggcttaatggcaatgctttgtgctgcaattgaccgcctttaa

SEQ ID NO: 73480 - DNA, 742 bp, Heterodera glycines
atgatgttgaaattaaaattagctcttttttatgataggttagattaaaaaaaaatgttttcaaagattctaattaaattatttatttttgtattttcagtgtaattaaaattgtgacttttaaagttgaaacggaaattgtttgaatggaatatttttccgtttgttaaatatcaaacggaaattttaaatttgtatttgtcgagaaaatttaaatgagctaaatgatttaatttcttcacataaaactcaaattgtcaaatattttcgcatccgtttgatgagacggacgtcaactaaaaattaacattttcccacctatttaacatcaatgtaaatctaaaagttcactcaattaaattttccggcatattgttttaattaattaaataatattctaaattaaaatttaaaaaggacaaattccgagtcaaaatgtcggcataattctcctgacctcaattttatgggagcgggattcggcattggcatcaggctcaattatgattaccgggatttaaatcccggttttttcgggatatgaatcgcttcccgaaatttaaatcccggttttcggtccctatcccggcccttttttccaaaaagccggaaacggcatcgggatcccgggagaatcccggcgggatcccgaccccgtccggctctaatgtcaacctttgaactgaacccttttgggacaaaaaagtataattaattttttgacttttgttaatggcgtgaa

SEQ ID NO: 73481 - DNA, 56 bp, Heterodera glycines
tagaacataaaaggtaactcgctcggtgggactcgaacccacgaccccagcaatcc

SEQ ID NO: 73482 - DNA, 783 bp, Heterodera glycines
ttttattttctgggatctattactaataatttatcattttcctgtcaatttgtaagtcatatagtcagttggtattttcctatatttttcatatttgaatacttcgcgcaaaattttagagaatccagtcgttacggagatcaggtgaaagtgggataaagctcttgagagatcctctaaaataggcgcctgtagttcatttggttagatctcggcacggaatgctggggtcgtgggttcgagtcccaccgtgacgagttaccttttatgttctacctggcgctcctgggtggatcccctccacactgccgggaccactggtccaaggagagtccaagtccgtcggtgaagggccaaggagagcccgagggaccggtcttccgagggaggcggaatgtgatgccagaaggaacggagtgtgggagaaagtgggataaaggacctgagagaacctctaaaagaggcgcccgtagctcagttggttagagcacggcacggattgctggggtcgtgggttcgagtcccaccgagcgagttaccttttatgttctacattaaaatagggaattcaattaaaaggtggacaaaaaaacaaacaaatattgtataaatgaattaattaaaattaataactagagctccgattttaggtgctaaaaactaggaaaatagttagtttttaggttctaaaaactcccaaaatagatgctaaaatgggaaaatagttgccaaaaactttcaaattaaaggggtgtaaaatgacaaaattttattcaaaataaa

SEQ ID NO: 73483 - DNA, 495 bp, Heterodera glycines
atgcaaccaaagcgccttgccaacatcaccccgccacagacaaaaaaacaacatctctctgataaactggcggcggcacaaacaatcatcggtggacttcaacctggacagtcggacggtgcacctcaatgggccaactccctccttggcttctgtgctgagatggtgggaatctgccgcgagcttctctccatggtcaaagagcagcagaatgacaacatggacacacgagagacttggaggaagaacgccgactccactctgtcgtggtcgtgaacctgccggaaagtgaagaaactgtgccctctgctcgtgtcaactccgattttgtgaatgctcaatcaatgctcgacacttgtgagatcgaatgccggccatgtcaggtttaccgaatgggaaagaagtccgaccgcccccgtctcatgaaaatcgaattccccaccaaaaaacacgcccaaaattttctgtggaacaagacaaaactcaaaaatcaca

SEQ ID NO: 73484 - DNA, 354 bp, Heterodera glycines
ttcattctctgttgaatttcgtttactgcgtttttgtgacttttcccactgcatttaattttaagaatgttcgtttcgaacagtgtttttctgcctgtctcccgctttttccattgtcgcgcgttgtccgctgtgaatttggtggttcatccgtttgtcgctaggaagtgcgcctttttgtctacaccatctttgtcttttccatttcggcgtcaatactcatcattggcatctgctacaacgacgggagcgagcaacgacaagctgaatgtggacaaactgttcgaaaaaataaactttgaagtgcgcggtcacgacttcacagtcctcaagtcgtattcgctttttgttatg

SEQ ID NO: 73485 - DNA, 2834 bp, Heterodera glycines
atgcgatccctaaataataagcttaacgaatttactgcgattatagccctaaaagattttgaattagtttttgtaactgaaacgtgggcaaaagaaaaaatacctttccaaccatttattactaacaattacaaaatatatgaagctagcagaagcggaaaaaatggtggtggagtaatgattttgacaaaaacgagcgtaaattcgttttctgtcttatcctgctctaaattcaattgtgaaatccaaattattcagataaatggagcaaaaaaattaagaatagtattactttacagaccaccgaacacttctgctaatttcacaaaaaagattctgaacctcattggtaactattttgaagaaaattttatattaatgggagactttaacctaaatgcaaaggacataacttggaccagtggaacgccttatgctaagtcggaaaaaggaaatattttttgtgaattttttaataagtatggcttattccttatgactaatggacccactcgtggtagtgcttggcttgatctgattctctcttctaaacctgattttgttaataatgttttaattgaggacatttttagttctgatcatctttccactaatttttcattgtcatttcctcagaataagagtaaggcaaatacatttacagtacgcaattataattctactaaacttaatctactaaatttaaacttatcttcaattttaccctacaaattactacaaaaatttaccattgaagataagtttaaccatttttaccttctttttagagaatatgtagaattatacttgcctaaaatcactgtcggtcaaaaatccagaaagcctaactacccattgagtcttaaactgtcaattaaggaaaaagccagactttataaactacaaaaaataaaccgtgataaatataggcatttgtatgatagcatttcattacatataaaaattcaaataaataactttgttactaaaaatgaaaataattttctgaataaaggaaaaaatgctatctacaaatatataaataaatttacaaaaaattttgaacaaatccactctcttagttacgagaaccaaattatttttgatgattatttaaaagcagaaacttttgcaaaaattttccaagaatccttttcaaattcagatgttccacaaattagcagttgtccttccaatcccaatggaccttctatttctgatgttgaatttaatgccgatgaaatttctaaaattttaaaaaatttaccgaatcgagaatccacatcccccgatgaaatttcctttagaatcttacgtaattgccaccttactctttctcctgtaatttccgaacttttcagaatatcaatggacacaggcaaaattcctgaaatttggaaaaaatctattgttatacctctctttaaaaaaggtgaccgaaatgatccacataattacagacccatttctcttacttgctgtctatgtagagttatggaaaaaataattgcaaaaagcatttataacttccttcatctgaataatttaatatccgaacatcagtttggttttgttaaacaccgatctactaatactcaactaattacagtattagaagattggtacgacagcatatacggtaagaaaaatattgactgtatctatgtggactttcggaaagcttttgattcccttcctattaatattttaataaataaacttcataacattggcattaggggaaaactgctaagttggttatctgaatttttaaaggatagattttacagagttaaaattaacaacaaattttctaatttatatccgattcagtctggtgttccacagggttctgttcttggccctctgttgtttttaatatacattaatgacctcccgcaggtaatccctccgggagttagcatcaagctttttgctgatgatgtcaaaatttatgtttcttacaaaactcgtgatgaaagaagcaaattaaatgttgctttagacaatattggaaaatgggctaatgcatttggtttaaacatctcccaaaataaaacatttatattatttctcggcaaaaataattcaaaacaacaatataaatttttgaacaatattattaatgaggttgaatctattagtgatttaggcattttaattgataataaattaagattttcaaatcattatactaaaattattaaagctgcttatttaaggattcgcaatattgccaaaattttaaaaacccgctctatacgtatttggaccaaagtattcaagacatacattcgtcctatttagaatatgcgcccgaaatttggaatccgacatacaaaaaagatataaataaattggaaagatgccaaaaatattttacaaaaattgctttatttaaatgtaggcttccgtatataccttacgaacaaagacttgatttattcaaacttcaaactttagaagaaaggagaaaaacaattgatttagttcaggcattcaaaatcatcaatggtctcactcatcttaaaaaagacatattcccacaattttctggtcacatcccttataatcttagacgtaaagttgtgttaaaaccacaatccagtaaaacttcaaattcttttatcaacagaacggccttaatatggtctaaactcaacaaagatataacagatgctccatctgttgacagtttcaaaaaacgaataaataaatggattgagttaaacaaaaatttagtctgtaaaagagctccttggacttgatattactttactaaaatctaacgtgtaagtggtcaccccttcgttggatatttttatttcttctga

SEQ ID NO: 73486 - DNA, 180 bp, Heterodera glycines
gggcataatttattggccgatcaatttggaagaattggcctaactcaaaacaatgcacaaacagaacagttaccggtcactgaaaagtcgagtcaaatggtaaccggaggagcgatggcagtgaaagaacagccgagacgaaatgggacaatggcaataagccaagaaaaagtgcagtga

SEQ ID NO: 73487 - DNA, 1206 bp, Heterodera glycines
atgcgccaaattcgggaccgagttgtccacctattggttcaaaacggtctcgaaaggcgcgagtcactgaacgtcgtggaaaaggccatccacggaacttcggaaggtccattcgcagaaagaacggtgcgtcaattgcacgacttggaaggactgtttgcaaggctgaaggagcttggcatcaaagtgatttggcaacattcgcaccgaatgtgactgtttgttcacccacagattgccatttgcacagcggacagtcgggcgggaacgacgcgagttttgaagactctaaaagtcgaacaattcgtggatttgatcgtttgtggtgacgacaaaggatcagtgccgaaaccccagccggacaatgctctgttcatctgccgtcaattgggagtggaccctaaggtcgaatgccctttgatggcttatcgttaatgttgcttctcctcttcagaatgccatggtaatcggcgacactcctgccgatttgggaatgggacggtctgccaaactcggctcaatcgttggtgttctgtcggggattggagaacacaaagaactgaacgaagctgaccatttggtgagccataacacatcctttcgtctgattctttcgctgtttaggttgaacatgttgaagaacttcttcctctgattggctgagatttccacgttgtcgtgggactgcgcataacccaaagacggattgaatcaatcctttgttctgtcaatacgtcgtgcttttccctcccctcctattaatttgccattgtatttatatatatatatattttaattttttgatatagatttcattaaattattaaatcaatttttaaaattaatttggcatttgtattatatatgtatatatttttattttattgtaggtcaaccaaaccttgaggatgacaatttggacaacttttggagcatccattccccgtcaaccgatgaacaattgtacgacatgccgtcgccggaaaaacgcaatttttacacccatttttggcgcagcattgcccaacgcatgccgagctatcgcggcggaaacggccgcatctcgtcactggccgaggcatttttgggcgtggatttaagcatggaaaattgagaatcatccgacgaataattaagcgctaactttatggaatttaatcccaaagaatttgactcgagaaaagcccaaaaaaatttataaattaa

SEQ ID NO: 73488 - DNA, 1926 bp, Heterodera glycines
actttgaggacccaattttggccaatgtaaaacaaagccaaatgttgatccgacaaaaatccaagggcaccatggacttggaaatggacgaattcttaaaactgcacaagcaaattcaaggacctcggcaaaaattggtacgaatggaaagggaaaaaatgatcaaagaagcgaccgaaaaggcaaaagtggaccgaagaaatcgtatgttggaacgagaaaaaatgtggagcatgaagaaggctggtgttgctgcacatcaaccagcatcaccggcaattcgtggacgaacacagcagcaacaacagcagaagctgcaacttggtaaggataatttttagaaagaaaaatttgaatattaatttgtggttaattatttgtttgaattttaattaggagctaatcaaataatgtgtgattccttcctggattgattgaaatattcaaaaggtgctgggtcgtaacaaaaaaaatttgcatatgcgttattaagagagtgctgaaatccagtaccggtcatacaaatcatttttaattaaggagattagagaaaactaattaataagagagagttatgggaagatatttaaagacatagaagagagaatagaaacatacggatacttctgcgtctatgacaaaatgcttttatatgattagcataaatttcaaattaaatttacaggcctaaaaaacctgtatttcctgtattaattttaatcattatttttggcgaaatgtcttaaaaaggatggaaaaattcaaaaaaaatatcatttttatcagtgaaatgtgtcaaatttgaaaaatttattaatattttggcgaaatgttctggttcaaagaggacttggtcgttttggcgccagcccattgggctgtaactttttttattttcaaccaaatctaacgatcttggtatcattcgaatgcccttcaaatttcaatttggcgcatgttttaaataaaattgtattttcttatgagcaaaaactttttgttcaaaattcttttttgtaaaatctacaaattatccgatggcttctaaaatccttataaaaaaattggtggaaaatcgcaaaattttgtcttttttggacaaaatcttgttaacaaattgcatttaaaattacaaattttttcccggcggcgcctacctgcaccgccggaccaccgccccctcccctagttacccaaaaaattgttttttaaaaagcgcgcctttaaaaaaccaaaaaaagtcattataagggatgtcaaaattatgtacaaatatgtatgtaaataaaatatttaaattgttgttttttggaaaaaaaatttttcgtagagggtaagataggcacaaaatgtaacctaattaggcttataccgtacatccgctatttgaaggcccccctccaattaaaggcccctttttggaggggttgaacaatagaaggcctgtgccttcaaatagcggatttacggtaatcatcttttagtattttaaaaattaattttggtattttttattggtacattttcataaattctcaaaatatttaaaaaaatgaaaatatatacgaaaaaagtttaaatatattacaatatttattgtttaatatataataaataatttagtatttttgtgttaattttttaataaaaaaggtttttatcaaaaaaataaaaaaatacaggtacaggcctggatccaggcctcgagaagcctgtatttttcctgtacctgtattttcctgtacttttgtacaggaaatacaggtacaggccaatttggaaatacaggtacaggtacaggcttttttcaaaatgtcgatctctactaattgtagaataataattaaatttaaaagcaaaaaaaagtattagaaaaaacaataaaaatgaaaaaattcatgacaattttataggctgactttcgaa

SEQ ID NO: 73489 - DNA, 378 bp, Heterodera glycines
atggaatcgaggtccaggtccaggcttttttcaaaataccgagctctactagttagtcatgtacatttagcagaggggggctctttttgctttatattttttggtttctaattaaaatttttgaaaaaatatttctcccatcaggtccgtgccgaggacggttcggcgctggccgagtattggtcttgtccgttcgcggaatgctccgccaaatcggcacacaatgtgaacacagtgtttgcggagattgtgcgcgagattaattatgtgcaaagtgccaaggcgaagcagaggcacggctgttgttcagtgatctgattgatttgtcatcatttgcacccgccccaaaaaacacttggccagaaacacaaattaata

SEQ ID NO: 73490 - DNA, 913 bp, Heterodera glycines
atgcgcaaatcgatccaattgcccattctaatcagtatgatcagtgtgtttgattttgtgattggaatggacgaattgaagcagccattgctgaaaaaagatgccactgatcagcagtcccaattcgaactgttcgtcgaagatggcacaacggaggaggaggacatggaaaaagcaatgaaaactggtaaaacattcttttggcgcgaaatggtgacaaattggcattgtaaaaatgggaaattgaaaaagcccgaagaaattggattcaaaaaatcttataaagaattgattgaattttgtgaacattggaaaatgatgacaaccgcagcgaatgcatttgtgaaaagttgggagaggtgcagaaatggacagaaaaatagacaaaaaattgacacatcaagttcaaggagttcgcggaaaaccagtaaattcggtgagagtgttaaggaatgaattaattttttaaaattaaaaaaaaattgtatttcaaagaaaatccattggaatgcctttgtctgaagccacattttcgtgtcggcgatcgcgaactccaaatgagctcagcaatgggagcaattaaagcagtttatcgtgacttgttcaaatggggcgatgggaaaagcatggaaattgaggtaaaataaatgtcaaaaaaattaaaaaatgtattttaaaaatttagtttaaattagcgaatgagaatccatggaaagtgatccaatttttagttgataattcaaatattgaagaaattaaagcatcattaacggaattggagaaatcaaccgctgttggcacgaaaaaatttgatgcttttatggcaaaaaattttccaaaaattaatttaaatgtcagatcgcgagacattttttcaagcaagttttttttcaataattttgcttcatattga

SEQ ID NO: 73491 - DNA, 592 bp, Heterodera glycines
atgcgcggaatttgggactccgcggtaatttttgactaaaatttttaaaaataaatttttttaaagcgattgttttataactaaatttatttaaaagtaaatttttgtttatgtaaaaagcaagagatttagaaattggattctcactaattcctccaaaaatgagaaatattcattaacttttctagacaattttcttctgtaatttaaaaccaaatgactcatgaaaaagactctatttggttttagtttgacaaaattgacaattcttcttatgccaaatgcaaggcatgcaattataaagttgacagagggcctagaaaacgaacatctgatttggaacgccatttaaaatctaagcatcctgaacattacaagcaaagggatgaagctttacgtaaaaagaaggaaaaaattgagaaatctgacaattctcaagtgcgccaccgggaagtgttgagtcggaacgccttttcagcagcgcaggatttattcttaatgatcttcgaaaaaacctatcgcatgaaaatctagaaaagcttatttttcttcatcataatctcatcctttaccattttgattattgattaaa

SEQ ID NO: 73492 - DNA, 817 bp, Heterodera glycines
atgttcagctcttccaatttgtctgctctctttttggcctcctccgttttggccgtgcttataattggcattaaaatggacggaccgacggaggcaaaaggcgccgcccctccaaacgccgcggggccaatgggacttttggttatgatttttaattgtaaaattaaacaattcaaaattcattcagcttttattgaatggcaaacaatcggcggctaatgaaaagggaaaagcgccctctggcgaaagtaagccaaatccggggcagaagccgagcggagaacggcgaaagagggacgttttggggcacgccggcggatacgtcggaggatgggaccatcccattgactcgacactgtaagagcataaatttaataaaaatggcatattcaaaaatgcaaaatacattttaaattaaataattattattaatttgagttattatttttaaaaagtttaaaaattaaaatatttcttttgaatttaattgtcctttattttagtgattgggcaaagagtcagtggaatgatgccaattggctcgccgatgttgtcaacagaaacggatgggaaaacaccggcactccaaccggcggacgatgaatcagtgaattgtgccgaccaaagaacgaaagacggcatttttgtttgggaatttaattgactttcggaatcaaacacactttcctttttagttgcctatttattctaaattagcgttttttctgttcattttctacgcataaatttgtgtgaataatattttttaaattttggctaattcaatgacatcattccaatgccatttgatattaaa

SEQ ID NO: 73493 - DNA, 708 bp, Heterodera glycines
atgttactgaggcggcacgagttgagaaagccgaggttcagcagcagcgaagcggcaccagtgaatatgcacaaaaagaacattggcaagtcgcaactgagtaaaatgtcgaaaaataatggagaaacggtggagggagacaaaatgccaaaaagttagtggggaaaagtgccatttttaaaattcaaaaagggactatggcattttacagtcggcactgctgcttcttttgcagttttcttcctaaactttgcctttttgctctgctcatccgtcactaatttggccacaaaaaatgccaacgaacaaacgccaaacggacggacgatgttcccaaacgcgccgaatgctcgaaacagtcacaatgattacggtaattacggtatttacagtatttaccgtcaaacggaaagtgattggccgaacaatgctcatttaaacatcccgatttttttaaattgttcgtatttttggtagcaatagaaatgggcgggatgtaaaaatgggaccgagatcttgtctcgatttaaaaaaatatgaagattcataggtcgacggttccgttaggcaacgccggagaaaaaaaccggaaaatgaaatttttaattaattttgcaccaaaatgtaaagtttaatttaatttaatttaattttatcgagcaaaccaaaggcacattagtgctcttatatggtgccaaaaacaaacaa

SEQ ID NO: 73494 - DNA, 1827 bp, Heterodera glycines
gactgatcattcggatgggctgattgatcagggtttcagggatgggacttccctgatggtgttggcacaacgtcagcagcaatttccctctccccaagggttttcaactgaaatcatgggcctagaatttgatgttattcaaaagccttaaaattcttattcaagaattttcccaaatattttgcagaggcaaaaatatataaatttttattgttgcattattagagatatgaatgaatgaagtgaatgggcgaggaatacattaagaggggcggggcagcaaagatcgaattaattgcagaaaaatgagaaataaagatatcgcacttcctttcgtccggacacaaagagcgatcaattttttatgaaattctatttaatttccaatttgtaaatttcatttgaattcgtagtaaaatttagaacgaatctatattagtattttagtaaaaaaatatggtttttattgattaaaaaacttttcaaaaaaccctgatccgtatacgggtccgtatttttccagcatacgtactatacggagtaagggtttttagtccgtaagtctgtagtccgtatggatgcctagtccgtagttctgatcctgatccgtatttttgccgaatgtcgccgctctctagaaaaaattatcaacatttcaaactttacatacaatttcctggcagatttaatacaatacttcaagaaatatcttattttttcttaccaaaaaagtcattcttaagggtgtaaatattttcgtctttttcgtccaattttgctctgacgaaaacgaaacacgaaacgaaaatccaaaatttaaaaaccgaaaacgaaacacgaaacgaaaaacaaaattttgaaaaccgaaaacgaaacgaaaaaactttggtagacgaaaacgaaaacgaaactaaaaaagtgccgaaaatgtaggacgaaacgaaaacgaaacgaaatttcgtccatccctgattgcgatgataagccaccgatttgactatttcgttgacgaacatttcaaaacgcgcaaatggacattgggcaaaataaaaattctaaatggggcaaaagaaatgaaaattgtcaattattccaattgggaatcgctgccgatcccacaaaatccgttgccgaacaaagtcatcggattcggaagcattgttatctagtgaaaaattaaatttatagatgattttaagcattacatttaactgatcttcagctacttcgaccaaaatgtgctcacttttgtccgccgtttttaccgtttcttcgcctcatgttcaacaacattgttcattcgcactgaaaatgtgcgaatttcggaattcattgtgctcaacatttggccaatgttcaaggacacgactattgtgttggattttgacggccgcaactttccgtcgaatgcgccaattggccccgtcaatgctcaacgaatgtccatcccttcatattattggtttcagttaagcattttgcccggattttcatctgacgacagtgccaatgcgtcgaatgaccaagtgtttccaggggttttcggggccgcgatcatggatggatacgaactcgatttgacgcatttcgaaccgctaatcagaaattctaacattttttgaaaattttgttttaaaaatcggttttaaatataccaaaatgcttgctccatgattatccgatgtgttgcttatattaattgttcagacgaagcattgatgcatttattaattttaatataaatattctttttttttgtagaaataattacagggctccagttggaagggacgattgagtcgtcgggctgcacctcattccaacgcg

SEQ ID NO: 73495 - DNA, 1917 bp, Heterodera glycines
atggcattggggacaacaacagcaaaaatcattcgaacagatcaaaattatgctgtcgtcgaacgagctgttgcccattttgatcccaaaaagccactttatctggcaacagacgcatctgactatggagttggagcgatccttttccacaaagatggaaacacaggaaagtttggcgtgatcgcatacgcctcaagaacattgagcccagccgaaagaaattatgcgcagatcgaaaaagaaggacgcgcagtaatcttcggcgtggagaaattcaaccagtacttgtacggtagaaaattcattctacagacggatcacgagcctttaaaaaggatttttggaccaaaaggtgaattgcccgtggttacggcacgacgacttcatcgttggagtttgaagctcatgaattatgagttcgaaatcgaatattgttcgacaaaaaatttcggttacgccgatggattgtcgcggttgcctagtccagaaattgatcaggtctgtaaggaaagtctcgagctgaacaaaatctagcaggagagccaaaacgctttgccgatcactgcgaaggacattgcgaaagaaattggcaatgatccggtcttcgcaaaagtaaaaggttttgtgctcaatggatggccaacaaggatagaagacgagaaaatcgcccattttttctggtaaaagacgaattggagctgaataacggatgcctaatgttgggatgtcggacagtgattccgagcaaattccgtgagaatcttttgaaattgatccacgagacgcatccaggaatcgtccgaatgaaggcattggccaggcaaaaagtttggtggccgggcatcgacaaagacattgaaagcatgaaaaagaagtgcaaaatttgtcaaacgaatgcgccggaaatgaggaaagaattgtgtctgacaacgggccgcaattcgcgtcaaaggagtttgaagaattctgctccaaacgcggaattgaacgaacgctgacggcaccataccacccgcagagtaatggggaagccgagcgttttgtccaaacattcaagaaaggaatgttgttggttaaaaaagaaaccaactgggacaatgaattggccatgaaccaattcttactcaaataccgagtaactcctcattctgcaacaggacgatctcctgcaaaaatgatgttcggcagaaagctgcgaacactgctcgacctcgtgcgcccgtccgaatcgaccaaaattgaaggaggagaagagaaggcaaaagaaaatgctgaaaagcatggccaaaaatatttggctcgcgccaaaaagaactttgatcgacggacgtggaaacgatcgtttaaaactggacaaagaatctttgccaggaattacagagacggttcgaagtggatggcaggccaaatcatgagccaaataagcccatcactgtttcttgtccgaacagcccgtgtggtctggaagcggcacttagatcagctgaaatcggacgagacgaagcctgatctggagagcaacaccgacgtggactcaacatcgtccataggtgatcagacggaggatgaaaaggacggaggacagcagacggacgtggaagaagagccgaacgatccgccaaatttgcacgatccgccattgagaagatcggtgcgcgaacgaaggccacgacagatcttcgaccccagcgcgtgatcgctgacttcagctggtggggaggagatgttgtgttcgttaattatttgaattaacgccaaaagatgctcgtttatcgatcatccttttgacccttcgtgttgtccatttaaaccccccttttcccccattccgtgcatttctccctcattcatttgttgtttccatttaattgtgacccgctccctcccttcgctatttattatatttatttgtgtgga

SEQ ID NO: 73496 - DNA, 183 bp, Heterodera glycines
aaacaaatttaaaaaacggtcgcgaagcgcccgcccaagcccaacaaaatttgaaaaacgggcgtgaagcgcccgtctggccccaactaaatttaaaaaacgggcgcgaagcgcccgtctgagccgcgaagcggccgaatgttcttaataacattaaaaacgggcgcgaagcgaccgtcttga

SEQ ID NO: 73497 - DNA, 3086 bp, Heterodera glycines
atggtgcaaaataatccagacgtcgtcctcgagtctttttaccacatacaacaaagttttgccgaaatcgacctgttaaacgaggaaattacaataataatcacaacctactcagcccccacgggatccggtaaataaaaaatcatagattaaaaaaaatttttttaggttataatttaaatgtgtttaattttttcccgccaaaagagaacgggagattatctgtccaaaatacagataattattgtcttttttatagtataatattgagtaaattttatcaaataattggggcagaagagcaatttcggatatcatatgcacaattccgaaaaatctataataaccagaaaaggcaaaaaaattacgtcgatgaattaattcaaaacacaaaaattgatccaaacaaaacgtcctatggggtagaagatctttcaattgttcaagatttttttgatcgagaatttcccggaaattttttagtcgcagcattttcaaaggtaaaaaagaaaatttgagaaataacaatcaagtattttaggaaaatggtttaaaacccatatttaaaggacaaggaccaaaaaaatatataatttgtatttttctcgaaaatgggcactgggacggtaaattaatataaaaaatcgtttttaaaaaattttaggtttaaaaagcgttaaacaattttttaatattaaacactattattgtatatattgcgagcagacatttcgtgaaaaaattaaacattctgttaattgtgtaataaaatgtcaacgatgtggcggatggggtaatgaaaaaaaaaggaaaataaaatttacaaaaaattcaggtacaaaatttccatgtaaaaacgaaaaaatacagccaaaagaatgcttaatatgcaatagatattttttcaatgatttttgctatcaaaatcattttaaattggcctgcaaatactatagacggtgtatacaatgtgataacgattattgcataagggatatgcatatatgcggtattaacacacaatctaataatttgttatttcgatttttaggatcaaaattctgcagagtttgtaaaataagacaccccaaaacggaatgttgttacattaaaaaaattataataccaaaaagtttaccaaaatatagaattatatcctacgatattgagtgttcggtatgatatataaaatattataattttttgatatagaatatttacaggctgataatctggttgataaccaaaaaacagaattctatgaacataaagttgtttttttgtcagccaggtttacatgtagcgattgtgaaggcaaaatagaaaattgtgacatttgtgggccaggtggaattcggcaccacacttggtgtactgtaaacagagtaaatccagtttttgaatttttgaaatgggttctatcacttaaaaactatgagacctactgttatgctcattttgccggtaatatattttaatgtatctaatataaaaagatttttaaaggtcgatacgatacccattttatattaaggggtttaacggagttgggacacacaccagaattaataatttcagacttgaaaatttaccaaataaaaattgggcaaatctattttagagatttttggctaatggctcaaaataaattgtcacaccttccaaaaacgttcggtttagactgtacacctaaattgttttttcctcataaatacaattcagaaagaaattatggtaaattttttaattataattcttctataatttattttaggaaaattactcccgacccttccacctatggaagattattgccctgaaagcatgaaagatgacgaatttgaaagattcaaagaatggtaccaaaaaaacaaaaaaatcccctttttgttaggtactataaaataagcgaacttttgaaaaaatttaatttagaggaacaattacaaatttattgcggacaggatactgaaattttattaaaatcgatactgagtatgcgaaaaatttttattgaaataacaaaagactcggaaacccctaacggttatgatgtttttaaggtaatttacattttcagttatcatttatgccatattaaggacagtacgacaatcgcaggagcggcgataaaaatttacagggctaaatttttaaaggaaaaacacctagctatggtccctgagggagggtttgaaaaacataacacccaaagcatgattgcaataaaatactttgaatattatatgcataaacattgtgttaaagggagacacgcagctaacgggggggagattaatataggaggtcttagtaattaaaatcacaaaataattttaaaattaagagttcaaagttgattttatttgtgggaaattcaaaaccataatcgaattccaggttaataaatatattttatggaaaagaatgataattttagggatgtgcttttcacggtttgttatatcaaaatttttggtaaatatgtatattaaggatgtaaaaaatgtttcaaaccttttcaaattgggcccaatggtaaaactatggaagaaaattttgtaaggacaaaaaaccgaatgtttaaacttagaaaaatatgcaataattttggaatacgggtggaggaaatatgggtcagtacaaattaacgattttttgattaatatttcttaggaatgtgaggtcctacgaaagctcaatccacgtgataatgaaaattatgacatagaaatgaagaaatatttcgattctattcccgataagggtggggtaatcaaaacaaaaagcaatttagcaaatatttaggaccaatcgacccccgggatgcttttgcgggtgggcgaacgcaagcgttttgtttatattcaaagatttctgaaaacagtgaaataaatatagccgacatagtctcattatatccatcggtaatataacttaaaatctcttccaaattttaattctaggttaattatttcacaccgtacccggttaagacaccaaaaataataataccaaaatctcaagacgttctgtggcaatgtcccgaagacatcccttatgatggtattcataaccgtatgtaa

SEQ ID NO: 73498 - DNA, 473 bp, Heterodera glycines
atggcgccggttgcgccccagcattttgtcgccggaattggtcctggagcgccacagcattttgccgttgggatgcccccagccgcacccccaccacttgttgtgggaatggcgccgggggagcaccagcattttgcggtcggaatgccaccgatggcgccacagggagcaccgcgcccactcatgggtgaagtgaactacaggccattgagaggtgtttttgaagcgcatcgcgcccacccgcagcagcgtaacggtcgttggcctgtgcgtccgccaacccctggcggtgcgaaaaaatgtttaaaaaacactcatttttttcatttttagtggcactgagggacccgcgcctgaggcgtcgtcgtcaacttctcgaggtcgtcccagaggaagatgaacctgcggcgcacagatttcagaactgggaccacgacccaccacagccgccgccgccgggtgttggagcatga

SEQ ID NO: 73499 - DNA, 152 bp, Heterodera glycines
tgcctggcgccgtgattttatcggccaaaacgtagttgctgaatcacccgatgtcaaaattgagccgccggatgaggaattggtgcacgccgaccacccgatgccgggtaatcgtttaaaaatgttttaaattattaacgggcttaattaaa

SEQ ID NO: 73500 - DNA, 2761 bp, Heterodera glycines
atgatgttaattcaaaagttagccaagatccggcacagtggaaatccgtggcaacagcaacacgcggttatttgaaaatggggttgctccccgtccttcagggagagaaaattcggggatcggggcggacattccccgtcaaaaaatgccgggtatggcttgagaaatttcaaaaataccggagagcaacgctttttcgggaaggaaattttcataaaaaaatacgaattttatcgacgacattcgcaatcctccgaatcgggtcggggagcattcctaatttggggaaataatgtttaacatttaattcttttaataattgtttagttgcgaacttattccgatatcgtcatcttccttatttgtataggtaaaaaaagaaaaatatatataaaaatattttataaaatatttttaaaataaatactaaaaaggtaaaatctaagaatagaactaacttaaaaatattaataaagtttctcatcatatatttgccattttgaatgtaatttataatttgtcaatattctttatacagtctccatttccgcgcttcactgtacggtggtacggtaattcgaccactgttctttgaattcccatcggacaccaacacacacactttgaatttccaattcatgtggggcccagcaatggtcattgtgcctgtcgtgaatccggtgggatttatttttatttttattaattaaatttttttattcgagttggcatcgcctgtcaatagtaaaattaaaaggcccaaatttgaacccattttacataatgcattttatttaaagcttttttgcaatttaaatgcgataaaattaaaagaaaaatgataaatgaatgaaaaaatgagtcaaaagatgaacttattcaatatttagcttatgcaatcactaaaaaaatcaaaattattaaaaaatatatttcattttctgccaatattctaaaatgatttatttttatttcaagtaaattattattttttattatcacagtacatgaaaaatttgtattcaatttttttttgaatttaattagaaatttatattcttctggtttccaaataaattcgtatttatttgtaaaaaaatattttttttaaattaaattttttcttttatatatttttaaaattatatttaaattatttatttcttttttttccttttttaatggcttttaattaaaaattactctaaaaatttcatttttaagaatgttgattctgtccatggttatttgcctgtcaacgaaacttggtattcgatgagtgaagcacatgagtacagtgcgcgcattatgccaggattttcaacattcaaagcgccaagagacacgccgttgccaacctttttgaggggttggatatataaaaaaataatttatttttaaatgataaaatattttaaaatttttaggcggtcatattattccaagacaagagcccgatttgaccaccactgcttcacgcaaaaagccattccaacttctgatcgggttaagtaagtataaattcttccgataggtttaaacttctgaatgcactttggacatccaaatttttacatttttggtatcttccgatagctataagtattctcttatagaatataaaatttaaaattcaacaaatataaaaaattttatagttaaatttaaaaaaaaaattccttacgattttccgacattttcggcacccattcaaagcgccaattgcggcgcagacatttgaggcgtcctcctaattactgagcagaattaattggcctttaaattaaccgccttttattttcctttcaaaaaaaaggtgtcttttttcaacatttattattcgtgttataatttttttaaactattctattagataattctttgagatattgaaagtggcaagaatatgtaattttgtcgacagtcgctatggaaaaaaagaaataaaaaattaattaaattcagaatttaaataagaaatgaaaattggcatttcattccagagccacttgcttgcccgtgcaaattggtcgccgctggggaaatgttttgggatgacggcgaaacaattgtggacgatttcggcaaccattcgtactatcgttttgagtttagcaccaccgcaacgcacaattggacaacaattgttgtgaatcggacgcacaattcaagcgaagtaatttattaaaacgtgccaaattttgtggctttttcggttttattcttataggtgatttgggccaaattagtcactacagccaaaatttgtcacctctggctttaaatttttatttgttatttgtcaagtaaaattttaaaaatccaaggacccattgccaagcttggaccaaattgtcattcttggccacaattttacgcccaatttggacacggcaacattgaacggcatcccaatcaaactgtcggctgactttgtgccggaaaaaggtgctctccgagtggaaagtgccagactcatccgtctggacgatgccaacacggctgtatggacactcagctggcagaatggacacaaagatgatgatggcggacatgctgaaggcagtggtgccaaccgtgaattgtcatttatgatcgctatttatttggccgccacattcaccacggcattggcattaattggtcactggcagtaatggcatttctgatttagcagattaatacttctaagatttttttttattattatttatatgaaattgttttttattatcatttatgcaaaaaacggacgaagaaa

SEQ ID NO: 73501 - DNA, 1288 bp, Heterodera glycines
atgccgaaaatgatgctgcaaaatgccgccgttgcctcggatttaaatgaagacaaaaatgacacaacaaaagcaaaacagcagcaagtgccacgcccgttcatcagcccggacctgcacttgaattacggcatcgcactttactacgcgtgggtatttttttcttggaatttatttataaaaaactaattatttgcaacaaaaaaaaaagatttctcgggggtgggaacgaagtgcatccttcaaattcactaaaaaattttgcgtctgttaggcatcgccggcaatttttttttttaatttttcaaacagaaggtttaaaaaaaagtcgatagaaaattttcagacttttttcacgcttaaaaaaaaattgtaatataagttaaaaaatcaaaaaacgtggttggttgggtgggggcgggggacgttcgaaactcgtcccattttttggcaaaaattttccgataccctttaaaaatgctgtatggtacatgtttcagtcaattttatgcaaaagcgttggcccagtttcgacgtgcgctggccattgagccccattttggacaggccaaacaccaattggacagtgcccgccaatttctgttcgccctgcgtgacggactgcacaaaaagggtaaaaattgtgaaaaatttaaaatttctcattcgaatttcccaagggacagactctgaaatttttatccccccccccccccaattttacaaaatttctaatttcggcgctataaaatttttttgcagttttattcaaaaaattttagcctaaaatgattaatttattaggaaatttttgtgtcatttttgaaaaagaattgtactcaaaaaaaaaatactttccaaaaaaaaaattattattttttattatttcacatgccattgaatgcgccaaattaattataattaattatgcctgacatttttttaaatgtggtacaattaagggaacatcgcaaagcgtcgcctgcgcactctcctcgacacattccctttaaaagcggcgactctgatggcggagcaacactttgtgatgcgtatgaagccggcacgggttgggttttcatagatttttttcaaaaaaaaaaattcgtaaaattgccagaccttggccatctgttcaacgcttgacgatttgattgccacctcttccaccgccaattacattggtctttcactgtctgcggttgcttccgccgcgcccgccattgtggcatcggtgaccgtccgttgtgtaggcgttgtgagcaatgaggaaaaaattccgaggcaa

SEQ ID NO: 73502 - DNA, 747 bp, Heterodera glycines
atgaaggagtgcagcagaagcaaagatggaggaggagcaggagttgacaaaccagcagttgttgttgttgtttctgttgacggagacgacgtcgaagcgaaaagtgctgctgctgttgccaataaaaccgcggaaaatcaccaaaagaacgacgacgatgccgagcagtgtctgttgatgatccgtgtcatcaatccatcggtgaacaaattaataattaaaataaaaatggaaataatatatatatatatatatatatattgtctaaaatttttttgtgtttgtttccattggtttgtgagtgtctctcccaaacatggagaagttcaacccccccccccccgaaaaatttttttaaataagaaaaaccataaataatttagggtttacatactagaaaaaattttaattttttttttgattttgtttttattgcaatttaaataaataaataatttgaatttgttaaaatgtttgaaatacccagtttaacattataatataacaataaatttaatccaaatatttaaaaatgaatttttgttggagcgaatgggattaatgggcgccaccgctaattgactcccccgccccatctgatttaagcgccaactgctgaagaatgggaagccgctgagttcgttggactgcgcttttgcggcaatgtcaatcgaaacgcagcaaatgcaaatgggcagtcgcgcgagggccgaataaaatttcagaaaaaagaaaaatggcacaaaa

SEQ ID NO: 73503 - DNA, 351 bp, Heterodera glycines
atgcctccaaatgaaaattctgaccgtccctttcaacaacccgacaatgttcaaccaaatcaacaaccgcatcaacaacaaccagatgaagacaccgagttgcgtgcacaaattgaagacgcggaggaggatttgctcttgaattggtggcgtgaagacccaacaattgtaagctttttttttcaatttagcatagttttttttaatttcatcacatttttcagattcgttttctttttggacacagacgcgcccctgcaatcgaagctgcgcttcgtcaacgcgctgaacgtgaggccgagatcttgcgccaatatgccgagaatcagcaatgagaagtgaccgatcaaa

SEQ ID NO: 73504 - DNA, 564 bp, Heterodera glycines
atggttctcgtaagcgtattttgcggccagctgctcaaatgccctgtcaaattgttgcgagaccggctcaaccaccccgaggaccgggcgcttgtgctgaaacaccttattgggcgcaaagtgcgcaccacctacaatgaccgtaacgggctgaccaaaaccttcttcattgctgggatttcggcacaaggcgcagcgtttcttcccgcttatggccacttgcgcaacccgttcaacatcaatgtggcggcgcatttttacgcccgccacagaataaagcttcacctcccttatgtaccgtgcattgttgaacgcttttccgggggaggggaggaccgacactaccctatggagctgcttgagctgattgatgacaacatggacatcgacaacaacaattggttgggcaatcttttcaccgaaattgacaacaatgacaaacaatccgcttcaaactcatcgtcgcaccacacatcactgcgcctaatactggaggacgatgacatggacattgggcgtaatgagtgcagtcaagatgctgcaccatcatcatcctactggtga

SEQ ID NO: 73505 - DNA, 2635 bp, Heterodera glycines
atggccaaattgttatgcgaagaattgacggccgaacgtttctatcccatcgcttttccggggggaagtgagctgatcctccaattcgacgagcacgtgataagcaacacttacaaatttggtcagtccgtttatttaacactcaaaatagaatcactgatcaattagttgcccccctttcacaggtgcaatttaccaaaagtttgggcagaccaccgaggaggagctgttcagcaacgactcctccaactgcgcagccttcgacgaatttctctccatcatcggccaccgagttcagttgcgtcattttgacggttatcgtggcggactggacaccgttcatggacagacgggcaccgaggtacggtggggcagagtggggcgggcatacggtaccgtttgcttaatttcctttttcagtcggtgtacacacagtttcgccagaaggagatcatgtcagtttcaattaacaaataattagtattaaaaataggagagtgagaggaagccaataaatccattttattgtgtatttcaaccaaaaacttaattgtccctttaattcggacatcccattagcccaattagctcttccccggcttcttcaggttccatgtgtccacccttttgccgtttaccattggcgacgcgcaacaattgcagcgcaagcggcacattggcaacgacatcgtggccattgttttccaagagcagaacacacccttctgtccggacatgatcgcgagcaagtacaaaaaagggcaacattcagtgcctaatttaattattttctttttttctaaagctttctccacgcctatttggtggttcatcccattgagccgggcactgaccgcacgcgttaccgcgtgtcgatgacagcgcgagacgacgtgccgttctttggcccgacgcttccgcgctcttccataatttggaagtgccaactgcgcgactttttgctcaccaaactgatcaatgcggaaaacgcggcttataaggcggaaaaatttgccaaattggcggtattatggcaattttcattttctgaaaattaatcaaaagtttgttcaggaacgcactcgggcatcgctgctggatggactgtactcaaatttgaaagagcgggcccaattttacggcatggcatttttggattcggtggacagcgcgacgaaacagcagcaacaggagaagcaccaccaccaatggcaaaacaacgggcaaaaccatcaccagcacagccaacagcagcaactgatgaatggatcggtgaacggaggaacgaacccaatgggactgttccattcggtgaagaaagtattcagtgcgaggtgaggggcaggcagcaccacctgaccataatggacatcaattaggccgttaattagtcccattaatatgatcaccccaaaacaattcaacaaatcctcatgactttttgatggaacagtagactgatttagctaattggctaatgaatgcttgttcctattctttgaccttttcaatattcaaaggtcacgatcggtgtcacaagacgtgtcctcaaatggcactccgatgccatgtgccaatactttcaatgaaaaggtgccgcttggctgtcgtctgtccggtacgttgtgctccaccagcagctcgtccggctcctcctctcagtttggcacgccgccaatggccgacgcaatgcaacagcagagaagagcattgaccagagagagagggggttggccaatttgccattgatcagactgatcagccgatcactcattccccagcaggtcgaattatgtctttggtggcaccgatggaggactgtcgcctgtcctcttccgcctccacttcctcttcatccggacatcattttgacagaccatccgcagttgctcatccgtcccaaatgccatcacataattatcaccagcatcatcatcttttgagatggcgttcaaatgcgggaaaaatggcaaagacagcagcggaaaggaagtgagaagacgaggggggaaggagcagtactggacgaatcaattctgattacgggaaccttattatgtgtacaacccattgtataagtggctttaataactccgtcctaattactatcgcttaatgggggcttttaactaagagggaaatgcgggaatttgcagtataaaagttattttggatggtttccgtccatcatcatccacattcagcagcacttccgccatgttggaagcgtcgttcggctgcatcgaccagcacaaccatcaccaccgctccacgccctcttccccttacgccgcccaccaccaattgcctccgggcactgtcattccgtttcggtcgagcattcagcacctgaggcattggcacggaggaagcgatgccgaggatgatgacgacttggacgatgtggagatagaggtggaggaggtgctaaacgaagcggacgacgcactcagaggaggcgccggaggggggcacgactcggacaccggcatggagagcatgtcatcggccgacatccaaccgaacggcgcaccatcggttggccgacgatgtctcaacaacggcgcaggggacgcaaaaaatgggaaaaatgccgcaggggcactccaaaagcgcgagagaatagcaaagaaaa

SEQ ID NO: 73506 - DNA, 1584 bp, Heterodera glycines
atggccgtctccgtcgaattggtccgactccgtcgcatttccgaattgccctccgatttgggcggtgttcgattggttccgtcgcaacgactttctgtgcgacctctcacaatgttttctgaggagacaaagagatgggaggccgaaattggcgaacagtgccctccgcaacagcgacgttcggttgttgccaaaacggtgccactttcgcatgtgccatgccaatgcgctttgcctccgtcgtgtcccaccactgccgtccctccccttccgtccattcttcgacggcgcgttgccgtgccataccatcgaatggcaaaagaagagacaaaaattataaatgggggaaaagagacaaaaaagacaaattgggagaacattcaatcaaacgaagcgacaacagagacaaaggcaacagcagaaaaatgtgagaaaggagaaggagagaaacggcaccaaagggaagaacagcgaaatgtgccgaattgtcagcagttgtgctcgtgggaggaattcgaagaacgagtgcaagcggtcagactgaggccgaggggacggcggacgagcggcacaaactgttggggggcaacggggggagcgaccggcaacggatgccctggggccatcgaacggaagcgacagcacgaaaaggcacatggggaagacggaaggaccacaaatggaagaaaaatgggagacagagaagggagggaagcgcaaaacgaagtgctaaaacagcaaaaatgttggaagtgccaccagatggggcgaaaatgtgtgaattgcattttgacgattggcactggcgatcagcagcagcagcgactaatcaaccaaattggtcggagaatgccgatgagtgacacggaggaccatttggcagagacaaacgcggcaaaaagggaggagagcaaaaagcgacggagacactccgtcctgtcaattaagcctattttgcgcaaattgaccagcacggccagcaccagcggaaatgcggacgcagcagcaacaattacagcaacagaaccaacaacagcacgacgaaggtcattcttccggaagaatgccggagataaaagtcattcgccagaagcccagcggaggaagaacaaagaaggacaacaggccgaggggggacgggccccacttccttggtcatcatcatcatcatcatcgtcgtcgtcattattagcctcattagcgcagtgggcggactcatcgccccttaatgaacacactttacacccaacctcttcattaccgattgaccaacagcgtccaccgaggatgaaatcccttctcggccgactgttaagacgcaaccgtcgccaaaagcaaacggatgacgaggcgaatggagtcggaatcggcacgagcgaaacggaaccgaaacaacggaaccaacagcagcagcagctgacccgacctgagtcaccggcgagatcaagcagttcaaaggcggaatttgttgaatggcagtcaaaatacttgcgattgtcatggatggcgccgaaagggacgaaaaacaacgacagttatcaccggtacaaatgtgatcaattgggggcatcgacggaagaaaaa

SEQ ID NO: 73507 - DNA, 81 bp, Heterodera glycines
atggacaataaatgggaggggagcagtgatattttgtatacactcaaaagtaatataaaaacaaaggaaaatggaaaacaa

SEQ ID NO: 73508 - DNA, 1392 bp, Heterodera glycines
atggcccctttgaatgcgattccctccggtgacgcgtcgccgtcgcattccgccggcccagcggcgaatcatttggcacatgcgacaaatgaccggcggaggaggaggacaaacgcgagaaggacgcagaggaaatttttggtgtacccatctgaccaactcaaaatgttgaacaatggcacggaaagaggagcgaaggatggcaaaacgaacaaaaatggcacatgggggaggacaaaccacgacagggaggaggacggaattgggaagaacggactgatgaggactgaagcggacggggcggagaacagctggacgagagaaacggagagaaatggaattagcagaattggatttgaccggaccgaaatgaacggactgaggacgaaactgaacgggacagaacagaacggaacaaagactgaatcggacggaatgtcatttaatgggaagaggacggaacaaaacagaagggaaatgaacggaagaagaagcgaattggaagaattgatgacgaatgggacaggcaaattgggaggacaagaaaagaggcacggaaacggggcggaggagaaacaattttgggggatgaggatgaagacgaagtgggaagatgaggaggagcagcggaacggcatcaacaatgccatcaatggaattgacgaagtgtcgacggacggacagagcacggcacagaccgagacggagatgaagcagaacggcacggggtggggaccgcacagcgtaacggacggactgctgacggaagaggacgccgtcgagtcgggttggacgagctgaatttgacagatttgttgaaaaaggccaaagtttaagcgaccggtggtcaatcctcacaacttcttctcaacggacagcaatcacaacactttggccatgtcgctaaactgcacagtttttgggaagaaatgccaatttcatcgtcgtcacttttgtgcatggacgaggagcaggagacggaacagaaacagcagcaacaccaccgacgaccgaccactttgtcacctcgcgcagtccttgcggcgcacttgccaaaaacggtgccaaagtcaaacgattacgaggaagaaagccacgcgatcaaacgccagcggtgcactctccgggaacaattagtgggagtgccgtcggtggcggcgccgtgggaggcgatcgcagccgaaaggttgggcacccgcagatcaaaagtgatcatgctgggtgactcaggtgagcgatggaaagaaaatcagcagcgaatggatgactttccaatgttaaaggtgttggcaagacgagcattgtgttcagccacaaatacgggccgaaccccgcgctgctcaattcgccgtccaatgcgaccatcggcgcttcttacaccaattttgacat

SEQ ID NO: 73509 - DNA, 172 bp, Heterodera glycines
tttggattttggcacagaagtcctgcgttgtcccactgccctcgaagagccgatatttgtgctgatcggcaacaaggcggaccagcaggacgagaaccgcgaagtggccgaaggggagggcgtccaaaagggtgggcacttggccaatgattggtgtgatcaatggcaataa

SEQ ID NO: 73510 - DNA, 240 bp, Heterodera glycines
atgaaatcaccaaaatggaaaaataacaccgcacaaacggtcgaggccaatggcaatttgaagcgcaacggtaaaagcggagccaatgatgggaagaagctgaatggagaggcaaaagcggagggaaacgtagttgaagccgaagaggaagatgaagaatttgaaggtgaagccgagcagcaggaaggaggcggagaaggcgtacagagcgatcagaacattgcaatgggaatggagtga

SEQ ID NO: 73511 - DNA, 996 bp, Heterodera glycines
atggcacagcaaatgggcgaggcgacaaattcgttggcattggcaccgagcaaaggggcgacgaagccaatgaaaaggacatacgcattaattacaaaagaaacaaaatgcaattggcacattttaatgacatttaataggggcaaatggacaagttacaggtaaaattcacaaatcaattcaattaccaattatttgaattgagaaatcgcaacattaaaattaatatttttgcccatcatcagatgtcagatgaaaaagacccggtagaattaattgttttttaaattttatttactttattttattttaattttcagttttatgcgctttacaatggcgccggttttgtgccgggagaagtggccataaatgggtttattgcgttgatttgcttcgtgggaatggcactgaatgcttcattagttcatgttagcatcaaaacaaagtgagtaatcgagaataacatggcaaagactgaggggagtgccaaagaccgaaaatgacttggaaaatactgtcaagcggtgccaatgatcaagaataatgtgattcagcaatcatttttcgaaaaataatccaataagttccatttttgggtaaaaattacggaaaatgactttgcaagatcgggaagtgccaaagaccgagaggggttggccaagagaggggcaatgatcgggaatgagatgatcaagactgatgagaaagcgtttgtcaagaccgatctaaaggatttatcaagagcagaccgaccagagttgatcagtctgtcgtgcatagagcagggctggacataagagatttcagttaccgaaatccgtaattaagggctccaaaaaagccgtattttccctaatccatataatttcatgttttgactattttttgtcaattttttggaaccaagatgcaaatcagcaaatctcacgcccaatattttggggcatcggaatttcgggtcggctcggagttcggactatggtttttaataaa

SEQ ID NO: 73512 - DNA, 362 bp, Heterodera glycines
atgagcagagagaagggacagtttgagaagggctatttgccaaattatggcgacgaaatattggaggttgacgaggtgctgaaagcgattcgccccgttcggtacaagctacgggatgagcgcggagagaaattcaagggcagcttctatgagcaggagttggcgcgtgtaagaaaggatgcagagacaagctaccgtattgaaaaggtgtacagaaagagaaagagggcggatgggtccactgagatgcttgtcaagttcataggataccccgagcgcgaatgggttcacgaatcacaatttgttgtataaaagccccacccatataacaacatatcacattttcataaattttacgtgaa

SEQ ID NO: 73513 - DNA, 2026 bp, Heterodera glycines
cggcaatttgctgcgggggccgagggcactcaaagaattgcaattggacggcaatcggctgtcagcgggacaactgaaccaactgctggccgaggttggcacactgaaaaggctcgaggcgaaccattgcgggctaaacgatgccgaagtgttggcactgaatttgagcaaagtgccgcaattggaacgcattggactggcggggaataatctcagcgaagtgccgagcagcacactgaggcaagcagaaacagaaaggcgcaattagcggtgctaattgggcaaaattggccattttggaatttgaaggaacactttttgtcgaaataagcacagttcagggcacttgcgctgctccgtaccgtcgatttgtcccacaatttgctccgttcccttggcccctgcgccttttgcggctccaacatttcccgcgtgtttctctcccacaatttgctgggcattggcggcgatttgcgccccattcaccgcgaagcgttcgcagagacgcgcattttggagttggacctgtcgttcaaccaattggacgctgtgcgcttcagctccgaaatgctgcaggatgcgcaagagtcgctggaagtgttgcacatcagcggaaatggccgtgtggcgttggacgcgccgcaactcatcggaaccctcccgcgcctgcgggcactgcacgtggcggacagtgcgctgggtacagtgccctacagtctgccgaaggcgtacggtcagctgacgctgctgaatctgtctgggaacggattggaccatttgccacccaacctgggctcaatgctgcctcatttgcaagtgattgatttgtcgcgcaatcatttcaggtaaatggtatttggccggaaattttcgtgccgtttgccagttcaattctatgctttcagcagttttccccactctttggtcactttcattcatcggctgagaatggtctttttgcacaatgtaaaaaatacatttaaaaaatcgtttaaaatttggttaattatgcattaattaattaattgcccatttcgccgttcgttcagtgcccttgggattgccaatgcgctgctcaaccactccaattgcacatgctccgccgattggaccacaaggaaatgttgcgatatgacgagacactttgtgctgagccgccaatgctccggggacagccattgcatcgcgtgcaaaagatcaacgactgtgccattctgttcggggccaactacggcatcagtcaggtcgggaaaacgaaaaagcattttttgtgggagggagggaatgttcatttgagcaatgctttacctttccccctctttggcactttcttcagtttttctcactttttcttctgattttgcttaattttcgcctttctcagaacactgaactgttgctgatcctcggtgcccttctgctcgccgcacttttcctttctgcctttttggctttgctgctttattttggccgagaaagcacacaaaagggcacttatgtgacgggcgaaggcgtgggggaggaggacggaaagagggcacggctaattggggggatgagcaaaagcatgacgatgaccagcagcggaagcaacggaacggcaggcggagggggcggaggaagagcaatgatcgatttgggtgggaaagcgatcactgatcagattggagtgacttaatgatgggccaattcgtcctttaaagatgcgatggcaatgaacggaagtgccattggcgggagagagtgccggcaaaaaagcgccgactgtgagtcgcctctgctgctcagcaacagtttggagcagctgcagcaacggagcagaacgaacagacaaaacggcacgccagcgacaacggcgacgacagcaaagagttctttggccgcattggccgtccaaaacctgcatttcgccgcgtcaacagcgccgcttttcgccccgtccgcgtctttggccacggatcgcctgaaggagccgcttttgctgcccaattcgccactttcgtatagctcaagcaacaccggcagc

SEQ ID NO: 73514 - DNA, 402 bp, Heterodera glycines
atgcgcgaaaaactcatttttagcccagacattctcattttaatagtattgttcgtaattaggaatcattaattatttttagagatcgacattttgaaaaaagcctggacctggattccatgttggacctggacctggatttcctggacaaaaatctaggaaaatccaggtccaggaaaaatccaggctcctcgagacctggatccaggcatggacctggattttttaaaatttgttttaaaaaacaaacaaatgcttgaaaaaatcaattaattgcttgggaacgtctaaaaatatctaatttataataagaatgtattttaaaaccaatttaagcattttttgaaaacttgaaaaaacatcggtcagttgaaataatagatttaatcacaccaaaataaa

SEQ ID NO: 73515 - DNA, 1841 bp, Heterodera glycines
acgaatcgaaatttgtcgcaagaacagtgttactgcggcggaggcggcaccagaattatcggtgtttatcgacgctgccaattctatgccatttccattgcccgaccgtccgttgcccagcaaaattcgttttaagcgccttcgagttgagtaattaaaaatcagtgctatcgcaataaaagcattcattcattccattttcacagttacattgatcactccgtcatcgcttttcttcgttcaaatcacaaaattttcgacaaaagtggcaccaagttgcgtatggggatgctttactcagatatggcggatgaccggcagccgatttgggacgtttttgttcgtgaaatatggccaatttttgcatcaaacattcgccacttggactttatcgatgctgatcatttggacaatttgcgtcgtcgcacttcgcccacaattctcactgatctcaatcagttgagttcaatcgattccgttctattgctgcccgatgcaattggtgatgattttgatgggccaaatgcaactgctggccaagcgttgaacaaatggttgcactctccgagaaaagatggccaacccaagcgattccgtttcattgatattaatgaacaagtgagcctccatttggtcaacactttcaaggaggtgcggccccacattttcggcaaatcgctgatttttggaattgtttaggaatttatgcgtgccaccaccatttcttccgtcagctacgaaattcatttttctgttcatgtgccgacaatgactattgtgccgtttgaattggtgaacgaacgaacgcaagaaaagctgacattggccaaagcaaatgaattggacaacatttggataatgaaacgatgcaaaattggggaggccgcggcggttcagcagcagaagaaagatgaaaattggaactatgtgtacttttggctttatagtggaaccaattgcatcgggtaagcaattaaataagggatttcattttttaaataattcaaattgcgcttaaggccattgtctccgccaccaccagcaaaagaagaagataaagcgagataattcattagtgttaaattaacgaagaaaacactcaaatatgatgatcagagaccggacttttaggcacgcaaatttctcaaataggcacgaaaaatgtgaaaaaaggcataaaaaatgaacaaaagcgtcaaaaaaggcacgaaaaattggcagcaaaaatcaacatttttgtagcaaaaaattttccaacagaccttttttttttttgcttaaccggagcgaaaaaaaagaatttttagctccgaaaaaatgacaaattttttggcgtccggcggtgccgataggcgccgctgggaaaaatattttttggaaattgtaaaagaaaaattgcaaaaagttatctatttttgttccaaaaatcctgaaaaaggcatgaaaaaggcaccaaaattatgtggcgggcataaggcaccaaaatcgcaaaaaaggcacaaaaaagttcaagctagaagcttcaaaccaagttaaaaactcgtttttcgtgcgtattaggccatagcaagttagcaaaaaaagcatatgcctcaaaatccggtctctaatgatgatgcagaatttattttagaaaataagacccagttgtgtaagtagtacagacagggctgccaagttttttttcaaaataaggacaaacgaggctaaaacgaagattttgacaccaaaaataagattttcagaaagcggctttttacagagtagaaacagttaaaaaagcattatcaaccgatgaaagtgagaaagaaagggaaggaagatccacatttggattggtg

SEQ ID NO: 73516 - DNA, 1176 bp, Heterodera glycines
atggaaacagttggacttacaagtacccgaacatatggattcagtcagcatgaaaaaaaaactaaatttatacaaagtaagtaaaggaaaattcataaataaagaaataaattaataaaattaaaattgtacaacgaaccataaaaagcttaaaagcgactgaattatttaaatattaaaataaaataaaaaatacatgaggccaacaacttccttgacaaagcatatggtacacaatcagcagaagataacaagaatgaaattaaaatcatcaatgaatttaaatacccaaaacacacaatccataaataagaaatgatattaaaaaataataataatatacaaaatcgtggaatttaatcaaaaaaaaaataatttaataaaatgattattaataaaaatgaggtaatttgaaaaatctaaaaagcgcataaactgaagttaatggaaaaattttacaattttgtctttttattttaagagaattaaattaaataaaatttttgatttattagaatctatttatgacctaatggaatttgttttagtttcgaaccccgagactcgagaccgagacccaaaaccccgagaccgagaccaaaaaaacccgagacccgagacttttttcaaaaattttttcttacacacttaaaaattgaaaaaatcaattttttgaggttttttctcaaaaatttttgcttttttcattatttaatctaccatacatttttccttttcatatgattgacttttttacaccattttttgtggtgctctttttcaaaagaatttttcgggaacaggggtccggcggtgccgataggcgccgccgggaaaatttcttttaattttactgcaatttgttaacggattttgtccaaaaatgaccagattttgcgactttgagctactttttttaaataaaagtaagggtaaaattttaaatttttagtgcatttgagaatcccatgtagaacaagagcctatagaacaataaaagttggtacttgtctgttatctgtgtccagattttcaaattttttttttgaaaataaattttttttccgaaaattggcccaaatttgctgtaaatgaaaaattcttttttagaagattctttttttggcgattaattattttgagcatgtattagagaaaagcggattctaataatta

SEQ ID NO: 73517 - DNA, 2722 bp, Heterodera glycines
tccattgtttagcgtcgttttcatgttcttcgcctgtttcgtgccggccatttccttcggcggactgatgggcaaatacaccaacgagcacatcggcaccatcgaggcgctgtttgcccagtgcatttgcggcatcatttggggccttttctcggcacagccgttgatgatcagtgggtgaattggcccaataaatatgccttgtgtaactcattccttttgctttcaaagtgagtgccactgggcccgtgctcattttcgaaggcagtctttacacagtgagtgttttccccccaagtgattttgatatgaacggtccaaaagcttttaaccgtttttaaaatattctatcaaaaaatggtttagggatttttttgccattttaaacaatttttgggtcaaattttgaaaattttataggaatattgggtccgggcggtgccgataggtgccgccgtgggaaattttgagattttttgtcgaaatttcctaatagaatgttatacattttcaattcatcccttaattcactctccgtttttgtcccacagttttgcgaaactctgcagttggacttcctcaccattcgcttctacgccggtctcttcattatgctcatcgccatttgcatcgctgcggtggacggctcgcggctgttggtgtttgtgacgcgattcaccgaggacattttcgccggtttgatctcggccattttcattgcggaaagtctgcatttcatttggcacgtacgttattatttgcagaaaaatggatttttcattttaatttacttaatttattgtttgtactcctccgttcagacgttcaaagagaatccggtggaggattacagtttctacgagaagatccacgtgaactgtcgtcgtcacgtgcacaatcagtcggccgagcagcagccaaacaccgttccattgctttcgcttccgtttgatgttgaaggcattggcaattcaacacggaatcgaacggcggacgccgactcgagcagacgattggtcaacgcactcgccgagataaaagacccaatgggcgtccaccgtttcccctgcggggaggcggagccgaacacggcactgctcaccgccatcatcgtgttctccacgttcattttggcactgctgctgaagaaactgcgcgagagtttctacttgggcagacacgtgagcaaaaggcagagacattatttgataaaatacaaatgtatttaatagctgagaagggccatcggcgactttggcgtgctcatttccattagcgtcgtcactctcatcggtcggtctccccccctcacaattcttcaccatttcgcccattcattcagtccattggctcgtccccgacccgtacctgcaaaggctggacatgcctgaccacatcaactttacaaacccaacaagtgggttcaactcacaattatatttttcgatttcggtattaaatgctttttcagggcgaggccacggacttatcgtcacgccgactttgcccttttccgattggcatggcattgtcgtgtcgtttatcgccgctctgttggtgttcatccttttgtttgtggagaccgaaatcactgagtgagtgccttttttgtgtgtttaacctgaaaccgaaactgttcccctttctccgctttttaggcttctcctcagtcgcaaggagcgcggctgtaaaaagggcggtgggatgcattgggacctcgttctgatgggcatttgcgcctttctctgctccgtatgtaattgtttcgacctgtactcctttcccttgtccatttttgtgtatgtttcccttgtatttgaaggtgttcggtttgccgtggatgtgcgcagccgctgttcagtcattggctcactgttcatctttgacagtgatgaaaaagacggctcccggggcacgcccaggtgacacaattcaataatttcagtttaataaattcactttccgccaaattcttctccaacccctcccttcccccgttgatcattgtcagaagttgactgtgtcatcgagcaacggatcaccaccatcggagttgccctgctgatcggactgatcgccttcggcggcagttacctgcgccttccgctcgcttcactcttcggcgtgttcctttacttgggagtcatgaatttgtgcggcgtgcagctaatccaacgggtcgttctgttcttcatccccgagaagtacttccccgtcacaccgtacactgaacaggttagtgggtcgggtcgatcaaagtgtgatcaaaccggacaaatgatcaattagatgagcatttggaggatgcacctctacacgtggattcaactcatttgtgtgttcattgtgtacacggcaagtgtttgtccaggaaaagcgaaaatgaatgctcgtgtgtttattttgcaggtcaaatacttcaaaaagactgcgctggcttttcccttgtaggcactctttgctttttgttttttttcattttttaatccggttttaagtgttctgatgctgttcatcttcttccgacagatcattctgcccagaatcttcacggcaaaagagttgcaggcggtaagttctaaagggcctttcggttcaaactaaacagcgggacaattagggctttttgatgcccgcattttcttagatcgacggagatgaccattctgacactgacgaatggacttcacgggattactttgacaatccgccaataacagtt

SEQ ID NO: 73518 - DNA, 1421 bp, Heterodera glycines
atgagcacgggcccagtggcactcactttgaaagcaaaaggaatgagttacacaaggcatatttattgggccaattcacccactgatcatcaacggctgtgccgagaaaaggccccaaatgatgccgcaaatgcactgggcaaacagcgcctcgatggtgccgatgtgctcgttggtgtatttgcccatcagtccgccgaaggaaatggccggcacgaaacaggcgaagaacatgaaaacgacgctaaacaatggaaggaggaaccggtcagatccaagccatcgagtaaatggtggtcaattttcaaaactcccctcgtgagacattggaaattggcggcgtcacgaatgtcggacctgaaaacggaggagtatgccattacttatgagtcagttatccaaaattggccctaagttcttaattatgtcacactaatcgagtcaattactccaaatgggcccataattataattatgccttactaattgagccaagtagcccaaatgagccaaccattccctttccaaaatttgttttcccaactgaccaataaaaaggaagtcggttaacaaagtcagcttggagtcctttgaacagcggaaagcgtcgcttccgtttcgtccgttgcgcacttttcgtcccttcttttgtccaattttgttgcgtctgtttctgttcctcgccccctccctctttttgccattgtttttgctgttcctcttggccattgtcctcattttcgtccccatttgctgctaaatgcccttgttgtttctgctgattgttgttgttgttttggtaatgccgacttcccccgtcttcggccgtcgttttcaaattgcctccgtccgtttcgacttcgccgtcgtatcgatgccattcagcgtcaattgctgggaggtggggacccttctcccaactgcgacgaaaggtccttttctttctctctcttctgacattcgatttatcactccgatggaggaagagaaaattattggggatcaatttgcaaatcccttcacaattgacggggattaaaatgagtcaccgttcaattgaaaattaaacattttgcttacatttccttaaagttccaacatttcagttaagcggaacatcgcgccaagcggcaatgagtgccgcctcagtgcatgagcacagattcggggaggagacgcgtgacgacaaaagcggggaatactgcaaatgttgcacaatgtgtggatacgaaatgcgatacgaaaaaatgtgaaaaatgaccccgaaacttattcgcacttcggcgctatatgaaaagtggtctttttgaaaattttttcacttttttggtcaaaattttttgtttaaaaatcgtgaatatactttttattcaccataattgtgctattaatacttaatattcatcattatgtgtaaaaaa

SEQ ID NO: 73519 - DNA, 230 bp, Heterodera glycines
gtatttcagctaaacaggataattttgagagtatttctatttgctttcgcattcgccccctaaatgattttagtgagtttcgagtcataatattttacaactaaaaatggacgtggataggctctcccggggaaaaaataaataaaaaggaaataaacagtctgtttacagttacctcctcgtcaacgacgtcctcacttcttacattgtctaaaaaattgacccctttt

SEQ ID NO: 73520 - DNA, 1201 bp, Heterodera glycines
atgtcaaacgatgtgaaggccaaggttgttcattgtcagcggattacccttttaagtacaatttactattttaggagaacaaatttcgcactgagattaaggttagaccctaccgtaataggaaaaaagtattaatttcaacttttaggaactcaaaacagagaaaaacgaattcgaaaagaatttgaaaaatgcgacggccgaaatggaaactttgcgctttgaaacggacaaaattatgaaggaaaagaaggaacaaaatgaccgccatttgattttcgaacagactgtacggcaaaaattggtggagaccgttcaggttgaaatggaaatttacaataaaatatcgaaatattttttgcccttatttccaaaatatttttaactttgtccataatttagctgaaagaagaaaacaaaaagctcgtggaaatgcttgaacagaccaacgccaaattcgcccaaactgaccatcaatttacacaaaaactcggaatgataaaccacgaattgatcaaagcgcgagaagagtgcgccaaacacaaaaattatacggacgcagtgactgcggaagcaatgaaaacgaagcaggaaacggaggaagcactgcgcaaagcgcacattaattttgaaggcactttgaaagcgcttcaagcggaactgaacgtttgtaattaacagaaaattaggcggagagggttaattaaggggtaattaaataataataatatttagaaggaaagggagcaacgaaaggcgcaggataaagagtgccaaatggcaaaaaacatggtggaccaaatgatgtcggacgtgtccaactcgcagaatcagcttaaggacgcgatggtatccaagtctgcgtacgacgacagaattcagacattgcaaaacgaattaaacgtaatttacgaacaattagtatcgtaaaatgacagacaattaacccattcagcgggaaaaggaccatcacatgaaagtgatggtgaacgcgcagaagcaagtcggagagttgagccaagagttggagaaagcattggtggcttatggcaatttggcaaaacagcagagcaatgacagcgcaaaatgtgtggaactgaacgcacggaaccaaaagatgggcgaggaaatcaggcagaaacattcatttgggacaacggcacaatgccttggatttgggatcatttggactgcgaattaa

SEQ ID NO: 73521 - DNA, 782 bp, Heterodera glycines
atggggactcaggaacaaatgatgcgcgaaataaatatcggaggtttttaataaaaatagggtttcatgaagttcaaaaataaatagggccgcaaacgattgttgattggcgtaatttttttcgggacatatgcaccgaatttttcattaaccaccgtgaacgcatcggtggccaaggtttttttgtcgttgtcgtcgtcgtcatcgttatacatatagtagtttgtcttctcgtaggcatcgtcgttgaaattgacgagacgctcgcagtgaaacgcaaatatgagcgtggcagactcgttgtcaacgacgtttggatttaggcattttccaactccaattactttcctcccactttttgttcactttccgtcgtcttttccgttttgccatttgatctgatcagccaattgacaatatttcacagaacccaattcactttttgatcagagatggcgggctgatcagatgacgggtgaatagttttaaaaatttcataaaaattcttaaaattttcagcttcatctgcggcgactgttgccttttggtgttcggttttcttgcgccttctcagctcggcatcgaaattgcatttgatcagccgccgctttgaccacatcgtcgatgaacatttcaaaatatgcaaaaatggaattgaacaacaaattgctaattcaataggacatttgaagaaaatggcaccaaccaaatgcaaattgccaattccgcaaaatccgttgcccaacaaattcatcggattcggtggcgttcagatcatgtaa

SEQ ID NO: 73522 - DNA, 1303 bp, Heterodera glycines
  unsure (1)..(1303): unsure at all n locations
atggcattgctttccgaccgtttcgatgttttggttgacacgcattttgatggaaaaagcgaattgacaatttggaaagcaatcgcaattcgcaaggacaaaggaccaaaagcgaaactgtctgaatggatcgatggcaaaagggtggaatttccattgccggaccgtccgctgcccaccaaaattcgctttaagagcctttggattaggtaaatcaaaaactatacagaaaaccaatcttcattttttcactttatcagctacattgaccattctgtgctcacatttctccgttccaacaagccaatttgggacagaagtggcatcaaattggaattgtctatatggtcaaacaaaactgaggatgatcagcgaatttgggatgtttttacccgcgaaatttggccactttttgcaacaaacattcggcatttgagctttcataatgccgatgctttggacaatttgcgtcgtcgcatttcacagacaattctcactgatcttgatcaattgatttcaattgattctggtgctctgttacgcgaaggaattgctgacgatggacccaatgcaactgctggccaagcgttgtccaaatggttgcacactccgacaaaaaatggccaaccgaagcaattgtatcgctataattattttgatccacggaatcccgaatgggtcaacgacttcaaagaggtggaccgccatattttcgttttattttaccaattttctttagacattccgtcgtgccaccacttctgtcagttaccatattcaattttatcttcgtgtggaaccaatgccaattgaaccatttgaattggtgaacgaagtgacaaatgagaagctgacattgaaacagagcaaagaatacaatttggttaattggctgttgcaacggtacccaattggggagacggcgccagttaagtggaaaatccgcgaaaatttgggtgccaatttatctatatcagttttgagctgtggcatgccaattattcgggtgccaatttgaacaatatccggtttgagttgttgcgtgtaactagttgcattgggtgagaagcaacagcaatttttgattgtcaaattaattaattttaggccattatcgccgccagcggaagaaaatgaagaagaagcggatcaaagcaatgaaaaataattataatttgagaaatgatcgatctcgccaataggaagctgatttgatgctctcgttttctcaaatgcttttgttgatttcttcattcgattaaaacatacattttatatcaattngaaactactaattaataaa

SEQ ID NO: 73523 - DNA, 2107 bp, Heterodera glycines
ctggacagattcaaagagccgcccgcatttgggcccatgtgcgatttgctgtggtccgacccgctggaggactttggcaacgagcgcaactcggaatcattttcgcacaactccgtccgcggatgctcctacttttacaggtggtttaaatggcactaattaaccaattaaaattggttaattgtttttcggtcattaatgttaattaattaattagtattttttttcttgaagattattgttattattatctgaggcaatttgtcactctaaatacatcaaatctggcatttgcatattatcacgcaatttggcgtccctttgcgccaaattaggtcttcttaattgggcaattagcgtgtgttattcattgagtaattagcgtgtcaaattaacttccttaagaaaaagcgaaggtctttcaaaattttaaaagttcaacaagattagcaatctaaaaattgaaaaagcatcaaaaatttttaatttattttccctatttttaattttcgcgcatttatttttaattaaattttattttatttttgccgcttaaaatttcacttttctaattatgcctctgattttgttcagttatgctgcctgctgtgattttctacaacacaacaatcttttgtccatcattcgagcgcacgaagcgcaagacgcaggtcgaaaaatttgaaaaaatttttgaaaaatttcaaaaaattttccaaccctctaattaccccctgaaggctatcgaatgtatcggaaatcgcaggccaccggcttcccgtcactgatcacaattttcagtgctcccaactatttggacgtgtacaacaacaaaggtgcgtttctttgggggttggccaggcgcgccattgaaaattaaaaaatttttttttgaaatatttccttgaaaatttttcaaattgacatgtcttttttaatttttttctttttttcgcgtctctctctgatcgcttttattattttgatcattccaaacactgatcaaattgtgccaatatttgtcatttttgattaattatgcaccaatctcgagcattccattcaccagtcatttatttttattttttggaattccgagcatttattagttttattttttggcatttctcgcgcatcaatttacccaaacattgttttcggcatttctctagcattcacaatattttagttccatttttggcattctcacacacacaaatttctatttttcggcatttctcgtgcatttgttgttcgaaatttctcgcgcattaatttctagattacattgcttttggcatttctttattagtttcaatttttggcatttctcgcgcatcaatttgcccaaacattgttttcggcatttctcgccattaaatgtgatttttttgtgatttcattttttttcaaattttagctgcaattttaaaatatgaaaacaatgtgatgaacattcgccagttcaactgttctccccacccgtattggttgcccaatttcatggacgtgttcacctggtcattgccatttgtcggcgaaaaaggtgaccaaattaatggaataaatttcgattaattaataaaaacagatcaattcataatttcattaattaacaaaaacagacaaaaaaaaaattttttttttcatttattttaaattcaatcattttattaaattgattaatttaatttatatttaaattaataaataaattaatttttatttaatttatataattccttttttaagcaatttaattttttaaaataaatactttaaatttacatttaatttaatttaatcattaaatttaaatttcttttatgattaatttttgcttttcagtcaccgaaatgcttgtccacattttgaacatttgttccggtaagtggagtaacacattctcattcattttaccatttgttcgaatggttagacttgcattttttggagtttcggcaaaaaatcgaattaaaaaaaattgaaaattcaaattttggggatcagtcccattggccattgaaatttcacacaaattttgaatctttgttccaccgtttttcagatgacgaactgatggctgaaggcgacgacacttttgaag

SEQ ID NO: 73524 - DNA, 377 bp, Heterodera glycines
atgggcaaaaaagtggcaatttggagagagaataacagctcaatcgaccaagcggcgcacatgaatgagcagaaagctgcgatgaaaaacagctgtcacagccaacccgacagcagaaaccggcccttcccgcccgaacatggtccgatggggacaaaaagtgcacgtgaatggagacaacatcaagcaatgcatgtgaatgttctgccgcaaatgaaggaagtcacagcgaagaaagaagagaaggaagagaaaaagacagcccatttgatcagcccatttctctaattaattgttttgtatgtaggcccaacccaaatgtgatcgtatttaagcccgatgaattgttcatttcattggctccgatcgcgcaccga

SEQ ID NO: 73525 - DNA, 902 bp, Heterodera glycines
atgtttgacatggtcctcaaccgctggccgacattttcaccaacaaacgcgtccatggacttcgaacaggcgatggtcaacgcactccgtgcgaaacatccacaatgctcaatcaacttttgcctattccatttggtgcgcaacatgaaagcacgtcttaccgacgagcaaactcatgtaagaaattttattacttttcaaatgctcaagtttagcgtttcacaacggacgcagcctttgcacaagctgccaaaatgatcacttcattggcgtttgtgccgcttgaggaccttacaccggcgctggcagccctagaagatcatctgtcgggtgaacttgagggcgttctcgattggtttgttgagtttaattttttttcaatttcattattgactttaaaggttttaatcaactacgttgggcgacttcgcaacaatggcacacgcactcgtccattgtttcgtcctgaagaatggagtgtgtatgagcgcacaatgagcggcaccaaccgcacaaacaacttcgccgaagcgtaccatcgcacgttgcaagatgcgatcggacacggacacccaacaatatggaaattcatcaatattttgcgtgagcaccagaaagtaatcgacgttgacttcgaacatttccttgccggaaatgctccgccgccaaaagcaaagcgctaccgcgacacggacaaaagaattctgaggattttgcagcgctacaatgaggaaaaagcgcagccgcaaatcgaaaatgatcaccaatatggccaaaaccaaaataacccaaattcgattattgaaatgcttttcgagcaattatcaaatggattgttaattttatttgttaattttatttgttattatattttggataaaactgagatttttaaaaattaa

SEQ ID NO: 73526 - DNA, 1080 bp, Heterodera glycines
ccccacttggcgctttttccctcctccattgtgcgagcagggcgccaacaaaagcaacagttggccaaattcacggaatcggaaatccatcggcgggatggctgcccatttgggagagacggaagagaattgggacaatcgcaacagaggtaaaagagaaggcggggcaaattggaggacgaaaaagcaaagttattgggctgtccattcagacgaagtgccaaagggatgaagccgagcgacgcaagaaacagtttgtatacacgaactcgaggaagtgagccatttaaggcatttgggcgaggggaggggggggggcatagaggctgaggaggtaaatgggtgccattgggggcaggggggaccttggtcaggaaacacggagcggcatcggcaactcattcattcactatcaccgccgatttttcaattttttatttaaaatttaaaataaaataaataaatgattttagagcgaacaaagaggcgcgaatggagcaggggccgcgcgaatatgaggtgagttgagaatgacaaaagtgaacgtaacgaatgaatgccacttgaactgattaattaagtcctgcaaagagattggcattgacttttgtgctcggaccacttcgcatggcattccctttgtcgggtgagaaaaggcattccgtcgtcactcattagcacttttgttgatcattaattatcccatttattaattgtctctttctcgccccagggctcattcgttcttcggtcgtcccttttgggcttgtgtcactaccatcgctttctgttccttcatcattcagacgtatttcacattgtccgattacctcgaatatcgaacaatcatcgaaatgcaactcaaatttgagccgggtttggcactttgcattccattaatttgcctaattttatttgattttcagcgcctttccccgccgcaacaatgtgaaaatgaaatgattttttatatttttaagggataattcctcatttttcagatgcaatttgaacgccttcaaattgagcgaagtgcgcaaattcgaagagattgagcagggcatcaaattgtgggagaag

SEQ ID NO: 73527 - DNA, 1398 bp, Heterodera glycines; identical to SEQ ID NO: 10349

SEQ ID NO: 73528 - DNA, 359 bp, Heterodera glycines
ggggcggcgaaaatccaggttgccgaaaaatggccaggacctggacctggatccaggaaaaatccaggcctggatccaggtccaggccgagctctagatggaagtgtaccgccgagagaaaaatttgaatatttaactgaatcatgttaagattttgcataataatcgcttcataaaactaaaatattgaaagtactagattctaagcctattttggtcctttttatggcattttgtgattagttcacttcttacgaagaatttttttgtttatacatatttttatttacataattcgcaaattttcttacataaaattagcagccctatttattattaatacactgtgttaatttaaa

SEQ ID NO: 73529 - DNA, 325 bp, Heterodera glycines
attgatttgaagaaaggagctcaaaaaacgcatttctgcattaaaaattttcgattctgatgtcactatcggtcactagaaatcactattttggcgacttcgtcactaaaatagttaaaaatcactattttggcgttttgtcactattttttcactatttcgacattttttggaaaattctttaacaaaaatgcaataaaaccaaaaaatacacccctaagaatcgacaaaaaaaatttcaaaaagcactcctaagaaatgaaaaaaattttctcaaaaaggtattttcgtggcaagaattttaattttaaaaattattttttta

SEQ ID NO: 73530 - DNA, 150 bp, Heterodera glycines
atgttttggcgtctgaactgcttggccgccattctattcgcactgtgctgcacctccagcactttttggctcggctccgccactactgacgaacataacaaagcgccccatgttgatcaccataagctgacggaaacgcagcaatacgaa

SEQ ID NO: 73531 - DNA, 388 bp, Heterodera glycines
cggagtaggacaaaacgtcgtcagccgaaacgtcgtcgaacgaatttttcgaccataacttttttctttctcaaccaaattaaacattcttggtattattcgaaagcattcgaaaaatgctattagcctgcaaattttcaaaaatttttatttatacacaaaaaaatcagagcaaaaaaagtttgaattactgggtttttgagttccttctggccataacttttttgaaacttaaccaaaatttttgagattttgcaaattaataataaacacatagagctatcgaacaacaccaacaattcttaatttaattgacagtgaacaaagttatggttcaaaaagtcttccgacgacgtttcggccgacgacgttttggggtgcaccgttt

SEQ ID NO: 73532 - DNA, 532 bp, Heterodera glycines
atgggagaaaacgtacaagcaaagtgagtaaataatgggtggcataacgccagagaaatgaatgccaaattaaaaaaaataaacaaattttttttcagaatttttttacggaaaggtcccagttttggaggttgacgggaagccattgggacaaagtgctacgattttgcgctaccttgccgaaaaatttggtaaattaattataataattaattttatttgtttttaattataaatttaaatttaaggcttggccggcaaagatgaatgcgaaaaggcgaaggctaacgaaatcatcgactttcaaaaggatgctaacactgatttggccccctatttatacgtcaaaatgggattccgccaaggcgatttggtgaacaaataatgcaattatgaaaatttatttaatatgaggagtatttctaattaaattaattaataattcattaataagtatgatttttttaattcattcattaattgagtgagtttttggtgaaaacagtaaaaaaatcggcccaatataaataaa

SEQ ID NO: 73533 - DNA, 819 bp, Heterodera glycines
atgaaagagagaaatatcgagagggaaagaaaagaggagttagagagagaaagagtgagagatgaagaaagagtaagaaccaaagacagtgaaaaacaaagaaaaaagagagattggaagaaaaagagaaggagagtgaaaacagaaaaaaggtactaattgcttttgggtcctcttttttggtcgaaatttttcaaggcgtagccagacaggcagacagtgcactatttccttctttctttttctcaccccttccttttcccacacacacaatgctgctgcacagcagggatgggccgaggtttcgcttttcgcatttcgcctttcgcattattcgcattttttggcgtttcgcatttcgcttttcgcatttcgctttttggcgcgaaatgcgacttttacacccctaagaattggattaaagtcccataaaatttttcaaaattttacctataaattggctaattttcagtgaaaaactgtttataaatgatcaaaatttccaatttttttcccagcggcgcctatcggcaccgccgcgcccccaaaactcctatttgttcttagaaaatggcccaaaatcgcaaaatttggtaatttgatgaaaaactgttctcagcggcgcgccaaaactcttatttctcattagaaaaatgatacaaaaatcacaaaatttgatgattttttggtgaaaatctgtcaacaaattttaatcaaattttcaaaaattttcccggcgccgcctgcccccccttcccaaaaagtttttttggaaaaagcgcgcctcaaaaaagcgttttattgatttttaaatttgga

SEQ ID NO: 73534 - DNA, 289 bp, Heterodera glycines
attttctaagaacaaataggagttttgggggcgcggcggtgccgataggcgccgctgggaaaaaaattggaaattttgatcatttataaacagtttttcactgaaaattagccaatttataggtaaaattttgaaaaattttatgggactttaatccaattcttaggggtgtaaaagtcgcatttcgcgccaaaaagcgaaatgcgaaaagcgaaatgcgaaacgccaaaaaatgcgaataatgcgaaaggcgaaatgcgaaaagcgaaacctcggcccatccctgctg

SEQ ID NO: 73535 - DNA, 210 bp, Heterodera glycines
atgaaaagcgaaagaaaaggtggcctcgttccatcgttgtcgtccaagcgccaacagcaaagtgtccccagccattcggttccatccacggagccttcgcctttagcttctccgtcgttatttttggcatcgcaaaatgtcggagacaagggacatcaaccgccacaaaagcacgtctacagcgaattagccttgcgcaacaattaccaa

SEQ ID NO: 73536 - DNA, 2485 bp, Heterodera glycines
atgaaaagcgaaagaaaaggtggcctcgttccatcgttgtcgtccaagcgccaacagcaaagtgtccccagccattcggttccatccacggagccttcgcctttagcttctccgtcgttatttttggcatcgcaaaatgtcggagacaagggacatcaaccgccacaaaagcacgtctacagcgaattagccttgcgcaacaattaccaagtaaaccatgctaatgggttttttaaattctttcgacccttaattttgacatttgcggtttttagaacccagaaaatttggcatttattttcttttgtaaaaataaatcgtttatgggaaataaaatacagtgatcacgatttttcggaacctttgagcccgaattcgaacacttataaatgcgaataaagtggtaaaaaaactcgtcctttaaatattttcttcaagggaatcattcactatgagtttatgtttcaaatcgcctttttgttccctaaaatggattttaaaatttttaattaaaatattttttgatttaaaaatgagttacactatcgtagcgttctctggacccaaatccaattggatgagctaacacttgaaaatctaaatctggcagatgttggaacagagcaggacatgtcaagcggctgtcagcggaatcgccagtggcattttggggctgaccggcactttgggctttctgttctatttcctttgtgttttcttacaggtttgttttttagaacctatctttatatttcaacaaaaatattatgattttcgtccttttatctgtaaaaccgtcaaccatgaacataatgttgttcaaataataccaaaattattatttctactgcaaattcataaatttaatggtcccattaattaataatcatataattgtttcttaaatgtgtttcttttccaaggcttttgtctggcaatacaagacgggctttcgatggagtgcgtttttcacgagtcgttcgcttttcctcacccattcggtcgttagtggccttttcacttatgtccttttttgggtgtttgtctacggacttgtccatgtttattagctgttttgtaccaacagtatttaattttctttattcgataaaaatgtttcggtgtttttgattttccaaaggaataatttattcattaattattatctatcttttatttgttaatggatgctaattacgttttttaacaaggaatggaatgttctaattgctctcttttgagaagagattttgaggagcaaaagatacaaattgtccgatatgaggcgaagatcaaaggtaagtaatggttaatgaacgtagccaaatgccgtggacattccctcagatttggtaaatgcctacaaaagtctaacgactgagaagcaatcgttggaagttgcgctgagtttactttctgctgctggagaggagaattccgaaaagagcgaattggggaaatcgaatggcgaagagacgggagaaattgcgcaagggacggagaaacgggaaggggacgaggtgaaattgagggagaggggggaatggaccatccaatcggagagaatttaaagacgattttgggccaagtcttggccatttaagacattgttttgcgttttttaaatcacatttgatagttgtccgttgccgagcaaatagaagcactaaagcaggcgatttccacgctgacattggtcaataaacgtaaggagatggagttcaaaaaggacaggcggtcgcttttggtgcgtccgacggactgccgaccattgggtttttatccgcgcttttaggaaacaagagacgaatttcaaaaccgatgcagcgatttggagcagcaactcaaattgctgaaacagcagaacagaagccaacatacggtactcaccagggatgccatcaccgatttccgataccatccatttccaaaaatatcaccaaaagttactgttttcgaggcaaaaacactaggaacgaactcaaactcataacatcctcttttgattattttattttaatttaaaatgttgaagaaaatgaggcaagaatttgagcttgtgaatttaggacactctaaagagattttctccgggtgcagtcaatttcttccttttattcttttgtttttcaacagaagcaactccgcgcggatttggccgattcgaaagaggcatttgaaaaagcaatgacagaacacggaatggtattggccgaacttcagcagcagtacacgaaggagaagaaacatggcgaactgttggaaaaacaggtaaaaacgaaatgggaaaggaaaaagcgaatttggacaatttaaggtcaccgaaatgagtcaaaggttggcagaaaaggacgcgcagataaagcagacggaggggcgactgaagcaaattggcaatttggagaaggaaacggaaatgctgcgcaaaaaggcgcaactgactccgacagtccgagtgataaaagacgaattggccaatgtgaag

SEQ ID NO: 73537 - DNA, 639 bp, Heterodera glycines
atggaagtgcaacctgcagaaaatgatatcaaattgccccgtaagtggatgtgaaaaattgaaaatttggcaatttaaaggtcctttaaacagctgtcagctatatcgagtaagaaaaggccaaaagattactagccaaaaaatggaaaaatatggacaaagttttgggttttcgcaataaaacccgattaattttatatttaaatgcatatattgttatatagaatattgtaagagcttcagttgatccaaaccgggatcttattacaaatatagtgacagcgtatcatatgcattctttagtctgtcatttttaccgtatccccttctgggtacgatatatccccatatgtgcattcacttttggaattgtccggtcaaatctcgatgtgccacccacagcgttaattgattttagcgcactaattacattttgtatttccagcaaaaatcgtaaatgaccatgaaattcgtggtattgcgccggtcggagtgctgctcaacgcatttgagttgaatttgagtgcggtgccagacaaagtgttccagcacgaccttcgcttcgtggctgagtacacaaacacgaaagagggccaagcgaaactgcaggaattggcccgtgggcctcgcaatgagtga

SEQ ID NO: 73538 - DNA, 1215 bp, Heterodera glycines
atgcgtcatcatcacagtcgcggaactcgcaaattcggacgaaaaattgaagatgcggaattgacatggtacaacctgcttctgggtttctctttatatggtggataatattacgattaagcacaaaaatcaattttagtaatggacatttcttttttggccaattcgtttttatcccatcgtttttattatccgtattcgtttttgggccaaaacgcgaaactcgaggtcgaatatgacagacactcctaaatagaacgtagttttgtgaggaaaaaatggatatggtttaattttaaatttttgaacattatgccaaattattagaaagaacttggaattttaaaaaacgagtaaaaacgataaaaaggcgtgaaaagccgaaaaataaaaaatttcttttggaaacattttttatcaaaaaaaaacaaaaaaaaaatctctatttttattttcgcactgataaaccaaatacatttcaagattttctggagtgaattctggggccggaattccgctctctaagaataatttttggtctcgtaattccgaaaatttttgaatttttgaattccgatttccacattttcagccgaaacagttgccgaattttacaaaagttgtctgcttcaaccgcagacattggaaccatcatgagtacgatctcattgggaacatatacgttgcttaaattagaaatttccatctgttcgtttgttgtcagtgctgtgcacattgcaacagaagtgagtcaaaggcttatatgaaaatatgcggcacatctcagttgggctccagcaggtttttggactataacttttttttttctttgtcaactaaatctaacaatcttggtatcccttaagatgctctattagcatgcgaatttccaaataatttgggtcggggtcacttcggcgcggaccatttcggcgccgcaaattttgaaatgctataacttttttatttgtcagttagctttagccaatctggcatcatttgaaagctctatgtgtgctctatatttacatgtaaaaatagaaatgaatgattcaaaaataaaaaagttatgccacgcggcgccgaaaaagccaagaaaaagtaatttttgaggttttttggccataacttttttgtaaaactgacgaatttttttgaaatttacaggctaataaagaatctgaagagctatcgaatgataacaaaaatttttaa

SEQ ID NO: 73539 - DNA, 743 bp, Heterodera glycines
atggccgactccatgttcaagtatgaccaggaggagcagcggatgatacgcaatgtgaagccatgggagcaggatccgcactatttcaaggtcttaaacaattcgaacaaaaaactaaaaatttcccattttcttcggggtagggattggtctgaaatgagtgtcggcttcgttaagggtccctctttggtctttaataagtttaaatgaacccattttactcgtccatgtttaaaatgaacacttcaaatcttttttttattttatttgtcatttgttacatggtaaaaatcttattagaagttggaaataccactaaaattgctaaaaaaaaaatttcggcgacgttttttgattttgatttaaaacgttcgattttgggaccaaaattagttaaaatgcatgtttgttttatgacaagcgagcccaaaactatgcaaaaaattgtttagaggactttttaaaacaaaatctttgccaaaaaggggccagtcaacggctttttatgaaaatctttttaatttagaggggtccaaataacttaatttctcaagcatttcacgctcatttcattaaaatggcttcccgctgtcttcaggaagtcaaaatttcggccttggcccttgtcaaaatggtgatgcacgcgcgcagcggggggaacatcgaaattatgggtttgatgcagggccgggtggacgccaacacaattattgtgctggacgcttttgcgctgccggtcgaag

SEQ ID NO: 73540 - DNA, 674 bp, Heterodera glycines
atgggtgggaatattggcggtgcccttgccgttctccttattgtcctggtcgtgcgtgcgtccaaatcgaatggcatcaagaagctgatggagtacagtataaattgggcagggttacaaaagaacacaaccatccggctacatttggtgctgaattggtacaaataaattgcttctaagggtataagacaaagttggacagattcgagtatcagctgaaaggcttcgccaagaagcaaggagcgaatacccaacttcaaggcgaaatattgtcaatgacgtccgttcgaatttgcctcttaaagttcgagttgcgtctgcaccaggcccttcttgcatgagatggacatataattatcaccgccgaaaacaacaaatggcggtcaaaaaaataaaatatagaaaaaaattatttttattgtttatttgaggaaggcgacgctgggttggatgctgttccaacccgtgatattgtcattcccgatcagttggttgatcgagtcatctacaaccaaaatctccaaggaagccgaatgattattttctgttcacaatttgggattaacaccctccgggcctacagagacgaagtggcagttgatggaacgtttgaagttgttagaaaagtcggctgtcagataaatgtcgatttagacgagtccacgtggttttga

SEQ ID NO: 73541 - DNA, 1144 bp, Heterodera glycines
atgtcccacaatcctaatgaagcggagagagaaatggaaaaagcgatgtaatattctaaatttcaatttcaatgccaatcattttgctttttcagcttcatttctgccgattgttggcttgaagtgttcggtttgcttccacgctctcaacttggcctcggaattgcgatgatcagtcgccgatttgaccgccgcgtggacgaacatttcaaaacgcgcaaatggacattggagaaccaaattgttcaacgattgtcaatcccttcgtgtcgtcaatttctatgacggcatttgccccgaatttccgctcgacgacagtgccaatgcgtcggattgccaagcgttggcaaaatggctgttcacgccttgtcacgacaatttgatgaaacagctctttgtccgaattgacaattcaacagtggagcaacaatggttggaaacagtcgagcaaatcaaaacggtgaatagtgatttttccgacatgttttctttcattttttttgtcttctttttaggcattttccatcgcttcttcttctgttgcttttggcattttcgtcaactttcgtccgtcctctccgattgactccgttgtgttgcagcagacgatgatgaaaaatggcaaaatgcggtcatgaatgaattaactgatggaaacaaacaattagtgcttttcatcggagacagtggagtcgacaatgggtgaaaaattttaaaaatctcagcaaatttcttgtttaaattttgtttttgaagtcttctcgatgctgcctgcttccgctgggccgagtggtgatcagcagaaatgaatttgggtgattgatgcgattatgtgacctttattatatcggactttgctatttaagtgttgtgtttttgatttttgcttatattttaaaaaaagagcgctgctatacatacaatagtcgatgcatcatcacaacggtaatactggagaatcttgcggaccgggtcgactgggcgccgccgactgggcgacgccaactgggcgacgccaactgggcgccagctcaactgggcgccgccgactgggcgccaagacccactttcaaattccctttctttaggcacaaaaatcgcaaaataggtttaaatagacacaaattttcgaagaggcaataaa

SEQ ID NO: 73542 - DNA, 465 bp, Heterodera glycines
  unsure (1)..(465): unsure at all n locations
atgccaacaaatttggtggaattgagagagcgaatttgtgaggagatcggttacgaaaatggcacaatgaaactcatacacaaaggttaatgattaataatttaaaaaaatagcaagaaattgggctctagtgcactttatgagtccaccaatcaatgatttttatacaataactttgttcatgctcgaacaaaccctatcttttttggtatcattcgaaagtacaaagtctaagtaatgtaataatacgagaaaacaagaaaaatctaacatttcaagaaagttacaaacgaaaatattaagtatttacttaattaatcaaatttttttggtaattgcctgaacgctgcgattttatatattttagcttcgttagactttgtactttcgaatgataccaaaaagatagggtttgttcgaacatggaaaaagttattgtataaaaacccgnggattgtcaattga

SEQ ID NO: 73543 - DNA, 676 bp, Heterodera glycines
atgggagaaaaatttgaatttggagatgtgagtagataatattcccaatcaaattatcgattgattttcgcccgataatttgattggagatttttttctctgacatccccttccacaaacccaaacctattggatggggttgagaaagagaaaattctgtatttgctctaattatcccaccaatctccattaatccctcagtctctgaggagcttaaaaaataatcccccccccccccaaccccacgggggggggataattagatcatatacattagttagataaagagagaaaatagtgagggaggagagagtgtgcgatagaaaaataggaaagtgagagaggagcgagaaagagagagagagaatagtgagagagagtgtgcgagagaaagagaaaaaaagaaaagaattttgttaaagaaatagagaaaaatcggtagccattaaaaataaattaattgtgtcgatactatgattaataaattttgcagatttgaatgtttatatcatattataaaatatgtttaatttatttatattttcaggtaataaccataatttttggaaaaaaatttaagcgcataaacaagcgcaactttaccaatgcgtttgtggcgcggggcgccgtgtttgccaacgcgttggtttataaggtttgcaataattatcattaa

SEQ ID NO: 73544 - DNA, 535 bp, Heterodera glycines
atggtgttgctgctttttgagggttgcgtcgtttgcaaaaacgctaaaatgactgcatcgctgtcacttcgccaatacatgccacaggtactcaaaaacaaaacatttatttatctatttttataattttttcagggactgttgaaagagacgtgtgcagcatttgttaaacggccgacgtaaaaaataaacaaataaataaataaatatttgttttctttgttttttagcaaagcactggtgggagtgacggctgacagctttgcttacggtattacgctgatggaacggtacggtaattatgtgcagtaaagcacgcactattattgtaaaaattgatttttgtcacataaataacacaaaaaatttcaattggaaaaagaaaaaactgctgaacaaaaaaaatttttatttgccaaaaattcgtttttttagtctctgtgctgagaagaaaaccaccgaatccgagccaaaagagaacgcaaccacaccggcccccgtatatgacatggaaatgctcaagtaaaaaaataaa

SEQ ID NO: 73545 - DNA, 2190 bp, Heterodera glycines
atgaacaagtggtctgcacttgtgtaagttaattggagggaggggtggggcttgaaccatggccaaatattaactctctgtccactttcagtctgttgatcgcgctgatcagcgcgctggacagcgctgttgttcgacaacagcgcgccgccgacgctgacgcatcgaaaccggaaccgaacaacgaaaagccaggtaaataaaaatgaatataacaaaaaaaaaattaatttaataatttgatccaggaattttggactcggacaaagcaaaaccggacaaaagccagggaacagacacggaaggaaataacccggaaaagccaacggaaagccagaaagtggaagaggatggaccaaatccgaagaagccaaaggaaagccaggaagtggaagaggatgaaccaaatccgaagaagccaaaggaaagccaggaagtggaagaggatggaccaaatccgaagaagccaaaggaaagccaggaagtggaagaggatgaaccaaatccgaagaagccaaaggaaagccaggaagtggaagaggatggaccaaatccgaagaagccaaaggaaagccaggaagtggaagaggatggaccaaatccggacgaggaccagctcactgaaagccaggaaacggatgaggaaggacaggagaagccggagccaaacgatgttgaagaatcggcaccggaaggcccagaaccgccactgttgaagcacaaaacggatgcactggcgaaaggtgagcaatgccaatatgaactgtacataaatatgtggaggacataattcaatttttttttattaaggagagcccaactcacggcagaagcgccaaggaggaaatcctgctggaggaggcggtggagaaaagactgctggaggaggcggtggagaaaagactgctggaggaggcggtggagaaaagactgctggaggaggcggtggaggaaagactgctggaggaggcggtggaggaaagactgctggaggaggcggtggaggaaagactgctggaggaggcggtggaggaaagactgctggaggaggcggtggaggcaatgagacaggtaattggatgaattcaaaactgcacctctcctcccccttgccccgttcaatatgcccttttacggaagcacaaaatttttgaggctgcttcaaatgatccttcatgtaaaatatacgaaaaaaactcaatttgaaattggggaatttatgagtgatgagtgatggtggtggtgaatgaacggcccaccagcagcttggccctttgtttttgatagcacacacaatcactggtttaatcattgtgttaatttgcagtcccgggaccagcgagtgtcaatggaactggaactgaaacaataaaaccagacgtaccagtcgcaccaagcggtcaaccgggagttgcaccaagcggtcaaccgggagttgcaccaagcggtcaaccgggagttgcaaccggtgaaccgatacccgaaccgaccggtgaaccgaaaaaagacctgccgattccggataaatttgacctgacactgccaggtaaatgcataaaacattcattgttcgtcccgggttcgcattcaatcattttgacctttgcatgttcagggcatatttgcctctttttttgtctgtaaattatttattttttgttgtggttttgagtgaaccgggcaaaaaattttaaattttctatgcttacatatggaaaaagcaaatagcaatttttacccgtttcaaataaatgtgctatttttatgcgaattttgggttctcgaaatttttcatttttaaatgtttttctgtaaattttcagcagcttgaaggccctatatattttttaattggcatttttttagcatattttgccccaaaaacatgcaaatctttgaccatttttttttgtccttgtgtacacaatcgcaacttttgtgtactgtccaactttgtccaagaaatgtttgactttcttctccccccccaaatttaatattaaaacaataaaataaattaaaacaatttgaagaggtggacccgtcgaattcatcggccaacgcaacgagatatgttacacaaatcgaagggcgaaaaaatgtctccgatgccaaatttaacggaaagacagcagcgtgtactccagcaggggtgggcaaaaacaaattttattttaaataaataataaa

SEQ ID NO: 73546 - DNA, 714 bp, Heterodera glycines
cctgtctcattgcctccaccgcctcctccagcagtctttcctccaccgcctcctccagcagtctttcctccaccgcctcctccagcagtctttcctccaccgcctcctccagcagtctttcctccaccgcctcctccagcagtcttttctccaccgcctcctccagcagtcttttctccaccgcctcctccagcagtcttttctccaccgcctcctccagcaggatttcctccttggcgcttctgccgtgagttgggctctccttaataaaaaaaaattgaattatgtcctccacatatttatgtacagttcatattggcattgctcacctttcgccagtgcatccgttttgtgcttcaacagtggcggttctgggccttccggtgccgattcttcaacatcgtttggctccggcttctcctgtccttcctcatccgtttcctggctttcagtgagctggtcctcgtccggatttggtccatcctcttccacttcctggctttcctttggcttcttcggatttggtccatcctcttccacttcctggctttcctttggcttcttcggatttggttcatcctcttccacttcctggctttcctttggcttcttcggatttggtccatcctcttccacttcctggctttcctttggcttcttcggatttggttcatcctcttccacttcctggctttcctttggcttcttcggatt

SEQ ID NO: 73547 - DNA, 2666 bp, Heterodera glycines
caaaatcgataattacaaatgccctaaaaatgcaattttttttttcattctgttgcctttgtcggcatttttttttaattaaataaattgtttggcccgcttactttgtttgggttggcaaagtgttgtggatttttgagaatttttcattattcatttttattggattatactctaaaatctcgaattgttagttaaattccaatggttttggcttttttaaattgattttaaacaattttatacaatttttaaaagtatacgatatttacagtatctcggcgcttgtgaagtgtttgaatcgcgtggcatgtccgtgtgcgaaagtgcgcttcaacacctcagggttagagcataattaaattttttccaaaattggcaaatttaaaataaataattgaaatatcaaaaaaacaaaatttttttctcttttcaataaccatttaaaataatttaattcaaatattttattatttatttgtcttcttcgtaaattgcttatttcttttgggtctattttaattcagttttttaattatttaaaatataaactattttcaatttaacatggtcaaaattccaatctttgacaggcattttttgcgcctaaaatttgaagtttatggaataaagttaaaaaactgacaaattttcgaaaatcaaggacacttcggattttcaaggacgtccttgtcacacctatacatgacaacaacaatcagtgcctaattatgcaaaatcttaaggcccgaaagcgggtgaccaaggcattgttgtacatttccggggacggcatccgtgtggttgatcaagaacacaaccgaggactgatcgttgatcaggcaggcaccgacaattaaaaaatctaagaatattttatatttaaattttaaaagttttgcagacaatcgaaaaagtatcattttgtgcgccggatcgaagcaatgagaagggcttttcatacatttgccgggacggcgccacgcgccgttggatgtgccacggcttccatgccacaaaagattctgtaggtactatagtttatattgaaaaaaattattatttcataaaaaagcaataaagaaatgagaatgttttacaatttttaatgaaatatattttttatactaagtaattaaataatttcttctaaatatattgcaattttatgatgttaaattcagctatattagccataaaataataaataatatttttcattaattgttttattattaattcattccgccatagggcgaacgcttaagccatgcggttggctgcgcgttcactgtctgtcttgagaagaagcggaaacgggacgcagaaacggcggcataccgtactgcacaagcgcttgcgcatactgtggaattggactcgggcattgaggacaattgtggcggaggtggaggagaatttgcgaggcgggaaatttaaaaaatttataaattggaatataaaaattttcgaaaagttataaataaaatcgaaatgagacaggttaagaagactccaaggaaaaaattgtggttttttactgaaaatttccattttccttgttgttacccccttcaatacttattatacctaacaaaaaatttccgaaaaagatgcgcgaaatttttgcgaaaatccacgacaaattggcgcttcattaataatttttcaagaaatttttccaaccccctaggaattttttttttaattttaattttttttagttaaactcaaaaaattagagcctttaatatctcactattaaatttctcgtatttacagaaccaatcaagcctacgggtcgtttcgccaattgtcgatcagtgaacgccgatccgatccacagaaggcaattttggtggatggaaaagtgcagcaaacaaataattcggtgacagtgtctaacaggtacagttagtgcaatcattttttgaatttgcgggcaaattggcgaaatgtaattccttcaaatccgcaggcacagtatgccgtcaataccaacaatgcctacggtaacatcagtgttgaatgcttcgacaccacggccaagcggcaacccgagcttatttgaacgatcggtaaggtgtttttttgttttttaatgttttatatttttgtaaaaaaataaaatttgactaaaatttttgagagaattgtggaatcccaaaaatgcaatctatccaaaaaaaatttccttgaagattttgtctgaaatgctttccaaagttttttttttgggcactaagaaagtgatttttaaaaaacaaaattattcataataattcataatatatttaaaacgaacaagtttagaattttatgaaatttcaaaaaaaaaatcaaattttaagaaattctgataaaatgcaacccatttaaaaacttaacaaactttgacaatttagggctcattgcgtgcccctaactcttcttcaactgttgttgttgttgctgctgcaaatgccaatgataatgctgttgctgtcgaatcgcaacaacaacaatgccaacaacaaattgttgtttcccaatttgcccgtttttgttcattgcaaccaaaaaataatatggcaaaacggtttggcacaatgccaaggatgtcgctgcacaacgagccaatttgggagggcgacgtggaggaagaaattggcattggcactaccact

SEQ ID NO: 73548 - DNA, 679 bp, Heterodera glycines
atgggtaataggggaggcaggaagagctggaaatagtaagttcgggaaatttaagggtaaagaattgggatttttcccacaaaattcgccactttggggcttttttgactaaaaattgttattacaaattttgtttttttctccattttttctgcttttaaagtatgtaaatttatgagggaatatgaaaacgcataaaattttttaattttcgtttttccattcgtttttttattaatttttttttagaaattcaatttatcgaaagattttaaaaatagttatgattttttaaaaatcgttggtccctttcgcgaagcaacttttccattaacttccagctataaaactgtgttaaaattcattttttccataaccgatgataatccatctatatcagacaattaaggaataattaatcaatccatgataattagcctagccagctaattaggtgtcaagctgggtggttaattgaacctgtaattgatgacacccgcttgagccgcctttacgaaatgaacgccgaatggagcgccgaattcggtccatgccacggtttaaaaaatgcctaaaatttgttgcgtaaaattaaatttagtcagattaatttttaaacattaattggaaggatatagattattttaaatattttaattcgaaaatttgcaaatttaaa

SEQ ID NO: 73549 - DNA, 858 bp, Heterodera glycines
cgaacattcaaatgaaatgcattgacagcactgaaaaaggtgccattctttgcaatatgatttatccattgtcaatatccaacagaaaattcatttggcggtggtgccgaattcggccattcccttttcgtttctggcattgaacagcgtttttcggtgttcgtttcgcccggcacggcctctctcacggcgccgtcccttttgaaactgtcgttagtccaaagttcagacggttctattgaatttttggtaaatacattataaaacaaattgtaacacaaaacctaaagaattttgacggaaattggaccaccgaagcgcaatttctaatccctccgcttgacgtggaggaaaagcatcgaattttggtacgaatgtgcaaaggaatcgaccgattggagacgtaccaatcggaacagaaaaacgaaggacaaatcgaagagaaatgcgaagtcatccgagttgcagagttaatttggtcactgatattttcagctcaaattcgaatggttcgctgcttctgattgcaaatctctgcttagcgatgattttctgatcatccgccgctcttttccgatcacttttcgcccgattatgcttctctcatggcgcacttcttttttgtccgatcgcactcttttccatgtggacatttctcgcaaggattgtggtgggcatatgcttttttgtcttcatttgcttgtcttctctctctcccccccctctctctctctctccccctctctcactctctcttacttgtctcgccgttcattttgccattccttcagtctctgctgctttcgctgtcgatgtgttccccacttttgtctctctcctttctcttaaaactgattg

SEQ ID NO: 73550 - DNA, 1406 bp, Heterodera glycines
atgttcgggttagagattcggaattggtcgaaatggagtcccgattcgtgctcatttgtcagcgccttaaaacacccctagaaaagcgtttaaaaaatttttagaaaaaaataattaattaaaaaatttcgggaccaatgatcttcacaattgcccgctgcccctcccttcccctaaaatttaaattagaattgctgcaactgttgtctctgttcactcactattcattctagcaaaggaacaaaatgataaaggccattttggtgttcaataaccatggaaaaccacgactgctgaagttttacacacaatatgtatgtaattattctattcttcctcttttggacattgtgccgaaattgaacttttgcccattcagagcgaagaagaacagcagcaaattgtgcgggagactttccagcaagtgtcgaaacgtgacgacaacgtgtgcaactttttggagggcggaaaattaattggggggtcggactgcaaattgatttacaggtaaatggtcctgccgatggatggttgggttaattaggacatcctcaaccattttaaatgaaaataatttataaacgaattctccgcctataattttaaggcattacgcgacattgtactttgttttttgtgtggacagctccgaaagtgagttgggcattctcgacctgatccaagtgtttgtggagactttggaccgatgttttgaaaatgtgtgcgagttggatttgattttccatgtcgaaaaggttgccaatttctgcgttttcatccttcgatttttttccttttcggtccatcacattttaaacgaattggtaatgggcggcatggtgctggagacgaacatgaacgaaattctgctgaggatccaagagcaggacaaaattgagaggcaagaggtagcaagcaatttcataaagaaaacccggcaaaatgtcaacttttcttttcatttgccatttccttaggctggcatcgccgctgcccccgcccgcgctgtgtccgctgtgaagaacatgaacatttcgcaacaaattaaggacctgcaaattgccaggattgccctctaaaattgccaatttcaaaagcccattttgaaaattgctgcccttttccaattcatttgtctctctcccaacgtgacattggccgagttgatcgggtcttacaatggaataccgtacaataatttcttatttacttatgtaatttcaaaatttaattcattaagaaaaaaaatagttttttcagaattttagtttttaaattttataagcgaaaccttgtacaaatatcatgacaccagttgatcaccaagttcaaactgaaaaggtcaatttgatgaactgacggatcaactttaaccagttttcattttattttatttttgcaattta

SEQ ID NO: 73551 - DNA, 1790 bp, Heterodera glycines
atggtcaaatacgaacccaccgaagacccaaaacatccggtgagagagacagggcgaaggagagagagggggagggaaagaggaaggagagagagaatggtgcataagacagaggggtaagggtgaaatgagagacagtttgagaccgagacggggaagatagagaatgagagattttcagggatttggcgaccaacaatacattgcccgccgggctgaactgaatgcgttggccaatggttttcggcacggcgattccctccctttcatttgctataccgacgaagaaaatgtgaaattcaccccttaacgaactcacgaaacataaaacttcagaaaacttggcgagttgcctatgaacagcttaaggaattgcgcgagacgcacacatgcgaagaataccaaaggaacattagagaaatggaaagagaagagataatgtaaaagggggagggagagggggaaagacggaacattcgttcacagaacagccgaccgaattccgcagctgcgtccgctgagtctgtacatccaaagtgggcttccccacccactttttgctcatttgtcagtccaaattctgaagaaaggaccggcttcgaactccgtccctgcggcggtttgctctcggctcgcgactttctcgccagtttggccttccgcgtctttcaggcactcccccaacagaataacccataaaaaaatgttgccattcaggcgacgctttacgttcgccatgccaggtgctccccctccctctccttcctcatgccctacgcgccaatttctcccccccccccccgattaattcgaatgtaaagttttgttgagttcgccgcaccattgccctgagcccgatgtcatccacgaagtgctcgggcattgtccgatgtttgcggtattcgaaggcattgacactttgtgtttaattaaagctgcaaaaggacgaacatttggcgcaaatgtcgcaggaaatcggcctgctttccttaggcgccagcgacgagcaaatcgaacgattggccaccgtattaattaccgtattcactgccattctaattcccccccccccctcttcaggtgtattggttcatcgttgaatttgggctgtgccgacagaatggtaccgtaccataggaatgggcccttgaattggctttctgttcttaattcccaggacaactccgcgcaatcggtgccggccttctctccgcgtttggggaactgaaggcattgccaaccattagaccaattctttaattgttctgtttttgcagttcgcctgctccgatgggccgggccatgaacttttcgtggccgaattggccgcgcaacggttggccacagggaattggcattaattgcagcccaaaagggaggattacactaaattctctctgtttctcagttcgtacgtcgactcggactatcagcccgtctatttcgtggccgaatccatccgaaaagcgatggaaagcatacggtaaatgaaaaagagcgaacgcccccgcctcaccagccgaccaatgaatagtcggcgttaaagcattgcactaattaatgaggtgcttttcagggcctacgccctttcgatgcgtcctcagagaattaacatttaccacccattgccacgctccattcaaagcgttccaagccacgctctgatcggaaaaagaatgggccaattgcaaaaggaatgtacggaactaagccaattgatggacaaaatgaagacggaagaagagaagggaattataccggcggaagagagaagggcagtgattgactaa

SEQ ID NO: 73552 - DNA, 671 bp, Heterodera glycines
atgtcgcggttggcactttattcaatcaacggcgaattgctcggaatgcacagtgagcgccaacgcacaataacaaggtacagtttgcatgatacaaaaaacaaaggaaaactattaagcattgccataaccgatttgcctgaaggtaccgctgttaattgtgtggcaattggactccaatcggggatgatcaggtgggagagaacatggacgttcctaggttttggactggatatccagggctttttggctcgtatacaattcgtcaatgaacaaatccatagactgacggattgccatgaccccgtttcttgtttgtgtgagattgagtacaacaatggggaaataaatggtgatcggtcaatttaattttcaggctgatcgaaatgtggacaatgactgtagtccgtgacatttcatttcaatccttccattttcccgtcctcaggtggtcatttacttcccaatttggcatttgccttttcagtctcctttttgccaacgaatcgcgccgtctttacgccgcctttgccaattccaacgtcgttctgtgttggcaggtcccttcactttatggcgctgccagtgaagaaccaatgactgtgagcagagaacggccatgcttcaaagtgctcaacccttttaaatgcagcgactcttttcccttgtaa

SEQ ID NO: 73553 - DNA, 1223 bp, Heterodera glycines
atgagcccgcagagacagacacagatggacgagggtccggacattttggcgttgtttgttggttttggcatttcggtgggttcaaatgcggaagatgaggcgaatcgaacaattgcaagggcatctgaccataagtccgaatctaaacaaaaaaatgcatctatttttattgtgccattgtgcaatttgttacttgccattgtctgaatcgcgcaaacaattaaagggtcgtctttgttgctttccacgaaatctcttcctcggtacgtctattttaaatgttaaaaaatactgattgtgaagaatattttgaacttaccgctggatggaaaacattcattgctcggacggcgttttcaccgttctgtttgaaaccaaatatcaaatcaatccaatggtgaagattggtcgtgacatgacggtctaaagggaagaaagaaaaagcatcgcttttccagagaattttctacacagaattaacgtactttcaagtgcgtgacgatggattagacaaaactgaaaatgcaaacatcaatttttaaaaccaattttagtataataaaacactaccaaacggtgatctccacgaggacaccaaggtggaacttgaacatggtcaactcggtccccagattgccgaactcccaattccaactcgtcgccatttcgtagcatttcatagaggtaaaagaactcagggatgagttcctaagcatttgttactttcttggataaaaaaattagtttcaacaccttaaaatctgtggtcgattctgagctggaaaggcgccaagtcgtgtccattgagctgaagagacggtcgggaatgtcgaagttattgtctggaatataaccaatcatttgacctattttgttaaacgattttactgctgaccttgatattcgagagcaacggaagtgtaaggagggacacggaccaaataatgggcaacaattccagtattagactgaaggacttattgaaataaccaagtgaacacccaggaaataacgaacgtaatgacttccgtaatgatacggcccaaaacgaacggttgaaaaaccactttttggggaagaaccgacagaatcggcactttggttgaatcggtcgtactcttccgccaaactctggtaattttgtgcataaactttctccatgtgcgcatcttgaattgccatcggctttgtcaaattcctaaattgttgacacttaattttta

SEQ ID NO: 73554 - DNA, 3998 bp, Heterodera glycines
atgtcaatgctcatggaattgaatttggtttgttttgcattacattaactcaaaattgcattctgccttttcaggatttccaatacgctctgaaaatcggtctccatgagttgtgccttttgcatttcacttccatcggcgacttcgacaccgacttggatttgttgatcaaattcatgcattccatcaatattcggtcgcctcttgcaaatttgacactggaagagattggctcactgacagcagacgaaattttgctactgcaacaattttctgaaataaaaagccaattttatgggaaaatgacggaaagggctaacgccgcttgggacagggaatgcaacctgctcaaattcactagcgatgtgagcgatttctgatgttattatcgggaccatttctgaacttttggtcttcccctgctccgcaattcgtaccgtttaaatttaattttagcaagcgatcactttgacatgcgaagtggcagaacttcaaaatgtacctcgacgactgctggtcaattggaagaaagaatctcaaagggaatggtcgcgcgctaacagaacattagcacatttagtggtaagtcaaatttcagccagagctgcaaatgaatatatttcaaatttcaatcacggacccaaaaaaaatttcgtaatgattcgtgatttggtaagggaaatcaggctgattttatttgatccttatagaaaatcttttcaaaacattatttaaattaaggataggatatagatcatggaaaatcgcaaaaatcttgatgtttcatagatttaagccgcacttgcaaattctattcaaattcgaatccctttcatataaaaaaataataaatttaaaaaaatgctcattgtttaaatactgtaaaattatactatattactctaacaaaggtagaaaaatattcagaaagagctttgtcatccggaggcgccatttttctctccatttttttggcctattggccgtgtccttaacacaaccgaaggaccatcgcgtgagagacgacgcttttccgacgcacattatttgtttccactcaaatttcttaaaagtgagcgaagcaaagctgttgaaagtcttcacaacgcaccgatgccattggacaatttattagtaatggcacatttcttactcttatttccacttttacaaatcaactaattttttcagaatagcggtgacatccaacaaagtcatgccaatgggcttagggacatggaagaccctgtcagcatttcgtttctgtaaaaggttaatccattttgatttagatacgaatgagcatttctgccacacttcttcaaacagcgtttgaatgttccggtgatttggtgatttccgaccaaaggctttactttttgggtgaaagtgctaaaagtacacaggtttggatgacctttcattgaaatgctttatgatcattttgttctaagaaaggcgtcgttcacgcgcccgtcacttattcgtgggattatgaccaaatcaaagagatgcacatccgtttttatcagttgaaagacactgcgcttgagctgttcaccaccactggcgatgcctttctcgttgttttcgcatcggaagaagtgaatgatggaaatagtaaattacattcggttttatttttatttttaggatcgcgccgttatcctccgaatgtttcgaacttttcatttggataaactcttcgtggaccacaaagcgcagcttaagtccgccacacaaatgtggcgccgtggcactttgacaaatttcgagtgagaaaaacttccaatttaatttcgaccctttgctttttagataccttatggttttgaataaattggccggcagaactttcaacgatttgatgcagtaccccgtctttccgtttgtcctttctgattactgctcggacgcccttgacattgccaatccaaattcttacaggtcatccaaattttacacaatttacagtcatattttccttccatttgtcaattcgttggttcagtgggttttctcgctcttttaacaaatattgtcggttcgattcccttcaatttcgtcttgttttgttgagtatcctataaaacagcctatgatgattttcaggagccagttctgcttctgaagcgatcattgttgaagcttttcctatctgaggctgttaatttgttgctttaataatattcgaattatcctttttttaatttattaaaaattaagtgtcaacaatttaggaatttgacaaagccgatggcaattcaagatgcgcacatggagaaagtttatgcacaaaattaccagagtttggcggaagagtacgaccgattcaaccaaagtgccgattctgtcggttcttccccaaaaagtggtttttcaaccgttcgttttgggccgtatcattacggaagtcattacgttcgttatttcctgggtgttcacttggttatttcaataagtccttcagtctaatactggaattgttgcccattatttggtccgtgtccctccttacacttccgttgctctcgaatatcaaggtcagcagtaaaatcgtttaacaaaataggtcaaatgattggttatattccagacaataacttcgacattcccgaccgtctcttcagctcaatggacacgacttggcgcctttccagctcagaatcgaccacagattttaaggtgttgaaactaatttttttatccaagaaagtaacaaatgcttaggaactcatccctgagttcttttacctctatgaaatgctacgaaatggcgacgagttggaattgggagttcggcaatctggggaccgagttgaccatgttcaagttccaccttggtgtcctcgtggagatcaccgtttggtagtgttttattatactaaaattggttttaaaaattgatgtttgcattttcagttttgtctaatccatcgtcacgcacttgaaagtacgttaattctgtgtagaaaattctctggaaaagcgatgctttttctttcttccctttagaccgtcatgtcacgaccaatcttcaccattggattgatttgatatttggtttcaaacagaacggtgaaaacgccgtccgagcaatgaatgttttccatccagcggtaagttcaaaatattcttcacaatcagtattttttaacatttaaaatagacgtaccgaggaagagatttcgtggaaagcaacaaagacgaccctttaattgtttgcgcgattcagacaatggcaagtaacaaattgcacaatggcacaataaaaatagatgcatttttttgtttagattcggacttatggtcagatgcccttgcaattgttcgattcgcctcatcttccgcatttgaacccaccgaaatgccaaaaccaacaaacaacgccaaaatgtccggaccctcgtccatctgtgtctgtctctgcgggctcatttcgggaacagtttcactccgtcgtcggtgtgaaatggggtgatttcgtaggcagtccggaacatgacggcttctatttctcgaccccatcacgatttttcacttcgggaacaaaacggtgcattataactttttaatgattttttaatgcaaacgtccaaatcgaatcggtgttcagctctctccgtctttccctggtgcattgtgatcagaccacggcaatttgctacggtattcccgaatcgaccgaattaatcgtctgttaccgaccggacagaaaaggtgtgatgctttggcctttgtgtttatttttccgtttcttccaagacccgctacgtctcaacaatgaattggcattgtgtgccgttgtcgcttggggcccttccaattttaccgacaatgttttgcgcattaaactcgtctacgctggccattctagcaaaaggcatttccaactttcgccttcatccatcgatgtgccgcaacagttttgggagcgtctcattgacttgcaatcgttggaactggtgtcgggttgcttattcgtccgcagccaatag

SEQ ID NO: 73555 - DNA, 1113 bp, Heterodera glycines
atgtgtgccgacgttttgtaccattgtttgactgttggcattgtgccgcgtttgagtgtgagctttttgtgagttaatttgtgcaggaaacagcaagaaagcgatagtttcgagcagcaaataacgcgccctacgcaaaaaggacgcacttcgaagaatattctgccagtcgtctattttcttaaatagggaatttcagccaattgtgaactgatcatcagactgatttggacaaattggcttttttctaagttctattcttacaatggacgcttttcgaggcgacaaacagcaggcgcagaagagaatctccaagaaagtcgcgagcaaagtttcttcggcttccgatgccaattggggcgagtcgaaaaacagaaacaaattgcgaaccattgtcaaggagaagagaaggcgatttgcgttctcttcgttagacgcaaagccgggattgaacacagaagcgacggaatggaagccatggggtcgaaaaaagtcaccaaaagctaaacggataatgaaaataagatattaaattgagtactggtacggtacacgaatcggcagcagggaaccattgagaagtactctgaaccaattcaaagtcggaagactcggccgaagatgaatattctaacaataagtcattttaaaaataacaaataaaattacagaggacaacaaaacctcgccgattcccgaacatttctcgtcgctttgaagcggccaaactcgagaaactgctcggcgtccgaaattggtcagaaagtgtggaacgaagagagtcaatccaacagaagagaagttggcaaagagcttgacgaagcaacggattggaagaagaggcagccgatgggtcgaaataaggctaaaacattgataaacaatgttaattgattggtatgacatcaaaaagaatcaccgtcaagtgatcgggggaatggctgctggaagtgctatttgtacgccctgaagaggaggtggagggcctccgatggccaaattcatctgcaaattgtccttgtcctccgtccttccacaaagcaatgatgcataaccaaacaaactcttcacaagacgaataggaaaaagggtcactgaattgaaatggcaaaa

SEQ ID NO: 73556 - DNA, 1118 bp, Heterodera glycines
atgccatcatcaacaactgtgatgcaagcagtgccaacgacaacaacaaggagaacgatgacaatgacggaactaacaacactgattgtgaacaacaacaacaacgctcaaatgataccgctgaatttttgattgattaattgttgatgttgtgatgatgatcatttttatccttctccaccccatttttttaaaactataatagagcaaaaatatacatatattttttaggaggaattatagccatatacaatatataattatttatgttttatttacatattttttttcttactttgctcataaaaaattttattttttgtgcaattaaaatagctcattaatttcagaaaaaaaagctataacctaaattatggatcgaaaagcgtcgacctcgaagaagcgcaaacaaacggagaaggcccggagcaaacaacaggaggaatgaagggtcagacagttttttggtagtactagtaggaatgtttatatcccatttttttgcaaaaaaaaatcaaaattttttcgtttagacgtcctgaaaataagtaccaggtggttttcgcggtcgctgaccacgaatatggcaaccatttcgccaaattcgggatcacttaaccgaattcgaataaaaagtcgaaaactcgagtttttcaaaattcgcattaagatcaaaacaagctatattgaaacatacattttgttcagattatactagtaataaaacaatttcaaattttctaccttttgttcgaatttgagttaggggttcggaataagccaaaataattgccatatcatgatcagcgaactcgaaaccaccacaaaattgataaattttcttaaaaaaaatttttcccctggcgccaccggactccaaaaaaatttaattttttaagatcaattttaaaagtctttagtgaccaattattgcaatttacaggaaacttctggatcagatgacacggactacgaaggcgagctcacgataattgcaactgcgtgcgcgatggcaattttgctgatttgattgtacgcgttcggagcacactgaagaaatggaagaagccaaaaattgacaccccgcgggtaagaacatcaatttaaaagatatataa

SEQ ID NO: 73557 - DNA, 549 bp, Heterodera glycines
atggtgggtcacctttttggatttcgattccatgatcagaattcgaacaaaattcaaaaactcaaaatttatttttatgtttgtatctgtatatttgaccgttttgatcaacttaaaaacaaaggtaaattttgaacttcgactttttgttcgaattcgggtcagggatccgaaattagtcaaaatgaatgttggattccggttccccggccttcgataatttattgtaaattgaatcgatttaaaaatcctcaaaaatcgaccaaaatttaatcaccaaaaaatgtgaaaaatcgactaaattttcagttccgtatcctggttccggttacttattggcccataattttttgattgtgagctaatttatacgattttaattccattcgaaagcacttgattttggttaagatgtatgattaagcagaagtaagcgattagaaactcaaaaaagttcaaaaacaaaattcaccgatattttattgtaactattcaagtgttatttattaatcgctcagtttttgctgaatcatatattttgaaatataa

SEQ ID NO: 73558 - DNA, 2138 bp, Heterodera glycines
atgacagaagatgagacggaagacacatcaacatttggcagctcaagaatcgatggctatctttacaaggcgagttttgaagcagtttatttccaaaatgggaacggtttgtggtcccaaattatggcacccaaacaaaatcacctttttccctttattgttaactgtttcagttggaacagcgtccattcgtcggccaaattcgcagaaagtattggtttgtgctgcctcgcgatactcccgttttatattggtatggcgaacgaaaaatttaaaaacgaacgcctaatttcagcccttttccctcattttcaggtacaaatcgcccactgattttaattgtgcgggtcgcattcttctcacgggcgctgcgttcctttacaaccccagggagcaagggattttcgagattcagtgaggaagtctcgattttatacgatgaatacttctgattctacttttccacccttcgggattcgtttttctcgactaaaatttcaaaaaaaatgaaattttctacttatttacgatttattgaatttataggacaatgaaatttagtcaaaacggatgaatccaacataaacaattccccaattatttttcagaggagtaaaatttctccgtttttagcgtcgacaacaaatgttatcttttggaggcgccgaacagccgtgcccggttggattggctcagcgccatgcagcaaagtcggcgtcggcactaccgtcgcgagaaggaggacaccaaagagaaatcatcagagagggaaggggagggagccgaccgaaccaatgccaatgaaaacgacgacggagaccaaatccaaggcaatttgccatcgacctcagcagccgaatcagtgccagacgaagaggtgccatttggggattaaaaaaatgcttccgaaatgtaaaattgaattatttaaaagtccgaagactccgcccggtcagtgttttacctgcgcgaggacggcgaactccacccgggcagtttggaagtaccgccggccatttacaccgtttgtgacgcggtggaactgaaaattgacacactgctcacccgcggtgtggaggagacccagcagttcgaagtggccaccaaaaagttactgcacaaggccaggagctcgttcaggttcagttagaggggggggggttgcatttgggaagtgattttcgggcgaatttctttttgggttgggcgtgtaatgggacccgaaaataaaattttcaacctcgattttttaagtttttctgtttgcacacatggtttaaatccgtcgataaaggacgaattatgaccattttctggattatttttccccgggaatttacattttcattcctcacgtaattattaacattttcatcatcccccaacagcaattcgttcccatcgcagcatcagcccagagagaattgtgctcgttgccaagaagttgttttcctaattttaattgcccacgagaaataaatgatttcataaatttgctgcagttgaccgagtcgttggagcagttgcgcaaccgctgctacgaactcactgacgatttggtggtccaccagcagttggtcaaatgtctgaagcggggcgttgtcgctgcacacaatcagcgcgatgcactgtaagcagttggatgaaccatggacaattgtttagggaggggaggggagcattcgtacatacctgaaaatttttatttaataaaatattttgaagaaagcgttgctgcgtggattcgtcgaccgacgcggaaaaggtggagttcattttggaacgtgaaagtgcgttggccaaggcgcaatttgccatttcggaactgagccgagacaacgagacgctgaaggaagagaacaggtgaagctgctcattcaaagcctttaaatttaatttgattatggagtcttttttaaatattaaatttttcgagttgaaataattttatttgttcgaccgttccctttggagtttgggacaaatgcataaaaataaaatgactggcccattcattgcattaaggtcaattttcccaattttacagacgccttgaggcggaaaacagctctttgaacatcactgtggatgcctatcaggagtcggtgcgcaccaaagacgagctgatcatgaagtag

SEQ ID NO: 73559 - DNA, 235 bp, Heterodera glycines
ctgtttactaccagttgaagagccgctacattatggtagaaaatgcaaaattcgaccaaatttgaaacatatttcgaatttagttgctcaaccatttccaaccgtcaatggaccgccaaaaacggctgcccgtggaaccgtcgatgatccaagaactgatcgacgaggtcaccagacctcactctccgatgcgtacacacaatgccaattccctggcggtggagacggtcagtga

SEQ ID NO: 73560 - DNA, 802 bp, Heterodera glycines
atgccaaccgatgaagcggtgggacccgcggagtccgcaggatcggtgccaaccgaagcaacagccgtctccggcaggttgttcaaatgtgccaagattttcgaaaataactcgaactccttcagcccgtcgatctctcattttgtgccgtcctcctccttcgctgcttttacttctccttcgtcgtatgaaaatgccggcgatgcactcaaacaggacgattggctccttcggttggccgccgaccatcagaagcgatccgatgacattttcgcatccattgagctgagcaacaatcaggtgttgtcattttaaggaaatccccggatatcggtttaactggtagacttttgagaaaacggttttctcccttattttggactttcttacatttttcgactccttggggaattcgtgccaatgtcacgtgtaatcccacccctggcatcattaaccaacacttccccccttttcagaatctcgtcgaatggctgcagcgttgggacgcctatttggtcaaccacgtgctccagccgatgagtccgaatccgcagctgaaaatgttagtccgctgtggcattccgaacacataccgtgctcgggtttggagcaggttttacagtgccatgccaaataaatgctttttctaacataaaatttctccagtctcgtcgattttctggtcgggtcgaccaaatccgagacgggcaaaggctattacgactgtttgttgcgcaaagcccaacgcattcaggagcaaagcgcttccggcacggcggacgaggacgcggcactaaaacag

SEQ ID NO: 73561 - DNA, 621 bp, Heterodera glycines
atgactataaggagggtaaagcggataccgccaggattgaagcaagcgagtgtgactactcgaggttagtaaactaaaacgagcacaaactcacttggaccaaaagagtagcccgacattaggggacttctaaaaggcgacatgtgcgggcattttgtggaggagttacagtcaagttttaacaacaacaaaaaaattctttccaggagcgtgaattcccatcctcttcccccttgctatagaagcatgctgttgtttatccaatttactatttttttaatttaaaaaccctaaccctcttataacccaacaatcccgaacccccctcaaaaagaattcaccatcgttagatggccgaataagaacacattcggcaggttcaacaaccatttctggcgccgatttgccgtctttcggcgcctctttttgcccattttcaccgccgaagcacctgaaaatgtgccgatgatgtttaagcagaccagaaaaaagcggataaaaggccacagccctacacggccctgaaaaatgattttttcttttattccccaattaaattaccaaccaacccactaatctgacagaaacgcaaaaattaccggaatcctgactaaaaataaa

SEQ ID NO: 73562 - DNA, 1144 bp, Heterodera glycines
atgattggcagtgatcagaaagatgcacctgctgcgcaagtgctgtccaaatggttgcacacgccaagcgctaatggtcagtcgaaggcgttgtactgctgcaactacaacggaggcattacaaatgttgcggaatgggtcaacaaattcaagcaggtcaacgaaatgtcatcgttaaaatttcaaaaattcctttctttaaatgctttttgtacaaaaatttttgttcaaaataattaaatttaaatttgttttcatcttgatttctttttttttttttgctccattgagcttaaaccgtttaaataggtgataggttgttgattaaatccgatagataaataaatttataatattttattaaataaaataattattttcctaacggctaaaagcctgtgtttatggcctggtcggcgatggtcatttaaatgtggggcatttgatgagtgagacgaattttgacgctttataacttttcattgaaacgaccaaattcaatatttctcatgtcctttattagcctgcaaaattttcgaaaaaattttggccattactttttggaaattttacgaaattttttttacccctcccccaatttttcaggcttttctcagtgccaccgctgcttcttcctatgaaattaacctgcagctggacgacccgacccagcttaaaaaatttgaattggtcaatgaacggacgcgggaaaagctgttgctgaagaaggtggcgccatcgccggattatcagcacgatgattgttgggagatgcgtcgccgtccaattgtgaaggcagcggctgggaaagcggaaaattgcgatgaatgggacgatttgagcacaattgacttcgagcttctcgacaacgattgcattgggtagagcgccggcaagaaatattgaaaaagtcgggattttgaaaatcaggcaacgacatgaatgccaatgccggccgtgggacaatttggcgccgaccaaatgggcgccagccattgtggaacaactcctttcatagctgatcgaattaaataattttaatatcttttgatagccctaagtgttttctctcatttgtctatgaaatttcgataaatttgcatgagcttcaaaaaagtaacgaccaaaaagattccgaaataaa

SEQ ID NO: 73563 - DNA, 519 bp, Heterodera glycines
atgcacggtcagggtcgttttcgtaccgccattttcgtaccgccgttttcgtaccgccgttttcgtacggggacgttttcgtaccgcaggggggtcgttttcgtaccgccgttttcgtacggggacgttttcgtacgagttcttgtacaagcgtcagattcaaatagaaaaacttaagaagaactaataaaaccaaaatttatcattttttgtttcccattcataaaattttgtagaaaattcataactttataataataacaaaatccaggacaaactaggtcgcatctcataatttcggaaaataccagcgagaaaattgttaaggttttcgggattgacattggcattggcataattgtgatcattttgagggacaatattgttattgatatcgttgtagcgttggacgagacgaagaatccgtgcgtcggcatcgagatacttctttttctgtgcaccaatttatcattatttagttttgttttaattacttgctgctggttcattttgtagtta

SEQ ID NO: 73564 - DNA, 467 bp, Heterodera glycines
  unsure (1)..(467): unsure at all n locations
atgtcccccgtacgaaaacggcggtacgaaaacgtccccggtacgaaaacggcggtacgaaaacggcggtacgaaaatggcggtacgaaaacggcggtacgaaaacgtcctggcccgcctgatacatacttcatatatagagaccggatttttatgtgctaaaaatcctgaaatatgtaataaaatatgtgctaaaaaatgctgaaatatgtgctaaaaacccccaaaaatgccaaaatatgtgctaaaatatgtgttaaaaattgaaaaaataagtgtgtttttgcataaaaattcccaaaaatctcattctttatcatttttagcccatacaacgcaaatcaaatacatttcgaagtgtttggggtaaaattgtctttttttgataaatcatttctataaattgaaagttccagcagagaacttcngaatccaatgacgaattaatgaattcgagatttcattag

SEQ ID NO: 73565 - DNA, 83 bp, Heterodera glycines
tccaagtggggaattgaacccaggcgaaaattatgaaaggtagaaagtttaaccactacaccacatgtgcatgtgtgtaatcc

SEQ ID NO: 73566 - DNA, 66 bp, Heterodera glycines; identical to SEQ ID NO: 65608

SEQ ID NO: 73567 - DNA, 1064 bp, Heterodera glycines
atggcgtggaaagctggcatgcccgactgcagaagacttttgcctctccccatagcaaaaatgaacagacggtaaagaaagattttaaaaattttcattttccctattttccatgtttcagttggatttgtggcgacgtttggatggacattctgccatcttttgaacatgctcaactcgaccttaaaatggcattgctttccgaccgtttcgacatcttagtggacaaacattttgatgggaaaacgacgaaattgacaattcggagaacaatcgaattgaaaaggaggaagggccaaaagcgaaaatatatgccaatggttatcgtgtgcaatttccgttccacgaccgtccgctgcccaacaaaatccgctttaatcacattcggattaagtaattcgaacattttgtaacattttgggatgtttttacccgcgaaatttggcctatttttgcgaaaagcattcgtcattttggctttcacgatggcgatgatttggacaaattgcgtcgccgcatttcaccgacacttctcactgatcttgatcaattgaattcgatcaattccggttatctgtgccccgatggaattgctgacgatggacccaatgcaactgctggccaagctttgaccaaatggttacacactccgagcaaaaatggacagccgaagcaattgcatcgcaataattatgtggttccaccaaagctggaatgggtcaacaacttcaaagaggtgtgtctcgtcagaatttccgtcaaattatttttgtgtttaccaattttttatttagacatttcgccatgccaccacttctgtcacttacaaaatttgttttggtgttttcttgtcgctaatcgagccatttgaattggtgaacgaagtgacaaatgagaagctgacactgacgaaggatggcactggtgaattcaattggcttttggagagatgcccaattattggggagacggcggcggttcagaaacagcagcagaagaaggacgaaaattcggatgccaatttgaacaaagtgttcttccgcctttacgatgacattgggtga

SEQ ID NO: 73568 - DNA, 329 bp, Heterodera glycines
agtaggacaaaacgtcgtcagccgaaacgtcgtcgaacgaatttttcgaccataacttttttctttctcaaccaaattaaacattcttggtattattcgaaagcattcgaaaaatgctattagcctgcaaattttcaaaaatttttatttatgcacaaaaaaatcagagcaaaaaaaagttcgaattactgggtttttgagttccttctggccataacttttttgaaacttaaccaaaatttttgagattttgcaaattaataataaacacatagagctatcgaacaacaccaacaattcttaatttgattgacagtgaacaaagttat

SEQ ID NO: 73569 - DNA, 1030 bp, Heterodera glycines
atgcgagtgcagagaactgtgaaaaggttcggatgttttttaaagaaaaatcccgccccttttgcccctcctctaaaaaagcactttcttgattgctgtctcgtatgcagtgtcttgactgtaccgcatctgcatgtcatgactttgaactgaccgccaatgagcttgtgacaggtgaaaccaacagccgtgcagaaatgcggtgggaattttcgctcgaaatgcattttcagctgccttttcaaagtcattgtgttggtcggttgtgccaccattctttggttcttttttgaccatttcaaaaaacgacgacgccctctcaaaaaagaaatgtaaaataaattaaacagaaaattttgaaaaattttccaatttttcagctttatctgcagcgattgttggcttttggtgttcgattttcttgcgccttctcaactcggcctcgaaattgcactgattagccgccgctttgacttctacgtggatgaacacttcaagacgcgcaaatggacgttgggcgaaattcgaatttgctacaaaattgaagaaaatggcaccaagcaaatgcatattcaccatgccgatgcaaatccattgccaatcccgcaaaatccgttgccgaacaaaatcatcggattccgaggcattaagatcgtgtaagaaaccgatcatccagattgttttgatttaggacactgactaacattttcagctacatcgatcaaaatgtcgtcgcatttctccgccgttttcaccgttttttctccattgttcaacggaattgggcattatcacgtgcagaagtgactgtggagaaattgacactgcaacaagaagacgaagatgtttggctcacgcgttgtccaattggatgggatgagatgaaatggggaaatgtgcaggatgaattattgaatgacgatccactgaatgcaattctatttttgatcagagaggacagattcgacgacgggtgaacaattttaaaaattcaaattgaattgattttaatgatgcaaaaatgcggtta

SEQ ID NO: 73570 - DNA, 269 bp, Heterodera glycines
atggcatttctcagcaggacgatgacgacgttcaacacaacgacgatgctgctaaacctggcacttttttgtcagtgcgttcattcgttggtcatccatccgcgactccgctcaacttcggctgcggttgctgcacgtcaaattggatcagggccagaaacaactgctgctgaagatgaacaactgcaacatttgattgacatcagcagaagcagcgataagtgcaaaaggatgcgttggtacggagcagaagcaaagcaaatgctcag

SEQ ID NO: 73571 - DNA, 344 bp, Heterodera glycines
atggcactgcttcaaatccgttgctggtggtgggggtggttccgtgcgcttctcgagtgccgtgccgtggtgtcaccgctactgccgattgtcgcggcacgttgtttggcggccaacagtttccgacgctcatccgccgtaatgcgcactcgacgaacgcccgggatgttccgtgccggattcactggacagttgaaggcggagaagaagcagtcatgcttgggcccctcgtcgtcaggcttgtccgtgaacagcgcgaacagcttgtccagcagcgacactttgccaaccttggacaccgcattccgttgtgccgcctccgttcgaagcctgatctcgtcaag

SEQ ID NO: 73572 - DNA, 102 bp, Heterodera glycines
ttacacctttttgaacaattaagctttggctttattctccaaattggcaagcgaaggcaacgaaagcaattcgatcaatttaaatttgttgatcagtcaaag

SEQ ID NO: 73573 - DNA, 66 bp, Heterodera glycines; identical to SEQ ID NO: 53774

SEQ ID NO: 73574 - DNA, 2335 bp, Heterodera glycines
atgtcgggcaaagcgtcgcggatgacgcgaaacgtcaaaacactcattcccgaagcggtgaatttttagtcgaattgttttccatccaacgcattgaatgaattgtttttgatttcagcagaaagcagcagatgaaaaaaccaaaaaagaagcaaaggcacttgaggatgtgagtgatctcccgtaaacacatcaccgagatgcagccgattcgcttcaaattttattggacatgaatttttgtctcccggaaattttttggcactaagttcccacttcttaaattcgaaatcggattctgtttcttgaattttctgaattcgtcaaaatttcgtttgcgcgtcattaattagaaatcgtgtttcggttcttaaatcatcaaatccgtcgaacgttttgttcacgattcttaaattcgaatcatgtttcaatctaaatccgaatgtttcccgcttatcaaactcgaaatcggatttctgatgcttttgaattctgaatccgttgaaatttcgttcccgatttttaaatttggaatcggttgcatccctaacacggcacctacgttcaactatacatcacataaccattttttgcatttagttcctggtctcactgagtccgttcaacaagaagtgggaagtggagcgcacgctcagttctggcgcctacggcgtggtgtttttgtgcaaggacccgttaatggagtgagtttttcttggccctctgctgctggtggtggtggattaatttatcccatattttgcttatcaatcatctctaattaattttaatccattttcaacaaaacagcatcaaaggcgtcgtgaaggttgcgcgtgcggagtccggaagtgaaacggccgagtgggaggcagctgtcatggacaaagtcacgaaaaatgtacgcctcggcaaaatatgccaatcatgatacatacatataacagggagggatggaatgctaatttccgaaattttctgcgaaaacgtattttagaaatattttttcgaattttgaaattttcgtttttgaaaaaattattaggcctaggaaatgccattcctgtgatacataatacttttgttacacaacaccaagctaatatccttttctcatttttacccacagacacacggaaagagcataaacattgtcaaactcctggacaagggcgttctggttgctccggacaacagtcggctgaacttcatggtgctcgaattctgcgaattgactgtcaagaaataccttagctatgtgtgtgcattttgttggtctttacacacagaattgttggcaattccaacttaattaggcttgtcgtccctatggcttttcctttggttcactaaactgcgctaaagtgcccaattgtttatgatgatcatcatcatatgccatgttttgtttaagcgaccggctggacctccacgaagggctcgcatctgtcaagtgttgctgggagcattgaaggccatttacgacatgcacaaccaaggactgttgcaccgtgacttgaagccggaaaacatgggcattttgtcgagggccgacccggtcactgtgctttacgatttgggcatgtcacgcatgtttaccaaccaattgggacaagtaaatcttgtctatacttgttgaccgtatacatatcccctctctgtgtttaggtgcgcgaaccacgaactgttgtcccgttcaagggcaccgttgagtgggcatcgggccatgcgctcaaggggcgtgagcaggtgcggtgccattttggcaaaatgacggcctaattaatcaaactttatttccaattccaacacatttcagactcgttgggacgatttgatcgcttggctgtacattgctgtggaactgtttgacccggacgtgaacaccgaatcgccgtacccgtgggacaaccacaggatcaacaacaccaaagtgattggcgattgattgatttcattcaattgatttcatattatttgcgtgtttttcaggccgttcgttatctgaagagctcgtactcgccggccaaagttctgctcaagaactggtaaggattgttgatggcatcattaatgtgttattaatgattgctaattattcccgtttagcccgcgtcaattctattccatccacacgtatttgtattgcggtaatcgtctgcttgtgccggactatgcattccttgccgacaaagttggacaagcgatggaagaaatccaggagcagatcaaaagtggtccggttactacgcaaggcaaacagccccagcagtccgcggcttccgtggcaatcagcaaaagctctgtggctcagtcgatggtcagcaaacgctaa

SEQ ID NO: 73575 - DNA, 133 bp, Heterodera glycines
atggcatcatttgtcatcaatcccggtggtcccggcggttatgtcattccaaagcgtcgaaatgcaacggaggaggaaaagaagaaagaaagacatggggcggcggcggcgacggcggaagatgacgccaaat

SEQ ID NO: 73576 - DNA, 892 bp, Heterodera glycines
atggcactgccgcagttcctggtacgtctcagcagccgtctttcggcacgtccaccgacatggcgcacttctccaacgcattgcaactgtgacaacttcgactgtatgcaggccaagaccgcctacagaatcttccagatcaagcagttcctcagctacttcatcaacctgatccctgcagaggaccttggcgagatgaacagcgcaaatgcatttgccaattatttcaacggaattttgcaggtgaccaccaatcatacattaaaaaggcggggagttcaaacaaatttttgtgaaaagagtctggggtggtcaattttgcgaagggactccggccgtggaattttccaataagaatttttagagtttttcttgaaaattttttcgggagggaaacggcgggagaatgaagtgcactccagtgggaaagttctgcagtaccgatgggtgccgcttttggaatttgaatgcggtttgttagcagatttttccaaaaagaccgatttttgcgattttgagccaaattttccagaaatttttctccttctgtcccactctagggggagatgtgtctggagacacctcttgtgcatataagacctgattctatctccacataactaacttattccaagaaataatttttattcaagaacacataaatatttatttggaatagtttgttccctctcccctctcgacaattttaaaactgtaattcttagttaataatttttttatgttaggttgttttccttgtaaaaatattgtttatcggggacgggtgacgttgagatgggaattattaacgacatttttccttttgcagaatgccatcaaagaaaaacagtctcaagaatccgttgaggagaaggcaatggcaagtgtctga

SEQ ID NO: 73577 - DNA, 1812 bp, Heterodera glycines
atggacgtgcagatatgtgagttctgatctgtttggcaatgtgtttaaatcactttaggacaaattttgagatggatttgttcgacacccaagtttatcgcaggggaggtaatccgtaacaatggctgcattcgagttccctctgcatttcagataaagatgaatcaaacgaatgttgcaaaaattcgatcgtaaaaccggcatgccttcccgtcacaattctcgcgttgcttttgttgatggctttctttgttccgatgcttaacgaggaaatgggcgattttgccgtgggcagcgcaaaaaaatacgaacggacgggcaaatgcaccgacgaatgcaggcaaattgaaaaaatgcacaaacggtcgactgttataccttttccgtttgcgttttgtcgagtcaataccgacgggaatgaatttttctgactcgtcgccgaggcatttgagtacttttcacgcgtggatggaattactacgacttgcgcaaaaagcggtggacattacggcattgtattggaatttgcgggacaaaacgcattacgaaacttcctggcaggtattgtttcaaatcgaaattttctgagtttgaaaacaaaattgttttactatttaggggaaagaaatatttggggaaatcgtagagactgcacgacgagatgtgaaagttggggtcgaattcttttgcttctttaatattttttcagattcgaattgcgcagaattcagaatcggtcttcggacctttaaatgatttgaaattcctggaaaagaaaggttttttatttatcccaatttttcccctcgttttttcaaggcattgtctccgtttcaacgctcaattttactgaaatttttggagctggtgtcctccacaccaaactttggattgtcgacaatcaacacttttacttgggttctgctaacatggactggcaatcgttgactgaggtgctttcttttggcactttcatttttttctttttgcctttaaaggtaaaggaaatgggtcttatgcttgtcaactgttcctgtttggcctgggaactcagcaaaatcttcaccatttactggagggttggacagaatcacaatcgagtgcccgctgcttggcctgtttatttgcgttcaaaatttaatgcccaacacccattggaaattcattttggggttgaaccttctcacacttttgtttcggtatgaaaattgtttcacgccttaatctttctgcccttttctttaagcattcacccgaacaattcaacccaaaggtgtccataattatttgataattttcctttcatttgtctgtagggcagagagcacgacctttccgccataactttttgtatgagcaaagccaacgaatttattcgtgtttctgtgatggattatattccggcaacaatttactcgccaaaaaacgacaatgtgtatgttctttcttctgtattattttcccaactttgaaaatacagcttttggccacccattgatgatgctttaaaagctgctgcttaccggggtatttgttgttgtattaaaaattagttacaacagttacttttaggagtaaaagttgaacttttggtgagcctgtggcctcattcacacaaaaaggctgtttatttcctccgctctctgctcgaaattaacgccgcacttccactaacaaattcggggaggaggggcagcatttccattgtgagttcgtttatttgcgttggtttatccgatttcttccagaaatacttccgggttccggttagtcctcagcaggctgttctggaatttgcgagggtaaaccaca

SEQ ID NO: 73578 - DNA, 1921 bp, Heterodera glycines
atggagtgcatcggctgcttggctttccgaacttcgttctctgttttgctcagaccattcagttcggccaactttggtcagggagcacgggacattgggtgggttatcccatttaattttgtacaacagatgtgtttttagttcttgtcacaatgtttcgtcacgtcattcggccctccttgaaaaagctttggctccctttgtaccgcgtacggcgaaggaattggccgaatatttggccaaaaatgtcctctaccattctgtcggcgatgtcctcgtggtgcacaaaccttacggcggttagaaaaggctgaacaaaaggctgtttgatggactctatcagattagttgctactcatttcagttggctctttgggctatgttcaaaaggaatttggcatttttccgacaacgcaatacaaattcaaagatcgaatggacctatttaacggagtgaaagtgagtagggtcgctggggttctgcaaaaaaggcctttcagaaggatgattcggttactttggaggatgcaattccgcacttaaaagaaatattccacgagccaaagttacacttttgcaccggtctcaaacggtcggtccctttgagcctttctttgcgatacgtcctctttcagttgggtgtccggccccgtggtgcttccctgctctgagaaggcttttaaaaacatcggtcacaggttcttcctccaatttggtcctctcatccattgtccttttgtgccctttcagccttttccaaggagagtccatcagtcacagcaatgagcattggacagcccagcacatgcaccgagcattgtttgtcgggtgaactcaaacaaaagtgaccggaggcctttcttcagggcaatttgcatttcgcgccctcccagagacgaaggtgccgtcgatggctacgccacgttccaagacacgagccgtgccaacgaagtgagttaatatgacaaggctaatgggtctatcgaccaattattacaacaataaaacccgtttgttttgtttccgggtttttagtattgcctttcatcttttctttcagtatattttcgtgccttcggtaaaaatcagaaggcgggcgaggtacgggaaatttgctgtgcagggcgaactcttctaccgcgtgcttgactcgcagtgcggactttcactcctcgacattcatttctcaaaatgtgctttttttagggtgtaggaatgtaatttgaaaacaaaaaagcatcgttttttggctgcgtatttatcgaaaattaaattgctattcccagaaaaggatagaggcaaaacattaagtggcgttctcgctcgacataaattttgactttcgtttcagtcagccgacacttcccccggctaattctctcccatttgggctgtccaatctttggcgattggatttacgagcagagattgcttaacgttgacggacatccgatctgtgccgagccgaaggacgtgtggagggctgaggcgaaaaagttcgagccaagcgcctttctcaataaaatcggcatcggaagtttcggggagttgcgacctccgccaccccttttttttgcggtgtacgaaagcactttgcctttctttggcactacgaaatcggaaagacgaagaaccaatctcgtctccagaacaccgcctcctggtgaaaaaggacgaaacaaaatttaaaattctttgggaatggttgaagaatttttataaattattccaaacaacttctaataaagttattttttacagtaaattgtttacagatcatttcatggccatggttgacctgctcaacttcggaccatcagttgaaaaattgctaatgtcgcttgaacttggagaattagaagaagctgaaattccaccgaccgacaaaagcactaaaagcagcggagaaacaaaattttga

SEQ ID NO: 73579 - DNA, 496 bp, Heterodera glycines
atgcggcgatgcaaaaataatctgacggacgaagaatatgaacggtaaaacaaaagttttgaccaaattttatcatttacaaaaaaataaataaataaaattaattttgatgattgtagacttttccctaaaagtgccgataaatatgtcttcccgacgaatacaaatggcatttgtgtaggacttggcaatcaaatggtaattattttaatggacatttatcaatctcagatcaccgggactttgggaaaataaatatgcaaattaaaagtgctacaaattagccgctttttcttttccattggcttttatttatcatttttagttccgttttgccgcattgtatggcattggaaaaccttatggacgaaagccaatttacaaggcttaccataaatgcacgtcggaagacgagcgagagaagcaaatgcttttcccggtgttcgccagccaagaaaaattttttgtaaaattttgaatcttcgcagttaataaa

SEQ ID NO: 73580 - DNA, 1892 bp, Heterodera glycines
atgatttttttgaagtttcttttgttcctgactttttttgcgccggctcccatccttggtttgtttaaggcgcttttaaacttccgacaaaatcttggggatgccaaagcttgtaataatgagattcaaatcactgagttaagggtccattgccataacggaaatgaaggtaattaaatctaaatttacaatacattttttaaatttaggcggatttcgcattgtcttagctacccatccaattttgtttggcaaggatttctccggcattttttactttgaaattttaatcaaaaaaatgcatcagtaaataaacagcatttattatcctaaagacaaatttttactaatttttaatttatttagttccccttacgctttactctccttcggattcaccgtaaaaaaggacaaaaaattgggagaaacaaacattttttatcttaatcgtggattttttatcattaatggcgtatggaagtgtcaacagttgattcttacacagaaaacgatattgtcggatgtggcattaatttggccacccgacagattttcttcaccaaaaacggacggcgtcagggtttgttattttggactttttgctcataaaaaacatatttattttgggatttttgtagtttttggcacatgttttggcgatttttgaaaaactcttttttttataaaaatttcttttttggtctcaagttcttggccaagtgcctaaaattttaaaattttctttaattgcattttttgactttaatgactttttcacttttatgtcaaaattataattttagcgaagaaaatcctgaaaaataagtaaatcttaaaaagcattgcaatgcttcagatttgagttatgctagtgaaatatataaaagaatgagatttttgagaaattaagtcattttttgagtaattttcaaattttggcacaaacttactcttttttttttgagtttttagcacataatttgggttttttggcacatataaatccgttcactgttaatgactcttgagaaattataataacaatttcaatagaccaaaaaaaaagaaaattaataaatgtggcaattgaataaaacaatttttccaaattatttcaaaaacaaaaatttgatgatttttgacaaaaaatttaatcagttaactataaattctcaatttttctattcgtactgacaattttaatattttcttagcaaaaattaacattttaaagcaaaagtttgtaaaaaaaaatttttggatgatttcttatgggcgtattttttgaagttttttaggctgattcttaggggtgaatttttcgttttttattgcttggaaacggtgttttcgtcaaaattttacaaaaaaatgtcaattaagcacaaaaagcattaaaatgttaaattaagcacaaaaattagatgctcagcattaagcacgaaaataacaaaaagttgaacctagaagtttcattataccaaattttgttttttatattttgtttttttacccaattatccctttgactattcaaaaaaaaaaaccgcaaatgattccttatttatcttacttatcccaggttcgttctattcggttgccaattcaccaaattctgttcccgaccaattgttcccattcgttactttttgggactttggtgatgaaatcgaggcgaactttgggcccaatttcaaattcaagcccggcctctcaaaacccggtcaacccggttaacccggtcaacccggatttccccaaaaatcgccgggccgggttgccgggcccgggaaaacccgggcccggcccggtcaggtctctaatattaatgttccttgatttcgaaattgacctgttgatttattttgccatagcctaatcttgttaataaa

SEQ ID NO: 73581 - DNA, 1958 bp, Heterodera glycines
tgaattcgaatggcacaacgaattccatcgatttgaatggcaccaaagggaatggtgcgaattccattcaataaaaaaataaatattttccagaattagcgcccacagatgttgaagaattgaatggaaagctcaaaaaaattgaacaaaatatgacaaaactgcagaacgagaatgtccgtcatatttttaattggaaacaaaaattaaaaaaattaaaatataaaattttaggaaaatttgcgggcgaaaaatgccgaattggaacaacaaaagcagcagacattaccagaagtggagaaattgaattattcgcaaaattggaatgatgttcaggtaaattcaaattaaaatacaaaaagcatttacatattttcagcccaaaaatcattggtgcctcaacaaatcggccagtgaatttttcatctttaagcccaattatttgaaagccgtacatcgtggagtagagaattgtatgtttaatggagaaagattaattaattaattacgtaataattaatttaaaatgatttaaagaaatttttcttcagctgcaaaacttttatttgcggaatttgtgctcgttccacactttggcattgtgtattatgagatcaaaatcataaggagacaagcgaccaaaagcgagtaagtaaagaaggtcaaataaatcactttaacctctaaatcagttttcctgttatttttgtgaaaaggaatttcgatcgaagaaggggtggggcgcgcacagaaaaaaaccgcggtcgcgcatcgcgcattcaaattgccgcggagtcccaaatgtcgcggatctcgcaaaaaaaaaaacagcggtcgcgcatcgcgcattcaaattgccgcggagtcccaaatgtcgcggatctcgcaaaaaaaaacagcggtcgcgcatcgcgcattcaaattgccgcggccagcggatcgttcattattaaaaatttttctaatttttaaaccattaaaaaaaatttttttcattttcttataaaaaatcagttaaaatcccgcatatacaaaatttgcgatgggactgaatggtggggggtggctcccattagaaataagcaaatcgtaaattcagttcatttgggatcagaaaatcagatttttaacaatttttttgcggcgcattttcccaaaaaagttctggggaatgggcaagaggagggggtccggtgccgggaaaattttttaaattttaatgcgatttgttaacagattttgtcagaaaatgaccaaattttgcctcaatcttatattttcttggtaaaatagtgattttatgagattatgacataattttccataaatctcttgctttttacaaaaacaatacttatttttaaataatattaaacataaaaaacaatcgcttcgataaatgatttttttaattggtccaaaattgccgcggagtcccaaatgtcgcggatcccgcaaaaaaaaaaaaaaattgcggtcgcgcatcgcggcgcggtcccagccctgaatcgaaggctaaagactcagggatttacaagaaaaaagcaaataaaaaattctatggacttcaagctttcgtttgttatcaagaatgtaggccttgatgaggtaagaaaaaagttatgacctaagcaactgaggatggtcattgactggacacgtattcttttggggaaatccccatttcattttaaaagtaaacttataaaagctaggtgattttaagaatctgacatcgtactagttaaattttaaatttttcaagcgctattcaaaaatagcataaattaataattttgcttttaagtacgataagcattggcctttggtctaaatcggccgggacacatcttaccgatattattgcgatggcactgtttatggtcacaatgccaatggcttcgagggatttccctcctttgatgagggcgacacggtcggattcggggccaatttga

SEQ ID NO: 73582 - DNA, 639 bp, Heterodera glycines
atgagcggaattgagcccttggacgggtccgttttgtcaagtggaaccaactgggcaatagtgaccaaacggtgggcagaaaatgccaaagaaagggcaaaagcaaacgcaattgtcggcttacaagcacgacaccaaaactaagaaaatgtaatggtgtaaatgatttgtgtgtttgttttacttctttgtgccggattggggcccaaacgcacgagcaacgattaagggtgatggcaatatgcagcacataaattggatattcgaaaaaatataccaaaaatgtgccaatgctgtaaagtgccgagggcgacgtgccgaaccatgggcaagtgggagcaaaaataggcaaccgatagaacacaacatcgacgacaaaatgggcaatttccttacatttatttaaaaaaataattaaatttataaaaaataaattatctgacccatgaattgaaatatcattaccaaaatgccaatgatgctcaaaaattggaagaacggtgaagaaaattcttttttagtgatcagaaaaaaaatgatgcgcagatacaacgggatggagacgagttcataaatggaataacacacaaaggaaaggacggacaacatttaacttaattaatttcataaataattaaa

SEQ ID NO: 73583 - DNA, 3495 bp, Heterodera glycines
atggaaatggaaaatcaacagcaaaagggtaagggaaattggacaaggattactgtacgtaccgtaagattattattataattattgctactatcaaatatcatttggtacttttccgttttggggccaaaggttgaatttttttaaatcaaaagcgggtgagtagaacttgactagtatttgtgcgaattcctctggcgcgaaaatgtcaaaacccgtggcgcagacccttcatttgaagaaataatctaagctctaattgtggcatttatgccttcgaaaaattttggcgcgtaactttagcaattcttctcgcccgctgttgatttaaaaaaaaattcaaaatttggcccaaaaacggaaaagtacctatcatttttgcattaaatgcagtgaaaaaaatgtataacaataaataaaaaattaatttttttttagtttctctcgaccaaatcgaacatttgcaaaatgaacaaaagagaaaagacaatgcagtgaaaaaggagctgaaaaaaattcagatgaaaatggtaatgaaaaggggaaaaaagattaaaataatttaaaaaatgattttattatatttgaaaagttgctccccgtccccgaggtccccggcccccgactttttgcccccccgactccccgacactaattcgggaattggggactccgagcgttgtaaaaatttaaaaagttaattcaataatgaagggggaaaggttgaaaatttatgaaattttgaacaattttcttaatattaattaattaaaaattccgaaaaacttttcggcggcgcctatcggcaccgtcggcccaacaaaaccccaaatttttttttccaaaaattgtcccaaaattgcaaaaattggtatttttaggaaaaatctgttaacaaattgcaaattttcaagaaaaaattttcctcacgctcctaaagctcatcccccctttgaaaccccacccctttccacttatttttaaaccagggcttccatcgaaaaattttataaactccaagcccaaaataagattttagtatcaaaaatatgaacattttacaacatttttctatgttatttttccaatttattcgatcaaattttatattttttgtcttctattatcaattttgatattttggggaggaaaatgcaaaattataaatttcagtaaattcgggaccaaaagatcaaaaaattttgcggcagaccttaaaatttcttgaaaaatagtgacattatgccataaaatttcaaaactataagtatatttaagaaatcagaataattttagtcgctaccccaaaatcagaacattcttatacataaataagacaaatggaagcccaggtttaaaggccagcctggactcactcttactggcgctaacgaaatcagatgattaaagtgaaaaaagaagatttacgagcatttaaaaagaaaacatgctttttttggttaaaataaaatttggtcattccccgatcggggtccccgacccccgacaattgagctcctctcctcccccatatcgcctcccgaggtccccggcccccgacattttgccccccgaggggtcggggagcaaccctagaaaatactaaaattcaaaactttatggtgaattttaattttaaggcgcttttaaactcccgacaaaattattgggatggctacacttgtcactatgacctcgaaatcactggtttgaagatccattgtcatttaagtgcagaatcgggtgaataaactataatgaataatgaacacccgcttagaaatgggttaaatgatactttaattgtttcaattaaacttaaaccgtttccttgtcgcaaatttcataaaaaatttgtgaaaattttccgagcggtgccttcggcctgcccccccccccctgaaaaacgcagcgcaacaatttgtgtgagaagtaacataaaatcctcaagttttgataggtagatctcattagcaaatctgaccgccggtctttctccagccctcgggcccattcttcgtcagttttggaatttacgcaaatctggaactatttgctcatacttacctcgccgagacaaaacgatcgatataaagcggggcggggcgttcacaataattttttccgaagtaaaagggtttataaatttgtttttaatgtacccgatcttggcgctaccttcgctccccatacaatattgtttggcgaggattttttcagctttttttactttgcaatttttgttaaaaaaataccaaagtaccagcattatttcttaccataaaatacatttaatcaaaaaattcaataatattaataataaagaatatgtttttctattttgatattatttttaaattattttagatgcctacacagtcagatcacctttggattcgcccccataaagtggacaaaattggaaggaacaattgtctctaactttggcacttatgcatactcaaacaatggctcttttacaattgatggcaaatggatggatcagaaattagatgcttttcaagaaaacgatattgtcggatgtggcattaattcggccacccgacagattttcttcaccaaaaatggacggcgtcagggtttgttaacaaaataataattattataacaaattattacataaaacgccaattttgaagacaacttatctcaatatcatcaaaaaaccacaaataatttctcatttatcttatccccaggttccttctattcgctcgacagtttaccatcttatgttccagacgaattgttcccattcgtttctttgctaacaattggtaacgaaatcgaggcgaactttgggccacatttcaaattcaatttggccactctttgaagagagcagaaacaatggacgaaggcgataattttgaattcatttattaattattatttttgctctttgtttatttttaatttttgattttgtaactcgaattattattttatttgtttttaattttattttattaaaaaatgctcttgaattttttgtgtgttttatatatctgagaattttgtccattaatatagtgaatacaaatatgattcaacaaatttctgttatccaagcctctacatctttcagtccaagtttttggactataactttttttattctcaacgaaatcaaacaaaaattcaaaaatttcaacttttttgcaattattacgttataacttttttggtaattatttagtcgcgaatcaatagcttagaaacagcttaaaaacagtaagcttttgaatgatatcaagattgttggatggttgagaatgataaaagttatatccaaaaactttggctggcgcctaaatggcccctactccttctatgtattcttgatttagttgagacgagtcggaatttgttgcttaatggtctataatcccaatttataaaatatgacgtaaaattggacttttaacgggtaaacatacccactgaatttgtctatttgaaaaatttaataaa

SEQ ID NO: 73584 - DNA, 2190 bp, Heterodera glycines
atgacaaaaatatgctattccgaaagcttttcattatggttggtgaacaatggcattttgctgaaaaatgcaaaatggagaaaattccttctccgcaagggtttcattaatcaggtcattttttagcaatttgttaattttatgacaacaaattataaggggggggggtaattaattaatttgtgtccgaaagcataaataataataaataaacttttaaatattttttaaggattgtccttttttcttagagttgactgtatgcttcaaaaatatgctaaaatttataaaattgcttattttaaaacaaaactgttaacaaaacaactaattttaaaaaatagacccaaaagtattttgggaaaatctgaaagcaaatcctcccaaatcgattaaaaatcgcgaatgttaaatcaaataatattttaagcttttgaattaggttttaaaggtgtccttttattttgtgcataaattttttttcatttcagtgatgtccttttgtggaatttttgatggaagcccggcttttaaatttatttttcgatttttggatttatttttatgtcttattttaggcgtcctcaatgcttttattttttaggctcaattcgatcagattaagccatcagaaaccgatttgaaatggtccgaaaagaattgtgaaaatgaattgggcattcaaaaagttatgaaactttttaccgacacacaatgtgaagtgcacttctcagtgatacaaaagctgattggcaaattcccgggtttgaccaaacctttcgccgacaaagcttgggcattaccacggtatcgaaattacggtaatgaattaaaaatagaaccaaaatatttttatttcttcgtaatttaagcgctatttaatgctgaagaacaaattgaattatacaaatttatttttaattcggacgagaaaacatctcacgaaacggagacgaaattggcaatgaaacagttaattggaatggcaaaagaaagggaggagagtctttttaaaaccccagaaattgcggacgaaattcgaaatgccaaaacgcagacttttacgatgatggcactatccgaaactttttgtccctccaaagaatggcccatggatcggatgctttgtccacttggacagtacgtccaatttttgagtgaaatggccaaaaatcggccgaaaatcgaatgggaggccccgatttggtgctttgcacatgatatcaacgaaattttcgcatgggtacgacaaattttatttggaaaacgggtcgaatttttcaaaaattatttgaaaagagagacaaacggaaaggacgacgaaatcatcagaattatacgagaaaagccgggtgcaattttgagactacacaactttgttcagcataaattaatcgaggaattgtggaaagacgagcaaatccgcgagaagctttacaatgtgaactgtaagtgaaacggacttactaattagcactaattaatgacgaataaaaggagttattcggtcgattggggtcaactgctgataactttttttttgccataagattgggtcaatttaattcttaagctgaaaatgcgtcagtggaaaaggcattattaagtattgttgactaaattcaaaattggttgcgttctgatttgataattcggtttttcagacattcaaaatttaacaaaattttttaaaattaccaaaatccactaaaaattctgattaattaacgcattttgcactgatgcttttccggtcattttttaaaaaatcattctgatttagtttttcatggcttttttagtcttctccaacaaatcgcgacttttgcacaattatcgccgtgcaatggccaaaagttcgtcgcccattgagcgcctcggcgcccgtttggccgctgacattgcggcgatggccaatcatttgtcggccaaattcccaaaagttcagccccatttgcgtgccgctctttcgtcgtgccaatcgttttctccgccatttgcatcaaattcgaatttgtcttccttttctgaactgctcgacgtcgtttgggttgaccttcgctttctttacgataagtcagacccaacaatttgtgatgaaagaatctacaaattgacaattatttttgtgagcaattatttatcgggtgtgttagtggctttggcaattagttagttaattaaaccata

SEQ ID NO: 73585 - DNA, 1258 bp, Heterodera glycines
atgggcgacataaaaaaattatttgaaatgaacggaatcacatttaatgagagcggcgaatttattacagcaaatgaaattgaggaaaaaggaaaaaatatgcagcgaaatgaaacaaaaaaaggaaaaggaaagaaaaaaagaaaaacccaaaaaataaacaaaaaggaggcgaaagagaaaaaggaaaagcaaaaagaaaaagagaaaaaagcggaagaaaatttaatggaggaaaaagaaaaagcagaagaaaaaacaactgaaaaactggaagaaaattcaccagaaaatgagaaggaattggaaaagatgaaagtaaaaagtggaaaaaacggaaacaaaaaatcaccagaatttgttttattggagggaaatccaacggaatttgtggaaaaagtgagttttaattgattcaaaatttataaagaataattaattatatttagcataaagattttattgtgatcaattgtgtggccgagcagaaaagtgattatgaaaaattttgcaattttattcgaggaaaaattcgatcgaaaatgaataatttaatggacaaaattggaatgaaaaattcaaaagaaattgaaatttgtgaaatagacacggaaattaacagagaagaaacatttaaaattgtgggcgaattggtccaccgggaattcaggtgaccaattattgttcgggttaattaattaaggtggtgaggggataaatgatcatgatttagcgttttgagtaattaattagtgaaggggtagtaattcataagcattttgtggagatattaattataattaatttaattattatttattggcggcataacttgcaattttaattctctctattttgagaagtttttgagaggtaattaatgcaaatgaattaatttaatttggttcccaaaaaacacaattattaatttgttcaaattttagcattaattttggcaaagtttggctttttggcattaaaataccagcgaatggcaacgaaaaattgaaggaacacttgaggaacttcgatattgaaatgaaaatggaatatttgcagcagttgggccttttgtctgttgaaatggacgaaacggaaataattaacgaattccaaaaattgggtgccaatgttttgtcgacggtggcgaaaaaatggtttttgatggacattttggaggagaaataataatcaatgaatgattggattgattcatttgtttttatttatttttgaaaattttttctaaattttctaa

SEQ ID NO: 73586 - DNA, 57 bp, Heterodera glycines
gtattacaattatgatttggtgaaaaatatgagaatgtctgatttgggttgaataaa

SEQ ID NO: 73587 - DNA, 2897 bp, Heterodera glycines
atgtacggaaacgtcggcggtgtgagcgcagttagtcgacctgccggcggaggcggtgcaggtggtcacagtgctggtggaggaggttacggcggtggaggtggtaacagtgctggtggaggaggttacggcggtggaggtggtcacagtgctggtggaggaggttacggcggtggaggtggtggcggttaccgaactggcggatacactggcggaggcggtggcggcggttaccgtggcccgcgtactggcggcaacgcggcggttggtgcgccctttcgtaggggcggcaagccccagcgaccaaagaaggaattcgtttacaccgatgaaatgcgggcattttacaatggctttgagtgagtaaccaaaatggaattttgaatgtcactatcatttcatcgttgcgttttttagtcccggacgtcgcgaacgaaagctcacagcaccgcccgttgagcttatttcagcttcttttaaaccaggagaagttatacaaggtttatttgcaattaactggctcatttgtttaaactaagctaaatgcttttttaggtgatgtcataatgtcatatttgagggacagattgaatcaggaagagccgaaattggacgttcatttggatggcggtgaatctgaggagccgaaaatggaagttcatttagatggcggtaagccgggggagtcagaattgacgtttatttttagccgaaaaagacgttcatttagacggcgttgaattagaggagccgaaaatggacgttcatctgaatgatggtgaatctgaggagccgaaaatggacgttcatctgaatgatggtgaatcggaggagccgaaaatggacgttcatctgaatgatggtgaatctgaggagccgaaaatggacgttcatctgaatgatggtgaatcggaggagccgaagatggacgttcatatgaatggcggtgaatcggaggagccgaagatggacgttcatttgaatgatggtaagccgggggagtcagaatttgacgtttattttgagccgaaaaagacgttcatttagacggcgttgaatttgaggagccgaaattggacgtgcatttggacgatggtaaaccggagtcgaaattggagacacaactcggtggtgagtcgccttggcattggacttcctatttttggatcattgatctttttcatttgcccatcattcgtttccattgtttttcttagacattcctcgctgtgtgagtggggctgccaacgtcgagctgcttgtgtctattctggccgagttgggccttactctcaccaattttgcggccaagatcaaagaccagttggaacaaatgaactgattgtgagcgggtattcggcagtcccaacccaattttctgatttatatccgaacggtggtcccatattcaatcatttattttttgcttttctttcccgatccatttcaatttttggtctcttgtggtgcatttttgccgtcttaatgttgaacaattcaaaattctctattggcagtactttttggacaattagttcgacaaataaatgcatccacaagtaaatggtgatttttccctcttttccgcaatattccgccaccatttccaacaatgaatctctcctctattcgccgtattttcacaagatatcatttgaatttggtagaattttcgtcatttctattagtttcctaaattctttcttttttcaaaattagccaaagtggaattcaggtatgctttcaatgagtatttctaccctggtcaggctccaattcttgaaatttaggcttggtccagtttttcgactaatgatgaatgaacatccttattgagaaaaaaacatatcttattttgcgtatttatttatctgttaatagagaaaacgcgatttttctaaatgaatttatttttgtctatagtcaaattcaaaattttgacaattttttctgttataaaaaatcgtgaaaacacgttttatggggtctttagggtcgttaatctcgaatctaacattccttttgatcaaattcgaatcccggatccgaactcgaacaaaaaagtcgaaaattcaaaagtttcaaaattcacttttatgttcgtacctgtacacaatgaccattttttgatgttgcaatggttttgggtacttattgggtttacggtatacttttaacacacatttttaaatgaaaaaattttaattttagaaattaatgaaataagtgttaagggattttcgaagtcgctaatcacgaattcgggctctgaccagcgctaccattcatcacatcagggacaatgaatttacaggcttcctgtaccaagggtaccctcatctaccatccatggttcgacccaaaaactcgaaaattttcgactttttgttcgagttcgggtcaggggtccgaaattggcaaaaacggatgttgtaatcggcagtattaccaatgtggtcaaccaagtgagagattgtcaaaaatttgatgatcctgctgctggattaaactcaaattttatcaaaacaaaaagaaaagacgaaatacagtaattgcatggggaggcacggtcccccagggtttcggcttgcgggcggggcaccgtcgccacccccagtattttgggctctaatgcagccaaaaaaaattactgtcttttttaaaacaaatttgattagaaggacctgtagttccgataggaatcaccgggaaatattcacggagaacagtaggaattggttttttaccgtacccccccccccccgccccccgggaccgtccgtctccgcgtaactgcccaccccaattgttgcaattcagaagttaaatgtgaaataccgttatattcattgatgaagaaagaagggatttaggaccaaagacaaattggcaataaa

SEQ ID NO: 73588 - DNA, 285 bp, Heterodera glycines
gccgcccctacgaaagggcgcaccaaccgccgcgttgccgccagtacgcgggccacggtaaccgccgccaccgcctccgccagtgtatccgccagttcggtaaccgccaccacctccaccgccgtaacctcctccaccagcactgtgaccacctccaccgccgtaacctcctccaccagcactgttaccacctccaccgccgtaacctcctccaccagcactgtgaccacctgcaccgcctccgccggcaggtcgactaactgcgctcacaccgccgacgtttcc

SEQ ID NO: 73589 - DNA, 1420 bp, Heterodera glycines
atgggcgagaataaaggacaatttgcactgattgggggtgggggtgagtcagaagaaaatgtttcttcggcttctccttttcgggagaatgaatcattcgtttgtcaaaggaccaccaatttgataggtgaagattaattgctgattatttcattcgttttgccattttctttggcttaattaatcaatggcactttcgccacacattcactaattacccaaatgctttgttttgccacctcaaaatgttttcctcaaagcttcgaccaattcaaaagccgatcagtttcactgatcttcatctttttgctgacgattcatcttttatttgcggaaattgcttcggaaaagtcatcaaaagaaacatttaaagatgtaaccaccaaaaatgagttaattaactgattttaggcagtggaaagtaaaggggagaggacaatgagccgaggggggggggggtaatcacaaaattgggcttagtggcattttctaattttgctcctatcctcgacaaaactccaaaattatttacttttaaactaatcaccgctaattggccaatttgaaacaataattaccttttacagtctctggtgcaaaattcgccaaaaagcgacctcaactttctattccaacaacggagcactcagaaaacagctttcatcagacatcattatgcttcttccgtagcaaatggccaatctggacaacattctcggcaccggcgacggatacccaccggaattattggcaaattaattgccaaattaagcggaaagacgggaaaaattgcagcgactgcaagcaaaagcgatgatatttttgttgggaccgcaaagggtaaaatgaagcctcaaaagggtatgtctgtctcaccaattccccattatttccaaagttggacgaattccaaaccgcgggacagcgcccggacgcttttacaaatcgcgcgggttcgaccccccgccctttgtctcttacgcggcccccgcaggaagcgaagtggccaaaaggacgagggcaaatgcactgacggggacaaaagtggcattggccgccgcgggagtcggcacgggcatttggtactttggagcggagaatgccggtgggaaagggacgaagccaatgtttttggcaaattaaatttgaaagcaatccctttttatttttttttagctctttacgtcgcatttatcgtcggaggagtgctcatcgttttgattttggcactttctctgcttttttatttgtttttgtgccgaaaacggaaaaagggatattatgcggtcaatgagcaattggcttcggcatttgccaagaaagtgctcttttatttgttctgttgatttttcatttttgacaatatctctacatataatttcttttttattatttttttattaatttattttttcaataa

SEQ ID NO: 73590 - DNA, 1301 bp, Heterodera glycines
atgtccaaaatccacgacttttgcggcgacgaattgccggctcagctaatgtccgcaaagaatgtgctcactctcacttacgtgctcaaaagtgccttcttcgctcaaaacccaacacaaaacactcgaaaatgggcgggcgattggcgacttcgcgagagagacgaaacggaagacgaacactttggatgggtgggaacgggaagggggggggggggaattaatgggagggtaattaatttggtggcacagattgccgaatatcgcttcatcaaagatttcggggcgcagccaatcgaagcgattgcttcggctgatgacggatcaagtgagttttatctttaaatcagctaattaacacccaactaaaacaattgactgaagaaggatgttcctttgtgttcaacggcacaataaaaaagacgggaaatgtttggagtcctaattacccgggtaattaacacggccgattggccattgccatgttcccacatttaccgactcattttgaggcttttacccccgtaacgtcgactgccaatacgttttcatcggaaggccgggccaaaaggtgtacatcactttcgagttggtcgcccaccaattaacactaattgatcattaatttgttcgcttttcctttttcactccttcttaaggtatttcgatgtcgaaggcttcggacagtaaaaagaaaagcgattaatggacaaaaatgcgaatgttttgtttcagttgcgaggagtccacccaaagtgattttgtgctgtttagcaactacaaaacccgggacaggtcattagcaaaaggaccattttgccaatttggacactttcgttgccttaaggacaaatcgtcgcttctgcggccaattgaggccaaaaggcgccgttcaaagcgaatcgaattatttccgaatgcaatttcatacgaatggtaatgtttctatatataataataattaaaatacatttttttaatgtttttcatttttcagcgttttttccttttttcatctgatatttaagtattcaaaattacaaatgataattcttttttccttaagctattttcgatggcactggtttctatgcccgttaccaatttttgcacgaaagttcgttaaattttcccggcttaatttgtaaaatgtttttgtagaacccttaaaaagtcgcgtaaaattggcaccaaccggcggaggagcgaaagggggacgaacttggacaaaaaataacacaattattctatcaatcctatttttacttacgttttggtgattttttggaaacaaaaataaa

SEQ ID NO: 73591 - DNA, 1004 bp, Heterodera glycines
atgataatattacatttgttccttttcctttcatcaattttatgctgttttggcacaaatggagtgcaaagaaatgaacaccaaaatgttgctgaggttcaattgaacgtaattaaatttaaccataattgtcataaagtatatctcactaatttgactaagacatgaagtgagagagagagaatggttaagagtgaaagaaagagagagactgagacagagtgatatgagggtgagatgagagagagagagcgagagagagagagagcgacagagagagtgagagagagagagagagaaattgataaagaaattttttaattgggctttcatgcataatttaaaaataaatatgtatgtatttagaatgtaattgatcctaatgacttgtcatcacctgggaactttgttgaagacgaccacccgccgaagttctttcgcatggacatgagtaaataaaattttgaatttaagataaatatatttatttatttatttaaaataacatcaggtcgataaaaattttttctagagttcttaaattattaagaattattgggtcttgaaaaatccaatcccatgcctaattaaaatcttactatacctgcaatctttgtattaatggaatatacatattgaaatttaaaattttcttagataacacattgccaaaaacttttgctgaagagccattacaaagaaaacggcgagcaccagaaaaatatgggacaggaaagaataagcaggcgcaaaaggacaagtaattagtaggggtgccaaaaatatgtacaaaatatgtaagaaaaatcgcgaaatatgtacaaaaaaccacaaataccgaaaatggaaaaatttttcaaaatattaaaaaattcaaaattttgaaacgcaaaatatcatatttctatttcaacattttgggcttttataaatttctttgtaaatattttggcatttttcgaatttttcatgtaaaatttcagaaactttttaacaaaaatgca

SEQ ID NO: 73592 - DNA, 208 bp, Heterodera glycines
atgagtaatctcgatcaaaataggacaataattttgatcaaattgagaaatggccaagacaagcgaacaagttccaactacatggaccttgaaagtccgggatctgccctgtcttctgtacgacgatctgacagtgggaaaagcccgaaaaaagtgccaagatttgccgaaagtccggcatcatcatctcgatcgtcagctcttgggc

SEQ ID NO: 73593 - DNA, 526 bp, Heterodera glycines
atgtttcgaatcccgaacccgaattcggacaaatttcttgactttttaatttttttatttcttgcggctagtatcttctacagtaatttgtcagtttggtcggatgtgcgtcaaacggaaaaaataattaaaattttataaaaatataacaaaaaataacaaatttcagaacaaactaaggtcgcatttcatagtttcgggaaacaccagtgagaaaattgataatgttttcgggattcacattggcattggcataattgtgatcattttgggggaggtgattgttattgatgtcgttatagagtgcgccgtcatgttctaacttaactttgtttcgttttgttttaattttttgctgctggtccatattatataatttaaatgggtcggggtcacttcggcgcggaccatttcggcgccgcaaattttgaaatgctataacttttttatttgtcagttaactttagccaatctggcatcatttgaaagctctatgtgtgctctatattcacatgtcaaaatagaa

SEQ ID NO: 73594 - DNA, 377 bp, Heterodera glycines
atgaaccgacggtaatgaattttaaaagtcacaaattcgtcgtttatttgactaaactgttttcccatttcagttggatttgcaacgacgtttggatggacattttcccctcttttgaccgtcctcaacttggcctcaaattggcacttctttcgccacgttttaattcgctggtggacaaatattttgatggcaaaagcgaattgccaatttggagacaaatcgtaattcgtcgcaagggcattggaccagaaatgaaactttatgtagagatggattacgtatttgtgccatttccattgcccgaccgtccgttgcccagcaaaatccgttttgaatggcttcagattgagtaattaaaaaacagttttatggca

SEQ ID NO: 73595 - DNA, 2431 bp, Heterodera glycines
  unsure (1)..(2431): unsure at all n locations
atgccggaccgtccgttgcccagcaaaatccgttntaagaatcttcggattgggtaaatcaaaatcagagagctatgacaataaaagctttccttccatttttaggtacactgatcactccgtcatcgcttttcttcgttcaaatcatcaaattttcgacaaaagaggcaccaatttacacttgcggattcaatcatcacacaccacggaaggccagcggatttgggacatttttgttcgtgaaatttggccaattttttctgaaaacattcgccacttgggctttccccatggtgatcagttggaccatttgcttcgtcaaatttcgccgacaattctcatcgatcttaaccaattggtttcaatccattcatttggtctgtcgcccgctgcgtttggtgatgattttgatgggccaaattcaacaatttctgctggccaagcattgtccaaatggttgcactctccgagaaacgatggacaacccaagcgattgcgttgcgtagattacaacaaacaaacggacttagattgggtcaacaatttcaaggaggtgtggccccacattttcaacaaatcactgatatttgttcctatcgaattgtttagcattttcttcgtgccaatgccatttcttccgtcagttaccaaattcttttttctgttcgtgtgccgtcaatacaaatggtgccgtttgaattggtgaacgaattgacaaaggaaaagctgacattgaccaaagcaaatgaaaatgactgggagaattggataatgaagcgatgcaaaattggagaggccgcggatgttcagcttcagaaagatgaaaattggggcaacaattttaacaatgtggccatttggcttttcagtactgattgcattgggtgagcaattaaaaaaaacatttagttttgttaaataattcaaatttcgcttaattaaggccattgtctccgccatcagcagaagaagaacaagaagcgggacaaaacagcgaaaaagtgtcgtcttctgctgacaattagtgacggacaaacgaacaaaaacggaacggtgatcagccgcagaagaagaaatgaattaattaagaaaataatggaccaatcataattgattagtgataaaatgtatatttataaaaaaaacctctcaaatatattttaaaaattcggattaaaaaccgcaaaatatgtaggttttatgctctaaaaaaccctaaaaataggttctaaaaggaaaataggctctaaaaagtctcaaatttaggtgtgtaaaatgacaaaatttattcaaaaaagtaaaaaaattaggaaaaatttttaaaaacaaaaattctttttaaaaaataaaatttggaaatgaatttttgagaaaattttaattgcttaagggcgtatttataaaatcaaaaataggttctttcggaatttttttaggcatttaggatttaaaaataaaaacctaatagtcactaataactagggaaccgatttctagtgaaaaaactttttttttttgctcaattgttttgaagaaaggagctcaaaaacgcatttctgcgttaaaattttttcatttggacgtcatttttcgtcactagaaatcactattttggcgtttcgtcacttaaaatagtgaaaattcacttttttggctttttgtcactattttttcactttttcgacattttttggaaaatttgttaacaaaaatgcaataaaaacaaaaaatacacccctaagaatcgacctaaaaatttttcaaaaaataccagttagaattggaaaattttcataaaaatttttcccccaaatttttcttacaaaatttttggtttaaaaatttcaatatttgctaaaaaaaaatgtaagaaaggaatgtaaagatttttttgctcaatttttggctgaaaattatgtcactattcgtcactattttggacttttttcactattttggcactttttcgtcactattttagttaactatttcgggatttttcgtcataaagttggttccctactaataactagtgatgctcgagagcaaaaatttcccgagaccgagacttgaccccgagactcgagaccgattccgaacttgaccccgagactcgataccgagacccaaaaaacccaagacttatctgatcaaggaggctgcagatgatgaagcgaaagtgttctacttaaaattagttccttttttgttcaaccttgttaacatatgcgtggcccattcttggttctgttccttacagatccagcagcctgaaccgatccaagcacaaaatttgccagccgaacccgacgaactgagcccacaaacgccgaaaaccgtccgttgttccccaactccacgtccagtccgtgaacggcgtccggttgttcgttactcacccgaacccgtggcaagacgaaaacggaaatga

SEQ ID NO: 73596 - DNA, 702 bp, Heterodera glycines
atggaaaataaacagcccgagcaaagtgtggaagttgcaccagcgaaccccggcgaggaattgtcggaagcgaatgcgacggaggaggcattgttggcaccggaagaagaggcaaaaacggcaccaatgccggcggaaagtgaagtagccacacagtctgaagagaaggagaacgtgccggaccaccacccggaggagttgaactcttgtgccatggaatcgactcggctcattccgcccaccaatcacttttttggttcgttcattatgaatattataattcttttttgcttttttccagcacaatattgcgctgaattggttgggagactgctcgagaaaacttcgcagaaggatggcttccatctgcgcaaagaattgaatgggatcatgacgaaatatgaggccatgaccatcggcaaataagaaatttctcttccgttctctatttttttcttttttttacgaatgcataaaaagatgaaaactgcgaattgacttagcaaaaatacttcactattttccttaaaaatatgtgaaagtatactaaaaaatattgagtaaaatccaacgttcgcagttaacgtttttcacagtcttttgcgtccaaacttcacatattgaaagaaaaaaaatcgtcgttgacttgcttttggacttatcccaaaaatgataaatatggtttttattgaattaattaaa

SEQ ID NO: 73597 - DNA, 290 bp, Heterodera glycines
cacaatggcaccggcactaacattggttccggcactggcaacagtcacaatggcaccggcactttagccttgaggcgcccgtgggggtgtccgccgctggtccgaaacgtggacagacgccggccgcgtaggtcaaggaaacgcacccgtggcccctacagcgacaattccgacggatcggcattcactctttttcatggaatgcatggtagttttgatacttggggcactgcgggcattgacgaatgggaccaatcggcacagagtgtacacaattacggcatggttgg

SEQ ID NO: 73598 - DNA, 2167 bp, Heterodera glycines
  unsure (1)..(2167): unsure at all n locations
atgattacgggtgaaaatcgtctctttgccgttgactcggacaacccatccgcccacacttcagcaaccatcgagataatgtccccagagcatagaattgaactttgtgtcatcgacgagatccaaatgctcagagacccacaaagaggtgctgcttggacaagagcactgatgggagcgcctgcggatgaggtaagaaattgggacgtaatcgtttttaaaaacatttttcctttgcgatttatcgggtttaatcaattttttttagttatttacagtacgaataaatttcttttttaaacaaaaattttcgaggttttagttcaaagacttaaaaaagacgatttccttttctgcatagctttttaaagaaaaaacatagaaacagtattatttctagagaccgagatttcatttatttattttttgcctattttaaaagaaaaactatccttcattttttaatctaaaaaatgattttttaaattatttagttatattatacattaattaaaatttactgatttttgtgtggaaactgcccgccattgaaaaactcgtttgactggcttggagaagccggatccagactggttgaaaacagcagtttccgggtccggcctctaaaaaatcagtcaaaccgggtttatatattttcggttttctccaagtctatacccatatgcttgttttactatattcagattcatctttgtggtgaagaatccgcttatgatatcgtctgtcgtttgctggaccctattggtgaacatgttgaccttcgtcgatatgaacgcaagggcaagttggtcgtgatcgtaacccacggacttcgtgatctgagctcaacaaaggtcgtaatattttttcattgtgttatttaattcaaattaatccatttatgtttaggatggtgattgtgtgatacatttttcgaaaaaaggcattctcgacatggcacgccgattgaaatttgaatacaaaaaagaatgtgctattgtatttggagatttgccccccgaggttaagcgagaacaagtcaaacggttcaacgaccagaacgacccgtgcaaaattctgcttgcaaccgatgcaattggaatgggaatgaacttgaacatcaaaaggtcgcttttctttttaaattgcatgggtcaattaatctttgatatttttcagagtgattttcacaacattgaaaagtcgtgatggctctttgctccccgcgtatttcgtaaaacaaattgccggcagagctggcagatacgcgtcagcatattgcaccggcgaagcgatggcgttggatgatgctgatgctggactgctcgagaagctgatgaatgaaccaattgattccattgaccaggccggcattttgccttcattcgaccaaattgaggtgagtccacgctctttttcattcatttattcagaaccctttaataatccattgaagatgttttcctttcacttgccccaatattcgctgactcaactgctcgacatattcgtttcaatttgcacagttagcgaaaagtactttctgtgtttgaatgactcaattaaacaaattgcgcaactcattgaacacatccaactttcacttagggttctcttctcatcatacaatatttataacaattttcagcaattaaggaacgttacattttctgcctcaccccaatcccttccggtgctcacccctttcttaactcggcttttatcaaaatggtccgacgttattctgagggcaatgcaataactttcgcatggatccgtcctttggttttgcctgagttgcgaattgtcgacagagtcgacgcggtcaatcgacttgttgacgtttacgactttatgggcgcgtacctttggcttagctatcgttttgaggtaacccttatttgaatagcaatctttacaatgtnttctcaatatttaggaacatttttccgaccgagacaaagtccgcgagttgcaacgagaatgtgtgggatttattcagaaaagcatggacaaaatgttatctgagtatggagaggaggaggcaaagggagcgccgcgcaagggaaaaaggagggaaaacagcgattcggagtacgaattgagggcgatgggactgcacaggaacagctcgaaaaggcatgacgacactgtttccaaagtggta

SEQ ID NO: 73599 - DNA, 1259 bp, Heterodera glycines
  unsure (1)..(1259): unsure at all n locations
cccgtgcccactgacattgacatttcccgggcacaacagcccaaggcgatcggtcgtctggcggccgaagttggcattgcccagtccgagttggagctgtacgggcacagcaaagccaaagtgtcgttggcagtgctcaaccgtctcaaggagcgcccgaatggaatgttaggccaacaacaaccatttttggcacatggcttcgtcctcttaggcctagcatagcccccactttttgataattctcgattttgctgccgtaaattaccgtaggcacagggggtttgcctgaaaatttcggcgccaaaaaatgccggaaaacggagagcgaaattttaatttattttttattttcctaaaaaaatatattttttttaattgagtatctaaatttcatatttattttgctgcgctattttttcaaattttttgaagagcggaaggtccggcgggggctttgaacttatttatgaaaattaaaaatccggcattttgatggaatttttaaaaatattctaaaaatttaaaatcattttttgtctccaaactcttcactaaataatttaaattctcgaggacgagtcagtcttgctgtgcttaaccaaaaacctaaaacattatccaaatccccttcctctgtttgaaggtatgtcgtcgtggccggcatcaatccgactccgttgggcgaaggcaaatccaccaccaccgttggactgtatgtatagtatacgatacagcactaaatatttccgtatttactaagtgtggttacggtattccggagccgggttaccgcccgaatcccggaactgagacccgaaaacccgacatttttatcgtctcgaaccctggcctggttttttggccatcccgacctatattagtctcgtcccgaattccggccctggccctaacttttgatggcacccccagttggatgtgatttcgttagtaatgccaaaattgtcagcctgttcgatcattgatactaccgtatttttctcagttagtgcccccggggcggcgctcaattagaaaaattattacagtattccatccacaaacacaccttttcaacgctccattttttaattggctgctttaagtgcgcaaagcttgtgcgcccatttgggtcgcaacactttcgcgtgcatgcgccaaccgtcgcaggggccaacctttggcatcaaaggcggcgccgcgggcggcggctactcacaggtggctgccatgnggggaggcattaagggggggggggg

SEQ ID NO: 73600 - DNA, 178 bp, Heterodera glycines
cgggatcaacgtggtgcaaagcgatggtgaaaagcgtcacctggtgggcgatgtgaattttgaggaggccaaggcggtggccggctttctgacgcctgtgcccggcggcgttggcccaatgaccgtggcaatgctcgtccgcaacaccttcctccaggcggtgtgccaaaaactgaac

SEQ ID NO: 73601 - DNA, 665 bp, Heterodera glycines
atgttccgcatttttggccgtttcgtcggcacttatcccatcgcatttctgatcttctcattgatccttgcttcgctgtcaggttgagcaaagttgcaaaaaatggaggccgaaatttagaaaataaaatggaaaattatagtttgcttaggttcatttcgctcatattaaaattcaaaaaatattcgattttttggaatttgagataataaattccatttcttttctatgaatctatttattttttaaaacatttttaaatattctcgaatatatacatacaaatttttaatttaatggaagattttttaaaaattcaataaatttaatttttatagaaaattctagattccgagccattgaaaaagcctatacctggacctgggttccatgttgacctggacctggatttcctgggaaaaaattttgaataatccatgtccatgaaaaatcctgccaaaaaatgcttggacctggacctgtttccagaaaaattcagacctgggtccaggacgaaaccgagaaaattcgcattttccaacccgccatttcctccttttcatggcatccggtatgaatttttgcgactttttattgtcaatttttaaagcaaatgaaattttttgcctaaattttgaaggcctttttattgttttactagcaaa

SEQ ID NO: 73602 - DNA, 715 bp, Heterodera glycines
atgccgggggaaacggtgccaaaaccgtacccatcacaaagtattggaccagagggataattgtggattttgagcaatagaaatttattttattttttacgagaaattatgaatatggcgaggaccctaattcgagggtaactttggatttagtcatcattccgctcaaaaagtttgaaagaaatgcggaataatgcatagagattcccgaaaatatgcatttttggttacggtcaatgcaaaagcctgcctgcccctaatttactaatgaaaacgggttcaaaattgggatatggaacccgaaaataggggagttttagtcatagtttattttttaatttaaagaattagcctattcaaagaaaatccaatttgctggattttggggaccatggctaactttaaaaatgcggccgaatttacattaaaatgctgccaaattttttgtggatttcggggccattggcatttgggtgaaatttaatttgtcatattttggcactttttagctgctttttcacctgtcccccaacggtggcggaaatgttcaggcgcaaaaagtcgtgcatccgaacgcattcgtccagccaacggagccggtgcatgctgtgccggtcgcgcgctcgcagcatcactgtggtcagcaggggatcgcctggggcattttgtgtaaaattttaaaatgagaaaaaagggtaaaaaatattttaataaa

SEQ ID NO: 73603 - DNA, 2072 bp, Heterodera glycines
atgagatggctcttcgtgagcatcctcgtttttgggcagccaagcaattccctggaactgtggaacaagtacaaagaccaaatgtacaatccacagggcattatcagtgcggctatacgccaagcacgggagcaagaagcgctagccgacattgattggcgattgcacttctttaactcaagctgcttgcactgtggcctcccagatccaccaaattcaaaagccaaaaatatcaatttggcagttgaagaagctttctttggtgatgatgatctgaatatgtcgcctggccagcaaaatcctaggcagcagcaaaacgctccacctccactcaacagcgaccaacaaacggtctttgatgctgttgttaaggcaattcagtcggacccaagggatccgactgtgcctcgccgtttcttcattttcggcgatggaggtacaggaaaaacattcctgtttggccaaattatcaaccgcttgcgcaagcccccatacacctataaagtgcttgctacggcatccactggctgtgcggctattttgctgccatatgggaaaacagctcattccacgttccgtctcggcagagaagtctcgctagacaagcttccaagcattccgcttgaaagcttctttgctcgacggatacgtgaggcccagctcatcatcattgatgagatcaccatgcttcataacacggtgattgcggtaatcgaccgagtgtgcaaagaaatggcaattcgccagcacaaggacctcctcttcggaggaaaaacggtcatttttagcggtgacttcaaacagtcactgccggtcgtgcctcatgaaggcttacccgctcaggtgacagcctgttttcaaacatctccgttgtttggacagttcaccacgatgaaattgaccatcaaccagagattgggccaaggccagcaagcgtacttgcaaatgtgccgccaaatcggccttggagagaccggagaacacttctggattcctccgcagttcctcgtaaagagcagggaagagttgatagactttgtctatcccgacttccaaaaactccttggaaatgacaaggaactgctcaatcgtctgatcctcgcacctcacattgacacgtgcgatgagatcaacgaaatcatgatggcgaatgtgcctggtcaagtgcgcgaatatttgtcttcggacaagccgcttgacgagcgtccactggacatcgatgaaattgagtcggaagtggcagcgttgaaccggcgcacagactctgggatgcctccccaccgtctgcgacttaaggtcggaagcgtcgttgttctacttatcaacaaaagtgataaggaaggactgatcaacggcacacgcatcgttcttgaagaacttggcgacgatcgtctggtcggtcgcgtcattaacagcaacgctgttggtggccaggttaagttcttcatcgaaagaacacgaaatgtctacgaggacaaaacgcctggcggcttaaaatatgagcgtttgcagtttcccatcaaacctgccttcgccatgaccattctcaaaggtcaaggccaaacaatcagcacggtcggaattgacctcgaaagggatgtattttcccatggtcaattgtacactgcattttcaagagcaacggacgggagcaacgtccgagtgtacgctcccagaagggagaccgatgcacaagacagagtcaaagtgctgaatattgttgcaacgaaaatgctcaatttgcaataaagcaaacgagttaggtccagcgcgtgcacactttaagatgtcaccccgttctcatctgcacttaaaacggacacatattcaaaaaagtgctgccagctggactgaatgaggcaggtgggccatgacgtgcgagttagggcacttccggtttccattgcattgaaaaatgcagtgtgtcaaggtgaaaccaagtgcatgtcggctgacgcaaagaccctaacacaaggcctaggtagcgaagctcccaaagcgcgaagcgctttaagaaccaagaaacatgtaagcacacacccgctagttcctacataaaacgggaacaaaaa

SEQ ID NO: 73604 - DNA, 625 bp, Heterodera glycines
atggccaatttgttggttgatcggatgaagctgatgctgagcacgggtgattatgcggatgtgcactttttggtgggcgacggagacggaaaagaggcaagttttggcagaaattaaaaattttttgaatttattcatgggtttattattgacaaaaataattcaacatatttttttttaattcacaatattttaacatttttttaaagaaatgcgtaattttttgaaataattaaaataaatttgctttgcaatattgattaaatatattataatttaaatttgcgttaacttttggttttataaaataaaaagcaagcaaaaaattaattatttactattttcacttgaaataaatttaattttttgtatttttttcccggttggtcccggacaaaagccgaagtcccggtcccggcttctcaggtcttggcagttccggtcccggttttggcaaaaattcccggtcccgtacaactctaatttttttttttgtcaatttattttatttttcaaaatttattctgttttaagattatcccagcacaccgagcagttttgaactgcggttccgacgtatttgcggcaatgttccgttacgaagcaaacaaagcagcggcgaata

SEQ ID NO: 73605 - DNA, 365 bp, Heterodera glycines
aaaaataattccttacacaagttttttacaaccacttattgccaatttaatttcttgcagatttaaagccatccattgcctgccggttctcgggacagcaaagcactaatacggtgtttgactcacttcaaaaaataattcattacccaaaagttttttacaaccacatattgccaatctaatttcttgcagattgaaagacatccattgcataccggttctcggcacagcaaagcactaatagggtgtttgactcacttcaaaaaataattccatacccaaaagttttttacaaccacatattgccaatctaatttcttgcagattgaaagccatccattgtctgccggttctcggcacagcaa

SEQ ID NO: 73606 - DNA, 381 bp, Heterodera glycines
atggagcaagactttccacatgatcagctgcaacacttcactgtacatgggcatcaaggtcaacaaagggaggtacacaacccggttttgatatggtacaatggactcaaccacttccaaacaatcttggtcagtttctcagtatatgtcaattggagctcagttcatttggtgtttcagggtcctgaacagctgaactaccctgccgcacacgacatcgtgacgaaccagcagtacgtgactccagcgcatctgttacaggatgctatggatgtcgggccatctctcgcagggccttctgttgccatgcaagaggaagaatttgcagaagaatttttaccgacaaagaaattctgctcgagtgatgagcgaaggatctga

SEQ ID NO: 73607 - DNA, 787 bp, Heterodera glycines
attgacagccgaatggcgttcagccgagcactgctcattgtgctctccgcctcgctgacactgcccatggaaacgctggagaggagcttcagtaagtgcaaaacgagtggaagaaagcagaagcgagtagagggccatataatcaattgggtaatttttgaggaaaattaaaaacaacaaattttcagatgcatccaacgtctttcagtagtccataatttcatttaaattttttcaatttttgctcaaacaatctcaaaaatggagctgctcccgtcttctacaaatatgagtatcaagaagccagacccgtgtccagaaaaaaaaattcaaaggggttccatttttttgttgctctcctcttcaaaatttttagtgcaaattttgaaaattgaggggatacattaaatttgtacgagttttctgcgatttaattaaataaaatggaattccatgtgattaaacttgaaatacacagaggacaactgcaagtcggaaaaattgcgcgaaatcattctggagacaatcggactctatccccaccagtacagctaccaagcaaggtattaccgtattgtaataatcccttggacaaataataaatcggtcgtattaataaaacagacacatgaaacaagtgtcggaaaatcggtttggtaattggtggagcgcggtgattatcagtgagaggggcggctacggcatgagtgccatttatgaccaacatcaaaacacaaggcgagtggaatatgggcaagggatgagtcaggcaaaggccaggcccgga

SEQ ID NO: 73608 - DNA, 1885 bp, Heterodera glycines
atggcgaacagcacgagaggaggacagcaacaacaacaacggtgacgagaaggatgaagacgatcgaagagcggaaatggtggaggggagggggaattttaaagaaagtggaaaaattggcacttttgttttatggcaactgtaggggagacccttttgcttacggaaacgcggctccaataatttaagaattttccgagtttgtagagatggtgagccaagcgatggtgatgatgatgagggtgatgctgtgcaacgccactctgacgaggctttgctggacgcacttcggcaccaattcgccatgcttcggctggacgaactgcgcgaacggttgcgccaccgcaattgcattgggggccagtgaatgcgggcaatcgacgcatttacgaggccaaagtggcccatttggagacacgacaatggcacggaaaaggaggacaacagcagaagagggacccaaacgcaataaaacgtaataaaagggcaggggaatttttaatcggaaacctatttctttcgaaattgaaattgaataatccaagagtgaaaaaaatgtatttatcattcattaattactacggtgtgtgtggccattcattcgttctctttcagaatacagccattctctgcagcgtttggtggtcgccgaagaacggggcaatgcggcggagagtcagcgcattggcagaagggaggaggcacaaatttgcacggaatacgcccactcacagcccaccaaaaaggaggtgaggggaatttgtgagtgatgaggaacacttaccgtactctccgccggtggttgattgggtaattaactactaatgacaaaaggggctggcaaagcaccgactctccgtcactttgttggtttgtttcaactataaatatgggttttctgcaattagttttggtgtcattcgatggtcacattttccatttctacaaaatttggttaaatggattttaatggcaattttattacccatttaatgtccctccccccttatttgttaggtgtccttcttctgctatttgctgaccaatccgtcccaattgacgtccttcgcctgggggtaaaatacatttctaatcacatgccaacgcactttcagcaatccgagaagctgaaacgcattttggcactttgggaccaaggcgagggagtgatttcgcaacaattgttctgcaacattcactccgccgaggcgcatgtgcgcgaaggggcaatgatcgacgccatcggtggcgtttaataggagggtttagtcgtcttaaatgcaaattcgacctccattttgacaatccgaattagggttgtcccactaatatcggagacgtacatgccgggaccaaatccccatttattggcatggctttttaaaaaggcgaaggttcgccggcgcctacgagaatacggctgagaaacagtgtttattcgcttttgaatcaacaatttttcagattccttgccgtcctcaaatactacttgaactccttctaccctgcacgcaaaaccgacgacgcgaagaagccgtacaatccgatcctgggcgaagtgttccgttgccgttggaccctgcctggcgtgccgttgtccgcaagccgaaccgccggtggaccgttcccgggctcagcaaccaaccaggtccagtttaagtgatagcctcgtcactcattgagaaatctaacatttgttcccacgtttcagatgacgttcatcggcgagcaagtcagccatcatccgcccatctccgccttttacgtcgaacatccggaatccggcgtgacctgcgcatcgcacatttacaccgagtcacacatcgctgggcttacatcggtgggcgtccgcaacatcggccgggcgactgttcgactccaaaac

SEQ ID NO: 73609 - DNA, 733 bp, Heterodera glycines
aaatctgttgcaaaattagtatttcttttcatattgcacgtatttttattaaattttcattttaggcttgaacgtgatgggaaattggcggacgctcgtgcaaagtttggccaactgttggcactctgtctcaaccgaccactagggcgcgttggaaggcatcgcacggttgtacaaaaatgatgacaacattggcggcacggacatttttatgccgaaccgacaataaaatgttcatccgtttttgggaaccacgaattcaagcagttcaccgctgttttaagccgaaccgacaaaaaacccttcgtcaatttaggtgggctcttacgcggcgatgacttcaaacggtgcgttggtggcagcaaaaacaccgccggaggtgcagcgcgagttcgcctcgctcgccaaagtgccattggtcgccgggacggtcaaccgcggctcggaactgatcggtgccggctgttgcgtcaacgattggatcgcattcacaggcgagtgttggtagtgacgtgctgagtgagccttaccattttgggtttttcatttcaaaatcaaatacttacctttctgtcgaaataaaattggcgacaaaaaatttcgttttcccatttgcaggcctcgacacgacctccgccgaactgtccgtcttggagtccatcttcaaattgggagacgcggcgctgagcgcaatttccaccgattcgcgcgacctttgatagaatctatgctt

SEQ ID NO: 73610 - DNA, 710 bp, Heterodera glycines
atgtcggctgagttggaaaaggaaaagaaggagaaggaggaggcaaatgcccgtgttgccgagttggatgatcgtgtggttaagttggaaaaagaaaacgaggatttaaagaaggaaaacgaacagttgaagcaggcgctcaaggcagatcggaccaagtcaaaggtagaactgtaacttatttccttttccattaatgaaacacgctttgtcagcgcccagcagaatcggaggaaaaaatgtcccgaatggagcaaaattttctggacgctgtaagtgttgtggatgctcttgaggatgccaattttttggtaatcaaaaattttttaatttgaaaagaaaattaatttttgaaggaacgcgttggagggaaaggtggggaggaagacaaaaagaaggaaaagggagaagaagcggaaaaggacggacaagtggaggaaatggaggaggacaaaaagaagaagggagaaaaagtggagcaaaaggaggacaacgagacgaaaaaggaaggagagaaaagcgcggaaaaggaaggagagaaaaatgcggaaaaggaaggggagaaaaacgcggaaaatgaaggagaggaagagaaggaaacggaggaaaatgaagcggaagaagacgatggacaagggagcaaagctaagcgaactcgtttcatgtaaatgctgatttcacacgtatgatcttgttgacatggaaataaa

SEQ ID NO: 73611 - DNA, 142 bp, Heterodera glycines
cagcgagtagggggcgaaggcgggcggggggcgggcgtgcgccgattgggtgtcgcgaccaagggccgcgtcgacaggggcggcccgggggagcccgggctgtgatggtcgcacaatgaggagagcaacggctcaggcccgc

SEQ ID NO: 73612 - DNA, 575 bp, Heterodera glycines
atgccgtctcggacacttgttcgtcattgtattatcattaggatgtataccccgagttttagcctggtccccctgggccacccggcgatgtcggattccctggccaaccgggaaaccccggacaacctggccttcctggccaagatgcgaatgacgggagtatgggagcggtaaccttcaaataattttattttttctttattttaattttagcccggccttcctggcccgcccggcatgcccggaatgcctggtccgatgggcatgcccggcacaccggcagggcccggcatgccgggacaacgcggctttcccggaatggcgggcaatgttggcgagcccggacgtgccggactcccgggaattgcaggacaatccggacagagacaggcggacggcggatagtcagttttttttaatttaaattttaaattttattattttttaattaaattctttctttcagttgtccttgcccaccaaaaaggaaacagcaacggtcaatgcttgttgttggagcggcaaaaaggagccttctcttcccgtagaaaatttcttttttgtttagccaatga

SEQ ID NO: 73613 - DNA, 1727 bp, Heterodera glycines
atgaaaatagaagaagcttattcttctgcgtcgacttcatcacagagaacaattgaaccttcgcaagcaaaacagaagcaaaaagtgccgaccatgttcacgtcaccggcggcaacatcaaacaaaaatgaggctgccaaagcaaaatggggccaaaaagggacacaatttactttaaaattggcggcttcatcaaagcgaagtgccgaaacggcacaaacaaaaggagagcaaaagttgcaaaagcttctgctatcaccgaagggaaacgaaattgtgcaggcaaaatggggccaaaaagtgccaggactttacacttacttcgaaattgccattgattgcgggtaaataaaatagttttggggacgggacaaaatatcgccgcagaattttaaagaaaatttttcaaacttataaatctttaaagaaaaaattttaacaaactttttttatgggaaaatttaaataaaaaaaaatttgaaattttcaacgattttttttttgaaattttatgaaaattattaagttttttttcgaaaaactttccaaaaaaaaatttttcaatgatttttttcttcaaattttcttataaaaattttctaagattttttttaatgaaaattctaagtttgttaattttctttttcaatttctacggcaatatgttgtctcggcgatatttcgggcggcgatattttggggtgcacccattagtttctagaatttactaataaaaaaaaacatagggattgctttcttgttggagtttcgccacttctcaatgcgaatttgggtgtgaatttatgcgaattgccaagtgccattgcgtacaaaagcaatggtcaattttgtgccaatggcgacgacataattcggcatgacgaggagaagcccaaaagtcaatcagaaattgcatatggcgcgggcgatgtggtcggatttgggtacaatgccaatgcattctttggcacgaaaaatggagaattaatttgtgagtgatttatgtaaaaaataaataaattttcaaagattttagggactcatgataatttgattcgatcggcaacaaacgatgccaaacttttcccaacgatcagtttttgcgggtttggaaatgccaaaatcaaagccaactttggcgaaaacccatttcaatttgacgtggccaattatgtcttgacgaaattcctgctgtgatttcgttacaaattcggtttaattgttccatttcttaatttgtgccgttttcatccgatgcatttgtatgccaaaactatttatacatatagtcagtcataaacagaactcgcgttatatgcagataatcataaaaatgtacacaactttttcaaatttagggtaaaatttcctcaaaattcattcatattcgctaaatttagggtaaaatttccccaaaattcattcatattcgctaaatttagggtaaaatttccccaaaattcattcattttcgctaaatttaggttaaaattctcgaaaatggataaatatggcatcaaaaacaattttagaaaaagctaaaagtgttaattgagaaaatcaagtaaagaaaattttcctttttggacttcatttgacataaattacaaaatttagcaagttaaatttttaatagtgtttcgagaaacttctttgggaaatttttggtttttataaaaggccgctttaatggatagacctttctaaagatttttttttttaataaa

SEQ ID NO: 73614 - DNA, 781 bp, Heterodera glycines
atgatggggacgaatcccaagtcgggatcccgaaaaatttcgtggggtcccgatcaaatcccgatcaatcccaaaagatattggaaaaatgatcgggacgaattccaagtcgggatcccgaaaaatttcgtggggtcccgatcaaatcccgaaaatcccaaaagattttggaaaaatgatcaagaatcccaagtcaggatgcggaaaaatttcgtgggatttttgagctttaacactagggttggcccccgacgtcggggttggaaaattcggggttcggggtcttcggggttggaagcgtcggggttcggggtcggggttgccaaatcgttcggggtcggggttcggggtttttcaatttttgccttatgccatatagtcaaattttttttataattttagcttaaaaatttttattattcataataataattttatgcatctttttatttctttttatcataaatatttttgtatagaattaattaaaaacgataaggcatttttaaaaagaacaattttcagtgaaaatctgtaaaaatagtcaaaatttcaaatttttcctccggcgccgggcctccaaaacttattttttcttaaaaaaaatttggctcaaaattaaaaaattggttatttttggtgaaaatcagtttacaattcattctaattctctaattttcagaaatttttcgcggtggcgcttaccgacactgccggactcttgttcccgaaaaaattgttatttttcaaatcatcttttgtcgcggcgcgcatgttctaa

SEQ ID NO: 73615 - DNA, 934 bp, Heterodera glycines
tgcgtaaagcttcgaccaacacccaatgatcaatttccattacatgatgaaatggttgctgtgaaattttgtcctgaccgcgtttcgcctggctttggcaaaaagcattaccgcaaagtggactgtatgctgtacaagagtacaatgcgtcaacggtatgttgttggttgtcatacacttactgtacgctagtatactgtataataaagtaataataataataataaataaattgaaaatatggctggcgatgtcttccttacaaatcaatgttataaaaaataagtgttacaattagtatatattttttaaattaaacaaattttaaaatgattaaaaaagatttaataaaatttttgtgcacccatttaaattattcaatttaattacatttatcaattttaggaatgttgtaaagttaacgtaagttttttattattaaaaataatttataaactacacaatattattattataaatttgtgagttttttctctcttttttttagcgttgctgctttgaaataagagtaagtgataataataataactaactctgacaatcaaatatataaatccattggatatattatatcctattaaaaaagtgtgtggattttcaattttcaggattgctgtgggcagcagaaggaaaaatccgtaaagattgatttaaaatcattacaaatattatacataatatgttaagaaatgctgtacaccaccacacagcgaaaatgtatgttgatgattataaaaataatattatatataattaaaatgttttttgtcatccaaatctcgcaatcttgttatcactcgaaagcttaacatgtttagaaactttttctaagttattgcttcgcgattagacaattactaaaaaagttatacttaaaaactgcgaaaaagtcgaaattttgaagattttctaa

SEQ ID NO: 73616 - DNA, 1025 bp, Heterodera glycines
atgaccgaggagttgctgaatgtgccgcatttgtgcgcctctttctttcggctgctcatttttgtttcggacatcgccgccgagggaattgcccaaagtccgccccaaatgctcgacgatattttgcgttgtgtgaaagccgctctcgactactctttcggcggggacagagtccgttctgcgctcgaaattgtcaacggattggcagcaaattgtgtcgaagactccgtgaagaaaacggggaaatatgcgacaatgactgaacgtcttctggccttggttccggtatttttttgcgaaattagctgtcacttttcatttctctcccaagaaaatgtttcaattggccatggagtacagcttcgagttggatttgctgagtgatgcttcaagcgcacttttttccctcatccttctcggcccggtcctttttcatatcaatcaatgcacttgttatttattgccttcctaattaactttcaggattcattcaaagccttcgttactcatttgctcaacttaccatccaatcaagaaaaccgagagcgcctggaggaagcgtttagccaacttttgacccctttccccggcgttgacgacatttctttcccggtccagccccattctcagctgaaccgccgctttcagcgtaacttttgaggtgttttctaatggaagaaaagcatcgccaaccaaagaaacctttcacatttaggattttctgatcagagtcagcggttgtctttgcttaaactgaccaacactttcacaccttcgaccgttcagttttaactgttaagctttgatttgacgggaaaacaaaaccatctcgctttatatttgatcttttgttatgaatttcccttttgttgtttccagtcagggcgtatgggaaagagaaatgaccaaaatcggagctcatgattttcaaaaaggaagacaaattggcaaatctgtcagcttcggtcttggttttctacgccctttctctctcctgattcattcctttttctgattgttaccga

SEQ ID NO: 73617 - DNA, 72 bp, Heterodera glycines
atgcggttgacatgtcaggcgatggttcggaaactgcacgcggaattggattatgcaagacattttccgaag

SEQ ID NO: 73618 - DNA, 3291 bp, Heterodera glycines
atgtacgttctgatggaacatcgctctcccgagaggcgtcccgcccgctccgttcactccgtcgaacgacatcgtctgccattgctcaggggccgtgccgtcgtgcacagttcccacccatcctccccccatccggcggcaattcgttgtcgctactcaatcactccgcagatgagcagttcggcgacaagtgcactgctcggcattgaggagaaaaggaggaaaacatcgtctggccaacaaccgcaacagcagcagctgaggagacgacaatttgttagacagaacggaattatggcaacagacaatgagcaaaatgacgaggctaataacagaggaaaagcagcggaagagcaccatcagcctaattttcaacagaataagagtggcgagagagcgagagaagcagtaccgacaaatgatcagcaacggcagcagaatattagcaattggacacctaaaaaattgtcatcgtctggcccttctcgacttcggcatgttcaacctccaccaaacataaaaggagatcaaaatggaccggctgtttcatcatcaaaattgcagaaaacacaggcgcatcactacgatagtagcaacggttgtgaacgcattgatcagcaacaacaattgcgaattgcggttggccggcaaccgcttaaatacgccagcagtaaggtgaggccggtgaagacgacaatgccgcaacaacaaattgaaaaaggcggtgaatacggtgacaaagcacacaaaaatagggaggaggagaaggagaacacagtcagaaaacggatcagcaacagcacaccacggcggacgacgccgaacacaacgcgcaaagagttgcaattggcggtgacgccaaaccatcgtcagcaaagtgatgttgaggtgattatgatgatgcacaacgacggaagacaacacaaacagcagcagaaacatcagaactgtaacgataacaacacttatgagcaaatttcatgggacaattgcagcggaaacaatgcaattagcgacaacaacaacaacaacatgatgagagtggtcgtacccaccagggcagttgcaatgactgaatggccacctccgacggatgaagaaccacaacagcagaggaagcggagaaaggccatgatggaactgcagcagaaagggctgagcagaagcaagtcccagtcgcgcaacaaccttttgctagcacaacaacagaaagcatcgctggagcacttccaaatgggccggtccaaaacggcgacaaatttggcatttgttgccggcgaatactcaacgcttggcgtcgacactttgtcactgaacaggaaggggggtggcggacctttcgcgcttctccgtcgtggtgccaatttacgaaagctgtcactgcagcggtgtcgtcccgccttttcgggtgcccaatcggcagtcgttgatctgtttgatgcattacaaagtgatcagagaagggaagagagggagcgagcagaagcattgcccaacggacagtttgaaaggattcagcgcgaactcaaagcattcgcggaacgccgccatttggcgttgggcaggcgacgcaaagtgcgcattgcggagttggggctggaccaactgcacgcgcagttggctaccaaacaggcgaaggccgatgcttcttctggcactgtggaaggctacaattattccaccaaaatgtttcagaggccacgcaagaagccattgcacgagtactacaacgacgacgacgccgaactggagggtgaggcagtggggaagatgaaggaggacccaattagtttttatttataatctacctccaaaaagctaattttcaatttttaagaattcttgagcggacatgctcccattttttgcttttcaaaattcatttgtgatccaaactcatttgtgtcttgtgtctttagcgctggccaacaccgttgatccgaatgccccacaatcaaatggccaattgatagtgccggctcgaggcgactttccttcggccagtacgagtggtgcgtctgcgccgcctcccctgccccgttcaattgactctgtgctgtacaaatgggcaaacacacagccaaagagtgtggcagcggttcagttggacagcggcggaaaggcaaccgcaacattaacttattgtgagagatttatcgagcttgaagatttttgggatcggattttggcatagatatttttttttgaattgtctcaaaattcgcgaaataccgttaccaatatgccgttccattctcttaaattttgattgtagccaaattgctgagtcgtgccaacaaagtggcctaccaccttttgacacgacaagtgacagtgaacacgggcggtgtcaaagagcgtgtccatctgtgcctgcctgacgatagggtcgcgttggtgttccccaacagcgaacccattgcctttttggtcgcattttacgggtgtcttctcgccggtggtcagtttattgtaggaaattcgtttgaaagggaaacaaactcccccttttagttgtgcctgttccaatcgaagtgccaatgccgaaaagggacgtcgccggcctgcagcagttcggctttctccttggcagctgtggtgagtttgtcgtccgacttggctttggtgccaatgtttttctttactctttcctcctctaaggtgcccatgtcgcactcacttccgaaagttgcatgaaaatgctgcccaaggcgggctccgtctcttccgcctcggccgtcccttcctgctcagcttcggctccttttggttccgcctcctcctcttccagtgcccttctccattctccgtcgtccaccttcgcttcctccaacgccttcccttcttccacaacgggttccaccggctccggttcaagttcgggtgctcaacgcgaccacaacgcattcattcaccattccccgcctcagaacccaaacgatgtgaccgactttaaagtgcccacttattgatgcttttaactgcaaatgcctaaggagtaaatttccattttcaagggatggcctcgtctccattgggttgtcactgaacaccttggaaaaccgtccagggattggacactgccatcgttggttgcggatgaccacccggccatacattgagtacaccttcgatcgcgaaggttccatcaagggggtaagagaggaacgaacttggcattttgttcaattcacactctcccatttttcattgtcaggtggaatggtctcgacaagcaatgctcgcccattctcgagccattgggttagccgccggcttcaaggaaggtaa

SEQ ID NO: 73619 - DNA, 505 bp, Heterodera glycines
atggtaaaaataaatttattacatcatttattatttgtgcatttattttaatttctttcaacatgttcattcatacatgacaaaatgacaatataggcaaaattagtattttaactttttttccattaaataaattactttacttaactgctgatggttacttttattatttaattaatttattttgtttaatataattttagttttattttttattaaacaaatattattcttattgtatagttttacctaataatatttttattataattattggaatcattatgttaattgttaaaatggtgctagtgaattaataaactttaattctatttatctctgagtaaaaaaatttcgaaataagagaaaaaaaattttagccaagcttctcatttgttattatggtatggaattttaccaaatattttttttgctcttactttaattacatttaatattaatcaatgcgtatgtgtttgatatttattttactaaattaattcca

SEQ ID NO: 73620 - DNA, 4364 bp, Heterodera glycines
tccacattctgagccgtacggtgcaaagcatttgcacaactggcactgttggtggcacatttgactatgatcagacatggatatgtgcgctgtaagtttttcttatgattggcaaaaattttcaaaacaaaaaaaacatttccaataagaaactctaactcaaagaaggttggaggcaaaaatttacaaaaaaaaaaaattaattcaaaaaaaaatttgaaccaaacatttttctattcaattcggctgaaagttttaattttaaaattagatttgaaatttaatttacttttaaattcaatttccagatgcatactgaacacggtgcagcatcgccatgtgccattgcgcgactgtcccatccgacaaatttgggccgctccatgcaagacttgcgcttcatcatcattgtgattgcaccgtccagagcggtaaagtttttagcaaatggtaattaggtaaataaatacatttactatttcactttttggactcacagaaattttttaaaaataaataaaattgcactcaaaaaaagccaaaatttttggagttgatttttaaaaaatctggaatatggcttatattaaaaagtctaaagttttataatttaaaaccggtaccccccccccggttttcggtttcgtaattgaaattttttcggcactttctcagtatttgatgagtgccttcatgcaaaatgaaatacctatatgattttaaattattaattaattgaccaaatgagtttttcccaatgtaccttacccattttacataaatagagttattgttcaaacgatcaacgattttaatcctacaatctaaaattaaaaaaaatacttttgaatgtgaaaaaatccttctaaaaacattttcataaacaaaattattcaaaaaaacaacaacaaacaatagaaagaaagtaaacagcaatgggagaaatagtacactaactattacattattttacggtaaagaaacgagcgctgcggagaaatagtgcatgaatgtgcacccctctttcacccatttctcgctctctttacaccccagcaaaaaataaaatatcaaatttctatcatatataatgaaaggcgctccccgatacaagtaatgttcaaagtgtgtttcataattgaaggcagttaatgaaatttaaaattacgctgaacaggtcggttaaattatattttatcattttatttccattattcactttaatttgagtaccaatcgtccagttgatcgatttatgagaatcttaatactttttgcctttgtttttgtattaaaaatttttaattactttaagagtaaaataatggaataaatataattattcattatagtaattgcttctcgcagtccacattcatttttttattttcaaaaaatcagtcaaaatttttaattttatatattctgtactacataaattttaaaaattttcagaaatggaaaccatagatttaaagtaattttatatttaattttcaattttgcttcctggatggttggttaccacgcagcaacatgcgacagaggcatttttatttttaagttaattatattattaaaataagatcagaacaaaaataaatagtctttaccttaaggtagccgcgaccttcaaaatttttcagcattcattttactgtaacgatttagagtaaattcaatatactttttttgtgaagtaaaaaaacatgtaaataagcagtttaagtttcaaaaaataatattaaaaaaataaaattttattatttgataaaattttaatccattaaagtatcaagagagatctattggtagagaaaatacatctagagctgtcaaatacaatcgaccatacgtttaatttatagtgttactaatatatttatatatcatattaaaataagaataaaattatactgattaataataaatagatattgtcagctataacatatatttttatttataaaataataattgagcaattgaatattttctttaattcttttcagtattttttttactttgttaaactatatgaggagttggattcaaggtagaaaaaaataaataattatatttagtttaggaaaatcacatattataaccaaacagatactctaagatttaactgttatcttattattacgacaataaatcttattttaaattcaaatgaatattaaagttttaaagtttactatttttttttattttgagcatttatttataataaaataaaattgagttgatattaaatggagaataatattttttggataattcggaagttaataatttaaaagagataaataataattatatagaattgaatgagaaattaattaaaaatcctaagaataattaaattaataacattgaagctctagttgggagcaaataatgtggtttatttaatttttatatcctttttttatttatatatttttaattttctaaactcactcatatatttgaatattttttaatcattttcttgtttcatttaaattgtagttaatattattatatttatttttttaattcacttaaatccgcaaatgtcgttctacaaaagtcgttctgcaaatgtcgcactacgtataataacatgaattcgttcgaatatcattaaatttgaatttgcaattattaattttatagattgaaagttaaatatttcatcaagaaattttagatatatatcagtttcaaaaataacttcaagagatagacaattaaaaaagttctaacaaaattcaagaatctgcattttcagctgtgaatatcgcttcaaatgatttagggcgatttttgaaattggtcaaatttcactaattttttgaggtcccagggggtcaaattccccaaaacataaaactattatggagtgcctgtaagaccactatgtgttgttccgcttttaaatttcttaataactcgcaaaaagaaaaccgattttaaaagcgatttaaatttaagaaaatacaaaatcagtcaaatgcatatcttaatataattatctcaaaattagaaatttataaaagaaaagattaaattaattaaagaaaaaggaaaaatatactctaataaaaagaaataaattaattgttatgaatgttgcttattaaggcaatattcaccggcacaaaaatctatgaatttctcgagaggaaattcagcatgaaatttaaaaatacattgtaaaacataaaaagaataaaattaaaaatcaaaaataataaaattggcgcaaatattattcattcctatacattacgaaatgattatacattttccaaaagttttaaataaaatctttaatggaattaatttagtaaaataaatatcaaacacatacgcattgattaatattaaatgtaattaaagtaagagcaaaaaaaatatttggtaaaattccataccataataacaaatgagaagcttggctaaaattttttttctcttatttcgaaatttttttactcagagataaatagaattaaagtttattaattcactagcaccattttaacaattaacataatgattccaataattataataaaaatattattaggtaaaactatacaataagaataatatttgtttaataaaaaataaaactaaaattatattaaacaaaataaattaattaaataataaaagtaaccatcagcagttaagtaaagtaatttatttaatggaaaaaaagttaaaatactaattttgcctatattgtcattttgtcatgtatgaatgaacatgttgaaagaaattaaaataaatgcacaaataataaatgatgtaataaatttatttttaccatactgaagtttatttatatatttactaaatttctaaatattaaaagaaagtgtttaaaggctattaattaaaattccaattaatacaaaaagaattttaaaaattaaataaaagctaaatataaaatgaaaaaaacagaaacctaattgaaaaagaatgaaaaattctaaaaattaataaaaataaattgaaaataaatgtgcccagtgagcgaatgacacgaatgacacaatagctgtagttaaggctaagataagcgagagaatattattaaaataacattacatttaatcaaaatataaatttaaataccaaatttaaactaatatttttattattatctaaataatttaaaagtcaaagctcataataataaaaaaatttagattataataaaaagactacaatattcttattgatttagaaattctgatttataatggcatttcatcaaataaagaggatttagaaaattttcaatataactaaattacgaaaattttccaaaacatttttccaaaaaaaaataatatata

SEQ ID NO: 73621 - DNA, 563 bp, Heterodera glycines
atgtttggttcaaatttttttttgaattaattttttttttttgtaaatttttgcctccaaccttctttgagttagagtttcttattggaaatgttttttttgttttgaaaatttttgccaatcataagaaaaacttacagcgcacatatccatgtctgatcatagtcaaatgtgccaccaacagtgccagttgtgcaaatgctttgcaccgtacggctcagaatgtggactgaaaatgatgctaattactaattagtagggctgtgatttctagtggaaaaactttgtttttgctcaattgttttgaagaaaggagcgcaaaaaacgcatttctgcgttaaaattttttcatttgaacgccatttttcgtcactagaaatcactattttggcgttttgtcacttaaaattagagaccggacaagaggatcggtcggtcggtttcggttaaaaaccgaaaaaaaccgaaaaactcaaaaatttctcggtcggattttttcggttaaaaaccgaaaatcgaaaaataccgaaaaaaaccgatcggtccgatctctaatataaata

SEQ ID NO: 73622 - DNA, 1239 bp, Heterodera glycines
gatgatgcgtttcactatttcagctacggcagcaatttgttgactgaacgaatccatgtccatgtgggcactctattaaactaaatacaatgattcttggcatttaatttccattttcggcataattcttaagtggcgattgattgcggcacggggttccgtgccggattttgtgtagaatccaatctgtaaatttcacaattaattgcgcgataattccattggatttagtccggcaacaattccgtttcccaagtctttagttttatgaatcaccatttccggatcagtttaataatcaatgtgtgctatgtgatcagaaattttgaaaaaaacgaaatttccaaatttgaccgattctattttttttactgaccgttttttcaaaaattcccacccggcgaggcctctggcattccgtccattttttcccatatgattcggttccatcgcgcacagatcaccggtgccgagttcgtcactgccgcactgttgcccggctttgagttgacctttttcgatcgatcagagcgttggcagggcgccatagcgtccgttgagcgcaaaccgtccgcgcgcgtctggggatgcgtatggcgtgtgtcgaacgcgttggccacagtgttggacgcgcaggagtgcggctaccatcgcatggacggtaggacagaggggaggaatactgtaactctgttagacaatgacactgtttgttcgatgtacgatgcattttttatttggattttttgagtaccagctaaaaaacttcaaatatggactaaaatgcccgaaatatggactaaaaagctcaagaatggccaaatatggactaaaaactgacttaaaattactccaaaattttcataaataaagaaaattaaaaaaaaaatttattgaaattcaatttaatatggggtttttaaaataattttcggtgttacctcctcaaccttccagttaatgtactgcttgttgaccccgattctgttactgatccatcaattccacccacgtcgatgctctgccgtacctaccagtactcaaacccggacaaacagcacaactgtccatcgccccactacaaacatgtgaaaatttaatcctttctcaaggacattttgaaaaaaattcgctaaaattttttttttaaatttctctttcttgaatttttttttttcgagaggtggactaggttttttcttccccgcgataaattaaaaaaactttaatcttgttttt

SEQ ID NO: 73623 - DNA, 477 bp, Heterodera glycines
cagcaacagaaaatgatgatcatcatcagacaatgcagcatcaacaacaacaacagaacgggtttgacgccaacactggtgtgcagttgccaaatgtcaccgattttgttgccggcggcgaacgacgatcaaaaacgtcgacaagaatggaggccgaggatggtggtgatcagtgataaactctgatcaaatcattgagatactaaatgatcacctctgattgtgagcactgatgacatatttgatcgatcattatttaattatataagtgttcacacatatatacaggccctattgcccaccctctcccaccaaaatggaaaaaaattgtaaatttgattttcaaaattccaaaaaattccctttctgcctcttggcattttgacggatcgcaaaatatatgcaatcttactttcctttaaattaagcttaaagcattaaatgctgtatttttcaaaagtctgctatattaataaa

SEQ ID NO: 73624 - DNA, 1022 bp, Heterodera glycines
atgaatgtcaaacggtcatgccatgtgcacgggctcgcctcctggttcgatgtggcatttgatggcaccaagtaatttgggaaattcaaatttttttttaaattcgtttttacatttaaaaattttttaagtggtcgtaccgtttggctgtccacggcgcccaccgaaccgttgacccattggtaccaagtgcgctgcctgatcaaacggcccatgctcgtgctggccggccaagatgtacggggcagtctggaaatggtggccaacgacaagtacgcgttcatatttcgaaaaataaaaaaaaatttaggagttttttgagtagcgcaaaattttaaaaagcaaccttaaatacctttttattggaaaattctaagaaaaaaaaacaatgatttttggaaaaaatagttaaaaaattgctagaaattttttttttatttctcatgaattttcattgaaaaaattctgtttggtttttttttcatgcggcgggagaggaaaaaacgagctgctcgccaattttttacgattgtatacttaattcatttttccttattttagaagaaataattaaaatctgccttttttcagacaatcttacgacatggagttggagatgtacaccgatgcagcggcggcagcaatcgacaatgacgacgatggtgcggcgcaacagcaacaccaccaacggaatgtgttggacctgaaaatgccatactttcgctacacgggccaacccgtggcgccaccgccgggcgcccacgcggactgtccaagtgaccaactgaatttggctgtgaacaactttttggctggcggtgccgccggtggcggcatgggtcaacagcagcaacaacaccagcagcagcaggaagatggggaggaccatgagggggagcaacaacggcgccagcaacgccaacagtacaagcatcatcatcagcaacaacagcgaatgatgcacgccatgaagaggcagcaacaccaccaccaacaccatttggcatcatccaacaaggcac

SEQ ID NO: 73625 - DNA, 815 bp, Heterodera glycines
atgggctatatgctggtcaacgagcggatgttggagagttttatgttcgcgcgcaaattccttcgccctggcggttagtaaatttttttcaaaataattttctttttcaaaaatcataccttacaaatgtgcacaccattaattaggaaatcgaattgcaacaaaaaatggaatatttggcatattttaaaaaattgcttaaaaatagctttttataggttaagataaaaaaaccatttaaaaatagccttttctggggtaagcaccaaagtgcaaaatggaccttttccataggctcaaaaaaatttttctccactaattaaaaaaaaaattaaatatttttgttgcgggagaaaatttttttagcaattttttccgacccaaaaggacatttatatttaaagaatttaaatataacacttaaagtcgttaaagcgtcccagagaagtcggtagacggcatcggggaaaatttgtttttttttatcccgctttagaaaattgcattttccagcgcctaattttcatgttttatttattttttgcattttggtccctttaaattttaaaatttttctagcgattttttggaataattctctttaaaaaataactagtaaatccagtgataaattgcttttaggtcgtatgtttccgacccgtgccgatttgcacttggcactgttcacggacgacgcgctgtacgcggagcagcagcagcgggccgccttttgggcccagcaaacgtttcacggtgttgcgcttggcgcgtctgcagagccagcgctggacgaaactgtccgacagccggtggtg

SEQ ID NO: 73626 - DNA, 292 bp, Heterodera glycines
atggaattgagaaatcgaagtaaacagatgagtgaaaaaggaaaaggtaaatcgaagaatcatcctttgtaaatttcaaaacataaggccatacgaatagttatttattcaaaagttctctgcatttcattttattcccaaataaatgtatttatatatccatccttccaatgtttgcagtttcagaaattattaaattgttaattgatattttttgcattactgagttagaaatacatttgtctaattaatttgtcatcatggttataactcaaattaagattcaattaaa

SEQ ID NO: 73627 - DNA, 2838 bp, Heterodera glycines
tgaacgaaagtttggaaaaattgtgccataaaaagaagaagaatggttggcggaaattaaagatgaggtggaaatgcaactggacaaaatgatttcacaagaagttcgaattgatgagccaccgcagctcaaaaaatgaggacaaatgattagaaaattggacgaatggtcaccaaaatgaggacaaatgattatcaaagtgggacaaatggtcaccaaaaagggacgaattgtcatcaaagtgggacaaatggtcaccaaaaagggacgaatggtcatcaaatgggacgaatggtcaccaaaatgggactaatggtcaccaaaaaagagagaaaatgactgtttgagaaaggggagacgagcaatgccaaaagggacgagaaacagcaaccgcaactgttttgaagctgttcgagatgaattttgtgcatctaatcgacctaaattcgatcgttttaacatgtctacagtcttagtcatactgtattcgctgaattataagcccccgcccctctgtattagaagcccctccccctaacataagaacttttcacacaaatggaccaagttgtatttttttctaagcttttccgtttgtagtggcccattccaatttttgcaggcggtggccttttgaatgtgctgctgtactgctacaaaatgatgcacatctccgagcccaagcatttggtgattttcggcaattcgaatttgctggggggagaaaatggcggggcttttgctgaacagcggaaaaagacgacggccgttgtcgagctgggcaacttggacgaactgcagcagtgttggaatgccgagctgttcatttacgtggagcgtggcgagacggacggaggcgcaaaagcgaaaaaggcaaataaatgggcaaaaaaattaatattaaaaatgaatttgaattaaataaataatatttaatattaattattaaaaatgtattttaaattaaacaattaaatacatttttaatattaattattaaaaatgtattttaaattaaacaattatcattttcaggtaaaaaaaaggattgcaattctttccattccaaaatatggaaataaaatgaagtctaaaaacatcaaaccaacatataaatagtgcaacaaaaaaaaaggtgagaattcctacaattacgttctctagtcataaaaaaagtttatatcaagcaactcttttgtgattgtttcattttcattactttttacaaaaatctttttctcctttcattttgtcctaattttttgtttagttagatttgttttgcttatttgatctgaaaattaatcagaatgaccagcgaaaagaatttgccgttgacaattggcgtgtgtgcttcttccgttgcgctcggctgtattgcgtacaaattgttgcagcgcaaaggctcccagcaagaacttctagacgaaatgactttgaggaaaaagaaagacgaggcacagcttatggactcactgaagttggacccgaacactccgctcaactcacacgaggcgggttttgaagcgacacaaacaaaccgattagtcaaataacggaaattctttttcagttggcccttgcttcactcatctgtcagtatttttttgggctttgccgtcggtccttttgaaaatcttcgtttagcattttccgaggatgccgcttcgttcgagaaagtgggcggctgttcttccattttggaacttctgaggcagaaagttgttgtccctcttcaactggcgtccaacaagaccactcttccgtcgttgctgtacagtgcgccgaaaggtcgcctttgtcttatgaaattggaccagtaaaaatgagtgcataatgaatgcttttaaggaattcttctttatggaccaaatggttgtgggaaaactctgattgcgcgtgccattgccaaagaggtggatgcgtacttcatcaattttggaacttcgctcgtcggtcggttgtggattaaaaacaacaattgaattgcaataatttcatttttcagattttgtcaacggatcatccgttactatgaagtctctgttcactttggtcagtctttttttgaactttctgccaatccttccttttccaggcagagaaaattcagccgtgtgtcattttcatcgatgaaattggtgtgttttcatgtttttgcaattcgcttttgttcttgtctcacagatttgctgttccatcgcaatcggaatgactttcagctgctgaagacgcaattcctcgcgcaatgggatgagtttctgcgctgcaattccaactgcaacgtgatcatcatcggtgccaccaatcgtgtgctcgacttgggtgaggaaaatgcctttccatccgtcggtggtgtgtttatgcaacattcttttttagatgaaacagttctctgccgcttctcactcaaagttcacattcccttgcccgatgaagaagcacgcgagaagctcctgcgcaagattttggcgaacgagaatttggaggcggactttaactacgccgaagttgttgaagcgacgcaaaagatgagcagttccgagctgaaggaggtcatccgtttcgcgttccttctgcgctaccagcaagtcgtccaaactcagatcagtgttcttcagcagtgagtccatggcagaacaaaacatttgcaattccaatgttttcattgccttaaggtcgtcttcggtggccaacgagggaagcgaaaatgaagcggagaaaatccaaatcaaattgtcgcacaacgacatcatccgagcgttccacgacttgaagaatgtatcgatggcgccattttccgagtcagtggtgacggaagaagtcgtcgaggtggat

SEQ ID NO: 73628 - DNA, 643 bp, Heterodera glycines
atggccaactctccgctgcttcttctcccaattttgtcattgtccatattttgcgcgtttttatctgaaattgccatcggtatgccatcgccgtttaaaacacccgaagcattggacagaatggacggaataagcccggtgagcagcgcatggacatcgccgacgatcagcggatgcagcacgcccgagatgggagccggcagagccaatctgcggcgatgtgccagcatcgcgacggacagaatgccaacgacgtaccacggcgccggcagaggccgatccccgccaacactgagccagcaaatgtacggacgaacgacggcactccttcccggggcgagggacggacggacaattggaatttttgaattgattgattttttgggagggggtttcccgaggcttaaagaagcccgcttttttcccggaattcgatcccaatgtttttcggccgttcgaatcgaaattcgattcggccgattttgctacctaccgaagcacacacattgttgaatttaccgcttaattaacatacgtttttatctccttcaccagcttttcatttattttagaagaatgcctatttcttcgccgcctcgtcggacttccaattacaatcgtagcttaatgtaaaataattaaa

SEQ ID NO: 73629 - DNA, 676 bp, Heterodera glycines
atggcagagctgacaaacgaaatcgcaaaaaccggtgcgagtatcaaagacatttttcacgaaagagcatggcttgcggccaatatttattctgtatgcgtccgggtgatttgtgagacacgaggcgaggcccacgtgcgtgaactgatttcacaccttggcaagaagtacaagcaggcaagtcgagagcggtaacgaatttcaaaaaagaatttcttttagataagcttcccggggctgtcatcatcgcaaaacttgtcacgaaaaaaagaaatttgaagtttaaagaaaaagcggaataccgtaaatccgccatttgaatgcccctctctggtagaatgccccctccaattaaatgcccttttttggaggggttgaacaatacaatgcccctctctggtagaatgcccctctccaataaaatgcccccctccaggagggatcaagtatatccgcagggattctgggggtttgtcgatgccgaaagcgaaatctgattacagattcgttatcaacaccctaaaatacctataaaaagtatttttcagctaaatttgggtgaaaaaaattttcccactcagaaaccatgtggtccctcccccctttggtcccaaattcccaaatcaattttatttttctaatcttttccaaaaaaatagtagaaatatgaaataaa

SEQ ID NO: 73630 - DNA, 1581 bp, Heterodera glycines
  unsure (1)..(1581): unsure at all n locations
atgatcagaaaacccaattcagaggttggacatcgtcgaattttgtccaaatttgtcaatgtgaataagcatcgcttttctgcgcaacagcaacaactgcaacatcagagaaccaattgcatttatcaacgtcacattggccaatgtgcgatgcgattactgctcaattcgatggtcaagtgggtttaattatgaaaaaatttcaaatttcaaaaatttttcagaaattcgtccaaaaattcggccgtggccgcgttgatgggctcgttgcatcatcagccgacgagtgccaaaagtcggcgtcaaaagccgatgagtttcttcgagcacattctgaccgagaacggcgacattaaccgggcggagggaccacctcccgccggcggggcagggcaacaacaaaaacaacaacaacaacaacagactcaaactgctggtggcacaacacagcccctgcagaagcaacagtcgacggcattgcttggaggtgatcagagaaagggcagttataataaattgggtgatgatcagatgcgtgatcattgctggattggggagctgggacattatagtcgggaatatcgtatttatttaattcgaacccccggggctcaattttcaaccaccctcaaaaggggggttctaattaagagggtttctaattcaatagatgcttcggtgaaattttgaaaattcataggtataaattagcagtagaactcttttcaaaatattgcccaaatgtttgttaattgtgcaggtggcggcaccggtgccatttcggcaatcggcagcacgcgcagagacttgaaacagggccaatttgacattcgcgcactacagcacaagcagcaaatggccgaaatcactaggcacgaaaatgatctattcatttaatttgcattttttctgatcagaccagttaggaagggcaaatcacattagacattttttagatatgctttggtcatttctaagacgatagtcaggcatctaagttatccgttttattagattagatcagtgatggtattcgttatgcaaggacatccttgaattgtgccctttcacttgaaaattttaaaatatccttaaattcaagatttccttaaattgagcattaaaaaaaacttaaaacttaaattttcaatttgaattttatactaaaattttttattaacttatgtcattatttttaaaagtagacattttttagttgtgatttggtcatttttaaggtgctgatcagacgccaaaagctatctgtctaattagactagatcaactagtatcgattaattctgaataaaaaaaaaattattttttaattaaaattgtaaaatattttataaattttaggaatcggattgaggaggaaatgcgcgagaatcacccttactttgatcggcctctgttcataattgcccgtgattcgaaactgcgccggttctgtcgtcggtttgtgcacgcccgctggggcttcgatgtcggcgctgaaatgggcggcgaagcggcggcagtggcacaaatggtgccggacgaacgccgccgctggcggtggaaagcggncccaacaataca

SEQ ID NO: 73631 - DNA, 1746 bp, Heterodera glycines
atggcaaaagtgatcgctgacggactgttcttcacgcccaatgcgttggtgcgcgactttggcggagtgatgaccgtattcgtctacctgaccagcttggtcttcctgttgctgatgcccaaacacgtggagatcaattcggtggaacagtttctgatgatctgccgcgcgatgcgtccgctgcgcatttacacgctcgtgccgcacattcgtcgcgttgtagtcgagctgttccgcgggtttaaagtaattaaatttgttggatcttaaattgattcaaaattatggtatttctacgtttttaggaaattttgcttgtgaccattctgatgattgtggtgatgttcatctttgccagtttcggagtacagacagtgggcggaaggtgctaatattaataatttgttatttatttattaatacgcattttaatcattctaaatttgctcatttaagattggctgcctgtaatgatgtgaacgtcacacgccaagtaattaaattgaaaatggctctaaagcaaacattcatttgggactatgaatttcacttttataggttgattgcacgggcatgttctggcagaaaatctttgtcaccagaatggaggtgtacggtaagaaataatttttgttttttagcttaaaaaccaaaacattgattcaatggcatatattttgttcaaaatttaaatgtttaaattgatgttttttattactttaaaccaaaagcattaaacttttcaaaactaaattaaatttgatttatttcaaggcaaaaacagtgacacgcttcatccaaaagtgcttgtgccacgcgtttggtccgttaacataaaggaaacaaattaataatttgggttatttttgaaggacaaacccgcgaaatttcaattttgatcacattggcgcggcaatgtaaaaataacaatatgtaattaaattaaatattgttttttatattttaaaggttagcactgttcgaaaccttgtcatacaaaggatggaatgtgatcagagacattttgtgggcacggcaaggccctgtaaaatttggcaaaaataatgcaccttaattactctcattaattgggttttgcatttttcttcagtgggccgttgtgttcatccacatttacgtgttcagcggttgtatgatcggattgacattgtttgttggcgttgtgattgccaattacaccgaaaacagggtaaatggattttatcatatttcctccgatattcacaaattttgaaaataatcttgaaacatttcgagcggctaacaataagaccaaaaaacggttgtagggtttgcccacgacaaaatattttctggtttcggtctgtatacctagaaaaccattctaacatcggcattttttcccttttcagggcacagctttgttgacagttgaccagcgacggtggcatgacctgaaggctcgtcttaaaatggcacaggtttggtgccaaggctctcattttcatttatcgcatttaaattcttcccaattttcagccccttcacatcccaccaaaaccgtccgaatccgccacatttcgtcgcaccctttacgagctgacaatgtgccggctgttcaaccaattcttcgccgccatggtggtactgaattcggcaacgctgattctgccgtggaatgttgaggaggaggaggacaaacaccgattactgtacattgtcaccgcactctctgccattctcaatatgcttttcgctgttgag

SEQ ID NO: 73632 - DNA, 2037 bp, Heterodera glycines
  unsure (1)..(2037): unsure at all n locations
atnggaagttcacaagggctntataatcgcagcaatactggaggttgttaattttttggtactcagaagatggaggaatagaaaaggaaatttatgcatgaaattttcatcataaaaatggagaaaattaatagttatgaaaataaatagattattaggggcatatctagcataggaacttatcttatttaaaatatcgaacagtcagctcacgagaaaaagtatcatttccggaaatatcttctgggcaccggatggttggcctatttggcagcagaatcaaatagtgcccaagatatacccccgctgaaataaagcaatagaaattaaatgatggaataggccacgcaataagctctggtatgggtaattccagccgaagcttaatatttttttcaatttcttgttaactgtaatttattatttaactttttcagatttgactcatgcattgcgtcaacaacgcaccgaggacaatcacatttcgataaatggacaaatttactcagttgacggacctaatgttaatgttggtgttgaagggcatgatttgagtgtgaatgggagagtttatcaaaacagggccacagagcagtatctggaaattatacaagacaaaaacataagaaatgtaattgtcagtgtgccattatcgttattttctcgcgaaaacataaccgttgggcaaacgcgacatattcacgctgaatgcgatggaaatttatatatcgaccaatcggcagatgactgtattcgcatattatgcgttgatgtaaaaaaggatgccgctgcaaagaacttttggtcaacaagtggaggctttaattttcgatcgacgagtgttttttacaatttttcggtccgaggaactttacatatccataattcgtcacttgagtgtgctaacattgaatgtgatgcatctttaaatgtaactcactcaccaatagaacgtaatgcgcaaatgaaatgtggtgggagtttaagtattgatgagtcaccaatgggaaatattcggcttaactgtgatggatctttgcggatcgaaaaatcgaaaatggaaagcagtcagattgatgttggtggaagcattgggattgttgagtcaccaatgggaagtattgggattgactgtggtggatctttacggatcgaaaagtcgaaaatggaaattggcaacctagactgtggaggaagtttaaccattgtagaatcgccagcgcaaagtctaaagttaaactgtggaggaagtttaaatatgaaggagtcgccaatgaaaaatgttggcattaattgtggtggaagtgcaaccattaagaagtcgaaaatggaaagtggtcgcattaattgtggtggcagtttttcaattgatagaacgccaacgggaagtgttcgaattaattacggtggaagtagaattaatttatgaggtcaaacgaatgatcttgttcggaactgatcatgaattagtctagcataacattaatagatagaaaaacgcaatatacaccatattataattgttttctttgtatctcagtaatggataaaactttatattattttcaaagattttattattccctcttacgaagtgtattataaaaaggattaatttgcattaagaaacattaaatgtggaaacattatcacaataattttgaatttgctttaaaatggtgattttacatgcataatttaatatatgggtgccatttgataaataattaaacgtttcaaacttctcttgcgcattatttgcatgggactcgatcggataaagttagtactgaatttatgtagatttttccaggccaggggttcgagatagagttctggaatcaacttatggcccagcgagttttttgacggggttctacaaaaattatcgacataaactcaagggggcggagtcgttattaaaaaaaacaatatgattttatgaaaattatctatacttagccaaaaagcaaccaaatttttattcttgatatctttcgatagccctaattatactctatcaatctacaaaataaa

SEQ ID NO: 73633 - DNA, 820 bp, Heterodera glycines
  unsure (1)..(820): unsure at all n locations
atggaagcaggagacgttgacataattcgacaacaacatatccgctattatgctgacattgatggcaggaaatatccaactgaaggacccgattatgatgttcttctttatgggacggatcttttagtcgacggaaagttatataaaaatgcagtccccactggttatatcaattatatcaatcgaattgaggaacgaattcccgttctcggctcatcaggccgaagttagttttatttatttcttattttctcgatgaggtttccactattaattctgagttcttaacgggctaaatgttttatcagttacgaagtttgcttgccataatcttatttcgttttaacttttttaggcattcaactgagtgcggcgggagatgatcaaggaaataatgcacgtttacatacgaatgttgttggtcaccaaatttcagggagtgtctccttgccagaaattccgattgggggaaactctgattatataaacactggacataacaagcatgatggaaaacccacttttggagacaccaaacgggaagaaaaacagaagaataaacagaaacagcaaaagagaggagagctaatcggtggaaattttacacatataaacaatcaaaacaatgaaaacattggtggtactcaagacatcggacgcatacaaattggaggaatgccaccaggaggagctcttcatttaaatactggtggaaatcgcaacgttggtggtactcagatgattggaggcataaaaataggaaagatgccgacaggagggacatttggtttanatattggaggcaatcgaaacgttggag

SEQ ID NO: 73634 - DNA, 928 bp, Heterodera glycines
atgtcttctctgctgctctccatcttcccaattgtgtttttggtctgttgcaatgcaatgccaagtaaatgcaaataaatttaaaaaaagtcatgttttaaatatctaaagcattcaatgtaataggcactttttataaaattatttaatttaaattccaaagatttcccgtgctgcccgggcagtcagcaagtggttgctgtgatgtccaaatacattgacactttctcttctgctgctgacgagtctacagtatgctcaaccgctaaaagtactgtggatggaataaaaaatgaactgtcctctcgcggcggatgccaaaacggaggagaagcacaaattgtggatgaaatcgatcgacagctgaagagttcaacaaattagaaaataattaaatgaattttgagagaatggtacattttaagaaagagtaattaatttaaaaatattgaccaacttatctcattaagacattgcgaaaatggaaatcaattatgaggacgagtgcccgtacaatttgggctttgcccgtgccatgttcgacttggccgctgctgctgctggccatgcggggaacggcacagaatggcaatacatgaaagtacaatttgagcaggaaagccaagcaatcaaagcaattggacaagaaaagaactttgaagttacggatgtgcacattggagtcccaagcaaaggcaaataaaaataattattgaaattgagaaattaataattttctaggggtttctgcacatcaaaatgtgccgagtccgagccatgtgattgccaaccgtggccaacacagttcggttggccaaggaaagaaagaagaaccgttgtcatcggacttcgatttttgaggacaaacaaatcaggaggaaatagaatagaaaaccattttgttgacatgtcgaacatttatttaaag

SEQ ID NO: 73635 - DNA, 925 bp, Heterodera glycines
atgccaaacaagttccttccatacgaattagtttttgaaattgttcattttattcgtttccacaaaaaatgggcaaatttaaatgtgtcccgaaaatttgatcgtcctttactgaagcgaatggcacaatggcttataattatgaaaaaacgggtgagaaaatgctaagctaatttttggggtaattaaaaatcaaaaaattagcattaaaaatacaaatttcaggaagaacaatgcaagggcgccgcaaaagaaattctgaacaccatcttcaatttgcttcctcagcacgtgcgcagaggtgccattgaaagtctttacaacggtaagttacattaaccaaaaatggcgcatcacttttaggaattaattacatgctttcataatttcacccaaaagtaatttcagcacctttaaatatttcacctttaattttttttacattttttactctttaatttccgtaataattttaccagttatttttggcatagttttaaattagcagtttatttttcagcacctttgaataatttttcattaatttttagtacatttaaatttgatttagccaaataaagtttcaaatattttcacccaaatatactttaaacacatttaaaatattttcacttgttaattttttgtaaatttgaatttatttaaaattttaattatcaacaaattaaaatatttatcaaattatattttcggcacataaaaatttttatgcctaattcctttttgaggcatttaaaatcatttcatctgtattaaaaatatttcttttgtaataattaatccaaaacgaattaatttgaaataattatttacagctttggccgagatcgcaaacggaaattgtcgcttgcccaacttcaagaatttaggacaaatgggattgcgagccgaggacgggaattac

SEQ ID NO: 73636 - DNA, 1210 bp, Heterodera glycines
atggacaacgcgaacgttgtgaacccaaatccggcattgaggccgacgacgacgacgccagcaccacgtaaggacaaagacggaatggcaactttggcagaccgtaaaattgttcaaggacatggactgtaaaattcgttttcaaggacatggatagtaaaactcgttttccagggaaactgacagtaaaattttgttttcaaggacatatttcaaggacaaagagaataaattttgtttttggggtctgttccccgccgtgtgccgggaacaaacccaaaaatcgtttctaaaacgaaatgatgactaaaaacgaagagaaataaaaaaataacaaaatgaacacaactaattttcaaggacaagcaaacatttcttcaaggactaaaaatttcaaaatttcagcaaaaatgaagtgcaaattgcgcacggaatcggagaatggcgaactcaatgaaaagctgaacacgaaggaagaaactgaatgcgaaaaaacaatgaaatgtagcgcgacattctgcaaagcgaatgatggtgaacaatgatttaaatcatttttttcgcaaaaagaaaaatttaaaaaaaactcgagaaaaattgccgtaaccacgttttttatgccaatttttttttgaaaattctcggacaacaaaatgccaaaaattttacattttcaaattctatttgttttaatcaccattttgaggcgcattggtgtggaaccgctggtcatgcttcccggctgatgcgaagaaaaaggcgtgtgccaaagaagcaccgaatgccgtgaatgaacatcgtgccgaatggagcgcttctaagctggcggaaggcactgattggaagtgccggtgccgttttggtgctaacgggacggaaatgggcaatgccaagtttgtgccgtcgtcggcgccagtgccgagtgagttgaggagggaaatgcggcactggattgtttattcaaggtcgtgcggaagggcttttcaaggacatacgccgaaattaaaatttcccggattttcaaaagttcggaccataatttaattaatttttaaacgacacagtaacctttttcaaggaccaaaaaaattcaagggcagtacagaaatttttaaaaaatttagagaccattcgccacggcaacggcggaggaatggtattgatgatggctgggctcatcattggtaaatttaatgattttataaaataa

SEQ ID NO: 73637 - DNA, 377 bp, Heterodera glycines
atgaatagacggtaaggaattttttttataaatttcaaaattttccatttttttctaattttttcatttttttgtagcgacgtttggatggacattctcccatcttttgaccatgctcaactcggactcaaattggcattgctttctgaccgtttcgatgttttggtggacacgcattttgacgggaaaagcgaattgacaatttggcgaaaaatcaaaatttgcgagggcattggaccagaatcgaaactgtctgtacggatcgatgacaattgggtggattttcaattgccggaccattcgctgcccaacaaaattcgctttaaggaacttcagatttcgtaattttaaacttttgtattatataatatattaaa

SEQ ID NO: 73638 - DNA, 347 bp, Heterodera glycines
atgattagaagagttacaacagtgattagaagaggtacaatggtgattagaagaggtacaacagtgatttgaagaggtacaacagagattataagaggtacaacagtgaatagaagaggtacaacagtgataagaagaggttcaacatggtttaaaattatataaataaggaaaagtttttttattaaagaataaaaatcgaatgcattgaatatttaagaaatttgaaatgatattattttttacagataaaaaataataatgaaattatttattaaaaaaaaatttaaaatttacaaccaatcttcaaattaattaaaagcattgaaaaataactcaaaaataaa

SEQ ID NO: 73639 - DNA, 1285 bp, Heterodera glycines
atggatactggtggaccaagcctaatgggcattggctacggagagcctagccttatgaggtattggatactagaggaccaatcctaattaggtattaactaccggagagccgagtattggctaccgaaaattcacacattttttctttttctagtttttatacatttctaaaatccttaaattccttgacttctttcacacttcccacttataatatgttcaatgcttcctcattaaattccatcaaatacccctgccttctcatccaaaatggcgggactgaaaaacaacccttggtgagtaactactaataggaaataaccaaaagacttaaaaaagtaaaattaaaaccaaaataaatatttaattaaaaaataattaactccaagtttcaacttttgataaaataaaaatatttcctagtatcctggtcccaagcctattattttgtttttaaaaggaaaaattaaaaatacaatcttattaaaagaataaaatttaaaataaatcacatatttaatagaaataaaaaacaaattatcttaaatgttaaaaaaacataaaacaatatttcaattattagcagactaaaaaattagtcgtagatattaaaaaatttataaattaaatcgaaaaattatttaatataatgcaaaaaaaataatttgtaaataaaactttacatcagttggtttaaatttgtaaaaagtgtcttcataaacaattacgacctaccttaccttcttggttttttgaatcagcataatgatggattcaattaaaaaataatgtttattgtttagagttaaattaaattactaatttcttacaaaaattttaaattaatttatgtgtatcagttgaaaaaattttaacataatactaagaaaaattgctttattttaatatttttaatttatttttttatttatcaaaaaacaataaagttttaattgcattctgtccattgaaacggggcggagtcgttatttaaaaaaccatcattatgattttatgataaattatttataacttagcttaaaagcaaccaattttttattatcatataattcgatagcactaaatatgctctacaagtttacaacaaaatttcagaaaatttcgtcaagtttcaaaaattttagggccaaaaatgctcgaaaaatactcgaaaaacaaggtttattgagttcatatagccataacgtttttgaaactgaaggaaattttctgagattttgtaaaattgtagaacatacatagagctatcgaatgatatgaaaaa

SEQ ID NO: 73640 - DNA, 715 bp, Heterodera glycines
atggtgcgaatcggtattttgggcatggaagttcggagtctgatcagggacagtaataggtcgagaattgggaacccctcccccggggtaatgaggtatttcaaattattttccaaaccgccaaattataaatccgaaacactccaatcatcattcattttttccattattttattttattttattttttgaatttattctgacattttagttaatctcaattttatttgttttatttaattgacatggaaattgatcagctaaattttcacctttttccttcaatgttcgtcttcttcgcagttctgaccaccgcatttatgtgattaattaaaaaactattttatttactcgcaataaaaatatataaaactaattgttttatttgctcaaattaatttttagttttggcgtcggcggatatgaaccgatgaaatgtttagtaagttaatgttttccaaatgggatgttcgcttcgtttgcgcttttatttatttatttttaatttttagctttttccaccgcttcaaattttgcattttgagcattctcatcgctcttaatttattccttcttttagcattcatcaaaaagcaaaatcgaccattttgggtttaatgtgtgcgaagtgctcaacgaggacggaacaacacaatcgaatcagccaaacaattcagcaatatttttccacgaggtgaaaatgattaaaataata

SEQ ID NO: 73641 - DNA, 1396 bp, Heterodera glycines
atgcgacacgcaagtgccattcaattacaggaagggcggagtgttcagtgagtaaaagaaaggggggaaagcgataaattaatgaaattaattataaaacattttgaataaggaatacatttcaaagcttttttgatgcttgacctcctttttaattatcctttctttttttaaatgtcattttaaaatttcagtgcgaactccggcgggtgaaaaaagcattaaattttttacattttgctggaaaaacaacagcaaaacgaagcagaaataacggcggacggacattcttttgacaaaataaaataaaatgaaaatggtaatgataattaaaatgaatgaatattacgttgattgatgcgttttttggggagagtaaaacggtgagtgatcgctccaactgatcagcagcagagagtgagtgctgttccgtggcccatttcgcttactgccattttctcaaagtgactcatccattttcggcaccatcgattgattacattattctctacaactatttaagcagtcaggcgaatgattttgcaggaaattctactttttttttgcaagtataacgcccaaaattggtccggtgatcagaacaaaacacctaaaaaccctaggcatttcacgagtcgagttcgaaaccgagctttttgagcagtacatttatatttttttatcttaatggttaatgaagaaatttgtgtctaatgaataaacgaaacttttaatgaattcagtttaaacgattttattggtagtataaatgatggctaaaaagtagtagaaataatttaaaatttaaaacaataaatgcacgcttttgggtgaattaaattataaaaaaattggtcaattattattaatgtccgactaattaaacacagtttgcctcatcattggcgcatttgtggggcgaatttgaccaattgcagagagactgtgaaaaaagagaaaataaaaataaaataaaatcttttaaataaaattgcacccgaataaatgcagaaacgaaagtgatcagagtcaaaagggagacgcacaaaagtgaccacctgacaaaagagcaaaaaatggcaattattaaaacagaagcaaattgataatgggaattattaacaaattaattatttaattagaaaaagtgaaaatggaatttataatttaccaaatgaggagaaaatcttctcattgaaccaggtgatgcgcagatggcattggatgaacacgttcggagcaaggacagagtcacaagtgatcagacgggggaaaatgggcaaatccttaaaagggcaaaagtgcagtgattaagagagtctttttcggtgttttaactttctaattaaaatttaaaccaaagtgccgaaagtggtcgaactaatgaacaaataaa

SEQ ID NO: 73642 - DNA, 443 bp, Heterodera glycines
atgctttttaagccttatcctggtaaaatcagagagtgaatgacattcattaaatctgaagatattcggagaaaaaaattttggggattaaaattgtttagaagaattttgtcctttaagattatttatttataattaattcattatattcaccaaaaaatttatattttgaaaatatttgaattttttaaacaaaaattttttaattttttgactaaactttaatttttgctatgaatgtgcaattttttaggagttttatattttctttttacagcacttttcttacaaaattttggacaaaagatggggagactgagtctttttgggaaatgggaccggacttgccacgaaccggaaaagccggaaccgggattttaatatgctagaaatatttactaattatataaaattgttgtgttatgattaaagaaattaataaa

SEQ ID NO: 73643 - DNA, 183 bp, Heterodera glycines
ctcaacaaatggaacccgcccattgtcacgtgttctcttgggaattgaactcgcgcactccgctttgctatcgcttcaatttgggcattagtagaagagtcttttccaactgtgaattaaattccacctaatgtcaaaggtgggggaggagcgcggatggctggagaatttcaggccaacaaa

SEQ ID NO: 73644 - DNA, 153 bp, Heterodera glycines
aaattttcgattttcacatttttgggctaaaagtggctcaaatgatcttttattgaaacaatgttgaatttcagttcgtttccgtgtatttaaacaaagtttgaaccaaaaatgtgaaaatcgaaaatttgaattttcgactttttgttcgaa

SEQ ID NO: 73645 - DNA, 1205 bp, Heterodera glycines
atgaacgagtcggccatgacggaggagaacatcacttacagcggttccttcgcaacgacagtgcattatgtgaacacgccgttggctaacagtctgaatgtgagggataagcatccgttttaactttagtttgctatttcatccaaaggaactgttagaaacaacagtctccgaaaaaggcatttcttccgcaatgagtttacaagaaaagaattcgccattatatgcttcttgcgaaaaattcatagaagccgacgcgacaagtttgagaagtttgagcatttgcagtgagctcaacgcgcgaataattcaacggggcggaagaacgcgcgtcagtggacgctctaacaaagataaaatggttggtaatttgttggctaattcaaaagtgaatacggtagtgaatggttagataagacggccatctccgccttcacttccaccgccactaccacctcgcaaacaatcttcacaggtttacattattgatgaaaataaactacgcacgatcagcaatcaaattctctaatttagccatgcttttcaaaatacattcctccggtgttcgatggtaagccgaattggttgtttttgtttctttagcgaattttgcaggagattacgttgacattgatgccataatggagattaatcaaagcgaatacattaacaaatcaatgctcattagttcgaatgccggtcgagagatgccaaaatatcaatcacacaatgcaacagattatattcaagtctatccgaatgcaacttcagaattaagaaaggttatgcaaaaactaggacatgtcgaatcaaatagactcattaaaatctgttaccaaatcacatccaaaatttccaaattttcccctgcggcgcctaccggcaccgccgcccaccccagttcccgaaaattttttggaaaaagtgcgccgcaaaaaagtggttttggaaagcaaaaaaaaaggtcgtcaaaatatatctttggccaacccctcccccttttttatgtatgatgaccactcattaactttcagacggacgattcactcagagcaccgatgagacgctcgagttccttgtacgacttctttgtatctcaacaacctccagttcattctcttgcgaaaaagaataacgaagccaaatactatgcgaggaattgggaatttggccgagaagtttcgtttcgtcgtcttcgcatatga

SEQ ID NO: 73646 - DNA, 2629 bp, Heterodera glycines
atgggaatttgtagatggcttggacgaaaggaagaagtttctttgtttgataatgggcttcgaatcgaatcaagcctcaaaattcttaccgatgacaaggtaggttataagaaaaaagaatgagagtaacactgtctatattgggccccttaaaaaacaaatgtctgaaaaatcctgaaagaataccataatgagcattgataaatttattttagtggcaaaatcgttatgttgtttgccagaggcgctgcttgtccgaggctcctttgctagtaattccttcacgcagaatttaaacaataaaaaaatcagggtattttcaaaaatggaggttgtcgtgaaagaggcgaacatttggaacttttctatttgcagaattacatcggatacgaatatggtcgtctttaagcctctattttttgaacaattacagtgtattttaggttttaaattcaaacgctcgaataagacgctcgccatcttgatacaaggccaaactttgatcttctcatttagcaatgtcgagagcatggtgttttggaaggagtggttgaaggacgtttgtgggcgaagtcatttattgagccgcacttataatgacggtgcttatttttcaggtgccatgtattttgtcaagtgccataccattccaaaggacaattccgtcatcaaattaaactctcgaagtgcacgaattcacatcactgtattttgttgtagaatacaagtgctactttcaaatgttattctttaaagcgctacgccctcgtcattgtccaggaagtgccgccgaaacagcgattgtatctcaacttggaagatttgtccggtaattactgctcggattggtcaattttttgtttttcatctatcagcagatgttgaatgcgttcaaaatcgctttgcgtttcgcgcattgacctacccctggtcaacaccgcaaagctttgtgttcactagcgatcagatccctgaactgacagccaaattgcagtgtctcctgaaggtgcggtcataggtcttttctgggatgaaattctcgttaagacgaagcagtaccttcaccagggcagtcaagcaagtcgaatgccttcgttgaaaagcagctcgcttggccaggcgtcgtccagccatcagcagcttctgttttcgccctctcctctctacgccaacgagggaagacagacgccgagtcccatttttgcgtcgctttatgcgaatgagggtcagcgcaagtttcagttcccatcactttttgttaataacaacagcgaccaacagacggagcattctccgctctttccttcactttatttcaatttgacgggtcatcagcagcagcaaacttaaaattgccttgcaaagaatttttcgttctgctttattttgttttgtttttcattcagatgctttaatcatttgttgttgactcaggtgccttcttttactgccatttctttgttcatttaatacctcggaacattctcgaaatggcagtccaattgcaatttggctcaatctcagttatggatgggtgctactggttgctttatttcttactttaaatacattccttttattgaaagagcttgataaattttctatgttttcttttgggtttttatggaatggtgcttaaatcgcgatcggcttccttatttcgatgtaatgccccattattaaagatatggatgaatttaaggacgtcgtcctcattcacaaagttttgatgaaggcgaagctgagccgcctccgctgaagaaaaagtcaatcgaagaaggaccatacgctattccggtggatttgggtaaagagaagtgcgagacaaactccaaaccaaaacgataccccaggaagcgaacggggaggcggattttctgtggaggatctgttgatagagagtgacccagcacagagcaaggaagacgcacaggaccgggcgtttgaggacctgcagttcatcgaaggaacgcccgcacaattcctcaaccaacagctcgtctccgaagtgacccatttcagtccgaatgcggccccgcctggacttgtcaagcccacttccgattcgccgtttcttacttttgctgagaatggccaccataaaatcggcaaatcactttcgagaaaactgaaacgacagctcactggatcatacacagttaggcatttcgattttgctgtacatttaaattctaagaaatatgatggcgacaaaagcaacagcatcagttacacgagggaaagtaatgagagtgcaaattgtggagctttactgcccacaaaaccagttatttcgatggcggataaagccatcagcaaacaatcagttgaaaatgagttagtgaactgccgaagaaagaacgagccttttgttacgtcgagtattcgaattgacagtgcgatacaacggggcagtgaacgtctgaagtggagccaaaggagttcaacttccaattcccagcgagagagcagtgtggagagagaagaacatcgtagccacagcgaagagtcgtctttatgtgaaaatgccgtggccattttggccacacaatgcggcatggacgagactaatgtgaaggtggaagaagaaagcgtccgtttgctgaagtccgaggaagaaatgtactga

SEQ ID NO: 73647 - DNA, 950 bp, Heterodera glycines
aaaataaaaaaaattaacaattattatttatttccagccaatgttgggaaaacaagcttaattgatgttcttgtatacgatcgtttttctgatcatgttccagcaagaagtggtaccatccaatttccgagagaattcagcgaggatggcgttttgacgcaaataacagactattcaggtagcaaataaacgctaattgctttattcctcccaaatttttacaaaaattcggtcattaacagagctatgatggcaccgaaaaccgccaaaatagtgcttatgattttttcttttatcggcttttattttatttttttattttaatttgtttgtttagaaagggtacaaagcgatgaagaacttaggtcaatgataagagaagcaaatgccatttgtgtggtgtattcagttgatgatcgaagaagcgaggaaagggtaatttaacattttcgtcaatttagcaatgcattgattaggtcaccagctattggcttcccttaatccaagaaacacttggcggaagcaaccataattgttctgtgcttttggtagcaaataaatcggatcatcagaatggaggagatcacattgtaaaaatggctccgataatgaatggttggaagataacgtttttttcttactttttcctcttcttttaagactacttggaaattgaaactgttgtcgaatgctctgcgaaaattatcaaaaacgtctcagaaattttttattacgctcagaaagcggtattttctttactgttgcttttcatttcttttttgaatttaggtcatttatcctttccgacctcttttttctgttgagaagagagaattatctatcaaatgccaaaaggcaatcacaagaatattcaaggtgtaaaataaatcatatgtgatttgattgttaattggtaaaatttgttattcaatttcagttatgtgatccaa

SEQ ID NO: 73648 - DNA, 446 bp, Heterodera glycines
atgcccgcctgggtggccaagctggtgcctgattggcttaatcacggtgctttatcccttttcgtttctttttgcattccccccccccatttttagtgtctcacacggcccccgtcgcttttgtattggttgacactttgctgacttgtcaccatgcacccgatcggaagattggctccactgttgtcgtcgcacttttccttttctacgttggaatgtcagccgatttgaatctaacggaatttggcattttcccattatcctgtcctgaatgctttttttcattttttatagaattatatccgtccgtctgatcagcggtcattggctgtacccgattttcgatcggctgtccaaccagcaaatcgtgggattgctcagcaccgccggtgccctcttctggttcctctatctgatcggggacggatttaatatggccctttggg

SEQ ID NO: 73649 - DNA, 1020 bp, Heterodera glycines
atgcgagtcccattaatttctctgtccgcttttcatttcgtattcccttcccttattttgttgacgtctttcctttttcctgtgcggttggtgtggcactatttttgacgggataaatggacaaaatgacgttttaatcgataaaggcataaataagtgacaaagtccgcacgccctcccctcccctcctgccacatggcaaccgaaggcaaagggacgaagacaccaaacccaccgaatggcattttttacactgcattttcctctttgttcataattgttgttgcactagtagaaggaaaaacttaattgatcatttaaaattgggcaaattgctccttttccctttatttttgatttcaaaattaaaaataattaatttatggggctggttttatcgccttatttctattttatctatatattttagatatttattaaaaatgccgctgttttcagctcatccaattgctttaccacacgacggctgccattgtcgcaatttgctcaattcggccacgctcttttatgcccaaattccattttattgctactgccattgttttcccggcttcatttgtacgtaataactagggagtccaaaaatatggatataaaatcgcgaaatatggccataaaatatggaccaaaaatcgcaaaatatggacataaaatggcaaaaatctcaaaatatggaaataaatggcaaaaatgtcaaaatatggacataaatttttcaaaattgagtgcaaaatttcttcaaatttattggttgaaattgcatatgagatacatttccaaattttttgactcggtaaggcgctttgacaaagacggctttcgttttgcaattagtcggtcaacattcggaaattggtctcgaattttttcggcaattacgtgcaatcattttaaaagaaaaaaaacataaaagctaaaatttattaatttttttagcgcaaaatcaacaacaaaagcgaaattttcgcttttttgcttatttttgacataatttattaa

SEQ ID NO: 73650 - DNA, 155 bp, Heterodera glycines; identical to SEQ ID NO: 51421

SEQ ID NO: 73651 - DNA, 275 bp, Heterodera glycines
atggaaagagaatgggaggagagcgactggaagatgaagctgagaatggaaccacggcgtagaaacggaacagaaacaaatgccgaaaatgtggacggaaagcgatgggaagcaaacggcaaaacgaacaatgcgcaggacaatggcaatttttatggcacaaaaactgaggagaaacgaaatgccattcccggaaaacgagcggaggaagagaacggcataaagaaagaggaggaggggcgaaacgagccaagaatggtgccaaagccgtggtg

SEQ ID NO: 73652 - DNA, 413 bp, Heterodera glycines
atgttaactataggtaattttgttttttcatttttttggttctcaaatgtctactttcactggttctggttctcagttgtcccggcgctcaaattttcttcggcaaaataaagtatgtttttggagtgatgaatcgtggctgtatgatggattgtatttgttgccacagcaatataaaaattcgaatttgcagcagcggcaagtcatcttggaaaaggattatttaatattttatgcattaattatctatctaatctataatatataaaatatttgatatattcacatgacggcatcctccatttttctcgattggaattttgcaatttgggcatttcttaaatttgttgactacatcttctgataatttattgtctctaaaatttgtgtcttaatagcgcaaaaacaataaa

SEQ ID NO: 73653 - DNA, 368 bp, Heterodera glycines
atgacttgtactttcccaaatgtggctttccttacaacagtgcgttcagaggctttttatggcttgaccgttgccgcaagtcttctcggtttgcttagcgtcagagggttatgctttcgccgtaacgtttcaaaccgatgtgttacgggagaaggtaggtcggagaaattaaatgctaataaatctgcaggcgaattcccaaattatagcaattagagaataataataataaaaaagaaataaagaaaaagaattgaaaatttgccgaccgaatgcactgtcaatcaaaatcaaaagcaataaaaaagctttagctgactgcgccaaaatgttatgtccaaaagtggacacaacttaaaactaataaa

SEQ ID NO: 73654 - DNA, 379 bp, Heterodera glycines
tcaagaatcagacggaggcttttcaagcccttctccaaaatgcccaaacaaatccaaattccgtcaatcattccactatttattcgactatcaatagccaacttggccaattcacatataatccagaattggatttaacttttcaagcatggctcgaccgttttggcccgttcattcaggtggatggcaaggaccttccagacgcaatgcaagtgcgactgctgcttggaaagctcggtcaggaggagtacgctcgtcatgcagaacgtgtacttccaagactgccgaccgactttacattggcacagacaattgataagctcaaaattttgtttggggaaaccaaaagcattttcacacgtcgatatgagtgttttca

SEQ ID NO: 73655 - DNA, 3071 bp, Heterodera glycines
atggcttttactggcattgcagcaactttgctacctgccgggaggacattgcacaatagatttggattagcattagacatgagcaattcaaatattgggccaagatctaaagcttggcaagagctaaaagaaacagatttatgtatttgtgatgaggcgcctatgataaataagcgcgcaatgaggactttagatgagaaattgaaagagattatgaataatggaattgcatttggtggcaaagttatgctttggacgggagactttcgtcaaactcttccaattcagaaacatgccacgagagctgaggtagttaattcaaccttaaaaagaagtgagtattggagattggctaaaagacataaattgacgaagaatatgagagctcttgaaacagagcaagaatttgcgagaaatttgttagagattggaagtggaacatagaatagtgataaatgatgagatatagttgtacggcatcaattatatttatcaggatgtgacccccccccccccggcaaatgcctttctctccgtttcactatttgcttttctgcactatttcgctgtttctgctcaaggtccaactatttggtacaacacacagctggtaataggtacactctttaatcgttcattattataatttttgttgctgtccgtgtgtaacttcgtcagcaatgttctttgccctgtgtgaacaatgtatgaggcgacacagatggagtgcctcttatttcagatccaagcactttctctatttttttcttttatttaaactttattattgttaacacttaacagtgccagtttataatttatcaatattcaatcagaatgtaaataaagaatttacctatgcaactgaaagttaaataggtatagacaaagggcaattggtattacacacaccgattcaattttgatcccctagttcaaaagtaaatgcgtgtgtggcgaagtggtttttttaagaatgtaaagagacaaagggaggtggagggcggaggttcgagtccgttgtgcaacatgaatatttttttatttatttttgtctaaaaaatttaaaaaatacaatttttgaattggatgtttttttgccaaccaaattggacaatcttggtttcattcgaaagttcttgataagaagaagatttttctaagcaaatgctaagcaattgatgagttagaaaaaagaataagcgttcgattttaaaatctgtctgaggaaaaaagttatgctgttcgaagtaaattcggtttttctctattaacagagacaaagaaatagtacgccaaaacgagagatgttttttttctctgcactctcttttcaactcgactagccttactttttggatttatcgccgccaagcgaacatagccaatatggaagtaaaagaaaatcccttcccggttcgtatcaatgcattttggtcaacttttcatcaccggtgcttgttctgttgccaagtcgcgaaatagatatatttttcaatgattttttttaattaatatttatttttgttccggatttttaattatactgtatatgaaattttagaaataatttatgtagacctatattctaggtttttattttttagatcctaaaaaaatttaaaaatcggttttaacctatattttggcgttttgcccaaaataattaagaaaaatataagaaaaaaaatgcaattcaaagttgcaaaaaactgccaaaatacctagttagttccctaacccgaactcgaactcgaataaaaatcgaaattttgaatttttcaaattatgattttttgttcaaatttagattaggaaatcggaattgatcaaaatagttgaaagattcgtgatcggggaccccaaaaaccccagagaataaatttttatgactatcacaaaaaaattttgcaaaacaaaagggtcccgccttttgaaaaaatttccaaaaacggccacttttaaagtagcgcccattttcttttgatacctattttcattttgtccatattgcgatttttagtccatattttatgtcaaatttcgtgattttatttccatttttgggaattcttgttataactttagctattccgaaattctttaccaaaatgtaaaaatatttcaattataattataatttcttcactacatttattgaaacaaattacaggtttaatgtctaatcaacaaattattagtcctagctgccaagctcttccttccagagagcaagctcttttcaagaaattaattgtatgggttttccatttcttttcatgtagaaaaatttcagaagtgctatgaacaaaaacagtacaaggttggcttaagatgtgcaaaacagattatgtcgaatccaatttatgcggagcatggaggttatttaagcgaaaggagggagtcgaacaaaacagtacgaatttaagaaacacttgcgatgaaaggattgattctaaattgtatggggaagcacgaagaagcgcaagaaatagtgaagaagggactgacggctgatctgaagtcgcacatttgttggcacgtctttggactgacccaacgcaccgacaaaaagtacgacgaagcaatgaaagcatataaaatggccttgaggatagagccggaaaatatgcaaattcttcgggatttgtcagttcttcaagtgcaaatgagggatttcgaaggatatcgagtcagttgggtgccttttcaacccatttttgttcccatttaaggactcccgctacaaattgctcgagttgcgaccttcaaacaaaatgggatggattggttatgcttcggcgtatcatttgcagggcgaatatgccatggcgttggggatcatcaaggagttcaagaaaaacaacaaggtgattgtccttatttttataatattcccttaatcttagaaggaaaaaattatttgcacttaatgatgtttttagccaacgtctaatgtcgattatgagaacagcgaaattttgctttacgaagtgatggtcctaacggaggccgggagaatagaagacgcattgaacaaactcgaggagaattccgagctgcataattga

SEQ ID NO: 73656 - DNA, 278 bp, Heterodera glycines
aaaataattatttgcagggttggggaattgaactttagaagaagaaaaaaaggatggaagacataaccaccaggccacgacgctcacactggctttacattctttgaaaatgatatgaaaaggcaaaaaggaaaagcttcatatctcggccagaagcttcatttagcaaaaataaaaaaaattttataatacaaaaggggggggggggtaatctacctaccctgaaagtttcattcggaagtcccacggtcacttgggtacctctcctttgtcagggc

SEQ ID NO: 73657 - DNA, 673 bp, Heterodera glycines
agcaagaatattgctatcttgcctaggcgggattctgacttagaggcgttcagtcataatccctcagatggtagcttcgcaccattggtctatcgaccaagcacatgaaccaaatgtctgaacctgcggttcctctcgtactaagcaggattactatcatagcaacaggtctttagtagggtaaaactaacctgtctcacgacggtctaaacccagctcacgttccctattggtgggtgaacaatccaacgcttggcgaattctgcttcgcaatgataggaagagccgacatcgaaggatcaaaaagcgacgtcgctatggacgcttggccgccacaagccagttatccctgtggtaacttttctgacacctcttgctggaaactttacacattcaaaaggatcgataagccacgcttttgcggtccgtattcgtactgaaaatcaggatcaagtaagcatttgcctttttgctctacgagaggtttccgtcctctctgagctcgccttaggacacctgcgttacgctttgacagatgtaccgccccagtcaaactccccgcctgacactgtcatcggtgcgggtcgccgggccaccgggtggcccgacttaacaccaaaatggacacccttacgggcgcactcccgttttaccgattaagtaaggaatcgat

SEQ ID NO: 73658 - DNA, 512 bp, Heterodera glycines
gtgctttgcgttggttggttggcgtgggtgagtgtggtggttgggccgtttttgcgatattgtggctggaaaaaaaaatgcgatttcactgtggggagcgcggccgtctgggttcaagtgcttgcttgcgcttgtgctcggcattgaacggtgatggctgctgctggggtgccacctttgtcgtggcctcagtttctccagcgtttggcagctgtcgaaatgaataaaacatgcagctcgtctgtgtgttaaagaaatttggcgagttaattgacttgtgtaaatgtggcctaaggcacaaatgctgtggggaactcagcactggggatgctgaacctaaagttggtggtggtgttggtatacgagtgagtggcgtattgccatggttgacaagccctatgagttcgtggatcggaactccttgcctgtggaccagtgtgcttgcattcgaaaaaacacgagggataagcgcccgaaggccttttggcctgaggaagtgtcctaaccggaaa

SEQ ID NO: 73659 - DNA, 123 bp, Heterodera glycines
atggcacgtgacaaagtgatgaagaaaacacatggcaattacccggccccattgcgcattttggacgttgtccgcaccgggctcgtggacggcacacaggagggctacgaggaggaaacaaag

SEQ ID NO: 73660 - DNA, 1394 bp, Heterodera glycines
gaccttttgccggtcattcgttcgcttctttccgtcgttagcaatgccctcagcacttcttctgacactcttttgaccacagaatctgtcaattcgagggcaaaagagtcgcatgacgagcagaatttgtgccaattcaaatttgacgatttgagctcagaggcgcaattggacgcgtcaagccgcgcgcaaatggtcggctgtttggtggacggaaattgtgacactttttgggagagtggggaggaggagagggggcgcacggagcggcgactgagggcggcaaactttggcccgggggcgctgctgttggcacttttcattgacaatgccaaggacgaggggttcagagtgggacgactgagcatcaccagcccagggaggcgagaagatgaagcagcccggggggatgaagcagttcagcgaggggacgatgaagcaaaacacttgctggacacttcgttggacaaagttcgaatgcattgccgattagtgctaattaccaatgatggcctacaattaaggaattttccggatgggtcaaatgtgccatcgatggacgaaaaagcgtcgaaatttgcctttgggtattttatcggtttattttatgcatttaaaattcctttgttggccagggcgatgagcttggctgccgtgtccgccaacttcgcattctcggctttcgtcatggtccgtccgccgttccccccgccgcccctccgccaaaatccgtctcccaacaaatgcttttcaccagcggcgctcaaagcgacgcattcgctctgttccaactgttggctactcaagtgctttgtgaccgaattgcgcccgaggggacggaggacaacgcacttagggagacggtgttggacatggtcacggcacgggggcagctgatgcatcccctgcagcaatttgttggcactcacctcgccaacggtattcaaaggtgcgaattttaaattacattaataattataagtaattgctttagggaagtccaaagccttcgcatccgccgcaggcgcaatttctcatatgtcaacgctttgctccaattgctcatgcgaatgaattcagccgctgctcagccaattgttcacgcgtatgatcatcatctgctgatggcactttctgatttgtggctgttcgcttccgaagccgtgcaggaaaaagcattgaaagcattcgaatgtttaatcaccgccggcgacggagggcaaagggaaggaaaagtgccggaagggactgaaatgggcgtgttggccgaacgattgttggttacggtagtcaaagtgttgcaaatacaagtgaaggaacagcgagcagcagcatttgggactaatcgaggcagacagcaactgaccaaacacacaattggggtgagcaattag

SEQ ID NO: 73661 - DNA, 1590 bp, Heterodera glycines
atgcacaatgattcgataattgtcgacctgtcattccgagtgctctccgccgatgtgccgggcaatgcgccccaaccgccgccgcattcgtattccaaacgcatccgtgccttccgcttcacgtcactctcgagttctttcaagggtttcagtaagtcagcaaaggccggatgatcgatctgatgggatattttcaatactaaaaagtctgtcccaaattccgtcccattttctgtgccaatttcgccccccccccccccgcccccgccgctttcccttcacattttccttgcagagggggcactgcatgaagcgaaaactgatccgtggccccggccaccgcttttcaagtgcggtgcgcacacattgccagtgaaaaaagtgcacacacttcagctgtacgcatggcgcctcgccaaggcgttcagagaaacaaatggagcaaaggtcgtccgcgtcctgatggaattggtctgaaaaggcatttgaacatggaaccaaacgaagcaattttgcaaatgaccgaccggaagagcataaaaggcaaggcggacattgaatttcttcccgaatgccgtggcataaatggccacagcttaacaccgactgacaagccaaagtgtccttctgatggcactcctccaactcgcagagaccattaagccgctaaaggagtaaaaggcggcataatcaaaggggagataagttgccattggcttggcttggcacctgttcagcagttgccagcgtagccccacaaaatcggcacttttagtcggccaatttgtgatctccgctcgggcattcgtcctcctcctccattgtttcatcgcttctcaaaaaccctccggggaccatttggccgcttgccctgccactgattttgcctgtgccagcgcccaattcgacaagtccgatcagactgttcgggttgatcagaatgagcagcagcggatgatgctggtcggtgctgatcagccggagtctgttgcagccctcgtggaagtccattcgcggtgtcaacactcccaaaatgccgacaccaatcggttgtgcgcgatggcattggtttcgtcggctcaaatgcaaaacggaaaaacagtcacggcacagcgaaagggcgcatgtctgacagcgcaactgcgcgcgcgtgcgtccgtcgtcatggttgtcgcagaggggcgacggagtgcgatcagtcgcagctgactgtgaaaagcattgggaaaacgaaagcgcaattccgcagatgccaccttcagtctctgatactcgggcacttcctccagccaatcgatgccgccaattgcggctaaagcggcgacagacaaccaaaaagaggcgcgacagacacaatgcgtaagcgaattgctcttggaaagcgaatcgtggaaggaggagcacagactgagcacgaaatgcgcgagttgggcacggagggcggcacgccagggagaagggcgaagtgagcgaaggaaacgaatgacaaagcgggcggactcggcactcggatggtcagaaatggcccagtgcggtggcacatcgcaggcgagagtcttgaccaatggaaaaggaccgatcagaaaatga

SEQ ID NO: 73662 - DNA, 829 bp, Heterodera glycines
atgagaggaaaggacattggattaagaaggattaacgggaaaggacggcacggagtgcgcagagaagaaaaacggagggacgcggagcggggcaaagtgccattacggcgatgggtcggcaaggaaaagccggaaccagcgggaggaaaagccaaaggcatttggacggatttggcgaatttatttattagccgtaagacgtgataaatccgcgcgcggaggtggcggaccacggcggatttcagtgtttatgggcttagaaagttcagaaatactgggaaaagccaaagaaaaaccatcgacgacaaagcgaattattggaacaaaaatttagcagaattaggcgaaagatggcaaaagaatggctaaaaaggggccaattgtctattgacacccaaagacggtgaaaatgccaaaagaattggcacaaaatacaaaattgacggattaaaaaaatggtatcaattaggcctgtttacacagaatatttgttcaaaagaattaaaattcaaagtgcaaaacggaagattaattaacgaataatgaagggaaaaaagcaaatgacgaagaaaattaaaaattaattaaccaaaacaacatatatttatttttattaaagaaatataaaataaattaaaatgcagaaatatggaaatcatcgacaaattggaggaatgccatagaaaaattatggaaaaccggcaaacgaaatgcagggaattttgccaaacgaagtgtcagaaactgcgcaaattgcgacaaatgccacagcccaaagcaaattctgagagaaaagaaaggaaattaattaaattaaaacataaataaa

SEQ ID NO: 73663 - DNA, 1376 bp, Heterodera glycines
  unsure (1)..(1376): unsure at all n locations
atgacaaaaatgttgaagcaaaacggtggcggcgaaagtgccattctgttgccncatcagcncaattcctcgactttgatcggctccagcgacgagtgcgacatcgtaatcaaagtccgttggatgttaatttaaaaatattttattttatttaaatttattttttccttttttagagtcccggccttcgtccaaaacacgcggtgatcgaattctatccgaaaacaaaatcattttggctacgccaattggacgcgaaaaacgaacagcaacagcagcaacagcaacagaaaaggcgcatggacagcggtgagaaaaagaaaatcattcggttactgtattttgggggttttgtaccccctaattactgtaacagtaaaataattttaaaaatttcataaatgcccgaaaacccttactttaagaatagaaaaaatcgttcataaaaagttctgtcctttttacagtaccgcctcctccaccatacccctacgaggacactgtggggccacaaaacctgtcggacaacaccagacagcaagtgttgagagatggtaggcagagaaaaaaagggcaagggcagacacacggaaacatttattattaaatgttgaaaaaataatcttttaaaaggttcactgattgaactccatccgatggacacactgcgcttcggcaaaggcgcaaatgcggtggaatttgtcttcaaaatgccgcccctccatcacaaaacggtggcacaacaatttttgaaattatgccttaattgggtaattatttgggcaattaaggcacctcgatcaaaatggtcatgatctgtgataaggtttaattgatcccgcggctcaaaaatttttcagaaataggaaatcaaaatttttttacgacccccaaaagcgtcggaaaccacaagtcggaaatcggaactccgtgccatcccaagccgtgactcgaacgcgcgggattcacgagcattcattaaatgaaaggcatcaacatttaagcgcttcgatccacatccgccgccggtgcgcaagaaatgctcgttggaccgcgaagacatttcgcttcccatcgtcggagtaaaaaattcggggaaggggcagggggcaattaaacttttaaattaattaattttttaatttttagagtcgcattcagccgaaggcacacgccgaccgttttgtccgccccaaacagcagtcaaaccacagactttgccaactcggtggccaccaaacgcagaagcaatcgcaaaatgtacagcagcagcaattatcaaatggagtaaatttaataaaaaattaaatgaaaaaattaataatcaattaggttgattaactgagttatgatttaattgcctaattacaaaggta

SEQ ID NO: 73664 - DNA, 427 bp, Heterodera glycines
atgtaccaaaggaatattttggacgatccggtggaactatcgcgactcttgcgtcaggctgagagagaccacttcagggctgccgaacaaatgcgcacattaagaaaaatcgtgtgagtttgttttaccaaggcttcggggagaccgattcacctgaccgcctatccctctttattttcattaaataattacgccaccgaaattttaatattataattttttaacatttagtgaaaaaattgcggctgccaaaaagagcgtttcgtttcgggacgacaaggctgcagcaaatacagtgagcacgtacatgtcggatctgatcagtaatcggggaggcgggtgcctttgcaatgatacctccatcttcattcaggaagtgggttctatttattatttaaatgcttttgtaatagcaactggcatttaa

SEQ ID NO: 73665 - DNA, 1259 bp, Heterodera glycines
atgtgcaatacgcttatggagtcacccctgacgcccgcagaatgcaccagcatggttgagaccatatttcaaggcgccatttccatttcaatggaattaacttcggaggacgtcctgtgtaacttagtggacaaaaactggtattttcatgcactgatttggcaatgcactaattatttctttgatttaattaaaacgtttattttcaaacaatttttagctcggaaaagacatacaataagacgggcccgataagttgcgagtactgcaagataatgcacgcgaaggccaaaacggtaaattaaatcaaataaaaatgcgtatctcaattaaatagtttcgaacaaatttttgtttatagcacaataaaacaatatttaaaaacaatattaattagacattttttcactgcgctccttttcgtcccaaggtagcggaatatttcgacgcgatgtttttaggcctcagtgtcatgtgtgcgcgaatcgatacaccggaaggaaagatcactgtgaagaccatgtttacgtgatcacaaatggaatcaaacaaaccattaaactttatttggatgaaaaagtagcaaaaaagcgatgtaaatatactttcatgtgcaagaaatgaatggcaaatgccatccgttctttaccaataaactgaaaatctgaaacaaaaataacataattcttgcatatgggttttttaaattgccgtttatgttgtaattcacaccattttgaaccaattgatgaaaaacaaagagatgataagaaaaatacttttatgcttttttctagggtttctaccacatggttgcgtttttgtctttcctatattttcgagtttatatgcatatttttggattccctacttattatcaaaaaagctaattaatatttgactaatttaaaagctctatttctatggacaaaattttacaatataatttattttataaaaaagaaacaattactaaataatgcagtaaaagttaaataataaaaatatgaaaaagcattctcgtcaaaagtgcaaaaaaaaaaacaatgaataaaaataatgatgaatgacatttttctgtaacatttcttattgaagcaaaaggacggcaaaacgaaggcatttgaattcgaaatgaggaaacgaagagtaaaattattttattattggaaaaattgttaaattatttttgtattacaggaatggagaagtgaatttcgaaaattaaaggagagtcgtttaattttctaaaattccaa

SEQ ID NO: 73666 - DNA, 1250 bp, Heterodera glycines
atgaatgtgtttgatgacccggccaaacttttgcgccttttgcgtcaggccgagagagggcaccaaaaggctgccgagcaaatgcgcacactcagaaaaatcgtgtgagtttgttttaccaaggcttcggggagaccgattcacctgaccgcctatccctctttattttcatatttatttcttagccgccataatttcaatgagacatgattaggccaattttgaatttataaacgcaaaaaatatatactataatttaaaaatttcctttaattttcttataaaaaattatttaacatttagtgaagcggaagttgctgtcgataagggcgtttcgtttcgggaagaagtggttgcaacaaacgcactggacctgtatctgttgaatgtgttaaacaaaacggggaacggatgcctctgcaacggcacgtctatttttatccaacaggtgggtttttatatgtcatttttaaatgctttcataatagcaactggcatttttactgggaaaaatcatttttacaaattaaacagggactaacgagcagtttcatcggcggatctctcggaatgcaaataatgtgtagttcgttaaccgcgtcaccaatcaccccggcggaatgcagcacgatggttaacacagtatttcaaggagctgttttgattgcattggaattgagttcggcagacgtcttctgtaatttggtagacaaaaaatggtaagcaacaataactttttagtttgtacttatttcacaattgccataatcacttcaattattcaattaaacatttttccagtaatacgatgacatacaacaatactagcccgatcagttgcgcctattgtcggctaattcacgccaaagcaaaaaaggtaaattaaataaagcaaataaaaaagcatatctcaaagaatatatgcgagaaaaattaaatgaaacgtttttcattcatgctccatttcaacccaggtggcagagcatttcgattcgatgttctccggactgaaagtgatgtgctcccgtttggaaaaacagacgttaaacgaaagctgcaaaagccaagtcaagctacttacaaggaagattaaacaaatcatcgaagcttttttggatgtggatgaggccgaattgaggtgcctgcacatattcatgtgcaaggaataaaatggcgaatgcaagttaccaatttcttacaaatgaatttttgatttactgttgcaatcaacataatttgtaccatcggaa

SEQ ID NO: 73667 - DNA, 989 bp, Heterodera glycines
atgattgcacagaattgccgaaaaaattcggtaaaaacccaactcgttttttgccaactcgttttttacccaactcgtttttgacccaactcgtttttattaccccaactcgtttttattatcccaactcgtttttttgactggaaaatggaaaaaccaaagaaaacgtttaaatttttaaaaatttttagttctaaggtaatttttatttatttacagactaatttacggatcatccactaaattcgaattggtgctataaatggacagcggcagggcccgaaaaaagaagagggacagcgttacgtgtgctctggatgcagacgaatcaaggacaagaaggaagttcctagtgacacaaaattgcctgcaaggaaacgacttggtgaatcgtgggcagacagcggtccgaaatacccgcatttttgtcaaccattctcaaagactgagcttctaggcgttgaagtgagtaactttttgaaaagcctgaattaaatcagttttttgaggagcgaagaaagatccaagcggagttggcactcggcgcgagagagaacattgcttcggcgaaagtgcgaattgaatgcagaatcgaacaaaattacagcgacaaaacggatgaggaaaaggcgcaaattcgcgataaagcgtgcggaaatgcaatagcgacaaaaaaagtaattttaaaaatacaaaatgtttattagtttaattaaggcattgtatcgttcccaaatcaagcggaccatgaaggtgcgtacgttgcttgaattgcagcgtgaggaaagcgctcctctgtggaccactctgagagggcgattggcgcacagggacagtgaccactttcaagaacttttcctactggattgttcaaatgaaattgccattttttcgtcacctcgtcagctggccatgctcaaaaaaacgagaacaattataagtgatggcactttcaaaatggcaccaagaggaattttccaggtgaaaca

SEQ ID NO: 73668 - DNA, 1038 bp, Heterodera glycines
atgtatagtcagcgcattggttgtaggtccgtaatggttacggatcatccactaaattcgaattggtgctataaatggacagcggcagggcccgaaaaagaagagggacagcgttacgtgtgctctggatgcagacgaatcaaggacaagaaggaagttcctagtgacacaaaattgcctgcaaggaaacgacttggtgaatcgtgggcagacagcggtccgaaatacccgcatttttgtcaaccattctcaaagactgagcttctaggcgttgaagtgagtaactttttgaaaagcctgaattaaatcagttttttgaggagcgaagaaagatccaagcggagttaaattttgaagttttaggatgacacatggattaaaaaccgtattggtcatgcattttttccctttttgacgtcgaccaacaccgtacaacaaatcatgctgaatcatatcatggtcgtcagcgtcacttttaccaacccggctttttgttagggcggtggattgcaaattttcaggttaacgtgaaaatctttctgtaacttaaataaaaaacaggaactgagccacgctgaagaagaaagtgcagtggcggtagacgaggggcgcgaattaccatctcagcctctgcaacttacaatcgaattggacaatgcaatcgccggtgaaaaggcgaacatcttggcatttttgaggactgactacgatgacgaacaattcactacaacgatgtcaaattattatggaagaatcgggcacttgatcgggttcaaccccgttcaaagaaatgagcttgacgaaatgatcattgacgatgatgcaaggaatttggcggaacaaagtctggacgaaaatggtcttctcaatgccgatttgccttttgacggactggatgaaattgaaaattttgctcgaagacaggcaagaagagaatgctattatttcaacagatgatgaagtcgatatcattaattaaacgcaaattttgaattttattatgttcttcatatttcattgcggttttcaaaaagctta

SEQ ID NO: 73669 - DNA, 2516 bp, Heterodera glycines
cgcgcggcaacaagtgcggagagtactcgggcagtgccgtcaatgccgacgcctcagggggatggcctacccccttcccacaatgcccccattaccgatggatcgagtgcggcgacgggtgccctttgaatcggtggggctcgattttctcggcccaacagctactctggacgacagcggacaacgacagaaagcatgggttcttctgatcacctgcttaacaactcgagcaatttacatcgacgcaacccgggatttgtcagcaaagagcttcatcgctttactgaggaggttcattgctcgtcgcggagcaccaagccggattctgagcgacaatgcaccgacattcacgattgttggcaaaactttgggcgaatttggcataacgggagacaatccgctggaattcgcggactcccggggcattcaatggcgattcaccccgcaacacacaccatgggccggtggaatctttgaacgggcggtgcaactcgttaagcgagcgttgcagaagacactggggagctgtgtcctcgattacgaaggcttcagcacgcttttggctgaagttgaagcgacggtcaattctcgaccgatcacttatgtcaatggcaacccggaagaaccgctcccgctgcgaccgattgatctaattcaggagaatggtcggctcatagtgaatccaccgccgggatcctccgaaccgaacggccaacgacgcgaaccaccgcacgaacaactgacgagacaatggcggcactctcaacaacgacttgaacatttctggcggcgatggcacccagagtacctcatggcactgcgagaaaaggcgggatggaatcacccgcagaaacgggtgaatgcacccggagcaccaagagtgggggacatcgttttggtggaagataagttccacccgcgcaatttgtgggcgatggttcgcgtcgaggaactcaaaggatcaggcggccacgtccggagtgtgctgctcaaaatggcgaacggaagaatttggggaagaccagtgaataaaatttcgtaatgcacaaccgaatattttttcttcgctctgctgcaaccgaattcgccaaatcagacacacaattaggctaatcactttaattgagaaacaaaacaacaaattagaataaagctcggaacaacaaaataacaatccaaacaaacgtcagaggcgagagaagacttatttttaagcacaatcaaaatatcaaaaatgcagaagatttttggagaccggagacgaataatcaaaaaatccaaagacgtaaaaatgggaagaaaattgagaaaacaaaacgccaaataaaataatttaaaatgagaacaaagtataattaatatttaacacattcccgcacaaagtcaaaaggcgtccctgccgaattaaaaacattcttaggctgttgaaagggggcgattcgtccgggtgagctcactgccagcggtgccaacgagaaaagcgacgacctccagcaacagaagacatcgaaccacgtccaaatccacgatacggatgcatgcgcaactgctgaccggacacagggtggtcatctcgacccatccccgatcgagctgtgattgaacgcaatggtggacggtcacctggacccgagtccccacttcgattttgacggacaacatgaacggcggagcgaacggtgcggatgcccaattccctgttgccagggaatgaagcaatttgtgattggacccaagccgccaatgtcttcactccttctcggctcatccaaccatcggctgccactcgcgttgtgtcgaaagtgtcgccgtgtcggaaaatttccaagatactgcgtcccgtcgatgtcactccgacgaaccattccggaaccaattgggccagtcgagtcacaaattcgccaaattctttgtcccgctggcgcacatatggaggcgggatccagaacacatgagccgaacaaaaacgattgcacatttgtttgagtcgaacacattgttccatcatttggtccacagtttctgattgcaccaatgagtcgcgtccgacacaaatcaaaacagcttgcacattactggacaaaacacaatcgctcaaagctctgatgaccatcggcaaaggcccacgttcaacaccaacaaagtgcgtttggtcacgcatttcggccaaaagttggtggcaggacgaatcaccgacaagaacgcgaggtgtgtcgataaaaatggcggcattgtgaatcagtttggcacggactctttcaagaacaagccccgtattgtcgaagagtgttgtccatcccgtcttttctgattccgtcaacttttcgagcgccggagggacagccatctgaattgttaatgagttttccattttctttccattattaatgaccgtaattgtcgaaaagccagaattggctaatatttctctggccaaaacgcaattttttgcccatatgtgccaaatgtcctccatttgcgctacagttggaaatgtgccacttttgacattgtct

SEQ ID NO: 73670 - DNA, 3564 bp, Heterodera glycines
atggacgcggataaaattcgtccaattcttgaacttccacttccttcctcaaaaaaacaattgcagtcatttcttggattcatgacatactaccgtaaattcatttacggatttggatctttggctgcgccactcttccatctcattaaagaaaatacaccttttgtaatgggcgaaaaagaacagaaaattgttaattttttgaaaagaaaagtgttagaagatgttgtgttgtattttccggactttaaagtagctgcggaaaatgcgttgaggcgatttatcattttgacggatgccagtaaatttggaatctcagcagttctctgtcagccggacgaacttaaaaatgttcgcccgatatactttgcttctcgccaatgcaataaatatgagagtaaatactgtcctactgaactcgaagcactggcaatccgttttggaactcgaaaattttcacaattcattacgggtattccatgccgggtgatcaccgatcataaagcattaattcccatgtttcgaagtaaaaaggaaacgggaaatgcaagagtcgatcgatggctgatggaagtgaacgctcgttaccaattatctgttgaatatcagccagggaagcagaacgtggttgctgaccttctatctcgagttggaaaacagtcagacacagaaaaaatggaaaatttgttagatgattgtccgtctgaggtagttgttatcaaaaaattgtctatcaaagaaattaagacaaatgctgacattgagaaactggaccgaaaagagtgggttgaacagaccaaaagcagtgagttaaaaggcatttatgagtttttcgagaaaagagaaactccacaaagcattaacgaggcacaaagtttaatggacaaaatcaataattttgctctgattgaacaacttttgtatttcgttgaccaaaagacagggtcctttcgtttgttcgtgcctgaaaaatacagaaaagaactgatcaaaagaaggcacgaaggaaaatgcgcagggcatttaagcggaaaaaagttgtggagacaactttgtgaattatatttctggccaaacatgatgaatgactgcttaaaattcgcattgagctgtcggatttgtgcccattcccgtaagcctcggaaaaatgagccaccgatgcaaatagtgaagactttagagccactagaattagtgtgtcttgatatactttccattggaccatcagagtcagaaaaccgttatgtgcttgtggccattgatcacttcactaaatatctcattgctgttcccctaaccaacaaaaacagtgaaactgtcgcgcgcgcatttgtaaacgaatttattctcgtatttggcactccgaaacgtctccatagcgatagagggggtgaatttgtgaatgaaactttggcggaaatctcaaaattgcttggtgttgaaaaaactgtaacgtccggttacgatccacaggctaacggagtaacggaacgcgcaaatcagaccatattaaatatgctgagaaaatcaaccggttcaaattggagttgggacgaaagacttccgtttattgtgttttgttataatacaacgccatcggaggtgacaggcttttcaccgtatcaattgcttttcggaaagccggcaaattttccaggggaacaggacgttaattggcaaacgaaccccaattacacaattgatgaggaaacctatattcagctttttcgtgaaaacttaaaggacataataagcatagccgtgaaaaattcggaaattgctagggaaaagtcgaaaaagtactacgataagcgcccaaatgttactgaaaacaaatttagtaaaggagaccgctgcatggtgctatttccgggttcgaacgctcgctctccccataaaaaattattgtggaacaattttggaccttataaaattgttgagatcagtaaatcatccgccaaagttgtacctgttgataaaagagctgaaccaattttagtcccgattgaacgcctaattagagtaccaccagaattgccgaatatttctacccttccaagagggaaaaatatgtatagaaatgttctaaatgctttgattgcacccaaaagttggacgaaaaagaaaaatgaccgaatcggacccaaaaaattggaaattgaagaagggaattcaaatagtcaattagggacaattgaatttttagacggggcgatggagttagacaaagacgaaagctacgcgctcacatggtcttcgatttgcgatggccttggacatgaaatatgctcaaaggtcaagtgcgtggatctcgacccagttctcgagacatcatccgaaatgggccaaactgtcgttaaaactccgctccaagcactcctttcggcatttttgttccgttctggctcagcagtctcagcatccgcagctcaagaattggtccgcttggtcgtcaaatccgatcctggatttgaattgattttgtacgaaggaggacggagagacaatgtcaaaagtggcacatttccaactgtagcgcaaatggaggacatttggcacatatgggcaaaaaattgcgttttggccagagaaatattagccaattctggcttttcgacaattacggtcattaataatggaaagaaaatggaaaactcattaacaattcagatggctgtccctccggcgctcgaaaagttgacggaatcagaaaagacgggatggacaacactcttcgacaatacggggcttgttcttgaaagagtccgtgccaaactgattcacaatgccgccatttttatcgacacacctcgcgttcttgtcggtgattcgtcctgccaccaacttttggccgaaatgcgtgaccaaacgcactttgttggtgttgaacgtgggcctttgccgatggtcatcagagctttgagcgattgtgttttgtccagtaatgtgcaagctgttttgatttgtgtcggacgcgactcattggtgcaatcagaaactgtggaccaaatgatggaacaatgtgttcgactcaaacaaatgtgcaatcgtttttgttcggctcatgtgttctggatcccgcctccatatgtgcgccagcgggacaaagaatttggcgaatttgtgactcgactggcccaattggttccggaatggttcgtcggagtgacatcgacgggacgcagtatcttggaaattttccgacacggcgacactttcgacacaacgcgagtggcagccgatggttggatgagccgagaaggagtgaagacattggcggcttgggtccaatcacaaattgcttcattccctggcaacagggaattgggcatccgcaccgttcgctccgccgttcatgttgtccgtcaaaatcgaagtggggactcgggtccaggtgaccgtccaccattgcgttcaatcacagctcgatcggggatgggtcgagatgaccaccctgtgtccggtcagcagttgcgcatgcatccgtatcgtggatttggacgtggttcgatgtcttctgttgctggaggtcgtcgcttttctcgttggcaccgctggcagtga

SEQ ID NO: 73671 - DNA, 2386 bp, Heterodera glycines
atgccagcgccgcacgacaagtcaactctacggtctttccttggagcgctcacatactacggcaaattcatcaaacaaatgcgcgaaataagaagcccattagatgaattgcttaaaaaggatgtaccgtggaattgggaagatgaacaacaaaaatccttcgagaaagccaaagaaattatgctttcggatttattgttaacgcatttcgaccccaaattgccaatcattgtggccgctgatgcttcaaaaggaggaattggtgcaacaatcagccatcaatttcccgacaaaagggaacgtgtcattgaacacgcatcatgcactttcacgactgcgcaacaaaattacagccaaatcgaaaaagaggctttaggattggtgtttgcggtacaaaaattccaccgcatgctatacggcagaagattcactctgctgactgatcacaagcccctactggcaatcttcggatcaacaaaaggcatcccaatttattcagccagccgacttcaacgctgggcgttaattttgtcaaattacgaatttgatattaaatacgtcaacacaaaggcattcggaaatgccgacgtactttcgaggctcatcgcaaattatccgaggccatcggaagacattctcatcgcaaacatctgcaatgacactgattgctgtgttaattttgtttttgaggccaaaattgagcaacttccgatcaccgcaaaaataatagcggaggaatcagcaaaagacgaaattctacaacaaatcagtgccttcaccaaacaaggatggccgcaaaaattggacgacattaaattgtctccttttcttccaaaaaaggcacaaatatccgaaatcgaaggatgtctcgcctacggtgaacgaattatcatcccttcgtcactccggaacaacatcctcaaatcattgcattttgcacatcccggcattgtgcgaatgaaagccattgccaggaaccacgtttactggcccggaatcgactccgaaatcgaacgagtggtcaaacaatgcgaggaatgccactcagcggccaaaaatcctacaaaagcgacccttcagccatggaaggcagcaaacggagtttttgagcggattcacattgatttcgccggcccgtgcgctgacggccaaacatacctggtattggtcgacgcctactcaaaatggccagaagtatggcaaatggaaagaacatccagccaactcaccatttcaatgctcaaatcattcgtgcatcggcttggaattcccaaagaaattgtctccgacaatggaagccaatttcgatccgccgaatttgcacaattctgcaaagaattcgacataaaacacaccttcacgccgccgttccacccaatgtcgaatggggccgctgaacggtttgtcgacatttttaaaaggtcaatgaaaaagtgccgtcaagaaggcaaagattggcttcaaaaagtgcttttggcgtatcgcacgacaccaaacacggcactcaacggtcattcgccagacgaacttttccttggccgacgcatgcgcacaagaatgacacttgtccatcccgaaaaacaaaaactccagccaacaaatttggaaaattttcaacaattccaagggcaatacatcaaaaagatggaaaatcaattcaacacaaaacatggagccaaatcaaccattttccaaaatgaggaaccaatttatttttggaatttgaaaaacaataaagccatttggctcccgggaaaaattatagagaaattcggcacatctccgacgtatcgcatcttggcaccgacgcttggccgagccattcatcgtcatgccaaccaaatcaggcgacgtttcccaattgaattggaggacaatgatcaagttgaagaaaatgatcagacacaggcacaaaatccgccgcactcgccgatcgcgcataaaccgcagacgaatcgccagcaaacgcccgccgctgagcccgtgcatttgcgccgatcaggaagagccaaacaagcacctcaacgactggacctggacccgtcaaagcctaaatacggcttaatccgatcatgaatcccaaatcgagggacattcgacttaaggagggaggtgttggatagggatcaaagatcactttcccatcattgttatcgactattctctctccccctttctctgtccaacactatttccattctctctctctctgcctatctcctccacatttctctgaccccacgtctttataagtgcgtccattccctcactcatggctctccgctccattcattcgcattggacatttttattattttattctcctccgtcgctgcactcctccgacctcatcaatttgtgcatttatttttattggtgtttatta

SEQ ID NO: 73672 - DNA, 302 bp, Heterodera glycines
atggacgcacaacaacttcagcaaattttggacgcggctctaaaaaaatcagcagaagtttttgccgccgcactcaacattcaaaatcaaaacctaaacccagggtcatccacaacggcatcacttgcggcatcaatcaatgcccgcctcgaaaaattcaattataatccggaggttggacagacatacgatgcttggttgaatcgatacggaaaaatcgttcaacaagacggcgcttcgctcccagagcagtccaaagtccaacttttagtcggaaaattaaacgaggaggaatacaaacg

SEQ ID NO: 73673 - DNA, 786 bp, Heterodera glycines
atctctgtccccgatccctaccgcggcttggagaacgcaacagcgaatgccactaagcaatttgtcgaagaaatcaacaacatttcacagccttatctcaatgcgaccacagtgcgccagaagctaaaccattcgtagatttttaaattaattaaatttggttacatttctaattacggtgtggaccaaggatagtacggaattccgatttccgaaaatttatgggacctcggaatgccatccctggtgtggacaatgccattgtcgatgctgatgaattaattaatagcttttttcttttcgagttttaggcttactaaaatgtggaactacgaaatattcttcacgccagaattttgtggcggtttattctattattatcacaacagcggcttacaaagtacgttccgaaattttcgttttcgaatttggggtccttaaattctttttaattaatttcgcctctttcgtgcccttggaaaatgcttctccaacttaagaccaaagagtgctctaccaaactaaatccctgaacagtacgggaaaagtgttcctggacccgaacacgctttccaaggacggcacaactgcagtgaccctggaaagcttctccgacgacggcacagtgttcgcctacggtatctctgaaaagggcagcgaatcggttactgtaaaggtgggccaaacgaagcatttcttttaggggggcatccgcagtatttttgactataaaaagaggctttaaagggagggtgaggacctgcccgatcagcataacgatcttca

SEQ ID NO: 73674 - DNA, 1101 bp, Heterodera glycines
atgtccgcgttcatagatagtaaataaagattaattgaattctctcccccaggggcctatttcaattcccgtcgtatctccgatatgatgtcatatctcagatacgacatcatatcgtcacttagcaccgccgccagaaccaaagcaatgacaaacatcgaccggcggcgatttactatggcattttaaaagctaacagttggcatcactgcgcagaaatttactggccctaaatgtcggcttcttcgaggggacacattcagttggcatgaaaagttgtaaagcaacattcggcttttacctcattattattattattattattttaatataatatattttttaaagttaatcaatacgaaatgaaaaataattttatttgcgttgttttttgccacggcatttcaatgggtggctttgccaacgtaaaaagtcacatgaaatagtcataactctaattgcgcgcgtcaattcattttctgcataaatggcaatgttgaaaaagaaataaccatttctaaattgaaaatgaaatttctaattttatgcctcttttttgctgtcttattaaaatattcaatttcacaaaagccacaaaaagggaaaaaaggtgcatattttaaacataatttatttaaagaaattaaaatttaaatacagagagtgatgatgacaaagaaggcgaagttccaagtcaaacggaggacaacggcaccggcttaatgtccaatattttaaaaaagacagctgtggcactcgctctggtctgaaattgttttcggcactatggcttcattaatcatttggctagagatgatttagaaacatatttattcgatcatttctgattttaatgggccagggaggggcaaaaacgtagtttaaattatgactaaattatgcaagaattaattaaattaattggcattgtttcatgaaaaaaataatatttagcaaagccccttcattacgggttcagcaataagattgccatcctcctcaacaagtgaaagcaccgccgatgttcaaccaacgtaccaataccaaaaatgtaaaaaatattggaaattatttgaaaatatcaaaaattctattaataaa

SEQ ID NO: 73675 - DNA, 573 bp, Heterodera glycines
atgaaatttctaattttatgcctcttttttgctgtcttattaaaatattcaatttcacaaaagccacaaaaagggaaaaaaggtgcatattttaaacataatttatttaaagaaattaaaatttaaatacagagagtgatgatgacaaagaagacgaagttccaagtcaaacggaggacaacggcaccggcttaatgtccaatattttaaaaaagacagctgtggcactcgccctggtctgaaattgttttcggcactatggcttcattaatcatttggctagagatgatttagaaacatatttattcgatcatttctgattttaatgggccagggaggggcaaaaacgtagtttaaattatgactaaattatgcaagaattaattaaattaattggcattgtttcatgaaaaaaataatatttagcaaagccccttcattacgggttcagcaataagattgccatcctcctcaacaagtgaaagcaccgccgatgttcaaccaacgtaccaataccaaaaatgtaaaaaatattggaaattatttgaaaatatcaaaaattctattaataaa

SEQ ID NO: 73676 - DNA, 474 bp, Heterodera glycines
tgctgcgttgtcctgcagcagggtcttgtacgggctccttttgttctgatttagagccctatcaatcagtaccagatttaagtgatgcttttccaggggtcaatttttgcaaggaagcatccggttttatccgccagggatgtctttcgccttcttatgcgtgcttattttacagattgtttgcggcgcctctttccccctacccctatgagctgtacaagtgccctgtttggcaattccaattgagactcgggattattttgcagcttaatgggtccacaaaagccgaagaaataactatgtctccagggattacccaccattggccgttagctaagttgtctgtcacctttacccccagcggtttgccacccttaccaattttgggaaacgattttattgctaaccgttcacatgcggcattggtccccgaatggcactcccacctccactgtgattctgaatttgcagcca

SEQ ID NO: 73677 - DNA, 1057 bp, Heterodera glycines
atgtgttcagctctccgtcaaagaggtgatgttggagatgagtgagctgcaaagcgccgaggggacagcagaagctgaacagtcgacaacctttggcgagctgcactccctcctgcagctgccggagattgacggcacaagcggcacatcgaatggcactcgtttccgacgtcaggcgccgttgccgggccgggcgcaatgcgaaggtgggggggggatttatttaaaataagaatttaaaaattgtattttaaatgttttaggttgttgcatcccgggactgcccggcccgccgggcccaccgggccgcagcggagtgcccggccgtccgggagctcccggggctcccggatttcctggacgccctccagcgtaaaacagccatctgatggcttggaaaagctgcctgctcatttccgccccatttagcatttgcgaagaagtgacccctccgccgtgcattccgtgccctccgggccaacccggccctccggggtcgcccggcgaagtgggcagcccgggcccggttggccatcccggacgacccggcaatgatggaccaccgggtgaacaaataaaatatacccaacaaattttactccatttgcgttcaggcccccagggacccccgggcattcagggcgaacacggcgacatcggccgagagggaacgcggggggagccgggccgaccagcgatttcgacacccgccctccccggcgactcgggcccatccggggaaccggtgagtgtgccaaagaaatgatcccctcccaaccccaaattgcagggccctcccggcttccccggtgaaattggcgagcccggccgtcccggcagcgaagggctgcccggaccgcagggaccgtccggcgccccgggtcctcccggaccgccgggccgacccggcgaagacggcacgacggggcaccaggtggagccaaatgggagacaaatcgggcaaaagtgtgtttagggaccaccgggagaacggggaatatgcccaaaatattgcgcattggacggcggcgtcttcttcgaggatgggacgagacga

SEQ ID NO: 73678 - DNA, 4001 bp, Heterodera glycines
ttttaattgagctgctcttcttcaactccgcttaccgtatttgctctaattatagcccagtctctattaatttcgcagtctccaattatccccccctttctgaggagttcgaaaaataatcccccagtctctattaatttcgcagtctctaattatcccctctattctgaggaggttgaaaaataatcccccatgggctataattagagcaaatacggtatctttaatttcacttccattgcatattcagagtttttctcttctcatcctccaatttttgctttgtttgcactgattttgatggagagacctttgatcattccatcaaatcatttaaagtgcaccccccccctttttttttgctttatttgcactaatttaatccctaatggatacgcccactttcatttgataaatgtgcctcataaatgtccctctcttcttcctccgtagattaattaattaattcattcattcatttatcgatagacattttttatgtttcgtcttagcttaacatttgtttcagcgaaagttcaaaggggatgccgctactatccaaaaacctttttccatcttttctttatggcaaatttttgcacaaacaaaaatgatttgcattgaaactttgaatctaacccaaacattcgccgctatttcgcttcagagaattattatttttagacccaaataaacattattaattccaacaaagaaaacaaacaacacttatttccaattgagagaattcagctgatgttcactgtccagtgagtttttattatttgaatttgcgtttatttactttttggcgttttgtctctcccagcttcgatgtctccgttccttttgctctccatgacgaccaatttgtttttgtcacgggttcccatgagcacctcggaaattgggagacggggaaagcattgaaattggacaaaagagagaatgggtaattaattaattaattaatgaactcgtcgagattttcaaactgagggattttcttagtgaattttcaaagtttgtctttcagccgttgggttggccttgtgaaccttggcgcggacgtgctcaaattccgttacttcatcggctattacttgcagtcggaggaggacaaaggccccgttttggccgtctccaaatgggagacgcattcgacgcccgtaattttcagccaagacaaaacatatcgaattaatcatttgttgccgtctttttagcgctgtgtgatgccaccggtagaggcgagcactgcgggcatttgccgtgccaatttgcgcgacattttcggcttcagcggcggacgcgaattctttagcgacggatgggtgctgacggacgaaatgcaccaaattttgatgaccgtttccggcgaggcactcaaattctacaagcagaagcacatcagggaggagtacaggctcaaaatggtgccgtttgacttgcgaaggaacagaaatgtgagcgattggaaagggcacaaaatcaaattgggacgaaatgatcgaaaatagagaggggaggagggtcatttggcaacttccaaaattggtttcagcaggcttttttcgtgccaaaattctatttacgaccatttttgcctaaattttgcctcgggggaaattcgtttggatatgggggatatttttcaggacgcttccaatgccgaggatgacgaagagccgaccgtgactgccatggacgaattgccgccgctgacccatccggctttgccgagccattctccgactgagattgccgtaagatcaaattactcgccagtcccgtcgaccgggactctcaagctgactttgttcctccgtctcggtcactttcctcccgaacttgtctttgtcgtccggtcgctccgctctctccccattgcctttttcgtctgacaatcgttgagtgtcctccgtttggttgtctctctccacatctttccctctttctctttttgcattttccctccggcgttttttggccttttggccatttcttcaattcactaaccgtacgaaacacaacaaatcggagggatgtgagaagagatgaagaaacggcactgttgcacttcgcaattgaagaaaggtgaacatttgcgctttgtcttctttaaattcgtctctttctgctttctctcgtcatttccatgccaattttttcgcttgtcaagtctcaattttgacaaaaaaccaagaatttctggcaaattcattcccttcggtgcttttgaattcaaaaaataaaataaattttgctttgagcaaaatctttgaggaacattgtgccattttcgtcctccgtcccttcctttgctttttgtgcccttttataattaccgcttcaaaatcgagacttttgcctccgttccgtccttttcttcttcgttttctctcatccattcactcgctccaggcactgttcagtgagcgaatccaacggccgtccgtttttgttgtgccgggcgctgtctgttgttgttggcagccaattgtattgttggctcgaggactttttgggcctggtccctaggcaattaacctaattaggcttaacattagattgtttgatcactaattgctatttaattgatagcctttactattatttgtttgtcctaatcgaatcaaatgaggctctagcaataatttgtttctgcagttattgtgcccatttgctttttttattattagctaattagttttacctaattacccccttcgttttttttggtaaattccgattaaacttttcccttccttccttttgtcccacttcccttatttctgttggtgtctttttcatccatttttcttaatttgcccaaatattaattttcctaactcatttctccgcacatttcagtctctctcattggacgcgcccaaatttcgcgaccaagaagagtttggagagccttttcacaacaaagtggactacttcatgttcaggactcagtcggtggccgtcgaatttttggcacgttttgctaataactcattaatgatgcattgggttaattgaaaattcctttgaattggcagagtttccgcctcgaagtgtacttggccaagtcggataagctggtggccctgggctacgcccttccctccacgctccacgacactttcggccgcacttcggtccctctcctgaccaaattgggtgtccccgtcggcaaagtttactgtgcgtgcttttccatctgtccatgtgtgctttatctattccctttgctcttcctcagtctcttatttgttcatccgtccgcttcgactgccccaccccaacccgaccatgcacaactgttacgccaaacattggaagaagcgcagcactttggaagtgggccaccgcggcatgggcaactcgtacacaaagtgagggtggccggattgtagggtgtccccgaacctttgcctgagaaatccaagttttccttacattctctccctccccactctcttcccttaaaagtcgtcgaccatccgtccccaactctgtcccgaacctccaaaaacccgcaatatttcatcagatgtgcggtcgcgagggaaaatacgctgcactcgctgagctcggcgtacaaaaacggtgccgacctcgtcgagtttgacgtccatttgaccaaggacaaaatcccgatcatttaccatgacttccatgtgatggtttgggtggccaaacgactgccaaccgcggcgaccgccacgggcggcggggcaacgaatggccaaacggacagcgaatcggacgacggcaaaaagtcgcaggggccgaaagtgatggacttttaccaattggcggtgaaggacttggagctgaaaaagctgagacttttgcacgtgcgtttttgttttttgagaatttaaattcaaatcgccaaaaaacttttttgcggtttcagttggaccacgtccaagtcaacgagaacagcttgcacagtgcgtgcgattctgaggaccatcgacgggtcaccggtgcacatgacg

SEQ ID NO: 73679 - DNA, 1957 bp, Heterodera glycines
atgagacctggacggtaattacatatttttcgggtcccgttacggacggtctgcgttcgtttaagtgtggtcattttagcatgagtacttgcctgtaatgcaaaactcacagtttaatatgtttccatgtaaggggaaaaattaaaaagcaattgcttaaatacagtcatggtcatatgtttagactcacttagtgcttttttattgaatgcatgataaaagcttaatttttggccaaacggctaacatgtttagtgttttttgtagcattttatgtgggctttccaatgatatcactacatcccaattgcttcgcataattaataattacaaaataaaagtcaacttcacccccaattttgggtggtcatatgtttagactcactctttagttcttcaataaaatcaatattttgtaggccaaaaattctgaaaaaattcctgctaagctagcttttgatgctgatcaaaaaagtctcttacagcaacttgatcagatcactccttcatagtgatcggcacaccacaaaatacagtgaaaatcggggaaattttcgaaaaaaattcctagggggttgtgaaaatttttttggaaaattttatcaagcccattagaaaggggacaaaattttctaaaatatgtaaaaaaccgaaaatctctacgacttaaaatcgctatggtatggccacttcaatttcagtcatgatcattttactgtaaaatgcactatttacttacgaaatacagtactttttgtagacactgaaattggattgcccatatctcagcgggtgtaagtcgtaaagtcaccattcaaaaggcaaaccggtagagaattcactgttctttctaatgggcttgataaaattttccaaaaaaattttcacaaccccctaggaatttttttcgaaaatttccccgattttcactgtattttgtggtgtgccgatcactatgaaggagtgatctgatcaagttgctgtaagagacttttttgatcagcatcaaaagctagcttagcaggaattttttcagaatttttggcctacaaaatattgattttattgaagaactaaagagtgagtctaaacatatgaccacccaaaattgggggtgaagttgacttttattttgtaattattaattatgcgaagcaattgggatgtagtgatatcattggaaagcccacataaaatgctacaaaaaacactaaacatgttagccgtttggccaaaaattaagcttttatcatgcattcaataaaaaagcactaagtgagtctaaacatatgaccatgactgtagctaattaggttatcccatatttggatttttatataaaattatttttattttattttttggtgtttatcattttttgatgttcttatgaatcatctattaattcatttcatgtatttaattttgcaatctttggcaaagatagtttaatttatttgtattcatttacttttctaattatagattttaagtttatttctcatctgtgtaacgtaaatacaataaataataattaaataatatttttaagataaatgttgaagaaaagattaaaactgtaactttttggatttaacacttcaatcttttaagtaactttacgaaaatattggttaattagaaatgtgttgatatatctgtttttgtttattggttttttattatttgtaatcaataatcttttttagttaacttataagagcataccaaattataatactatttgaataatatgcttgaatataaaaatttattgtcatcagtttgtttaattaaataaataaattatatctaatgtaatttgaaattaattaaaaaattaattcattatttcagtacatattattgtttcattttattgtgtatttatcgttgtattttttgctgataaattaaaatttgtacttatttattttaaataaatctctttaataaa

SEQ ID NO: 73680 - DNA, 3292 bp, Heterodera glycines
  unsure (1)..(3292): unsure at all n locations
gtacacaaaaatattcccagagaaaaatatgcagaaatttggaagttagtggaaaatccaattgtgattttacatgatggttttattcatttcaacagtgtgcaattggtaaaaatatttataaatttagtaaaataaaattttcaaagtaattataaaaaatttcaatcattgttaaagcaacttgacgaagaggtgaggttcacatgccaacttttgggtgctgaattggcattgccaaagaaagaggtatttttttacagaatgcagttgaatggcaggcagtactgcccttaaaaaattgcaaattttaacattttttgcccttatatctgataaaatactttaaattatccaattaaaaaattggtgaaatagtcaaaaattgggcattttattaaaaaattaattgaaaaatttgaaggatcggaagtcggaaggggttggaaattcagacatgtctaagacaaaatccagggtatttagaacggaaatttcgtcttaaaaatattgctgaatcataattataccataatctcatgcgtttatggcttattacagttgtacgatgcgattgaaaaagtactgtacgggctcattaagcaaaatgatgatgtgcagcagtcgttgagcgcctccataacactttttcacacattttgtcttaattatgaacggcgaaaagctgcgctggaaaccattgacaaatatgtgaggaatctcattgagcaaccaaatgagcaaaaattcttgaaaattcggatgagcaacaaagtgtttgaagtgagaaagcaaaaaaaaaaaaaattaaaattaatttttatttaaattttattgcattttgcgccgcaaatggaaaagagtagtagagaagtttgaaaaattgttaaaaaaccaagagggaggagaaccttttagttttccaaaatctaacccgaacgcactaggctttttctcgagtttgagttatgatggtttctttcactaaagtcaaaaatttttacaaagaattaaatctatatatttaatattatgtttataattgggaattataaatttttcgtgaaatgaaaactaattttctaaattctgagttttttgaatatccattttacccggtacccgaacccaagttctttcaaacccggtgtttcggtatcatgtcagatttttagcttgttttttttgccattttccaggaaaaagtgcggccagtaaagggggcactcgaatttttgggtgcaattggatttcgcatgcaaaaaagtgttcctactgtggtgcaacagccggacggtacctccgctaccgtaatcagcaatgaaccgtatctggtgatgacaccgccaaacgaagcgtatgtaaaagccttatgcaaacaattgggtgaagcattggtgcaattgaaaaccggcgaaccaattcagctcaaactgttccgagacgcgaaggtaaaatttttaatttatgaaaattttcaaggaaaatgcgattattgaaatcgcaaggcttttgatttttttaagtataaatttttgaaaaccctataggtttttagtttattttaacaaccttatgattagtgactcgttaacatggtggcataatcaaaattctacattcttggtacctttcgatagcgcagttttttctctattagcctgcaaaatgtaaaaatttttgttcaacttttgaaaaagttgtatgaaaataagtactatttctgccattttctgccataacttatgttaaatttgataattttatttgaagttttgcaagttaatagagaaaaagcttggctatcgaatgataccaaaaatgtaaaatttgattgcttttaagcaaagttataacatattttgtcatcgctaaaatggcaggattttacgaaacgcacaaggtggcgcgacccagcacgaattttgaattgcaaaaacttttctcctcattttgatttaaaaaactaggaatacagttttatntaattctcacccaaccgtaaccccaaaatacagctcttcaaaccggatcaaaacgttcaccaacagcagagcgttacaaaaggatactgtaggatccgtgtcaaattccctggcggttatgtggcccaggcaagttatttagctacaactaagcttcatttaatttaaaaaaacaggaaacataatctaaatctaaactggtctgctgtcctattctaaaaagacaagaaacatctttttttcgtcaatttgcaatgaaagagtccttttttccaaggatgtccttggaaatcagcattagaaaaaaatattaaaaattttacaaaaattcgttaaaaatccttaaaaaattttcaaaatgtaacataaaaattgtcatattcatattcggtgaaaatttgtaaaaaattggccaaaaatcgcaaaatttggtattttttatttacagcaatttttttttaaattttaagggcattttccgtgagacagaaaaattttcaagtgtccgtgcgtttgttgctgagcacatttcatttaaacatggcatgttcaatctgattcctgctgttcctcctcaaaaacatggcagaaaacaattgagagaggaaaacaacacgctgaaagaatatgggttagatcagtctggagtggtcaattttagctgggactcggagactcaggtgggcggcaggcatcaatcagggccggagggtctgcgtttaatgttagacatgggtctaaatttctgcaaaaatcccgggccctgaaaaaccggggcttcctgtgccttgggagtggtcaatttttgctggcacgcggagactcaggtgggcggcaggcaccaatcaggggggccatttgggtatatgaattcgagagtctgcgatctctcacccatttttaattttaaatcatttaaaagttcataaagaggacccgaattttgagacacatggcccttttctgctttttggcgttttcctgcctttttatggattttcagaagatttattcataaaaacaaagaaaaattttatgccgcaaagcttaattttttcttggtcatttttttttctttttttttgtcatgttataatttgcttccatttttttaaaaattttttgtacctcattagtcaacctgaattttcaaattccaggaaattattactcaacttccggatgatcagcaaccagtgtttatacttcaataaacttgacaaatctacacaaaacgccaattacccatgccgatcaatgaaactaaaaaatgagtagagagattttaacccaatgatccccgataa

SEQ ID NO: 73681 - DNA, 1121 bp, Heterodera glycines
atgtcgcgttcaaatgattcaataaatgacgaaataacgcctgaccaacaacggcaggaaggtggcacgaatggaaatgaattaaacgcacaattaatattttttaaaaaattttcagcttcggaagaacatcgtgtgccaatgccttcaaatttgagtccgtccgaagaatggcgtcttttgagtgcccgaatggaagagttgaagcgaatgaacgcgagtgggaccgtcaagtggaagcccggcgagttgatatgtcgggacggcggggcggaaacggtgtgaattttttaaaattacgtaacagaaaattaattcactcaaaatattttacctcttaacttctttttactcaactatccaataagcatggtaagtcattcgatagctctacatgtttaggagctagccaggcccgtagccaggagaaaaggggggggggggggaagaagaggaaggaaaagcgcaagggaagcggtgaaatcaaagaaagcgttactaaccccgaggggcatttgtctgacgcaagagggagttggggggggggtaatccgaattttggaatttcttaacaattccgttaaatccaattgtagcgttcaacaccctttctcttgcggatgaggcaaggaaagtaaattttttattggttaaaatttagtgaatggcgaagctggacagaatgagcagcctgaccatggaccagacgaagctgatcagcctcagcaacagcagcagaaagtggttgagtgtggaatgcgaacaaaacgtccttttttcaaattttttccccatttttagcaccgtaacaatgacagttttgcccgtatggaagtggaattgagggagacgaaacatttgtgcacagtcaccaaattggaacttgaaaatgtaagttttttaaacaaaaaaacgattgaaaaagggcatttggcctttcccttcagaaggcacttcaaagtgagatgaagcagcagcaaatgatggatgagctgagctcagtgaagacgcaggtcgataagattggccaggaacaacaacagcaaaagaaggagcagcaggaaaagcaggaggaggacgcaaagggaaaatacggtaatatcaagggaatactacggtaa

SEQ ID NO: 73682 - DNA, 2683 bp, Heterodera glycines
atggaaaatttcactgctgcgttggaggaacagcaaaagaaaattggtgtgttggagaattttgttggcgttgtgaaggagcgattcggaaatggtaaaaaagaataattttgaattttgttaattaattattcgatcattaacctgtctatcattgaactttaattggctattaattaattgattgattctttgtttgtctgtttgtttagagctgtcaaagtctgtccatccgaatttccgttcggactttactgaggtggaaaaaaaaaatatatataatggtgaaagttaatttagaagctttcaattccacctcaaaattgttgggatgcaaatgcttgtcacaaaaatctcacaattagcggacccaacagaacgacggtcctttacaaggaaaacaccaacagcagcagcggaagaagtgaatggaaccttattttatttctccgtttttttcctttttccagccggctttctgctctctgatatgatgggagcaatcttatcatcggaccccgactgttctctgtttgcgaaaaatccgattccgcaagaaaattcgggcattttctactacgaattggagattttgaatgtcagagggtatatctcaatgggactcgccaccaaagcaatgccattgaacgaatttgtcggacgttcgaatggctgtgggtatcgaagtgatggccttttttacattgacactttctgctgggattataaaaaagcggcttgttctcgtggcgatgtcatcggacttggcattaatttggccactcgacgtctcattttcacgaaaaatggacagcgattgggtcggtagaataaagaattaatggcctttttaatttaatttattcatttgcaaatgtatttccagatccatccgatttgttcttccctccctcggctgatcgtttgttcccttgcgtttctttgggttcgccgggtgataaaattgaagcaaattttggcccgaatttcaaattcgcatttttggtgaattatttatttggaatgataaagcatttgataataaatggtgtgtgacttctccgtttttctacactcaaaatttaaaaaacgaacaaagaacgtcaattttgggaccatttgattaaaaattggttcgaaataaggcatttttttcaaaataatggcacgcactgaactgctcggctcttagtttacttttttcaaacttttgagtgtatgaaaaaacgattgagtaactaaatgataattgatttatttcaaaattgaatttagaccattccaaagactgtttcaattccaccgcaaaagaattcttgggattcctccgcttgtcacagtgacctcgaaattacgggtgccgaacaattgatggtcaattacaagaaggagggagacagtaattttgtttttattaaaaaactcatctttttatccacgttgcaactaagcccgaaaagtttattgtattccttttatgctctctctctctcgctctctctcttcttaatgtcggcaaaccaattccagctcttcctatcataattgctaacttttctatataaaatgcttttaatttttctttaagaatggcgcactgtctttgcaaaatgcgctgttccgaccaccggttctgctgtcattttttactttgaaataaaagtgataaatgagaaacagtaagtggtccaattattgtgctcacgtacaaaataaagcgaacttgctaatagattaacgaccatcggattggccaccaaacagcagacgccattagctggaagaattgcaaaacgccgtggcatttttgcatatgagagcgacggtgattgttcaacggaaggacgcaacagacgcaatcgaagaaggcaattcggtgacggagacacggtcggatgtggcatcaatttggcaaatcgccatttgttcttcaccaaaaatggacagcaaatgggtcaaaaaaaatattatttatttaaaactaattgccaattttatgtgtgtttaagatctcacttttgtggtggattcgttgccttctgatccgccgttattcccttttgtttctttgggtgattccggcgacaaaattgaggcaaactttgggccgaacttcaaattcgacctcgccacccttctctgatctgataaaggaagaagaaatttgttggaagatggcgtattttgtgttttaattgacattttacaaatattcatttttctttttttaaaatttattcgatttttattcttttttaaatttatgcacattcgaaaagataaacaatttttatttttgaatacaaccaaaacatgcatccatctttccaaatacggtcgaatgttaagcgattctgctgttggtcggttttacgtgttccatatttatgccatctcgtcggatttattagatttttaactgtttttagcggatagcattttaactatttctgccctttagtgttcaacccaattgcaaaccatgccctatcgtataaataagcatgctttaccttctgttgtttgcaaattctgtcttttcacccgagaggtttttttgaaattatatttcatagccaaaattaatcacgaaaattaccgagttaaattcattcaaatggagacaattataaaatttaagagaatgtataatcttttgatcttcaaggtttttgtgaaagta

SEQ ID NO: 73683 - DNA, 1279 bp, Heterodera glycines
atgaatttagaccgagtatttgtgaatgatagaagtaatgataatgaacagaatttgttatatgcttatgtttttgataatgattatgaagtagttgagagcagttatgatatattggaagagcataattatagtaaacggtcaagaatggatgttgttggtggcgaaagccaggtatctctgaattcagatattggtattgctggaccgtcacgtatgagtgatagtcaatttgaagaaaggagaagaactgagtatttgaaaagaaagagagaacgtgagagaatgagaagagaaaacgaatcacaaaaccagagagttttgcgtttagaacagatgcgagatagaaataatagtcaaagatcggaagagaatgcatatgagagacagttacgtctagaacagcaaagaattagacagagagtgattagacaaggtgaaattaatgtttatgcagcagggtcttatgtgaatgctcatgaacatggacttggtcttatgaatgttagatgtgaattttgtgatgcattgcattttgttggagagaaaataagtggccgaggcaattctttcaaggattgctgccattatggaaaagtttttgttcctgagattcctgagcaggatttccctgaggaattgagggatttgtttatgaaatttgacgcgaggcatgtgaatttttttgaaaatgttagacatttgaatagcagcgtttcatttgcttcaatgaatccgctgaggtatagatatccgaataaccgaggaccgtattgctttcgcatttacggtcaggtttatcacagaatgaatttggctttgaatcccgaaagtggcgatgagcctgcttacgggcagattttcatcgtagatactgaacaggcaatgcgggcaatgagacaaagcaatgtcggtgttgaccctcaattgttgagaaccgtttatgaagtgataaggaatgcgaatccatttgctgaggcttatgtgatgatgaaagaggaagaagatgatgaagttgagagagcgagaaacgagaatagagagcctgccgagatcaagcttttgtttgagaccggaaggcaattggacagacgtttggggtataatgtgccacgagcgaatgaagttgctgcggtttatgtgcctggagcagatggtgaagtaccggatgcaaagattgttatcagagaatgtggaaaagagttaaagattttgaatagcattgacccgatggtaacaccgatgacgtacccgctgttttatccgcgtggtacactcg

SEQ ID NO: 73684 - DNA, 2737 bp, Heterodera glycines
atggaccgccgccaccaatctgctgatcagtctgacagcattaaacgacaattgatcaaggagtgtgccgagatggaggagcaaattagccaactttacgaacggagaattaagcaggagaaacaacttgcggaaaaggatgagataataaaacggctggagagcgacctttgctttaatgtgagttcccggcaaaatattttcaaaaacacagaaacaatgattaatgatgggaactggatgttactatatgatgtggtcaatggaaactcgtacatacaagcgggcaactcattcaattaaaaatttacaaagtctaagcttaagcataggcctagcctaaagcttaagccattgtacgagtcgcctttttacgagttgttatgacatctatatgttctattctgataacatctcatcatttaagcaaaatgcaccaaaattttcgaaaaatatcattaggcggcgctcctttgcacgccatttgtttgacctctgtttccttgggattttgaattttccttaaaaaataaaatttcctttttgttatgccacaaggtttagtgtagtaaattgagtccttttctcaaattgcacacagaaataaaagaactgttaggaacaaacaaattgggtgtttccgttaatccggcattttgcctgacgaaaaaattcaaaaaacaaatcaaaaggcaaaacaattaaatccccggcacacattacgcactcattaatgggatgaaaatgtaccatttcttaaatgtatatttgaacgcagatcaaatgttctcaaatgctggacttatttcatccaaaaaattcactttttcataattcattttcgtttttacgaataaatgcgggcgagggaaatgctttgctttattaacaaatgtttatcattttttaatttaaatttctcaaaaagcagaaagtttttccgctcattgggcaccctcggtcaaaattcccaacatttctatgcgtgtcttattttagcgatctctctcaactctttgtcttttttaagcacactataaaaatgtcggaacccactaaagatgaacaacttgccaaattaagaaaagatcgcataggaataactgcacacgtggaagaactttgggaagaagatgcaattagggagaaattgtttgaagagaaagacaaaacgatcaaagaaatggaaacgaccaacaaagaaacggtggaaaaaactgccgagggtgggatgtgcgagagtctcgactctaggggggtattctcggtttctcaattaaaaaggcatttctcgcacttccctaatggaatatggatttattatgtcttatattttctgtgcattttttagaaagccgagctcagtcagacaaaatccgaactcaatcagacaaaatccgaactcaatcagacaaaagccgctcttcgccagaaggaagaagaaaacgatttgcttaaacgcaaattggctgaactacaacgtgtgccagtgaaggtgtagttgcgcattaagaatctcgaaactcgttgcaatcgaattattctcaccgttttacagtttttggacagtgccgtggccggtgtttcgttgtcagctttgccctcctcctcatcagttcaaattctgtcggttcagaagaacattttcgccgattatgagttacagccgaactcacttgtcgagcattacaacagttgcataacggaagcggaacaagaacttgtcactattttcaatcaatttggacgggaacaagcggaagcggtaagtttggcacaatcctcacataaaaaaagtcttagtctcaaggcccgagctcaggtttgagttgtctatggtccaatctcagtttcgaaacgacagctaaaatatcctaagcaaataaaaaacattcctgaagaggggataataaattcaaaaaggattcgtcattaattcacgaattgacatattaattttcaggaccaaacgatcaaacagttggaagagagaattatggaaaaagaagcggaggcaaagtgtcgaatttgtctcaagcacgagtttgaagggtgaattgaattaatcactttcattcatatttttgaaaaatttcagcactggcgggacaaacgcgagcaccaaaacataccgtcacattgggtgaggaatgtttatgcttttattaccttttactccaacagatccctccactctcattctattagtgtactctgtaataaagcctaaatgggggacgggtgcttgaaaacgagccccgaggggattctgtttgagtaaatgtgctaaatgttctaattaatgtctaattaccctaaaacataataacttttagaacacaaacaactgaagtcagagcgtcaaactcatggacattcggtgagggaaatgaatgtttaaaaattgtcaaattatgtcctcatgccaaaggctgttcgatgggtacaaaaagtttccttctctgaaattcaggcccaaaagtgtctatttttgctgttatttcgagatttaagaagacatgatcccctagaaatggcatttgtctgcaaaatttattgctccccttgagagtcggtcccctgccttttttctgctctcatttgatcacacttttcagtcattttaatgatcgttctgttcggcactttcgccgtctgttgcatcattttgtaccaaattcggacaattcaaaatgccgtgacgttgcattatgttcggggacctccgccggcttga

SEQ ID NO: 73685 - DNA, 560 bp, Heterodera glycines
atgcagcgtgcgagcagtaggtcggggcgccgcgcccgctcccagttgtggaagcgcacttggatggtctcggtctgcgtggcacgcgaccgggagccggcccgctcccagacaccgaccacggtgaagaagtcgtcaacgacttcaccgtcgtcgtcgtcgtcgttgtcaccggcttccgctttggttgtcgtccgccttcggtcgcgtcccgtctgagtcaactgaagaggtgggcggattcaattgttgtcggctggagtgatccatccaaaaaagacaaattaagagccgcctttaaggtgatttttcattaaatatttgtttagctttgatttttcagcaaatttacgaggacgcatatgcatatttgtgcaaatggtcacgacaattttctgagatggatgaagtgattggagattgggtcatttttgagtctgagccaacatctgaaaaagttcggaaggcgcataggcatttttgtggggcgacaactgatgatgaaatgaatgatttgtatgatgagatcgctgagtcgcaacagacactggagctcgagg

SEQ ID NO: 73686 - DNA, 3105 bp, Heterodera glycines
atggctcgcgtgctggacgggcgtgcggagccgctccgcgtcgggctgtccgtacagccgcccggctgggacaactgcttccacgtgccgatgcgcccaccacagcagaacagtgcgcacgcgctggcggccgccctcgaaacattcgcgaagcagtacgacgagctcgacctgttctccgccgacgtctgcttcaaagtgtcggcggtttgggccttgcccggtgagctcgtcctccgcatcccccacccctgtccctcgacaaagtttgacccctccccccaccgtttagccgcgcgcgtggagggcgcatgtgccgaggacgagcagcgcgcacgtggcactgtccgctgccaatcctttttgccggttgtgaacggggcgggcggcgaccgctggtgcatggcacgcgccatcgtgctggggctggcccagcggcgcatctgcgtactggagcagcgcaacgtggtccacttccgcgccttctgtctggcgcagcgtggcgaagcgggcgcgcccgaggcacgtcgcctgttggaggacgcaacggtgccgctggaccgcccaacgtacggggctgccgaggcgcaacgagtccagcgctggctggacgccagcctaggcgcccaccaagtgcggctggtaatcttcgcccgcgagctggcctaccgcgtggcgtggaagggcgcgcggctggcacgctttaacctgtgcttggtggcgcaggacggccactacgggtacatacagtgcccggagcagctattccatgtttgtcaatgtccctttacttgtgaaattattttaaatatgggaagcttttaggcgcgccagtactgtgtggactgcaagcagccggtggaccggcgcacgcacccgcaaggctgccgggcgctgtgcccccagtgtcttcgctttggctggggcgtccctgtgcgcgggagccgggccgcgctccgtcgcgctgcgccgactgtctgttcgtgttcgagaacgcggactgcttcgaggcgcaccggcgccgggtggacccgccgccgccgcctggctggcaacacgaccgtcgtcgcggcagaccccaccgtccgatgtgtgaggagcggcgcgtgtgcgcccgctgtcgtcaggtggtgtggacccgtcacggcgcgcacgcgtgcgccctcaacaacaatgttggccgacagcaagcagcacaacaacaacaacagtgcgaccgatgcttcgggattcacgacgcgcagtggaccccccacttcatccagccgaagcgggcgcagtgtcagctgatcgtcaacgacgcggtgcggccacccgtcccggcggaaggcctcgacggcgacaacgacgacgacgacgacgacgatgataacgatggcgatgctgacgatgtcgacgacaacgacgacggtggtgatgcggaacagaatcgacaacgtcgacgacggcgcccgctgcgctttctgttctgggatgtggagtgtgcccaagtggcggacgaaaatgaagagggggacgagggggtgccggcgcgagtgctcaaacatgtgccgctgctggtgtgcgcggaggtgatctgtgagcggtgtgtggccgcgggcgtggacttggagcgcgagccggaccgacgggcgcctggctgttgctgcggcggtgcggcttggcgagacggacaacaccgccagtggttgatgcgtgcgcgcgaggacgcgttcagcgacgacgacgacgacaacgcggacggggggcggcgatggcggcggccaaacccgcgccgcttgcgtttcttccacgacgcggcgaccgggcgttcgccgatggcacagtttgccgattttgtgctccacgacgggcccgtgaatgtgcgcaccgtgatgctggcccacaacggggtacgggggtgtacaaaagcggagttgaagaaaagctaccatctacgctttgtaggggcggtacgatgtgcatctgctgatggaggagctccagcggcgcggagtgcgcccccggcggctggtcgccaccgggctgcgcgtctacacgctggagctgggcggacgaaatcagcgcagcgtggtcgccaaggactcgctgaactttttcggctgtgccctgtccaagctgccggccatgttcgggctggacggcgtgccggacaagccgttcttcccctacaactacatccgggccgaaaacatggatgtggcgcatgtgggactgccgccggctgccgactacgacccggaccggatgcgcccggcggagcgcgacgcgttccagcgctggcacgcggcggagcaacagcgtcgacccaaccgactgttcgtgctgcgccgggagctgctccgctactgtgccaacgacgtgcgcattctgcggcgcgcctgtctgcgcttccgccacgtggtcggcgagctgtcgggcggtgtggagccgttcctggccgcctccaccatcgccgggctggcgctggccatctaccggcaacaacatctgccccgtgatctgatggtgcacacgccggagggcggcttcctgcgcggacgacgcgcttccgccgcctcgcgccacttcttcgcgctgctggagagactgcgcccgcaatggcgcggtcgactgcgcaccgcccgctggtccatcggcgaagcgtgcgtggaggacgacggctaccggctggacgcgctgctctaccgcccggtgccgctgcgcccgctcgtcatcgagttcaacgggtgcttctttcacggtaaggaagggggggggctccttttcctgcactttttccatttgcctcgtccaaggttgccccgagtgctacccgaggcgccatcaagtgttggcgggcggccaaaccgccgagtcgctgtgtgccaggacacggcagcgtgcctgggagctggagcagcaccacggcttcgcggtgcgcacggtgtgggagtgcgccttccagcggtggctgcgccgccagcccacccgagtgcggcgcctgtacacggatgtgtgccgggcggtgcccggcccgatggacctgcgccgggacgcgctgttcggcggccgagtggagccgttcgcgctccactacacgtgcacagagcgagaggaaattga

SEQ ID NO: 73687 - DNA, 1206 bp, Heterodera glycines
atgaagtaccgcgccttccccgtgggtctgccccgggtgctcagcgccgagcagctcgaccgtgtgcggttgccgtggacgagtgtggagcagaatccctaccgcggcttcttccactgccgcgtgctgccgcctcggcccgccgagcttggcgagcgccacgccctgttgccctaccggacgcgcacggggcggctgacttttccgctgtgcgccgcgtgcgccgagtgggccaacgcggacaagaaggtgcagcgccagcaccgcccggtgccccgctgtcgacaccgggcggcgcaacgtgcctggacgcacgcctacaccgatgtggagctgaacgcggcgctacagctcggctacagggtgctggcgctgtacgaagtgtggcactacgaccgctgggcgagcctggaggcgggcaacagcctgttcgccggctacgtcgacacgatgctccggctgaaggtggaggcgagcgggtggccggccgactgccagacggtggagcagcgcgcgcgctacgttgcgcgctacgcggaccgggagggcatccgactcgaggcgggccgcgtgcagccgaacccggggctgcgcgcggtcgccaaggcattgctgaactccctgtggggcaagctggcccagcgcgcggagcgggacgacgtgtgctacacgggcagcgcgcgcgagttccacgagctgttgggcgacccgcgccaagatgtggtcgactttgtccacctcaacgagcagctggaccggtgcgtggtgcggcgccggtggccctttgtgcgcgcgccggacaccaacaacttggcggtcgcctgcttcgtcaccgcgcacgcccgcctccatctgcacgggcggctggaggaggtgcggttggcgggcggccgcatgctgtactgcgacaccgactccgtgtactttgtacgcgcgcggcgaccacccggcccgcaacaacaccagttccttcgatccgagggcgacgcgttcgggcagctgatgcgcgagtggcccggccggcgcattgtccaattcttcagcgccggccctaagaactacggtttccggcaccggtgcgccgcgagcggcggggacgaacgtgcggagcgcaaggtgcgcgggctggagctcacctacaccgccagccaactgctcccgttcgagcgcatgcgtcagctggtgctcaacttcttcggccggtga

SEQ ID NO: 73688 - DNA, 1223 bp, Heterodera glycines
atggattcattcggaactgtcgcctggattctgcgaccaacggctcagacgacaggcactgctgtgggctcaatggagtacgaagaggaggaaaacgggacaggaaagttggtccacagtgacacagctactgtcaccacacctaccaccgccgagtttagactggaaaaagaagccccctcctccgagaaggacggtgctgaagagggcagcggcggccacggcacactgctgttcatcgaatccgatgatggggaggaggaggaggaggaggaggatgaggacattgaagacacccccgtcgccacagactccccctcggctacgacggcaaccgttgtggatgactcttccaacactgttaaaggggtggagcagcgctccagtgagcacagtgacatgacgaacggtacgggcggtggcggtggaagcgaaggcgcaaaactgctcggcgggggagaggaagaggaggtaggtggaggccagctaattttctaccccccccccctactgtttgtagcctgttcgaatgccgctgctcaactacctgtgcgcgttcaacgactgttcaatgaaggagcttcaactcctcttccacagtgtccacgcgcgacagcgtatggtgtcgcacctgcaacaacactgccgacttcataccgcgcatctgaaaccggcggagcgtaacattgcgctccactgtcacgacctcagcgtgcagaacgccaaccggacgttcgcctgcggtggctatctggagcttaccgtaattcgatgactgtgtagaccaataatggtgcggccttctgtccaggttcgacaatacttcttcgccaaacacgggctaaagctgaagcacccgtacatgccgtgcatgatcgagttcgggggcggcacgcacgcctcctactatccgtaagcggggggtacgcaaaaatgggggaagtgagcgtaaacgccttcagcctggagctcgtccatgtcgtgctggagcgtacgaagcgcgccaaacaggagacggtgaagcaagaagagccataccgtcgtgaatccggcgacgtggctccgacaaagtcgatggcaatgccggaacgacattgttgccgctgttgctgtcgatgcgctaacaactagctttttgagagacatggtcattgtagatttgcgcgcgtgatcacgtaacttattgtgctgttatagtttttgtgcactttttttgaaataaa

SEQ ID NO: 73689 - DNA, 1363 bp, Heterodera glycines
atgacgttgaagcacactgtacgcatgctactcatccccgaggatgtttatcgacgtctgatggacaaccccagtgcagcggcggcgacgtcttctaccacgtgcatgaacaagttgcccacgcccgcaactcccattgagcacacggcacgcaaaatggtggcggcatcgagcaagcacacgaacgacgacgaacgcctcatccactaccaacaggagttcaaacgctaccagaaattgctggaagaggaggcggaacgaccgctcaacgtacagctatcgcaacggacaacaaacgcactgcgtgacactgtgctgcagaaggcttcgccggcaacagcgacgccgccgccagctcgcccccaacggaccacacctctgtccagacgacggggcttacagcatcaaaaccaagcgccgagcgcatcttcctcttcttcgacaaggccaacaaaaagtagcagcagtaacgagcaacaacaaccgctcccccagcagactgctgctccacaaaaaattggcgatctgcctaagcaagctgagccgcgtatacatgccgcgatggcgtacgcgcaacagaacccaggcttgcttggcgtcggcggtgaagacggtcagcaaattttgcaccttgcccagggcgcttatcgccccatccggggcagcaaccttgacacgctgctccgctaccactttgtgggtcgtcatcagcagcagcagcagccgcggtcctccactaccacccccaccgccagtgtcgctaaggcaccaccgggctacaaaaccttcgtcaacaatgcgcgtgacgatcttcaaatgtggcgtctgctgtttccggatgaaagggcggcggcggcgggcagtgattcagcgtcaacagtgggcggacaacctcggcgccaccaacctctgcgcggacaaaagaaaactggcgcgggccgcctactacagcctaatcatcatgcacataaatcggttcaaaaaagtgcgacgagcaagaggaagcccaacactgtggagcattccactgccaaacgttttaagcctcaattatggtgattggaagcaacgccgtccgctcactgatggtggaaagtcttttggacccgatttacaaggacgaacggtcgccagcttgcttcaccagcgtagagcccctgctgcgggaggcgaagcgccggcacccggacgcccgtcttacgcgcgcggagatcagccgctacttggcgggccaacgtgtctacaccctgcaccgacaagtgcgacgacgcttccgccgtctgccgactctggcctccggtctacacaccgactggcaggccgacctggccgatttccaacgtctccgcgcgcaaaaccgcgg

SEQ ID NO: 73690 - DNA, 186 bp, Heterodera glycines
ggcacccccacaaagtgtccaagccacgaaatgtccaaaagagtaaaaacccacgaaatgtccaaaatttttcaaaatttataaaaacaaaatgagtctaatttaggatttttcggttttcggggtcgctgaatacgaatataccctttatattaccccttgcctaaccttaagcccatctgaata

SEQ ID NO: 73691 - DNA, 470 bp, Heterodera glycines
  unsure (1)..(470): unsure at all n locations
atgaatggatcaatagaaaatgatcatgaaatatatttttattttttgttggtcgctaatattgttcgcctatttttcattataaataaaccaatataattttgcatcgttttcttcgtccaaatgttaatatatccttccgagtaaaaatattcagaataaacttaataattttatataaaaattattaaagaattaatacatattcgcttaatttactaaaaatgtctttgttctccaaacaaatgtctgagcaaattgcatcttcaattaaagacaattacgcaacattcttcccaaacagcaaagaagctaaatttgcccataagtcaaatactgcctgggacgacttaacaaatgagcttaatgccaactttggttcgtcggtcactgtgaaacaagtcaaagaaaaatggcacaatatganaaaagattcgaanaggcgctttgtcgaccgaaagcggtcataa

SEQ ID NO: 73692 - DNA, 673 bp, Heterodera glycines
atggccaaaattgtaaaaaaaatcgacaattttaatcaatattaataatttcaggtctcacaaaaatattttttaatataattttatgattaatattttaggttaatatatttataaaaaaatttcttctatataatatattttatggtggacgcaaataacggggaatatttcgagactcaaaaaacgaaaagcagacatttttgaaatgataccaaattatttcatttcgcataactatgaacggagtttatacaaatatttaattatatttttttaatcaattttttaataatttttaaaaaatcgaaatgtcgcccagttgtcccccacacaatcccggccctgacatgtgccattcatccaatttcgaaattctaatccgtactaagtattttttgagtcttatttagccaaaatgttggatgtacagccccaaattgtgctcgtcccgtccattgtgccagtgattgtgacagcaattgcgctctttttggccacaaatgggccccacaattggccagcactgtggcaagagctgatcaatccgccgtcggatgcgcgacatgccatcagagggccatcaccatattcggcacatgtacggcttagccaagcggggctcgatatgcgccgtgcgcaactgatggtcagtgatcggagacaaatttaa

SEQ ID NO: 73693 - DNA, 176 bp, Heterodera glycines
atgttcaatagatttgggccagttttaccttctcccgtccaaaattataatgttttctgatttttatagagatatgtttttttattccttaccagggaattgagtgtttatgttgaattttccaaaaatgtataaaaaaggtaacaaaaatatgtgtgtttaaatcaaatttatga

SEQ ID NO: 73694 - DNA, 1850 bp, Heterodera glycines
atgcgaaaattgtcatcttccaaatcacttaaaatttcggcaaagcttgacggagaaaggaagaatgcatttttgacaaaaccaattaaaagcttgacggatggagtccaaccaaatgttggtggccctgttttttcgccaaatgtttttcatgaacaaaatgaagaagataaagaatatgagaagcaggtgaagttgatcaaactgtaatacaattagtttttgatcacaagatatttaaaacactgaaaaattcaaatggctagcaaatttaaagaaaaattttccaaattttcgttttgcttgtgtaataaatttttggggaatttttcccacctaattacagcggaaatttcctgtaagtcttcaaatatattaacttcagcattgctgttaatttgtaagctctctacaaattttaattcaaaatttaattaattttctcaatataatttaaaattcaaaaaattaatttgtttttatattaatccagggaatctatttgaaatcaaattttgaaattattaaatttgtaaatttataagtttatctacactattatacaactaattttttgtaaagactgataattatgtgccgttcccgctctactggcatgccgtgttggaacattttgatggaaaagtgccggccaaaattattgccaatattttgggccgtctgatcactgccttaaaactttgcaaaggcaaccatgactatgacgtgatcacttcagtaattgattttgacggcattttgacggctgaacattttttggccctcaaaaaaactgatgggccaatttttcaagagaccgaactccgtggagacatcgctttcattgtcaagaaaattgatgtgccagcaaacacacgtctggcctacatgagtccggaacaagtgatggtaagtatggcaaaaatatgaaaagttaaatgtccgaatcgatcgaaaccgggcgatcggaatgttacaaattaaaatttggacgagatcttcgatcatgtgcctctaggctacggcacaaaccgatattttcgattttgatccaacagattccgaatgatcagggacatcccgtgaaggacaagtgccacctaattagcaaaatttaaattcgatgagtgccctcattaacggttcccgcgggacacggatttccttatttttaattcttgcaaagccaaataagtaaccgtacctaaacacttggattaatgccaatgctaacatatacaattttatgcctaatgcctgtttaacagcacaattcctacaaccactccacggaggaggacattgtgtggtcattgggcgtgatactgttcaccatgctcatcaaccggcatccattgcaagggatggcaaatgagcatttcaatttggcacaacaaaatgccaacaataacaaccgaaccgttgacattggcacattcttggccaattcttcagaagacatgttgccaaaatggcgcaaaatgattacattttatgtgcgatcagaacaggaattgccgttggaatacctcaaatcgtcggtcggtgttggtaatgatcatgttctactaatcccggtgattgaggtcggtttatatgaaaggcgcgatcgatgattttcgatttggtaccgaaaaccgatcgaaagaattttaaaatcaaaaatttttgatagaaatacccaaccccaaaattcccaagaatttaaatataacattttgtggctaatcaacaaaatgccaaaattacggtttttagcgctgccttcaaatgcaaaagcagcaaaggatttcgttgtgccgtttgcgcaaaactttggaagaaattgtggagaaaattgaaaatgctaa

SEQ ID NO: 73695 - DNA, 749 bp, Heterodera glycines
accatcggcgaatgtcacgtcgtaaatcacaccagttcgctttgaaatcttgccctgttgccaattttgggaaattctgtggcgggcaaagaccttgtttccgatcgaaaactcccttaatttggttccaaatcgcttattgaagcgtcttgccatttaaaaaaccataattatgatgaattaagcaagtgcgcaattttgtcaccgtataataccgtagtggataaatataatgaagagattttggatttattacctggtgaacaaattcatatttaagtattgatgaaacagatttaagtaaaaataacccagtaactccagaaattcttaattcattgaaatgttccagtataccagatcatgaaattaagcttaaaaaaggggcgatgataatgttattacgcaatttaaatgtaaaggagggattgtgtaatggaacaaggttgcaagtgactgatttgggcaaacatgtaataaactgtatcattaaaagtggagatcgaattggagaacaaacttttattccaagaattaccttaattgaagaaaaaaaatttccttttctactgagtagacatcaatttccaataaagcttgcttttgcatttactataaacaaaagtcagtctcaaacattttcgaaaattggtcttgatttcaatgatgatcctttttcacatggccaaacatacgttgctttatcaagagcgaaatcttggaacgatattaaaattaaattatctgaa

SEQ ID NO: 73696 - DNA, 1446 bp, Heterodera glycines
  unsure (1)..(1446): unsure at all n locations
atgattcaaaatgcttttattttttcttttatttgctttttcaacaaaatattttttgccaaaaatgtcaaaccggccatcaatctgatcaaatattcggctatcatttctccgccgggtttttataaaattgcaatttgggacagatttgaaaagaaaaaagcacaacaatgcaaaaatctttttgaagaagttgaacaagaagtaagaaattaaaagcatttttataaatattcaattttggctaactttgccctgaaactttgagagtgatttttcattatgccaatattctgccaattcgggaatagtaattcataaattaaatattctaatattttaaataaaaattctttcagtaatttttaaagtttcaatttcaaaaaacgattattttcaaaatattttctttttttcatgggtcaattgtccgaattttgaaattttgtgctttttctcccaatttaattgtctaaatttttacttttaatagttcaatggtaaatttcatgctgttcgtcgcttcaagtattatgatggcattgaattagaatattttgctgaatgttttgaaaactttttcattgctcagacaaatgaagacggtgaatttgatgtgaatttaatgggtaacattggagaaacaatctttttccaaatatttccactctataataataaggtaattaattagaaaatattaaatgcaattaaaatatgacattgatactaatattcaaaacctatttatagctaaacgaagtgaaatttgcatattttgttaatttctttaaattaaattttcattaattccttcttcaggctccaatccgttccgattctttcccctccacttttctccaaagcatacacagaaaacccgattggaggttatgtgtgcattttgagcaacatttttattttctaattcataaggaaaaaaagactaaaatcggcacaatgttggacaattggcagagaagtgccaatgccaacccatcggatgaagaagcctttttcctcaaggcatgtttacaggaaatagcgtcaagaattgttgacacattcaccaagggcatcaagctgaccaataatgaaatcagcatccagcgcaaatattggagtgcatttcaacagatgaaagggcatggaattttggccggaaaattggcacaaattgatggaatgccaaagttaatgaaagatttatgcagatttacggttgctgattatgaggcaaactccgccgatggattcgaatttaatgacaaattattgcctttggctttcttttgtgcggaatttataanaaatggcaatgaaaagcatgagagcatattggagagaatgaagcttgtgaagtttgaaaaaagtggagaggaaatgaacaaatgtagacattatttattttatcacttttattttttgtggaatgggattaattag

SEQ ID NO: 73697 - DNA, 1056 bp, Heterodera glycines
atgcgccgctattatgggactgattttatggattttatcagcgagcaaggagaggaagaggaaattggtcttaatttcaaacagggaattgtccgagtggggcacgtccaattgcccatgattgcagccattaatattgagtgccgaccgatcgaagtacgacttttgcaaacacacactctcccaccgctctcggattccgttgggtggggacggataaacagaaatttgagtcctgaggaaacattcatcaccgctgagagagaacacgactattttccaatacgtgtggggaagtgtctaacaagtcccggggcgacccgaattgtaccactccgcttgttaaactttggaaattgtgacataaaagtgcacgggggatcccgcttggctgtacttgaaccgctttcagctgacacgcatattaattggttgcgaaagtgtacagaaaccgaagaaagcatgctgatgaacgacgaggaatggcataaattcaaagcagaaagtgatcaaataccaccggaagccgattggacagatgaaactctggcgttcccaaaaaatggcgaggccaccaagccaattttggaaagaatctcgctgaaggaatcaattttgagtccgggaggaatgataaaattgaggcaaatcatcgaaacaaacgaatttgtatttgtgaagccgggcgaagtcggtctctttaaggggaagacaattcatcgaattgatctgactgaggtagccagaccatgtcaacaaaggccgtatcgttatcccgtggcactccaaccagaaatagagaggcaagtaaaagaattactgcgacagaatgtaatccgcccctcttcctccgcttgggcttctcctattgtgcttgtacgaaaaccggacgggtcctacagcttttgtgtcgattatcgaaaattaaatcaattgacaaagcgatcaacatattatttgccgagaatccaatcgattcttgacgaagtgacgggaaagaagtatttttcggttgctgactggctccagtggattcttccacataaaattggctaa

SEQ ID NO: 73698 - DNA, 1053 bp, Heterodera glycines
atgggaagaaaagaagaagaaaaacgaaatgaagagaagaaaagggaaataattagcaatttctataaaataaaagagaaaataaaggaaaaaggaagaaaatactcaacaaaagaatggaataaaattaatacgaaaatagcgaaaaaattggggacaaatcgtcaatatattgctgaatggatcaaagaatttggtcttcaaaaacaaattcataaaaactataaatcaaaaactgatgaagaaaagttagaaattgtacagaattttattgaaatgataaatgaatataagcaaaaaagaaaatatacgagaaaagaatggcaacaaaattatgccgaaatttgtaagaaaattggagtaggccatggaacaatttacaaatggaagaaacattttggcattcgcagtaaaataacggagaaagaaaaaatggaaaaaatgaaaatttattggcaaacaaaaagagaatatccagaaatgagtgagaaagaaattgcaaagatgttgaaaagtgatagaactaacatttcaaaatggaagaaactgtttggataaaagaatcgttgaagattgaaaggatgattataagaaaaattggataaatttgcagaaaaattatcagaaaaactatgataatttctagttttttttttcaaattttttgtatttgtattaaaaaaaattattttaaataccctaagttttgaaatttttcttagtgaaaataagtgaaaacagtcaattcaaggattgggagtgacaaagccctactctggagactgttgggactcggggacacccaaaatggggcccctcgtcgcagctccgggcgggccaaaatggccctaaacaccaagccccaaatccgcttttcgctgtcctctttatttgctgacaaaggaaggtccccaggtgtccgtgggatttccgaatgaaatttggtgggtggttagagcacccctgggttcttaagaaaagtggttttattttttgcggaatgagcccgagtgccgagttatgacgtgccaaacttttttttatcccaataaa

SEQ ID NO: 73699 - DNA, 1594 bp, Heterodera glycines
atgccactgactcaattgcgcgtctatgtgctgaagtgtctcatcgccactttgttgtccgggcatgcgaacaccgtggcggttcttcaatttgcattgaattcggagaaaaacaaaatgcaaatgcatgaaatcctccggaattcgatggtcggttactactcgcaaaaccttgaggtatgtgcaaaactgcccttttttgttgccgaataacaaattcaattgaatttgtcccgttttcaaggaccagggtcgactgacgcgcattctcgaaattgcgcacgagctcaaaattcttggagaactgctcaacatgacccaatttgcgttcgtcatcgacttggccacacttgccgcccgacgggactatctgaagttggacaaattcattggggacaaactgagcgagcatggcgaacgctttgcgcaagacctgtgtcattacttacgacgtcgatgccccgtgttgaccaccataaacccgttggccaacgacactttccactccatgttctccactttgcaacagcgggcagcctcttggccagtgatcacggccgatttgaaccaactgattgcgcagatcagccgaggaaaggtcggttgcaaggctttgtagccgttttttgccaaaaaaaggaatatttttgccattttgtgatccattttttgaagaatattgcaaaattggggtccggtttatgccgttaggcgccgtcgggagagtttttgggaattttaatccaatttgttaagagaattcctttttcctgttcaggcaacgcctgcatcagcacagcaatttggaggcattggcagtgctggtagcgttggcgctggtgtcaatccgtttgtgccattaaaaggacagggggagccgcggatgttcggcgcttcgtcaagcgcagcggcatcgggcattgccaacgccttcacaatgttccgccatcagcacgccgaccagcagcagcaaatgctgcgaagcctgcgctccacgcccggcgcctcggacttccacgacttccgtctgaccgcgcaaataccgccaagtccgagcaatcaacagcaggccgagtttggaggtaattaataaacgcgcgtttcattggtcatgcccgcattattatcaaatcgctcccataaaccatatttaaagggtccggatcatatgttactgatagaaacttaagtcgattaaaaatttcccaaagttttaattccgaaataatcatttttttataaaatttttagcaaccctttcaaaatttttcatttcccttcgaaagggggagggctgggggcccatccaaatgcatatgctcatgatatttatgactttagtattccaattttgcttacagatgacttggccaccgcagtgttcagtgaagacatacaggaagaagcgaactcatattttcagcaggtttcatttgtcctcaacttaacaattactattttccattgtcgtccatagatttatgctccaaatggtcgcatgtctgtcaatgatttcatcgcaaaactcaaaggttttcggcattctggaaacatcaaagagcgcgtgagtatttattttgtccaccaacgaaca

SEQ ID NO: 73700 - DNA, 476 bp, Heterodera glycines
cgaaagtaccatttggacgatataagcgagcgcatgttgcgggtctttttgcgccatcggagtgtaacagatggaaatccattcgcgcaagatgttctccactttgctctgcagaatttggtcctcagtccgaacgcccaattcgttgcctggcgccgggcagaaggcgccgcggccttcagagaaaatgccgggcggaagtgccattcgttctgcggacataatgggcgcggcgggatgaccaacaatgggcggcggatgatgggaagggatgacgccatggagagtggtggtcggagtacgaacatcggtcatggacatttgactggaagggatgaacggtgtggcgagcacatttgtcggcgttcgagaagaagcagcagttggtgtgttcatcagaccaggcttggtaaactcgataaatctgtcctcgggcgcgagcggtttgaagccacagattttcctacaaaattttc

SEQ ID NO: 73701 - DNA, 591 bp, Heterodera glycines
gttgtggcatgttcacaggtggcggcttcggatgtggcatcagcaattgcaccaaattcacataagtggtggagggcggctgatcatcttttgaataagaaaatttgttgaaacgaaaacattttcggcggtaaaaaaacgtttgaaaaaattccaggcaaaaaatggggttaaaattcaagaaaattttgcttcaataaagaactcggtaaatctcatgatactaatggcgctgcggtttagtcgagtcttgaagacaataaaatgtcaaaatgttcgcttgggccaagagaattccaggccagggaattaccgaacaaaaggggacccaaagtgcccaaatttcctcaaaacccaattctcgaaagcatcgccaattttggcacctttgccgaactgactgctctccttccaatgccgtcggctgctggacatcattgaagatgatggtattgcttggtggtgctgctgttttttgaatccggcgccgactaagccggcgccgctgcgccgggttcgaatccgaatcagaaacagtccgagcgccatcagcgcacatgcaacgccgcaggcaccgaacaccgccctgga

SEQ ID NO: 73702 - DNA, 1569 bp, Heterodera glycines
cttttgcggataattatgcgcaagtgttgcgcgaacgatggcatttgggcgaatgtggcgaagacattctgattttgattgtcaaaacaccgccacaaatggtttcgtttcgaaaatcaaaccaaattgaaattttaaatttaattttttcagcagtccaccgatgggcctcagtcgtccgcgcactcgcggcccaacggcccatttccggtgaaaaatgagcatataaactctgtcctgtggaaaagttaattggcctaatcaccgacaaatgatctcgttctactttaatcctaaaccctgatcactctaaaattttgcaaaaattaactgactgatcaccgacaaattgatcccataatcactttcaaattgaacggcagacaaactaatctgtcttgtgattgtctgatcatcgaaaaattgtttccattccactgttatcgcaaaccctgatcacttcagacgaatcctttttgaattttgattttttatcccggtcaactcccgaccaattccccgaactttggatcgctctgaccaattctttgatcaccgatcactatgcgtttccgatcaataattttttaaccccttttcccgactgagtcgatcaaatgcttgtaccttctatttcaaagttatatgtgttcagatgcttttcctctcgcttggcccactgatcactagtcggcttcaccccgactttgccggccacgcgcttcggcacattttgtttgatgctaatgcgcaactccaacacgacgcacgccctctcttcaaagtgcgcacacaaatattgttattaatccatgaccaagcttaatggggctgttcgaaatttccaagactcgagaattgggtcccgagagttgtgttgaatcgtcagattggaccgggacgggttccctgatactgaggacgggctttttaattgtaaggccaggagcgcaaaaaattttcggttttttgagaattttttccccttttgagaggggttgaaaaataaagcccacgggggttttattttagggaatactgtattttattttttctcacaggtgctcaacgaaatgttgctgcgcatggacgccgaagtgtttggagcgttggcaccggcagaattttcagcgggcgttggcacggcaccgtcctcctttgtgtccacaccgcacgcgcggcaccggcacagttatgccgatgggccgacggtgccgtcacgcagtcacataccgccatgggcatggtccaggaatttagaatttaatttggcaattcactatggcagaaactcgggggcctcaagaattgaggcccggttcttgagcagcgagagatgcgattggcccaaacccagaaaattcgagaattgaaattttggcccaaaaattcgtgaccaaattttggccaaaacacgaagggaatagtcaagactcgaacttagttttgagaatatttgtctcggtttggagcccgagaaatatgagaatttgccaattcaatttttggggggggtcgaaatttttaggcataaaaatgttgaaaacatttttatctgttaaaagcaca

SEQ ID NO: 73703 - DNA, 1340 bp, Heterodera glycines
atggccaattgcttaacggatggttttgcgacccgggctccacaatgtccatgtcggaaggtgattaatggaagaataaaaaatgatttaaaatataattaaaaataacaaaaataattaattaattaattgttttgcgtaatatatcagaattaaaatcattttaattgcattaaatagcaattaaatcgtatttttgtacgaatttttgtataattaaaataaaattggttgaagcaaaatttattttatgattataaatttaatattcattaatttttcattaaaatgttttaatgaaaatagagcctttaatattttgatttattaaattttataataaacaattatttatttttttattgtcaagtttttgccattgacgaaacattgcgacgaatttatgaacaaaatcggcacaattgcatctgtagaaatgaagataatgttcaaagactggaaattggtgatgagtaaattatttaatttatttatatcatttttattttttttgtatttaaattttaaaatttataattaattattcaaatatttttatttcttttttattttcagataattctgctccaaaagatcagcttctttctcccgacatttgctggttccgttttgggtttgcctttgtgcctgagcttagtcctgggcccgattcggcctcgtaaattttcaaaaaaaaaaaaaaaaatttttataaaaattaataatttagtgccgaacattgtgccaacaataattttgaaattggcacaacaaacagcagtttggaagcagaaaatgaatccaatgaacagcttccattcaacagattattcttaccacctgaaaaggggtaaaatcttcttttttttttaccaatttggcaaattattattttttttgaaattttaattgtaatttcctgagtttgacatttttgagtattaagtgagtgcctttttttaaatttgaatttaattttttttctctaaatttggcatttttagattttaagcaaatgccattgctatttttgggtttgcttataaggcttctaaatttggtttttcatttgaggaggcattcgtctaaaattaaaattggcattccgtgccaaaatggaaaatgcattaaaattaaaatggcgtggcatttatttaaaaatggcaattcttttaaaatttaaattatccattttcatcattagctgacatttcatttaatttaattggtacattcagagaaaacgcctttctctaaatatttaaattttctaaaaaaggcattttaccaaaaattggcatttttactaaattttcttcggtagttttttttaaaataaa

SEQ ID NO: 73704 - DNA, 984 bp, Heterodera glycines
atggaggacgatgaggaggaggaggagaagggaatgtcactgatcagcagggccaatgtgaggagacagctgagagggatggcacaactgctggaggaggaaagtgccaaagggaacggaacggaagagaaaaggagcgccggaaagagagccgcgagggcaaagcaacgtcagcggagggggggggaattccaaatgaattaaacatcggcattttgttttcaaattgcccttcctttaaaaatagtttgtgccaaatccagtccgttgcagaattggagcattggctgcaggcattgaaagtgccgcaaacattcgccgcccttcgggcagaagccgaacgatggcgacagacgaaaagcgccatggcgggcgccgaccagcgaattttggcacagggaggggccgctttgaaggaaaagctgcgcgagttggcgcagcgacgcggcgcgggcgacgctttggtggcgggggacgcaatcgcaacggacgcattcgaaatcagcgacaaatattatgccaaaggtaaaaaaatatttggttatttctcaaaaaaaaaatctttctcagcgattattcacaccgttccgcccaccgatttgctcactcaaagagacttcgaaaagttggccgactgttttcggcgctctttggaaatcgcttcttcccgtggcttttcctccgtcgtaacgttccgtcggcttttgacctttgattcgttgaagcaaatttaggcttttcctgagatgttagcaaaaaatgcaagcgaaagggacaaagagcgggcggcacaaattggcgtcgaagcggtggccaaatggatggccaaacatccgaagggaaaggtaaggccaaattatcacccaattgcaattaattagtcattccctaatgtcaaggtcaattccgtccttttcgtcatccagcaggacaacaaacacatgttggagcagtaccagcagttggtcgagcagaaatttggga

SEQ ID NO: 73705 - DNA, 652 bp, Heterodera glycines
atgtttgtactgtccattggtaaatggtttggccattttgcgcaccggagacgcgaggaaacggccgaaagggaaaaggagaggaggccgaacgaagtgggaagagagaaggaagagataaggaagaacagggaagaggaagaggaagagcagaatgagaaaggaccagctgaggaggaagagaatgaggaggagggacaaagcgaacaaaaaacaatggaagcggaaaagagacaaaaggaggatgaggaggaggaagaggaagaggtaattgctttcgattagtggaacttttgtccaattgttttgcttttcatttgccctttttcgctttttcagtccgaagaccgatcatcgacggatgagaatgactcttttgcgcttgaggacggcacttcctccaccgatcctttggactcggcggatgagctgttccttgaggcgtccgcctttgccgagttcacggtcagcgaagacggctcaatttgggaagggaccggcggatggggcgaagcggacgacgcgacagacgcggagtacgagacgagcgtggaggaaatgctgatgttacggcacgggacggtggagggaaagcgcagtccaacgccaccctcaaaaattggcacgatttgctcatcggcggaagacgaag

SEQ ID NO: 73706 - DNA, 1806 bp, Heterodera glycines
atggccgccggggtgaagacgataatcggaggggcggtggaagcagtgatcgccacaataattaggacgaccaaagtggaagtgattcgtgtgaagcttgaggaggaccaatggatgggccaaaacggactaaaaggagaagaggaggaggaaaaggaaaagggagagcagaaaggagtgggaggaagggaaggggaaaaggaggaggaaaaggaagaggaagagcaattagaagagcagaaaggagtgagaggaaaggaagaggaagagcaattagaagagcagaaaggagtgagaggaaaggaagaggaagagcaattagaagtgcagaaaggagtcggaggaagggaagggaccgaaatgcataaaaatggcaaaaaagagcagcaacagcagcaaaaagagcaaatggaacccaagcagtacctggcggtgtacacagcacaaacatgcatcaaaagagcagcaggtggacggattagcaattgcttaaacaatttattcaacaaaagccaaccacaatttaagagaaaggcggaaaatggcaaaaggaacaaaatggaacagcaaaagcgggggaggaagacgaattgtcaatttacagcgacgcattggaagagcaatcggcggaagaagcagacgaaccgaagaaggaagagagaagggagatggaggagggtgggaaagagaaagaggaagagagggaaagagaggaagagaaggagagagatgaaggaaaagatatgaagaaaagggaggggaaagaactaaaagaacgaatggaagaggagaaaaagggcaaagaaagaaggccaagcaaagaaatggccgaagaacagctcgtaaacagtgagacatcggacgacgaatgcgaagaagaggaagaggaggaagaagaggaggaggaagacgatgaggaagtggaggaatacacggacgaagaggaagaattgtgctcggagatgtcccaagtggagagggaaattgagcggatgagaagggaaagtgtggcaatggtggaggaaagagaagtgaagacgaacacgccaatgaaaatggcaaatccgaggaacaattcacccgaaaaagcagcaggtgaagaagccgcgggaagggtggcggataaagagcggacgccggtggacgtgggcgtatactccgggtggaggagtacggtaatggacgggaaggatacggtggaggaggaaaacgacgcggaagacagaacggaaacgccgaaaccgcctaagaaggagcagcaacagcagcagcagaagtacgccaagacaaacgacttccaatggccgtcagaggcgcgacgaatgacggcggcggaagaaaagccgaaacaaaggggcaacgaaaaggaggagggggtcagttgagggaatcggagggggggggcaactcattagagagggagcggactcattagagagggacgggggttcatttgaagagacgtaattggaaaacagatgagcaattcgaacgggtggccaatttaatttatattttaaatatatgttatgtttttttccttcagctgttacaggaaagtgatcagagttcagcccctctctctgctgtccgaattgggactgatcagctgccgagctcctccgcttcttcggccttcgcccacgggactgatcaaaatcggaatgtccctttttctctgccgtcagtttcggttgctccttccatttgcagcgggtccaaaccaatgccgagccaaatcagcgacaaggcgatcagcagtttggaggtgggcaatggcaaagggatgctcgaaccattgattaa

SEQ ID NO: 73707 - DNA, 1066 bp, Heterodera glycines
atggtctattgtgagcctggtgatatgatgcaaggtgaagtgtatttgctcgctactcttatcgtggttatttttactttggctacaactgtaatttatattatcattggaattatgctgaagggtaaatttaattacataattaaaatacataaatttaaatgacaattttacaattcgttgtaaaaataataagttttcatttctcagtgattagaagtgatcagaacaacagcaacaattcttctcagtcccaaatcgaaatcactcgtcgcattttcaaatcgttggctgtgatcatggcagtgatcttttgcttttggtttttgtttgcactgatcgccaacattttggcacgaggactgatcaccagcgatccggcactgcaatttcttatcattcgattagtgacgcaattgcccttaatcgctcgagcgattaacgcacctgtgctttacttttgcaggtaaaaaaatgaaaaaattaattaaaaaatacaaatatatcatttaaaacttatatgtaatgatttttagaatggtaaagaattattttaagcttaacttctttttatttaaaatttattcaaattttcaaaagttcataatagcaaaaaagaaaatttattaatagagcttcgtttttgaggtacaaaaaatcgcgaaatcgacacataaaatgcctaaaaaatcgaaaaaggtagccattaattttagttttatttcatttgtaaataaaattatgaattattaaaaaaataatttcgaataaggacaaatttttaagccaaaaattttatcaagaaaaaaataatgattttgggaccattcttgagaaaattttcaatttttaaatccttgttaaataattaatattatttcattttcagttctgaatatcgtgaaataataaaaagtgaatttccatgggttaaatttttgctgtgttcaaacaatcataatcccccagtcgttgttgtatctgccgggccacaaattctcaattcttcgaacatacaacaaatgcatcataactgatgaattgtgaaaaattttaatttgtcata

SEQ ID NO: 73708 - DNA, 1363 bp, Heterodera glycines
atgacaaaaatccataagaaatattgtgaagagattggaagagggcaaaatatagagaatacattaaataaaatggaaaatgaaacggaaaatttaatcaaaaatttgaaaaaagacccgaaattgcaagaaaaggttcaaaatatggttgaaatggagctgagcaagaaccgaaaactgaatgaaaaaattcaaaacgcaatggaacgcagaaaagttaattccttctacgatttgcttaacggtaaaatttaaatttttattaatttatttactctttttagccgcttttcaaacattttttggaaactgcaaaaactgttccatcatgccacaaaaagaactgtcaggaagaaggaaacgacggatggcaaaacatgaaatgggaaacacttcaaatacagcgaatgagcaaaataatttctctattgctggacaaaatttggtgactcaaccaacggatgtgcacaattcaaatgagacaggtctcgagctcgtcactcattcatctgatgacaatgaccatcaaaatggtggtacaaaccgagtttttttgaatgccgaactcccaccacaaaatcggaatttgtctccgactcgtcaaattttgccggaagatagagccacaccaactcaaactgttgaccatcatccagccaatgatcaccatgttgacataccacctgtagcacatgcaaatgttcatgaactgtccgctgagcagggacatggagccattccaattgctcaaccggcaagacaaaatcaagcggtgaatgagcaaatcagaggattacttaaccaaacttataacgcacgccaaggagatcgaatattcgtttgtaaatttagcaaatttattttttctttgataattggcctttgggtgatgttgtggatgagtatttttaaagaacagcttcagttcgatatttctctaagtggtccaatcgcttttttcatcctctatttgtttattttgctttcttttttcccttgcttgttttatcacgttgaggtacatcaaccaactcataaccaagatgtatgaagcaagaatcacgcaagcaacaacagatcagcttctcatgtttctctttaattatcttttttagtttttagatcatttcctttctattgctcacctcactataattgtaaatttatattggtaaacttatactgtcggtttatttctttgaaactattaacctttgagtaaaagaagctgtcaccttttttatgtgcaaaattgagagaaaaattatataacttaaaactgacaaattatgttcgaaagtaccgaccatcatgcttaaaactataactaaggattatgtatgggtttgacagacaaaattca

SEQ ID NO: 73709 - DNA, 708 bp, Heterodera glycines
atgcctgtgccgacagtgacgaagcggcactttgttaaatcaatgttattataaaaatgcaatttcctaaaattgttgggatattttttttcgaaaaattaaaagggatataaatttttattgcttttactttgtaaaatttgagtgtttcttttaaattttattccgcgttctttaaatggttgggttatttatttttttgtaattattaaaattaaaattaaatttataattataatttacttttaaagcgaagtttttcacggggataatccgctttcggagccggaatgtgcaaatttagccggctttatgcatcagcattcgccacaaattgatgcctatttgacgctgcattcgtaagtaatgtgctgatgcatggctgtaaccacagtttgataacggaatgggttcgtttgaaattaaaaaaattaatttgttattggtattaatttgaaagattttggcaatttatttctaattgaagcccaataatttgaattgaaaaaaaaataactttaaaaagtttccaaaaaatcctatttgaaaatttactattaatatttgcattaaatattcttatttaaaaatataatattttttacaattagcaaagagttggaaatgaaatggccaatgccatcgaaaaagcgggcggtgaacactttaaagttggctgtggtgatgaaattttatgtgcgtaattaa

SEQ ID NO: 73710 - DNA, 322 bp, Heterodera glycines
tttggcaaaagcgcaaagaatggccaaaagaagccaattatgttggtcgatgctggcattcacgctcgagaatggatagcaccagcagttgcactcaaattcattgacagtgtaattattgcgctattaattagtgcttaattaattattttaattaattaattacgttttttagcttgcaagcgacaataaatacaattcaattctcgaccaacttgatatttatgtgattccagctgtaaaccctgacggctatgagcacacttggacaagcgatcgtcagttttgttttaatatataaataattttttattttattaaa

SEQ ID NO: 73711 - DNA, 460 bp, Heterodera glycines
atgcacacacgttgcattcaaatgcggacatttttgccgattctgacagtgccaaaaaggtgagtgccgaaagagtcataaccaaatgaatcgaaagttttcgttcccgcccttattaaaatttacgaactttaaggaacttaaattttaatttgatatactattaaaatatatatattgaatttaaattttaatcaaaaatttggttatatttacttttaattattaaattattttataaaaaattaggaatgtaacaaaacacacaaataaatagtgtaattcattgtgagaattctaaattctaattaaataacaactaataatttaattttactaataaaggttctcgactttttggacaagaattggatttggcgcgacacaattgtggcaaattatggcgagtaagtttggaaacactattattaaaaaagtaatttaattatttataaataaa

SEQ ID NO: 73712 - DNA, 418 bp, Heterodera glycines
atgccgcgaccgggagtagtttgtgtacccggaaaagggcataaacaaattggccaaacaagtaattaaggacgaactaattaacaattaaaattataaatttttaagattttgcccgcccttcaaattttggcggaagaagtgagcaaaatgacatgatgaattcattaaattagagctgatgtgaaaagaaatacctaattatcagtgaaatatatataccctatataaaattgcacagactgtcaaaaggttgtgggtactgctcgcccatcccgtgcctatgaaggagtacagtctttgaagtagccgccccaaccccaaacctggtttaccgcaaaagaccaagccaataggaagggagtcctttgaaccaaaacctattcgactcccttatgaagttgccgccctaattaaa

SEQ ID NO: 73713 - DNA, 1794 bp, Heterodera glycines
atggaatcacataaatatcaagttggtcgagatttgaatgtaatattgtcggttgcgagctaaaaaatataattacttgattaaactaattaattaaacagaatcaaaatcataggctttttccaacttttctggacttcttgcgatcagttcgtggtgagttgaagtgtcaaaagtatcgatgtgggtgatcagaagaggcgggggtcatttcagtacggaacaaatgattttaattaattaataattattttaaatatattatttttaaatatttttaaatattatttggaggcaaaaaatccatcaatatattttacccatttcgcgcaatcccaacgaatgactctcaagtgctggcattgcgtcatttcgcaaatttgatggagtcgtcaaacagtcgcaaaggcactgtccaattctggcaacatgcacacacgttgcattcaaatgcggacatttttgccgattctgacagtgccaaaaaggtgagtgccgaaagagtcataaccaaatgaatcgaaagttttcgttcccgcccttattaaaatttacgaactttaaggaacttaaattttaatttgatatactattaaaatatatatattgaatttaaattttaatcaaaaatttggttatatttacttttaattattaaattattttataaaaaattaggaatgtaacaaaacacacaaataaatagtgtaattcattgtgagaattctaaattctaattaaataacaactaataatttaattttactaataaaggttctcgactttttggacaagaattggatttggcgcgacataattgtgacaaattatggcgagtaagtttggacagacactattaattaaactaattaatttaattattttaaataattaaaaattgttgtaaaattaaaaaaaaataattagtaaattaaaatcgaccgcgagtgaactgatcgcaagaagcccagaaaagttggaaaaagcctctgattttgattcggataaatatcatcaatatgatacggtagccgtaatttattttaaattataaaattcattttttcagattgtctcatatttacgacttttggccgaaaataattctgactttatttcatttaattccatcggaaaatcgtatgaaggccgcgaaatttcgtatttaaaggtaaaaaaagatattttaattcgttattaataattttcttgggtctgtttccaagtccggcaaaatttttaagaaaaaactgaaaatttttaaaattgaagcaaattttattaatagattttattcaaaatttctccggcttcatctatttggacaactaactcaaatcgacttagacaaaagattaaaaaatcctcaaaagtatagaatatttaacaaaactctcatcacatcacaccaattttttcgccagaaataataaataaatttttaattaaaaattttaataataacaaaatttcagtttggcaaaagcgcaaagaatggccaaaagaagccaattatgttggtcgatgctggcattcacgctcgagaatggatagcaccagcagttgcactcaaattcattgacagtgtaattatagcgatattaattagtgcttaatcaattaatttttaattaattaattactttttttagcttgcaagcgacaataaatacaattcaattctcgaccaacttgacatttatgtgattccatctgtaaaccctgacggctatgagcacacttggacaagcgatcgtcagttttcttttaatatataaataattttttatttta

SEQ ID NO: 73714 - DNA, 160 bp, Heterodera glycines
atgatggacttcgggcattggaggattggcaaagcttttcagaaaaacgattccaacgcaaatgaacagtcggtggaaggacagcatcagaaagaaacaatgacagcacacgcgcgactgatcgaagatttggtgaaccggcgattttatgagccgacgg

SEQ ID NO: 73715 - DNA, 1518 bp, Heterodera glycines
atgatcagagagaagaagcaagagaaggaggatcagagaatgatgaaaagcaaaaacaaagaacgaaataaaagacctaaagaacacatatgtaagcatacagatcagatcagagcacaaagagcaaaggatcactcaataaaagccccaaaatgagagcaaagattatgaccaaaatgcaaagtgcgcgcgaccaatggcggcactcagagaataaaacaagcagaagtgcccttcttaaagcgcagaacgcaaaaagataacacaaagaacaaaaccacggaaaaatcaaagagcaaagatcatgaccaaaactcaaagtgcgcgaaatgaatgaatcagagaacgaaattggagactcaaagtgcgcgatatttaagcacacaattcaaagaaccattaaagctcaaagattgctgatcgaaccaagccgggagcacaaagaacaaaaacattaagttaaagagcaaagatcatgaccaaaactcaaagtgccgtgaaaatttcactcccctcccctcttctgctgctcatttgtctgtgcccatttgtctgtgcccatttgtctgtcctcttttgtctgtactcacttcttcgcgccgaaagtcaaacgaaatgacggtccattcgtcgtcctcaacaaaattcttcatgttcactttgggccgtgtgtaatggtagtcaatggtggccatgtcgtgggtccaagaggaaataataaacgagcaattctatgggaaagggggagggggtaattaaagtgatcagaatgccagtcgaagtgatcactgatcaacgccaatttggccagcctgaccactgatcaccctcattaactgtcttctgccacctgctggtcgtaagggaagaaacgcctaaagcaattcaatttaaacgaatttgaaaattatttttaggagccccacggcctcttacacgttcattttgcagctcaacttgtaaatggcggggaacatcagctggatggcggcaccacgtccatcattctgtagtaaccaatttttaattaagtaccattaatatataattgtcctaggtatcatgtcatccctctctaccctcggtaactaattactccactaattatccccctcccttctccctcttccaattatggtaaattaattgaccgtcccccgtccttttattgagcatttttttttatactcaaacttcaaaaacaccccatcattaaaatgcaacttttcccattatacttttgtcattgtcccaattagtcccacatttttgtcattatccctttgttattatcataattggtccctttttccattatccctttgtcattgtcctctaattgcccccccccccttttctcccacccgccaatgtcccgtctcgacaatggcattcatcaccgcctcgctgttcttcttgtccatattgcccgagttgtaaagcaccgtgtccggaatccaaatgtcctttttttttgaaaaatgaacaaaaataattggccaaaatgcctaaaataaa

SEQ ID NO: 73716 - DNA, 2443 bp, Heterodera glycines
aatatgagcttctcaacagaaccattgtgccatacgaagtctgctctttgacttttagcatttattttaggcattttggccaattatttttgttcatttttcaaaaaaaaaggacatttggattccggacacggtgctttacaactcgggcaatatggacaagaagaacagcgaggcggtgatgaatgccattgtcgagacgggacattggcgggtgggagaaaagggggggggggcaattagaggacaatgacaaagggataatggaaaaagggaccaattatgataataacaaagggataatgacaaaaatgtgggactaattgggacaatgacaaaagtataatgggaaaagttgcattttaatgatggggtgtttttgaagtttgagtataaaaaaaaatgctcaataaaaggacgggggacggtcaattaatttaccataattggaagagggagaagggagggggataattagtggagtaattagttaccgagggtagagagggatgacatgatacctaggacaattatatattaatggtacttaattaaaaattggttactacagaatgatggacgtggtgccgccatccagctgatgttccccgccatttacaagttgagctgcaaaatgaacgtgtaagaggccgtggggctcctaaaaataattttcaaattcgtttaaattgaattgctttaggcgtttcttcccttacgaccagcaggtggcagaagacagttaatgagggtgatcagtggtcaggctggccaaattggcgttgatcagtgatcacttcgactggcattctgatcactttaattaccccctccccctttcccatagaattgctcgtttattatttcctcttggacccacgacatggccaccattgactaccattacacacggcccaaagtgaacatgaagaattttgttgaggacgacgaatggaccgtcatttcgtttgactttcggcgcgaagaagtgagtacagacaaaagaggacagacaaatgggcacagacaaatgggcacagacaaatgagcagcagaagaggggaggggagtgaaattttcacggcactttgagttttggtcatgatctttgctctttaacttaatgtttttgttctttgtgctcccggcttggttcgatcagcaatctttgagctttaatggttctttgaattgtgtgcttaaatatcgcgcactttgagtctccaatttcgttctctgattcattcatttcgcgcactttgagttttggtcatgatctttgctctttgatttttccgtggttttgttctttgtgttatctttttgcgttctgcgctttaagaagggcacttctgcttgttttattctctgagtgccgccattggtcgcgcgcactttgcattttggtcataatctttgctctcattttggggcttttattgagtgatcctttgctctttgtgctctgatctgatctgtatgcttacatatgtgttctttaggtcttttatttcgttctttgtttttgcttttcatcattctctgatcctccttctcttgcttcttctctctgatcatttctttgatcttttgcgcctttctccagtgatttgtccattttcattttgttgttttatctccattcaatacaatgctcatttgtcaatgcttttccaattccacttgaatacatataatttccccgttttgttcattagttaaaattcaaatgctgcgcgaggccctgggccatgctttacgcccatttggtgatccgccgtaagccgttgtattacattgtcaatttggtggtgcccacttcgatcatcactgtggtggcggtgatcggctttttcacgccatcctcaagcacttcggaacgggacgagaagctgtatttgggcatcaacacggtcagtggcattgtgccatcctctgagagaaaagcccccccccaaaaaaaaagaaagtgtctttattttgccaaagttccatctgctggaaaacatcctgactttcaaggataaattgttgggaatatggcctttttccaaggacatctttgaactcaattaacggtctcgagtctcggttctctccgttcagttgctgaccatggtctctgatgcttctgatggtgaccaaccaaatgccgaacacttccaattacgtgcctttgatgggatggtcagtttgtctcctctcctccgtatttcagcagaatgaatccatccatccaaaaaaggtattacatgggcatcattttcgtcatcgttttcggcaccattcttgccaccgttgtgcttttcattcactctagaaaggcgcgccttcagccactccctcgcccattgctcaaggcaagttgagcaaaaaaaaaatgtttttaactgtattttttagagagatttaaatcagaaaaatatttaaaatgccttttttg

SEQ ID NO: 73717 - DNA, 969 bp, Heterodera glycines
atgaccaacattggcgagattctgacgtacgccggctcgtccttcaagcacggtgagtgagcaaaagcctgatcatccatccatcatctgtgaatttgcgccccttttcagtgatcaactgcaacatcatggtggccgacatgagcgacttccaggcggtcaacgagacgatcaagaacttcttcaccgaggacacgtaccctgcgcgcagcttcttccaagtggtcaagttgccgaagagcgcgtacgtcatgatcgacgtggtggcgatcgttcagggccagagctgagctgaagaaccggagaacgagcgcggcagacgaataacagagatgtacataaacctgtctattgtatatttgcgtgatcaacgttcatatcgatgtattgttcttttctgatcactgctatgtgtatatattgtatgtttgctgtgttgcgccgaccggataaataattggaagtgatttttcttttctagtgaaaatccatcccaccccaaaacatgcataattagcccgtcacatgtggattaggggagacaaaatctgcatttggtgtcaaaaatgagcattttagaaaattgtcgccgaaactttgaaaatttgagtgcaaattgttaaagaaattttcaccaaaaatgatttgttattttgagccaatttttattaaaaaataagttttggtggcccgacggtgtgccgacatccgcgccttgggaaaaattggaatttctaaacagattatcactggaaattggcaatttttaggtcaattacgttctatgaaattcagcatctcaagaaaaaatcatcatctctgtcttgaaatcagtagggatgggaatttaagtcaaatggcttttttacatttcgacaatgaccgtttcgccaatgaccgtttcgacaatgaccatttacgactatatcatatcgccaaaatttaaaatatcaaattaaatataataaa

SEQ ID NO: 73718 - DNA, 72 bp, Heterodera glycines
tccaagtggggaattgaactcaggcgaaaaattatgaaaggtagaaagtttaaccactacaccacatgtgca

SEQ ID NO: 73719 - DNA, 498 bp, Heterodera glycines
atgtcgtcaaaacccgaaactttggtggagcggatgaagcatttgttgagctcgggcgatgacgcggacgttctctttttggtgggggaaggagagggaaaggaggcgagttttaaggggaaattgttacaaatttaaatgcttaattaattttaaattaattttaatttaatattgttttctttaagcatgtgcccgcgcacagagcgattctgaattcggcttcggacgtttttgaagcgatgttccgttttgacaccacaaaaaatgcgactgacaatgaatcagcgggtggagaaggtgtaaaaaaaacaacaaaaaattttgtatttaaaaaaaaaaaattaatttgaagcgaagggtcccgtagaagtcactgacatcgatgcgcatgtgttcaaagtgatgctcaacttcatttatgcggatgatttgagtgaattgaatggagacaacgcaatggcagtgctttacacgggtcagaaaattagtttttaa

SEQ ID NO: 73720 - DNA, 3926 bp, Heterodera glycines
atgccaacttcttcctctgcccacggcaccgccgccggcttctgtgccgtcccgtcccccttctgctccgcctcgtcctcgccctaccaaatccgtgacaccgccacttccgctggtactgcagctataccacacctgcaccaaggccaggacggcgaagtgatgtgtgccgtgtgcggcgacgggccggcaaagctgcactacggcgtgttggcatgctacgggtgcaaggcatgtgccgtaattggtggatggaggggcaaattttagtttaaatttttaaattgaaattagaattatgttgaattattcataattaaaattttcttaatttctattcgctaattgccaaaacttgttggtgtttctatttttttaaatttaaatgattgacatattcgccaaatggattcaaaatgtttcaattcaaattaacatttatctatccgatcatatcactgatttaaaaaaaataattagcttgaggaatattctttatattggcccattaaggggaattagttccaaatccaataagctgaccctttttatgtcccaatgcttttcaagggcttcttccgacgcacattgagtggaaaataccattgtaagcgcatttaaaattactgcttaaatcaccttttcaaaatttagatgtctgtcgcttcgacaacgattgcattgttgacaaatgtgagttataaacgatgatgactcatcgcaaatgcaaaaaattgagccaaatttaatcccaagactctcgcaaagacagcattttctggccaaattcgatgaccaattttgacggtgccattttcagtccagcggaacagttgccgatgttgccgtttcaagcggtgcctcgaggtcggcatggacccgaaagcggtacggcctgatcgcgacctgaccggcaaacagcgcgtgccacgaattcgcaaacgagcactagacgaggagctgatcaatcatatggtaatgatccagaacctgggcttcgagagtggtgcattcgattctttggtgcacgagagtgagaatatttcccgagactcggaaccccgaaaaatccaagcctctcgagaccgtcggccatcaataaggtgttccctccggctcaggttcgtctccagggcaatgattggtcccgcaaaatcccggtggaagcccgggtgcttctgatgcaactgctgaacatcgagtccaaagttgccaaaggggacagtgccatggaccgtcggctcaacaccggcgttggcggtatcactcaatcgacggcggcacaacaacaaaatcaacaccaaaatcagcccccgttaccatacgaaccgtcgacagcaacggcatacaatggtggcaaagagacgacaacaagacaacaacagagggaactgtccctgagggaactgttcgagcagaagccgtcgctgaacacacgcagaacggaggtgtgccgatttgggaagggaagaaggaaacatgaagaagcgatggtggatggacaattgcggcgccaagtcaaagcgacactgcggcgcccgacattttcggcaccgatattttatggcgcccccataaataatgcgctaaaccttttaattaacatccttttgctgcgccgcaagtgtcagcaccgcaagcaaatgtcgcatcaccaattggagagggtcccgttattaagtgccgatcgaacccattctttgggcgagagtcggatcattaactaaattaacggctcactgtcttcatcagtgagttattctttcagctggcaatttctgatccgacatgtaactggccagatcactgatttgatttgatttgatttgatttgatttgatttgatttgatttgatttgatttgatttgatttgatttgatttgatcactcttccctcggacctctctgtagctcaatggaagagttgcccattgtattgggggagtcgtgggttcgattcccaaccgaggcctaacattttaccataattattttggaatattttttttatccattctctctctgtacagatgtgctatgagccgtaccgaatggcacaggcggaagaattgccaaaaattgcgcatcgcggtgccatcgcttcggtggattgggtggagtcgttggccgaactgctcgacactgtgcttctggacacgcaagacaaagttgaaaatttaagaaaagccttttttaatttgaattttgtggcagatttcgctggtcaaagcgtgctatgcgccgttgaccattttcaacttttcggcacggactgcgcaaaacacgcgcaacccggacattctgtgcctgtgctcctattcgtatgtgccgcgtaaattgccgcccgattttaacgggtcaaagtgagtgcaattggcataattagcatttgttttgtcataaattgatcattagaaattaattggaagtttatccattatccgaattttttaataatttcccgacttatgccattagtatttcgacatttatgattgatttaccatttttaatggcgatgttagatttattagagtgcgatattctgaaaaatttatggacagaattcgggaaactcggacaattttcaaaaatgctccaatcgggatactgtgaaaattctgccaaaactagagtgcagcgggaccgggaatttttggcaaaaccgggactgggactttgccgggacctgagaagccgggaccgggacctcgatttttcttcgggacgggaccgggaaccgggaccaaccgggaaattttaaaaattcaaaaaaatttaattttaatttatttcaagtgaaaataatacaaaattaaatttttattttgttttttatttaataaaaccccaaagttaaagctaaattaaattaagaaaaattttcaaatcaaattttcttcatttctttcaaacaattaatcattttttgactcaaatgatcgaatattattagaaattcagatttacgtttcacataaattttttcggcgcgctttttccaaaaaacttttggggaagaaaggggtccggcggtgccgttaggcgccgccgggggaaattttgaaaatttgagtgtaatttgttaacagattttcaacaaaaaaggctggttttcgggattaataggctcaacaatttgtacggattttcatttaaaaaaatgataaaaatgtgacaattaaaataaaactatgagtaatcatattttgtcgataggaaacacatgagtatacaaaaagaatattccaaatatgttagtttctgtagagggattgaaccaggggaaagaagaagggaaagtcaaggagactagccactaggccatccgcacaattgtcgtcgatacttttaaagaatatattaatatatttttaaaattttttccttttaactccaattatcttcactaatttttcactcagacccccattcttaccagtgcttgtttttcccggttgccctaccccgggacctcgaatgaccgggaattcccggcccggtcccggtcccgctgcactctagccaaaacccgtcctgttccggatttataagtaccaatctttggcatttgttagcattgatggtctaaattcattttggcattgtgccaaatcacgtttccctttttcagccacctgtccaacaatctgatcgatcgaacactgaacgaattggtcggcccattgcgcaggctggccctccgggaggaggaggtggtgccgctgaaggccatcatcatcctggacccgaacacgcgcaacttgtcgcccgaggcgcaacgtggcgtggccgaactgcgcgaccgtgtgcaggacatgctgttccacgtggtcaaggagttgcacccggtgcacaacgcagcccaacgcttcggcaatctgttgttgctgttgccaacaatttcggtgccaaaatcgaataa

SEQ ID NO: 73721 - DNA, 956 bp, Heterodera glycines
atgcagaataaaatgaacacggactttgaacaaatactcactttgctccgcggccaatccacaacaatgacagacaatcgtggtaacgattaatgacgcatatgtgatttcgcttccgatttttttcgggtcccgaattctggctttcagaaatttttattcaaatgcctgaatttcttaaattttttcatctttgtcccactctggtgccgtgccatatttaataattaaattttatctttttaaaaatattatattacgaaaacccaaaatattaaaatcacaacatcaaacagttgttcatgacgacagcagaagcagcaatacgaaaagtggtgatgttcatcaccagcagcaaaatcagcgtgtccatgggaatggcggcggaggcgaacagcaacaacagcgacgacaagcgcaagcagtaccaccaccagcaacacaaacaacagtagcgggcccaccgttgttgcagcattttgcgtcaccgtacagctgcaatttgatgatgccattgtcgtccagcgccaatcacccggcacaattgcaaagttcgtcaagcagcagcaacaataacggcaaccgcaacttgggtagcaacaacgaagcggacgaggagggcgacggcgcagaacaaagaccacgacggcatgatatcgcggaacaacagcagcaacggcacagcaacgaaagtgccaacaacaacaacaagccgtcatcgtcatcatcgtctgccgatggcactggtgatcgccgtcgtctgccgatcactttttcgcccgattctgctgacacaattctgtgaattataatattttgttgttgttgttgttgttgaaatgtcgatgatcaaccaatcatcaatgttttgatcaatcagtcaaaaaataagctgaaattaatgggacaaaatgttcgcgctttaaaaatggcactaattatttatggacattaaa

SEQ ID NO: 73722 - DNA, 1984 bp, Heterodera glycines
tttcattttcagtcgcctacgtgaattcatccgtttctaccaaatcccaaatccgttgcgccagcgattggaggagtatttccaacatgcatggtcattgattgattcagtgattaattaattaattaattaatatatttatattgattgattaatagcctatagtaaagttctcaaaattcttttaagtgactatttcgataatcccatcaaaatttttaatttaatctgcttttcgggtagagcagaaaaaattcgggcatttttttttgttatttatagtttaaaaataccttccctttcagatataattttccaaattaaattgtcttttatattttatttttagccaatttttaaaaattcaaaaataattaatttgtcctaattattgttaggtcgtacacaaatggcatcgacatgaacacagttttgaagggctttcctgattgtcttcaggcggacatttgtctccgtaattattttactattttatctctcattaatattttctcgaaaaattaaagtcacaatttctcaagcgcaaaatttaaattaaaataaattaaaatttttaaattattatcttttcactaattcaattacttttgctcagatttaaaccgtaatttgctgaactgttgcccggcatttgcaaattgttcgcccgggtgcctgcgggcattgtcaattcgcttcaggtaaacaaattaatccattaattaaccattaaaaaatgtttaggacaacacacgcgcctccggtgattttttaaaccgattaatttaaattaatgaattcaaaacattttagggcgacactttagtccatcggtaaatttattaaatattcatattcatcaatatctctcctcggaatgatttattgacaaatatttatttaaattttggttttagcggtgacattttggcacggctttattttattgctcgtggctctgttgaaattgtaaaagatgatttggtcgttggtatttgtggtgggtgaaatatgttcttttcaaaattctaacttactaaaattttttattatcactcattcgaatgaataatttaaaattaaattttggcaaattttattttttaatgcctaaggaaaggacgatgtgtttggcgaaaacccactcatttatgaagaggttggcaaggcgaactgttccgtccgggcgttgacttactgcgatttgcatgtgattttgcgggacgatttgctcggtaaaattttaatttagtttttaatcttttatatttttttcaagatgttggcgatatgtatcccgaattcgccgaaaatttttgcatcaatttggtgatcaattacaaattgcgcgacgaaacgctgacaaagcggcgacggccgacatttgagcgccaaaagttgcagcgagtttcctcaaattcggcgcgcgaacagaacgaaggtcggcaccgctactcgataggagactcgagatcggtcattccgaggccctctctgaaatcgagactcagatccaagacaatctcgaaatagaaactcgagatcaatcatcccaaaacgttactgaactcgagactcgaaaccgagatgacttcgagacagagactcgagatcgattgtctcgagacctctccgaagtcgaaactcgaatccgagtctcgagttccaaaaaactgagccttttcttgagtcggaacttgaaacctaaacttccttcattcagatgtccgcgcattttcctcctcattcgccgcacaaaaccatttgtcggcagcgaccgcggtcggcgcctatgaaagtgttcggcgcagtctgaacggcatttcgcgaacggacagtgccggcaacggtccgacaactgcactggaacaaagtcatcaaacaaccaatgctgcaatttttgaaaaacacaattctcgaataaatcctcacttttcggcaacaatttttaggattcgggactcttgacctctttttaatgctt

SEQ ID NO: 73723 - DNA, 1838 bp, Heterodera glycines
aatttaattaagacattactttgttaaaggcaaattaatatttattttttaattaaataaataatttccaaattttccaatttattattcttcggtgtattttgagtctgcttaaaaggcactaattttgccattttcagatgattgcagctgtgccatttggtgagtgttttggccataattttcattattattttaaaattttttaacagatttgttacttgttgaaaccgacagtgatgaggtgtcaattttttaacttctaaattaaattgtaaaaaagagatatcatagttcactaacaaataagggccaaaattggtcacaaataaaattaatcagcaaaaagtgatcagagccggggactgatcagcggaaatgtttataaactcttttttatcgtccccaatttagacgacaactttaattggactcttaaaaactgctcgccttcttcgcttagtccgggtaaacaaaacaaattataatccataaaataaaattttaaaattttttaaaggtggcacgaaaattggacagatactccgaatatggagctgcagtgagtgacaacatcaaattaaatgaaatttggttaatttattttcctcccattcaacaggtgttacttttattggtaaagttggcattatttgtttaaataatttttaaaagttggttagccaaaatattttaaaattcataaaaccatatttattaaatgcctaatttcggaaagtataaattggttaaatgatatactgtttgtgatcgatcacagatggccttattttgtctgattgctcattggctcgcgtgcatttggtacgccattgggtcggctgaactgcttcacaaagtgataaatcgaaaataaattttaaaatttaattaattatttattggttcagaataatatcacatggcttcatcaggtgagaaaatagtgacatcatttggagtaaaaatgatcagcaattaattaattcattcattgtacagcttgcgcggcacctgaatgaaccatatcggcaaaatgggtccttaacgaacggcggtccgtcatgtgagtgttgaacgggtcgagaattatgtcgagaatcaaattttgacaatttttttttaccagcgttaaaagcctaattaattctgttataagccttaattttcgagggcaaatcctttctttcgggtggcattaattcgaaagtttttttggcaacaaattcctttgatcagatactctaataattttatcatttaaactattttttgatcacataattcggtcaaaccattgtcaaatcagctgatcactgattcactttttttggaatacccggagcattgcctgattttgacaggcctttgccaattttatgggtttgcatttaatttaattggattgccataaaaagcccgaccaaaatttggcaaaatttaaatttgatttcgcgtttttttcctctttatcataagcattttttgtgtcaattttgcagtgaaatcgcgttacgtgacctcactttacttcactctgagcacaatcacttccattggctttggcaatgtcagcgcaacgaccgattccgagaaaatattcaccataataatgatgatctgcggaaggtgatcggacggacggacgggcgatggtggcaaattaattccattttcagcttaatgtacgcttcggtgttcggaaacggtattaattttcatttttaataattaatttggctaataatgtcgtggtattaattacaaaaaatattacagtctctgccatcattcaacggttatattcgggaacggcacggtatcacaccgaaatgagg

SEQ ID NO: 73724 - DNA, 519 bp, Heterodera glycines
atgagccaaaacgtaataatggcatttgcttatcgaattatctcatatttccttcctttaattcaggttctgtcgcttggcgcagacgtgctacctgaggtgaataattaattaattaatattagctaaaaattatatttttttaattacctaattaggtatgtctataattttccattttcagtacaaacttcagccaagtcgattgaatcattgcacgtaagtgtggtactactgattagagttgatgtcatttggcatattcctttatccctgtaaccgtagtccgtaattagggtaattatgcatttccaaaatcactcatttaattgccattttgtgaatccctgcgccatgcccatagtgccataattaatctgtaatttttgcgtcatttatatgcctaaaaatgcaaaacatttgtttttttttttgttgcttataatgcatccatttatttattttgcagaatcatccactactccccattcaaaggtaattaatattttttaaattaaa

SEQ ID NO: 73725 - DNA, 651 bp, Heterodera glycines
atgcctcctggcacagtgccgatgatgatgatgatgatgatgctctgtaggaaccatttaaaatgccggtccgtctgcgaacggtcgcacttcgttctccgcacgaatcgcaccggaccgattcactgggctctcgacctttgcaaaaacgtgagaatttataaaaaagaaaagaaaaatcggggcaatttttgtatgggttcaaatggagggaagagaaacaatgaaatgtatgcactatttctatttgtctctttcttttccgttgtctatttcacttttctatgtcttcttttttccaatgtgatcaactgtgttttattgttttggtcaaaaattgagctcacttcattaattaatgaattattaattaacaattagtcaaagtcatacatttttcttcatcttttgccaaactctgttttggtactttttcccggaattcgggtcgacaaatttctcggattttccggcatccgaccctcgggatcaattctcggttttcgatcataaaaaattcgagcctagaaatcattatcaactgatccttatttattttaatattgacaaatttgtgtctgatatttttatgaaaaattgccgatcagaatttatctaattttttttatttcaaattccgttggtaataaa

SEQ ID NO: 73726 - DNA, 1259 bp, Heterodera glycines
atgcctgttaatgatgtcgtgtttagcgatgcgtccgccgtttcagtgggtgtatgtgccatcgtcggcccaagaaaaaccgaagcgaaaagcagaaaaacaattttaaaaatcatgctaaacaacagaataattttattgtttttttgagaattaattattttttaaattaatttgtaaatgaaaacaagaaaaaacaaatttgtttctaaaagatatgtttttcaattttcaaattaatatgtggttttatttaaaaaagcataacaatttaagtaataaagcaattttaatcaaactttgccagattaacaatttatgatcactcacagaaaaaacaaaaatatccgaatatgccatgagataaccaacaaaaagcccttacaatatttgccataattggtttatttatttttactgaatctcggaactttaattgattcaagaaatttcaaaaaatcgcagattttgcatgcgtgcgtaatcacttggccataactttgtgaagtcaatgggaaaaacataatcaattagaaaaagctgggcctaatataatggaattatccggcaaatttttttaattcaaattgctttattaaacttgaatttttatgatttttaaaattaaattgtttgccactttgaaagacgaaaaaattgctccgctgtacattagtaaattgtattttttatttttccagcacaaatggctcaacccacccaaaatgttcaccatcataattaaactcaagaagggaccggtccaaaaggccaacgtttaattttttgcgcaaatttgtcatttaatttttttgccaaaaattttttttaatttgctgcctcaaggtatcaaataaggtgacacattttgctaattaatgaagtaattaggcgaattaatgtgcgggatgctaaattgattgttataacggggaagtgcatgaataattatgcagttgttttttgattaattgctttggcgcacttttttgtcctttttattataagccaaatttgttttacgtattaatgatcattaaatactgcgaacaatgaatgaatcaacaaattgacaaattcatttttattatgcataattgcgaaataattaaaattaaaaaaacatttaacaattaggacacatttttggtaggaaatcggcttattaattatggcgcgttgtgtaaaatacatttaaaaatatgcataattaagaaattaaaattatttatagaaaaatatttatcaattaaaataaa

SEQ ID NO: 73727 - DNA, 254 bp, Heterodera glycines
aaacgctgtgaacatgtcaattgcattgagcagaagccaaaggcattggcattacgtgccacgcttggtgaagtcgaggcggcatcactcaaattgggagagtaagcgaatatatatatttgtttagttttaaatttaatttaaacagaccggacatgccaatgaatgagattgaccgtgccgtggaagtacgtcttgagcgagtgcaggaggtcaaaaagtcgatgctcaaggaagccggactggaaacagac

SEQ ID NO: 73728 - DNA, 535 bp, Heterodera glycines
atacccgctcattctgatcagtgatcaggggattttcatgcagaaacaggcactgagggacatggtgtgcaccatgcgtgaacgcccggacatcgctttggtcactcagccgccgtattgtcgggacaggggcggcacctttggcgccgctttggagcaggtgatcgacagtcagtgtcctacacaattgggaactcaactttcccacattttggaggtgtattttggtggtgctcattctcgcatttatttggccagccacgcctttggcttcgtttgttccacggggatgagtgcgttgatggtcaaagacattgtggagcagtgcggcggtttcagacagttcggtgcctacttggcagaagattactttcttggccaggcctttgtcaaagggttggcgcttcaattacaaatgcttttcttttaggccattcttcattttcagtggcttccgcaatgtcatttctcatctgcccgcacttcaaaacacagccaggcccaccgttcgttctttccatgaacgcatttgtcg

SEQ ID NO: 73729 - DNA, 110 bp, Heterodera glycines
atgaaatcgtttattctcgttgttcttttctcatttctcttcatggctttaatgatgccacttgtcagttcagaggaatcggaaacaaaaatgaaatcgccgattagtgg

SEQ ID NO: 73730 - DNA, 168 bp, Heterodera glycines
acacccgtgtctcctatatttacgtgttcgagccggacaccgttttggagcgcggcattcgtccggcattcatttcaaatgcggcacgctttccggacgtgcgcgaggggtaccattttcgtccgccgttgggatggatgaacgacccgaatgggttcagcaaatttg

SEQ ID NO: 73731 - DNA, 1066 bp, Heterodera glycines
  unsure (1)..(1066): unsure at all n locations
atgaaattgggcctaatattccatttaattgtgcttttaatcgtcttaattaatattaattatgtcggtgcagaaaagaaaaaattgcaacaaaaaacatttgatgaaatatttggagaaaaatgggaagagaaagaagaaaaacaactaaatgagcagaataaaagagaaataattcaaaaatattataaaataaaagagaaaataaagcaaaaagaaggaaaatattcaacaaaagaatggaataaaataaattcaaaaatagcgaagaagttgggcacaaatagtaattatatttataaatggattaaagaattagggcttaatcaagaaatacaaagaagtcacaaatcaaaaactgatgaagaaaaaattgaaattgttcaaaaatttattgcaataaaaatgaatacaaacaaaaaagaaaatattcatcgaaagaatggaaacaaaattatgccgaaatttgtaagaaaattggagttaactatggaacaatttgcaattggaagaaacaatttggaaaagatgaaataatggaagattaattaggaaaaatttaaatttttttaaaaagctatgtatgatgatggattttaattgattccaaaaaattaatgtattttttaaatgtaaaaattccaatgtccaaaattttctaatcgtcgattatatccaattttcaaatttttcttttacaccgataaaattgcgttaatttgacaccagccatccgggttatgccgaatgggtatgtatttccgataaatttactcacattttacaatttataaatcggttttttagaaggttttaactagaaaatattttgccgtattttttcaattatatttattaataataataataattttttgttatttttttgaaattaatattttattttccgaacaacaaaaaccaaaaaaaaaatcttgaatgtagtaatttttgtgataatgtcatttttatgagaattttttaatccaggaaaaaacgccccaatttatataaaaatttaaaatatttaatttttgcaaaaatataataattcntttaaaataaa

SEQ ID NO: 73732 - DNA, 1148 bp, Heterodera glycines
atggattccaaacctcaggagcatattccaataacggtctaacataagttttgtacaaaataatccaaatcctagaagattttgatttaataacccgaaataaagaacgcatacgtaaatatgcattctttattatttgtgcgacatgattggaaaattgcaatttattatcaatatttatgcctaaatccctaattgtatccacaacatttattatatttccatcaattttatatatttctttggggtttttatttgagatttttgaaaaaaatcggaaattttcggaaattctttttttgaatttttgctaaattacaaaatggtttattttaaatttcgaaatagttaatttaggtatgtaatttggactcccaaataaaaaccaaaagtgcgccgcaaaaaaagtggtgtaaaagaccttccaaaaaaacgtactaaaacaatgtaaattgatatgaaaaaaaaaattctgttgcactaaataattttccaaaaaatttttggttcctcggaatgccatccctggtttacggtaaatttcgttacggtataatttgggtgacacaccaatgtcctcccacagcaagcataatcaggcattaaaataaataccattcaatgagtccgtgtagtacacattcattttgggccgtcccgaaacggcatcaatcaccaccaccgcagagccggaataaatgccgccgatgccatcatgctcaagtgccactgcggggtcgggcagcaaaaagattggctgatgcacccaattgatctttaaaaatgccatgtattttacataaatgccctaattaaaagaccaaatcaacgaattggcaattttttttcattattaaaaaaactttaaagaagttgaaatctggtccagctcaatcccattcccagttcaaaaaaatgggaaaaattagtaaatgactggacaataataaaaaaagcaaaaagaattaaaaattaataatattttacataattataatttctttttaattatttttaatttttcagaattttaaataaaggaaatgtttttaattttatcataattttcataaacttaattcattttccataaaaataatgcaaaataacgaaaatattaacgaaagatatgttgtgacgctaataaa

SEQ ID NO: 73733 - DNA, 2845 bp, Heterodera glycines
atgctccaaaagtgtcactttttggctgatcaaagcgacagaaatgcgtcggatgatcgccgtagtgagtgcattttcagcatttgtggttcccatttcattttgcgcatttttaaagcattccttttggtcaaacttttgttcatccaaagactgtcgtccgaaaaccgtggctcacaaagggaattggtggaacaactgtttggtcggtaaaatgtgttcattttggcatttaaataaacaaaaaatataaaataaatatgcaatttttgatttaaaaatttaggttctccattttcgttacaccaagaagtgatccgagcgtaccatgatcggccatccacttttatggacttgaaaattttgtaagttttccattttttaagttattttcgaaattggccaatttaattggaaaatgatgacaattttcagcctccatttgctcactgctgatgaacaacgggctttgcttgacttcatttcctcaattttggtaccaattctttttcgcgctaatcggttggatcccatttgggctttccccatgcatttgttgggtactttacgtgaccctcttctggaagttttcaaaaaacagaaattccaaaaaatttttagagaatttttgtttattttttagactaacaataaattttagcagaattttttttcaaaatgctaattactgggtcgagaaaggatttgcatccgcttcatttgccaccaattatttgcccatttttccgccagaatgaccctaatgttggtgttcatcctgcgcttgttgaccattgttttgcttcttcctccgatgaatccgctgctgctcccttttccgtttggacttttctgttggccgaaatgatctcttccttttgcttccaaccgcacactttgtccgaccaatccctgaagggtctgtctgtgtttgaccgatcatttagcattcatccgttcatgccatttctttttgccactgacgggacggactatcccatgaaaatgcgaaaaaaacattttttagaatttttttaagaaaattccggggggggggggacgacctgctcccgccgttattgagtggatgacccgacccaataatgtaaaaaatagcatggcattctccatttttcagactccgtccgtcgactgttgagcagaattttgcaaattaacgccaacggcagtgacctggccattgctatgcatgcccaaatggtcgcaaattattgttgggaattttttctcagaaccggtaatatatatatatgcatatgcatcccctctttttacagtaacttttacaaaaacacagtgcatttgtcgtaataaaaatactttcactaatcccccccccccaatattttcattaatttcagatgattacaatgtgttggccttgctactttcttttctggaagtcttgaacaaacaaacccaatgcaacccgctcattcctgtccttttgtgcagaatttacggtaaaatatttattgtacagcacagtatttttttttatttaaaatatgatttggcccaaaatttcaaaaaatttaaatgccaattattttcagcaattttcggcatcacttggcgcatcaatgagctggtcagacaaatggacatcaaatttattcagcgcgttaattttgccttcttccaatgctttgttgccgaaaattttggacaatttcggacggccggaaattattacgcatcgatgggtaagtgaagaatatattagttttatataaaacaaatgcaattttaattttcccattttagtgaatttgcagaaatccaatactaaagaggtgaggaggcaaaaaagggacgaaattattttaaaatcatttaagaatgaattattaaatttattttaataaaagtttactctccactgatacataccatcgaattttcttccatgtcacagctctctgttttaaattgaatgataatttgttcagatcagtgaatgcattgtctctgcgtttcggaaggaaaaatactttcaaatcgccaatttgtacgattttatgcaaatttggtaatgtttttttatccgagtgcatggattaatgttggtaaaatattaattttgactaactttagtcagaattccgtctattcccaatgctccgttgtccaaatggccgttttctcagcctttttcgattcacagtctgtggaaatcgcttcaaatcatttgacaatggacgaagatgattttggtaaaagcggcacaaaaaatttacagtattacattgatattttaaaatgatgttcttttgaaatataaatatgtcagaaatccccctttccggaattatttttagtaaatttccggcactttttctctcctgcaactcccaattccctgataattttgaggggaacctcgatcaccagttttcttgcacattttttcttgtaggatgatgtcctgaaaaacggattaataaatgtttaatttgttggacattcaaacatttaccataaataaacacgtatttcagatttaaagcgcaccatcgacaacagggagttcagtgctgtgaaggtttttctgtccgaagcgacgcttggcgaaatgcgcgatgggacacttaaagaaattgtgcgcagagagagagcgaaatgtgcaattgcaattttaaactatttcagaagtcctatctgaggttgcgcgtcactctgtgccgggccatttgctcaattggcaaacagtcgttagcacagaatgccgccaccttttttgccacattggacgagtgccggacggaatatgcggaagtgccaaaaattgtgggacgaccgacacatttcaaaaaaatttaaa

SEQ ID NO: 73734 - DNA, 1369 bp, Heterodera glycines
atggtttacttaaccatggttaaagacgagcataccggttaaggtcggtcgttaaccacggttaacgaaaccgtggttaatgcgttaaccgtggtttactaaaccgcgagacgagcataaggcgccagcagcggtgccgataggcgccgccgggggaaattttgaaaatttgagtgtaattttttaatagattttcaacaaaaaatgctgatttttaggattactatgctcaatttgttcgaattttcttcaaaaaataataaaaatgtgttaattaaaaaactatgagtaatcatattttgtcgataggaaactcatgattatacaaaaagaaacaaaatattttaattacttagaggaattgaaccatgggaaagaagaagggaaagtcaagaagacgattggccgacatttgcggcgctgacacttgcggcgctgacatttgcggcgctgacatttgcggcgcccagtcaaagcgacacttgcggcgcgacacttgcggcgccgacacttgcggcgcccagtcaaaaggacacttgcggcgccgacacttgcggcgcccagtcaaaaggacatttgcggcggcgcaaaattcaacgaccccaaaaatatttcaacaatttattaaagttaacagaattgttattttaatagtttattttttaagaatgcctaatttaacaataatcttgtaacctaatcacaaagataaaggttgagtcgtttgccgttggctaatgcatacattaataggagagaaagatttttttccgttttatgcagctacttcagttcttcatccgtgccataaaagcaaattttttccaaatttctccgttcagtgagtttctcaaacaactcaaaaagataattcatctcaaaattatcacgttcgaccagaagctcgccgcccgccaccacgaaagtcacgtacaaaggagtcgttcgattggaccgcaaagcgcaaaaattacttattattcagtcttaatatgccaaaatatttgtaactttttgtttttatgtaatatatcggtgtaaggattattggatcaaacaaaattcaattattgatcagttgaatttaagttcatttaatgtttaattatattttaatacaatttacgctgagctgatgtgcgtgtgtatcatttgtttttgtccgcaaaacgatattttggtttagtttaaatataattgtatcaatttaagatttgatcttgttaaactatatttagctttacattttgctttgctttaattgtgttgaattacataatgaattatcattgcgtttattttcataagtcactttgtttcttcgggtatttttcaccaattttctcaaattgataataataataataaa

SEQ ID NO: 73735 - DNA, 237 bp, Heterodera glycines
atgactgaccaaaacagcgaagcaacttttgccgaggaaaccagagagctcaaggccgagattggtcccgtctttaaccgcgagaaactcgacaaggcgtacaagaaacttgcaaagaaataccatcctgacaaacacaagaattctgctgagaagacagcaaaatttcagcgcttacaaaaggcaaacgatgagctcaagaaagagctgcttaaaccggaggcaattttattttaa

SEQ ID NO: 73736 - DNA, 136 bp, Heterodera glycines
atgatgggatcgccaaatgcagctcggacgcttgatgagctcaacaaagtgggccatgacgaattgaagaaaatggcaactgctcaacgtggcggtgattggaccggaacagtgacaattgggggacaacaatttg

SEQ ID NO: 73737 - DNA, 436 bp, Heterodera glycines
atggttgtcacgttggacggagaaacggcaaaagtgggttttttttgtgggcaattgcccaaaaatttaattaattaaattttaaatttcccaaaaaatttctcgcgcattaggtcctattggaaagcactgttgaaatcaaaaaaggacctgagtacaaattctttcaccaatggttgggcaacggcgttttggtcagcgacggggaccattggcttcgccaagtgagtcccataaattcataaatcagccgaggattactaagatttaggattttcggggcttgggtggggaatatgttagaaaaatgataattatcatatccggccaattttattttttccaccttttgcaaacgaatttttaccatcttggctagggtggtggtacagtatcctttacacctcccctcctgctgggactgttccagaataaa

SEQ ID NO: 73738 - DNA, 677 bp, Heterodera glycines
atgcttctgttcttcgttgcggttgtgctgctcgttttcgttgtttggcgtatttttgccatttcttccacccatttgcgcttcatccgcacttccaatggcatttacaatattccggagacaattccgttcctcggccaggcccacgtgttccctcaaaactcgttcggtaatatttacataaaaattttaaaaattatttgggtgctaaaaaatagcttttttatggcatcccggaggcagtaaaatttgttttaaatttgagatttttaatattgtatttctggatttaaagtgaattaaaattcaaaaaaatatcgaaaaaccctaaaaaaattctcagaaataagatgaattaagttattttgaatttatttgaacaattgaccaaaccctttttctcatcagtgatccaaattgatttgagtttcatctttttgaataatcacttctaaaattctttattccagcatggtccagctttattgtggaacaatcaaatggtaataatattgtattaacactaataaaaaaaacataattaggagataattaattcataattacagacgcggtcagaaaaggacaccatttgatgagatggtttgattaacaaataattgtattattatttttaattataacaacataaaattgaaaaaaataattgaattaaa

SEQ ID NO: 73739 - DNA, 357 bp, Heterodera glycines
atgcacaactcatacgtgggtcaaatcggtgaaaaagggaagtacgtaaaatatttatatattatatttatatataagatttttcatgagattcatttgattataaatgccttgaagtaattaaaattattttttcagtatttttgttttagaaataattaactttttaaaatgagtaaggaattaaggtatacattttttaaaatctattttccattaaatttattcatttgctgactttacgaaatattgatggttattgaagaaccagaaccacattttatttttatgaagacttcattttcctctattattcgatttaaatcattttttaatattcatgttatttcacctaaa

SEQ ID NO: 73740 - DNA, 224 bp, Heterodera glycines
atgaatggcaatcagaataggtttactatttttataaaaagaagtaataaaattaataaaaataactaaatattaatcaatttctaaaatctccaaaagtagataaaaaataaaaaaataataatttaaaaaaattctttaaattacagagtaaaaaagagcgagtataaaagagggcattgcttttattttcattttaatagaaaaagagaagaataaataaa

SEQ ID NO: 73741 - DNA, 1111 bp, Heterodera glycines
atgcagcgtgacaatgaaacgtgccagatgatggtgaaaaaacattgcaaatgcggttgggcacgatgccatgagaggaggggatggaatgcgagtttgtgttgccaggccgggtacgacttggtgtgctgtacattggttcgacattttcagaaattcttacaaaaaaaataattcagggccctgattaatacgtgccaaaaaactagaaatataagctaaatcaataaatgtccaaatatgagctaaactggacgaaaaatgccaaataattgttcgaaatttgcctgcaaaatggtttaaatttaaccatgaaattttcaattttttttttgccaaaatcacaatttttcgtaaaataattttgtaaaagataattttaaaaaatgcaccaaaaactaaactagttttttattttttattaaataaatatttatttaatttggacttcaatttttaccatttataggatactcttgacattacaactggaactattcaacaactggcaagtttttctatcaagcaaagttcctttcttaagagaaaatatttaaagtttaatgaaataatttcatttaatattttttgaaaaattaattttaaaagaattaattaataattttttataaatggaataaaaagcatcaatatttctgattaacaaaaattatatttataagaaaaagaaaacaataaacaaattttcaacaaatttaggaattggaagagaatttgatcgcaaatcatggccaagatgagcatcgattgcctgtattgaaagaaatggctaaaaatgaaatttgctcggacactgtgcaaaaatattgcccttgcgaaagtgccaaatgtgcacagcgattggatgacaaatacgaaggcagcatttgttgtgagaagggctttgacgtggtgtgttgtgtgggaatgctcaacaaattataataatttaattgttggaattctgtgaattaattgcgtctgccggccattaattaaatgtatgaccatttggaaattaattggtcgatcaattaacacaaattattgtatttttgaatttcatttgattgaaacaaaaaactaaaattttattaaatatttaaataaa

SEQ ID NO: 73742 - DNA, 873 bp, Heterodera glycines
atgtgcaaaatgatttgcttctcattttctcaattatttgttgttctcgtgctcatctgtccattggtgtcctacgcattagcaccatcgaacaacaacagcaggttttacactgattgttgtttatattatttacatattcatgatcagatttgtttttcagcaattcaaatttcaaagcttttcaataaatattaattcatcactttgttcctcagcaaccataatttttaattttttgatttagttcgatagcacaaattgtaaagtgtgtttctctattagataataaaatttcaaaaaataactcatttgaaattttgcaggctaattgaaaacatttagaacaatattggcgtagccatcgaatgataacaaaaattaaatttggttttgagtaacatcatagcgccaaataattttgagcgttttgatcacgtaattttttgatgatagaatatgattaaaaatctgctgatcccctggagacgtaaattcatttattaattaatttaaatcatcggatgccgagcgaataagtgagtgaatcctttaacattttagtaaaatgccaacatcatcattttttggccaaaatcggtcagtcgccggcatcggcattcttggcaccttttcccggcctggcattggtgcctatctgtcaacatggatccccgaattgagcaagaccaactgttcctacaaggcgatgaatgtatgccacccatttgtatggggttcatgcgttgaaaacgatgtacgcgtgaacagccacccgtgctgcatggacggctatgagtggcgatgctgtaccaaggcaagccgtacaaacaaaattatgtgcaaacataagttgtattgggatgaaagcgg

SEQ ID NO: 73743 - DNA, 435 bp, Heterodera glycines
atgttgttcaacgttcttttcttatttttccttctcattgtgcaaattctctcacaaggaaccaatccgccaacttgctttgtgagtataaaattatgtatttaaaaaaatattttttaacattttaatgtttaaaaaaagcattttaggttccatgccctgcaaatgaggaattcggctacaaaaagtgcaacggatgtgagccgagttgtgacaagctgaaaccggagatttgcaccaaaattgcatgtccatgctcatgcgactgtaagccgggaatcttccgcaacacaaagacgggaaaatgcgtggagaaatgttcatataatgacaattaaaaaagcggaaaataatgctggagaatttattaatttcccattcacaaaacaaaatagtattttcttgtttgaccaaacaatttgttaattgaataaa

SEQ ID NO: 73744 - DNA, 2098 bp, Heterodera glycines
atggaggcagattttcacggtcaaattcccatttgtcttctttatccatcatttttacatttttcagctccttggttttacgggtcactttcccgcgagaaaactgagaagtgagccgaattcattttggaagagcaataaatttttgattttaaggtgcttacagtcatgcgcagatgggactttcctgatcagaaattcaacaaactatccgggtaatttaagaatattcatttcgaaattgaaaaaacctttttggaagaagttttgcttgggctttaagtcgttgtttacttacatatttctcattatttttggttttagttataatctctaagactgtaattttcaggcgatttcacactttgcgttgcttgcaatttgcgggtcgagcattacaggtcggcacacatcgcaagaaaatggcttgaacaatgcttcgaatctccaggatttacatggtgaatgaccactttacgtgtgacaaagaggagctgttcgacacgctcactcagctcgtatcggtcggttggttttccgattgctattccattagacgaattgtccagaaaaatttttaagaaatgcaaaacgggcgactttttcagccacaaccaaaaaaaaaagctaatgagttttgtttcacgcactcattcccgtcgcttttgagcactacaaaagggatgccgacggactgtgccatcgtttggtgtgcccttacatttccgaggaatgccaaaggcagcgaactcacatcgatttggtgttagttgaggagcgcaaaaaggagttcgagcaagcggcgctgttactctccgttgaccatcttcggcttggcactgtcattggacacggcgaattcggaggtgtgtcttttacgcggtttactccaaccgctttttttgaaaggtttcaagaattactcaaaacacatttaaagaaacgcgttcaatgtctatttaatttcttggaagcaactcttttcctactctagaaagggaatttttcaaagaattatcatttttaaaatatttttttcgaaaaatatttaaaaaccacgtatccatgatggtcaccattacaaatacaatacaaaaaagaattctgttcattgtcagacgttctttcgggcacataccgaggcagaaaagttgcagtgaaaacgctgaagaacggaatggtccaggatttgctggccgaagcgcgttttatgatgtgagaacaatcttttggcgttaatcaaatcccttccattttgacactttttcagtggccttcaccatgaaaaattggtctttttggtcggcgttgtcattgaggacccgcgcgaaagtgaagtgtacatgctgaccgagttcatggccaatggcaatttggtggattttctccgttcccgcggccgtcaccacgtggaccgaccgcgacttgttcaatttgcgcagttagttttttttgaagtgacttcgtgtgagaaaatgccgcgccatctttgcctcccccttcttttcagggacgtggcggaaggaatggcatttttggagtcgcgcaattttgtccacagagatttggccgcccgcaatgtgctgttggacgaccgattggtggccaaaatcggtgacttcggactcgctcaattggccaatcagccgtcaaaagagtcggcgaagggaaagtttccgatcaaatggagtgcgccggaggcactccgacagaatgtgagcgatcggtggcattcattggcatggtggcattttgatgctccatttttagctgttcaccaacaaaagcgatgtttggtcctttggcattttgctttgggaagtgtattcctttggcagagtgccctacccccgaattgtaagtgcacggctcattaaggcactaattaattgaccattgctgatcatccattttgtgtcccttcagcccatccaggatgtgctgaggcatgtcgaaaagggatatcggatggacccgcccgagggcactcccccgctgatcctttccctcatggacgactgttggcagttgtcgcccgcctcgaggccgtccttcgccgaaattttggacattttatgcccacgaactcgctgataaa

SEQ ID NO: 73745 - DNA, 2199 bp, Heterodera glycines
atgggaggggtcggaacggaacagccgaacaccaccactggggaacagagatgttcacaatcagcatcaccaaaggatgttggaatggaacaggaggaggaggagacggaagaaggacctgtcgatagcaaagacgacgacgaggagggcacggagagagggcacagtgccgacccatcagcaaaggtgggctcaacacttgccatggcattagtttgccttgccattcatcgtcatgccctcctcatttgtcagtgccataccgactttgccgccgaactttcgctgctccgtcgctccgcttcggcttcgagtcccttgggccccgcctccgccgaaccttccacggaattcgttctgaattcactttttgctcgatcttcgccattccgtctgctcggctcgacactgctcaacccgatcgcaccaacaacttcttccattgacaatgatcactccgatcagcgtcgtgcgttgtccgctttcgcacccgcgtccaaatcgcccgtcacttatccgacgcgtcaccatcgctttgtcagcactcccaatggcaatggcacatcacttcgaaacaacggcagtggcaacggtcagccaccgtacctcatccgtcgaggtgaatactgtgacaccggaacttgtttaggtactttttggttatgcgggcgcaccttcaaatttctaaaaaagaaaaaacgcgcgttttaaaaaagaaaaaacgcgcgtatgtgttagggatgtgcgagaaatgatttttaccgagactctcgcacatcctagcatttgtaaatgttcccagcgcattgtgcgaattcctttggcgctaagacttcaaacgtgcataaccgagaagtacccttgtttatacgataaaaaagcgcagaaagtgctaaattaattttaaaaaaccttcaagggtttggcgtttcaaaatcccggggtcgccttgccagcggcactctcccgcctccgggttcgtccgattgatgaaaacaattgattgatttttaatagactcggcaatttctgttcgtaaatttgacatcgtttctatgtgttcgtcaccgacggaaatttgtggggacggtgacacaaaaatagaggaagaagcaaacagtggcaaagcgaacaacgtcacaaattgctggaccgatgccatggaatgggcggacggtcgaggcaatggaacggcaaatgccaacggaacggctaacaatgaggacgaagacgcattgttcgcgcgccttgtagtggcacggctgaaaaagtttggcacgaaggaacggagggcggtgagtcggtgaaggaattaatgactattctttggaagtttcccttttaggttcgttcacgcattttcaattggttggaccaaaaagaagaggaaatggaaacggcgacggccgaagacagccaatgaatgccaaacattgcttttcgattgatattttgccattcactgatcagtcaatgattgtccctctctcattctgccaaattttctctctttttctttgttttcactttcttttatcttttgccgaattcattttgtgtgccgttccccttttaacctttgctcaattgaccgatttctcctccttaactgacaaattaattaatttgtcttttattttcaatttatctttgtggctaaattaaaaaaatggaccaatgaatttgatgagaaaatcagcagcagcaaaacacatccaaaagtttgtccaacacttcgcttgagtggccccgggggcggcggaggcgacaattgcccgtcccgccccttcggttgcccttctcccccccccccgcctccgcccaatccttcgccgttttgccatttcttccaattgccccacggccctttttctcttccctttggccaatcagtgcaaatgaccctttgggcacagtaccaaagccaaacagaagagacgggaaaaggaaaagcataaaaaacagttaatgattgtgcaaataaaaattgcaaattctcagcccaattaacgcgcgccgatgagctcaacgaatgccaacgaatcaatcgacactttgcccctggcaacaaattctgcttcgaatagtgccattcccggcaaagtgcctctgagtggtgctgagttggaaagattgctgcgcatgcgcgcagaacgcacgcaacgaacgccaaagtgcgcgcgggttggtgcgaataaa

SEQ ID NO: 73746 - DNA, 379 bp, Heterodera glycines
gcatggcatccaaagcgtttggagttgctttcgtctggcgccaaccaaacggtggtcagatggtcctactcagattcggtagggtgtactaagatttttcactgattttttcaaattttatgttgaattattaagtttttttcaaaaaatttctaaaaaaatacgctgaaattaaaatttttacaaaaaaattttcgggtaaggaatgaactgcccccgtttgggtaaccctttttcatttgcgcttcattcactccataaaatgtttgtttgccatcacaggactccatttggcttccaatttctcgctttggcgacattgttggcgacgaggtcaattgctatgacatcacttattcgccttgtggacggtacgcac

SEQ ID NO: 73747 - DNA, 1216 bp, Heterodera glycines
  unsure (1)..(1216): unsure at all n locations
atgtaccaaccgtgccccgacngacctgtgcatgtgatgaaagttcctctccaacagtcccattgtgcacattgcggccaacacttaccaacaattggtggaaccatccgttggttcgtttggcacccaatgggactaacaataaacgttaattttcctttccaatttcagttaaaattgcgcaaaatttggtgttttctctgaaccggtggaatccgaactttgtgcaggtccaaactcagtcgtccggtaccaaagttttgaacgctgccgccgcctcagcgacagacaaatcgaccgcagcggactcgtctgcttcatctacagcaacgtcacaaatttccacctccgaactgccgatcactgtcgacccgctgctcgtggttgccaatccgtcacagaaagtgccgaaacgacaccttggcgaccaattggaccaacggctgacagtgtcatggagcaatttcatttgcactgttgacagcagcttcatcatcgtgtgcggttaccctgactacagtttccgactgattgagacgggcaatggtgaggacggacatttgggcacataaaactcatgttgtatcggcaccttttcagtacaagttcggcaagttgtgctcggtcatggcaacgtggtcacctgtttggcatgttccgagacgaggtgcggtcattgggaggaattaagggacagcagttcgtttagacacattattgtgttcaaaattcgagactttcaccaaggggaaggccagccaatcattttttcttaaaatcctccacccccttacaccgtgctgtttagtcttttcgccgattgttacgtcgcctcgagcagtgccgactgcaccgtggtactttggcacttcagtcaacacttgggcctgctcgtcggcgattacaatttgcctggggaagagccgtcgccacgtgccattttgactggacacgactcggaaatcagtggtgagtgggtgagaaatgcaaacagagatccggcttggattctaccctccccgggtgtaatttttcccctatgttttagcaatttgcgtttcggctgagcatggcattgtcctctacggacggtacccttctgatgcattccacacagggcgacatgctgcacatcatcatctgctcgaacggcaacggaacggacacattggcaccaatcaacgacattctgttcagcagagactgttacattgcg

SEQ ID NO: 73748 - DNA, 2900 bp, Heterodera glycines
atggaccgctgggcacgcgagtacggcacgcacacgcacagtcaggaacagtttgggccaaaggaggcgtacgagcgaatggtgccggtgccgcacgggtcacagtttagcatcacggagccgggaggtgagacaaatgggtgaaatgggggacaaatgggcgaaagaggggacaaatggaccaaaatggcggacaaataagccaaatggaaaatagatgaaatgaattaaaaaatgggcgaaatggtggacaaatgggccaaaagacagatagcccaaataagtgaaaatgagctaaaattggggacaatgggccaaaagttagacaaatagccgaattaagtgaaaatgcgagaaagggagggacaaatggctaaatgcgtgctaatgaacgagatgaagatgggggataaagccgaaatgggagaaaaatgctaaacggggcatgggcgaaattgtcgacaaatggatgaaaacttagacaaatagccgagataagtaaaatgggcgaaacggggggaaaaatgagcgaggtgaagatcggggatattggagattgcgggaaatattaccatatggggggggggcgatgtatttaatgggaacaaccaactaagacaaaatgccgaaatgggacaaagtgccgacataattaattcattaaatgcccttaatttgtagccacattcgactcgaacacaatgtattcggaccatttccaagtgtcgcccgagtccttcacacgcattgaacgcccgcagcaaattcggccgtcgacggcactcagattgagtggcaacatggacatggtcaccggatacagaacggtgtcaaaatgtttttaaaaatttaaatttacctaattaagggactaattagtaaattttgatcgggagaatcctgaggaggatgggaatggatgaaagtcgagagcttagcggaggctactcctttgagattttgaaattgtcttaattttcttggcaaatttctttgaattttcaaaaattttcccgaaaaaaatttctattttttcaggaattccaaaataaggtaaagcctggacatgatcaccggatacagaacggtgcaaaaatattttcaaaaaatttagtttacctaattaaagggctaattactaaattttgattgggaggagtcccgagggaatggatgaaagtcgagagcttagcggaggctactcatttaagattttgaaatttgtatcaattttcttggcaaaaatttctgtgaatttccaaaattttccctaaaaattttttctgtttttcaggaattccaaaataaggtaaagccatgccctgccggtgaactggtcgaatcattgaaaaaggaagacaaatcggacacggaggtgaataaattattaagaaattaattagaattaaattaaattaattgattagtttaataattaagcaggatcgctgcttattaaagtgccacggcacaaatgaaatgcgggaaaattgtaaaagaaatcaattttggcaatttacggcatttttgtcccaaattggtaataattattctcagaaaatttggcggtacttttccgttttggggccaaagtttgatttttgcctcacaaatcattttggtgtgtagctttagcaattctacgggcccacggttgatttttaaaaaaaattcaatttttggccccaaaacggaaaagtaccaatttggcagcacctgcgaatactttgggtaaaattttgaaaaatttaggaaaacttttttaacactctttccccccccccttcaaaaaacgattttagggctatgcccttgattgttagttaaaattttttgtaatccactcccccgcgctccagcaaaaccggtgaaccttaatatggcgatacggtaaaattttccaatttttcggtgcccaaatttccaaaattgcaaaagcgatactctcgagcagtacacatattgattaaatttaccgaatttcctataatataaccaccgggggctctatttttcgacccccgtcaaaaggggggctttatttcagggggggctctaattcaaggggggaggggctatattataggaaatacggtatttgtgtccaattgcaccaattttcagcattttcaattccacacaatcaacaaaggacatcgccattacaaatccaaagagaatttggcaaccctttcagccggtgaagaacaacaatgaacagtggaaatgaatgatgaacattttattatcgcactaattatgatggaattagtttttaattgtgattgattagtgaatttgatggaaaggtcggccaattttcggcaaaaattgctgagttttatttgccaatctctccctatatagttgaattctgtcgttcattatttagtatttgttttctcatgaatttttaccatcaacataaaaaacatagaaaacttgcgcgtctgcggcattagattgtttgatttgtatgtctatcgtatttcaagaattcattcgaaattttgaattttatctcaatagtaacattatgccataataaataaatttcatcaaaaaaaaaatatctaatgctttgtcttggcctgttcgctgttcgtttctttgggtcttttggtccaaagctattttttcattctctattttttacaataacttataaatattgtatacttaaaaaatttgttaagcgcacgctaattaaacaaaattattcgatgcaatccaacggagctgcgaccggcacggcatcggcggcggacgccgggcgggcgaacacggcacaaatggcgcaggcgaatggtggcattgaacgtgagcggaagccgttggagagtcgtcaaattgtcgcacaatacatcaaatatgcagtgaaattggaacggatcatttga

SEQ ID NO: 73749 - DNA, 993 bp, Heterodera glycines
atgaggcctatcttgctaatgaccgtgcagaaaaaatactgttttacaaatgagtatacggtaagacgcaatggttctgaagagtgggtccctcaatccgtccccgaaaatttaggtcattttcggcataagttatactataatagagccccagagggctttatttttcaaccccccccccctccctcaaaagtgaggctttatttcagaagggggcgggcctttcagggggggggttatattataggaaatacggtatatcctgaccccgacgctccggatcccgaaaggataggactattgaaaagataaatatttggccacaaatataatttcaaaaaagttgactcaactccctcgatttcggccgagccgaatttttcccgtctcgaaaacaatgttttttctgttcggcatatagcgcgagggcaccgttggcgagctgggcacagtgaacaggacggactttgtgccgcaccagggccgtgttgagcgttacgagcggcgcgtgccgcccgagtcgcacattttgacgcccgagccgggcgcattggtgccggcgagtaccgtcagccgcgacgagtttggcgagaagcgagcggagcgcgcgcagcgccaccgcccgccggaggcccaattccgcctggaccaaggcgcatgggaggtgaaaacagtgatttttggagtttaaaaattaattttaaatttaaaataataaaattatttttagaattgtatttaaaatgggatttttaaatttaaaaaaaatcacaaaatttaaaatataaattagaagaaactaatggacaaaacacattttaccaataagctaaaaagcaagtaaaaatcatttttaccagaattccggttttgaaccgggaaatcggtcaaaaatgggaaaaaatcgggaaataccgtttaaatccgggacccagggagtagacttgtcctggtccaggctttaatttaggtaggtatagtagttataataaa

SEQ ID NO: 73750 - DNA, 166 bp, Heterodera glycines
atgccagccgctgcaccgcccacaccgatggcggagccggcgccggacgagggcggcaccggcgcgccagccaacgcggctgggccatatccgtcactttccggcccgcgcttgtttgttgagaaaccggaatcgccggtgaagaaatcctccgctatacggtcca

SEQ ID NO: 73751 - DNA, 2261 bp, Heterodera glycines
atgccagcgcaaccgcagccgccgcctccaccgccgccgcagcttccgcaaatgccaatcgcgcctccgttgaggtgggtgagcgtgcggagatccgggcactatagggggacggaacaaaatttcgccgccgaaatctcgtcgagacaaaatctcgccgcgaattttcaaaaaatttcaaaccaaaaatttttcaagaaaaaatcttagaaaatttgtttataagaaaattctattaaaaatgattccatcaacaccgtaggccgttgccgaatgcgatcggtggcgccgccggcgttgcgcaaccgccgcagccgcccccgggcaatgcggcgccggagccggtgcgcccgtccgcgctgcttggactgatcaacaaagcggacgaaggcttcaaccaagtgatcacccactttgagcagggcacgcccatcgaagcggcggccatcgacataatggaggtgggcgcgtgagaaattttagcggatttaaaaaatttattcgataaaaaattttttgctacaaattttaatttaaaaaacccagcaatttaaaaaaaagctttttcaataatagaaatatttattaataggccttaattacaatttggaaatttgagaatgatgtgtgcttattgaggtttaagctaatgaaattgtcaaaaaaaagtttcaatatgaaaaaataacgaaatttttctgaatcataaaatatttggcgccactgtaaaagtggccgtttttggaaattttttcaacaggggggacccttttgttttgcaaaatttttttgtgatagtcataaaaatttattctctgggttttttggggtccccgatcacgaatctttcaattattttgatcaattccgatttcctaatctaaatttgaacaaaaaatcataatttgaaaaattcaaaatttcgatttttattcgagttcgggttagggcttagaaattagtcaaaatacatgtcagattcgtgattagcgacatattgatgggcattaattcaatggaattttttctttcaaatttaccgtaatcccaaaaattggttttaaaatttttcaaaattctgagtttttaatgaaaatttaatcactcatcatttttcgaatagtgatcagcagaagctcaccaaattttgtaggggtactaaaatgaagagaattaacctattttaaactttttcatctattattggttttaaatttttttttcaaaattttgagttttccattattttattttttaaaattttttgcaagttttaattctccatattttttaagaaagtgctttgaaacccaccaaattttattgccatgttattcataaactctaatgcttatattctaaaaatggctcataaattctttaaacaattttttacgaactttttaattatccctattattttaggattatattttaaaaagttttatcgaatttaaccccttctataattaatataatctcaccaaattttataagcatactctccggtacaggactaaaacttaatctgaaaatatctcaacgcttattcgttttaaaaaaattttcgaaattctgagatttcccattatttttttttccaaaataaattaataaatattttttcagagaatgctctgaaacccaccaaattttattgtcatgttattcatgatgaactctaatgcttatgtagtgaaaatggctcataaattctttaaaaaaaattttttttacgaaattctgagttttttcttaaattttgtcccacaagaactgatcagaatcgtaccatatttttaagggtatttttaattatatataattattttattcatattttaatgccccgggagggctctattttagggaatacggtaaattaaattttatacaacaggtggccttgggcagtcaaaagttggacagtcaagctaaactgctctcccacgtggaccgcgcatttggactggacaatttgcagaggttacagcgttgggcaaacactggtggagcattggatttgctcaaggaacaggtgggaattaattaattaattaaaaatttttgaaatttttggtttaataattcaaaatttaaattcgcgcccttttacagttcgccaaaattgccaaaaactacaaaccccctccggcactggccgccatcacattgccaccgcagttggactatttgttgcaaaacccaagcggcggtggcggaggcggtggacttggcggcattggaagaaaatgaaaaaa

SEQ ID NO: 73752 - DNA, 1274 bp, Heterodera glycines
atgccaaaaacactttgttctagagctcggcctggacctggatccaggcctggatttttcctggacccaggtccaggtcatttttcggcaacctggatttttcctggacctggattttcctggattttgtccaggaaatccaggtccaggtccaatgtgaaaaaaaatccaggtccaggtccaggcttttttcaaaataccgagctctactttgttcatttggcatcggtgccaaaatcggcaaaaaaaagaaaggtaaaccaataatgccaaacaatttttagacatagtcccaaaattttccaggtccagaaaatcaatgccaaaaaattaatttgttattttatttgaacaagattaattaatttatttttaattaaattttctgactatccgacaattaaatcataaaattaaaattttaaattgaccaaattagtggaaatgcacgacaaaatgaccactttttttcttcacttctcttcaatttatgcatttctgcacccaatcatttttctttcacattttatttgggcttactgtggcgcttacagtatacgcaatgcatacccacgcctaccgtagtaattcccctctctttaccacagtaatctcgcttcatatttttttttcttttaaatgttgctcttctcgaaatgctgaaaatttattttcgaaatcagaattttgaaaacggcattcttgagcagcaacagtaacctctatgtacaagtcgtttgagtaccgtacattttagtacactgtatattgtcctaaaaatgctattccatccacgcaggatccaaaaatgacacggcactaaaacgtcttgcaccatttttattatgcttcattcattattaattactaattaatttatgccttcattaatgttgtattgtaccaaaaatggcgctacagtatccacgcactttgtgttttatacattttcattccctcttccttcgctgttccattgcatgagattatgtactgtatttgcgcgcttttgttctttcccatttcttggttactgtgcaatttatttccatttttaatatgcaattttcagatttcttttttttaaataattttaatgattttttaattttgttttaaatataatttttccgataaaatatttgtttttccaattttttccctccctcctacggggacaagtgtcgatttcagcagaagaatctccaaatgaatatgtatcatgttcagtataaacaaaaaatttggtggtaactgatggttatatgggataa

SEQ ID NO: 73753 - DNA, 599 bp, Heterodera glycines
atggaagtaaaatttccatcatttttagatgtaatttttagtaaatttaaatatgctcattttaatgttagtttaagtgtttcttcatccatcaaagtaaaaattttcttgttttatttctcatccatagtttcccttttttatgcatttcttattttaattacatatatctaatcaaaaaaatcttttctaactaattaagatattctttcagttcatcttggtcagccaaatgataataagaatctcaaacatgctgtggttttcttacgtgctgggtcgtttcttaaaaactgccaccatgggcgtttcttaaaactgccagggcgtttcttaaaaactgccaagtgggcgtttcttaaaaactgccaagtgggcgtttcttaaaaactgccaagtgggcgtttcttaaaaactgccaccttgggcgagaattaaactacaaattaaaacaactatatagaaatattttatctaaattttattgatataaagtttgtaaattaatatatatattccagtatttcttttttaaattttcttattctttaaaatgttcaccaaaaacatgaactgacaagcataacaaattctaaaaa

SEQ ID NO: 73754 - DNA, 300 bp, Heterodera glycines
atgaggaggaaattgaattacgagaggatttggtcattgacgattgcgcaaattttgatgaaattgatggcgaaaactttgaggattttgattaagattccgatgagcaaattgaggaaattgatagcccattatgttcaggtccatttgatttttcagaaataaaatattttcatttaaaaatttttaaaaataattttctaattaacaaaattatttcagaaaaatcaagtggatcgagttttttcccttctccggaaaaaaaatgccaaaaacagattttatttcatattcggataa

SEQ ID NO: 73755 - DNA, 64 bp, Heterodera glycines
tatgcacccaccaaatttcattccgaaactccacggacacctccagaccttcctttgtcagcaa

SEQ ID NO: 73756 - DNA, 99 bp, Heterodera glycines
atgaccaaatcctctcgtaattcaatttcctcctcatttttaatgcacctttcaattgatgctgcaaaacttttggccaagaatatttcatgctcgttg

SEQ ID NO: 73757 - DNA, 1265 bp, Heterodera glycines
atgaaaatttccttaatcccaacgacccaaatgttcacacccaaaacatcgagggtatgtggtccacatacaaacgcaaattccgccccaatctggtaatgtttgttttcttcttttctcatgtcttcaacgcatttgtattgccattccatccatttgaatcgattttggaagataaatgtgaattttgttgaaaaatgaaattttgactttttgttcgaattcgggtccggggttcgaaattggtcgaaatgaatgtcatattcctgatcagcgaccctgaaaaccccaggaaagacgttttgatgaatttcaaaaaaaaaatcatttttttgaaaaaaggtggggaggggggggacaacccttgctattaccccaaaatattcgtactaataaattcaaattcagtaattttccatattgattgtgggaatttcaaacttttatcatgttataactcaagtcctaggcagactctttctaaccaaaatgctaaatttattctttttcctattgattctaaatgttcaaagtgattttgtacccttataaccaaaattattagaattttcgaatttatgttttttcatgtgttagagacatgaaaatagtgcgccaaaacgagagaaaaaagaaatacgtttttattattatttataatttttgaatgggagtataaacaaaaataaaatcagtatagaaaaatgcagatttttcttctctatcgctatgcaaaatttggtgcggatttaacatagagaaaaaaagctagacatagaaaagtaaatgttgttttttacaccattaaatgaagagatagtacgccaaagagagagaaattacaaagaaaaagagaaacgacgagatagtctaggctcacagtggagttgacccatagtgatagtatggtttacaggttcgaattcgggttcggggttcgaaattggtcgaaatgaatattatattcgtgatcagcgccctcgagaaccctaaaggactttgaagaattgcataaaaccccctttttgcctcttttttttgtgggacctgtaaaccatactattaccgaatttgagtgccaaaaaagacatttttgtaaaaaaccaaatttttcaaaaaatcgccaaagtgggctccctttaaaaaaaagaatttcaaaaatttttaggcgccaaaaatcgtgaaaaaggcactttgataggcacgaaaaaattgaaaaatttttatgcttaacacatcaaaacaaacgcacaaatgataataaa

SEQ ID NO: 73758 - DNA, 273 bp, Heterodera glycines
ttgaggtggtgtcaactccgggaacaagcggcgccacgggtgccaccgctgtgtcacaattcattgaaggtactaacgtttgtctttgacacttcataaaattaatcgtaattgtgaccaaatttaaatttagaagacgaggaaaaatgtgcaggttgtgccacagcatcagccactgtacgaaggattgcaacaagcgttgaatcggaagaattatttttattatcatttgtgcgtttgttttgatgtgttaagcataaaaatttttcaatt

SEQ ID NO: 73759 - DNA, 466 bp, Heterodera glycines
atgcttagtacattggaagagctcggagcaattccatgtggcacgcaacttgcgtaagttatgactgattttttgcttaaagcaaattggttcagatttttttgtggacaaattgtaagcattttgccatctgagaagaaattgaccgctttgatgacttgtgcttcttgtgaaaacattgctgttactgaattcaaaaaggtttcagaaaatttttcaaggatttgttcgcttggataagtaattacggttgggttgtatcgacgatatattagcattatttaggtaattaaaatgtcgattcttaaagctcaacgatttgttgttgagcgttttgatggttctgtttaccatactcctttgccgtacgaatttgtggttatgaacttcacaaaaattgcagttgttcaatgtgcttcaaagattgcggactgttttgaaaaattgacttcgggttgcttttatt

SEQ ID NO: 73760 - DNA, 1251 bp, Heterodera glycines
atggcttcacacactgaaacaaacaaacaaaaagtgaagctttctcacggtgaacatctttacacatttgataaaatgagcaaaatggaacgacaaaattttgtaggtgcgaattcaaggacagcgtaaacaaatgtaaaggctaattggacggacctcaacaagcacttcattggtctcgcaacgccacacactataccgcaaatgcttcaaatacgtatgacgaatttttaacaaattaaaaactaacaagcaaacttattttagttaatcaaaagggcgagccacgaaatcaatgcaccaccagcagtcccgaccaatttgaattttgagatcgcccaagcatacaagacctacacgtcgacggatggcgttgaggagctgttttgttgggccactccggtgtatacttcgaaaatggaaatcaaaacccgcaacggtaattttgcaaaaaaaaaagcaaaaatttttttctcagaattttattgtttggtcgccaatcattttggcgttttgcggacagaataaatgcgtgttttggggacggaagcaaacatcgtgcgaaataatgttcacacttttgcgtgcagcgggccaaattttgctcccacttctttttccgtggattttgaaatggatatgtcaaatgccgttacgataacctttcccggatgccagattcggttttgcttttttcattttatacggaacttacaaacgaaagtgaaacagcaaggcttatggcaggtaatgttccctttattttaaaaattttttcaaaatttaagcgttattgtgctgatccggtgtttcctttaaatgttcggatgctcacatcagtcgctttcgttccattttgtgatgtcaggaatgcagtgacagcacttgacatggaatttggaaatttgtcggcttttcaacctctcattgattggtcagaattttagaataattttttaggcttttggacaattatgttggacgtcctcgtcccaatggcacgtggtcgcaaccgttgatccgtctactaacggacattggatggagatgcgaggacgaacaacaacgcagaagcggagcaccaccgtttgcaaggcgcgttcaattgtcgtcatccatcgttgtggcatttcattgatgttcttcgacttgaacagaaaatcaccgatctcaaatacaattctgcgatcgctggattgtcacctgagaaaaagcgaggcaaatatttggcagcagatagacgaattctga

SEQ ID NO: 73761 - DNA, 580 bp, Heterodera glycines
atggaaaaaagaggggaatggaaaaagaggggaatggaaaaagaggggaatggaaaaagaggggaatggaaaaagaggggaatggaaaaagaggggaatggaaaaagaggggaatggaaaaagaggggaatggaaaaagaggggaatggaaaaagaggggaatggaaaaagaggggaatggaaaaagaggggaatggaaaaagaggggaatggaaaaagaggggaatggaaaaagaggggaatggaaaaagaggggaatggaaaaagaggggaatggaaaaagaggggaatggaaaaagaggggaatggaaaaagaggggaatggaaaaagaggggaatggaaaaagaggggaatggaaaaagaggggaatggaaaaagaggggaatggaaaaagaggggaatggaaaaagaggggaatggaaaaagaggggaataaaaaatttggaacgcttcacgaatttgcgtgtcatccttgcgcaggggccatgctaatcttcgagcaaaaattgtaaataagagatttataataaccatatcattaatataaatcatatagaaataattaaaaatataaataaa

SEQ ID NO: 73762 - DNA, 687 bp, Heterodera glycines
atgagcaaacgacttcgcagtgaaactgacgaacttctttctgccaataatcccgacctttccattcttgaacaacgaatgtcacgactcgaaaatttgcttgagaggcttttgccagtgggcgtgggtccaattccagaagatcctatccagcgccttgaaaagcggatggaaaaattggaaaatcaagtcacggcacttgttctggcactcgaaaaacggccaatttctcaacaacaacaaactccatggggttgtcccccggaccacatcatccggcacataaatgctgttgttttggactctgacatcataagagaaaagtcaaaaagagctgttgtggagaaactgcctgagggaatcgatgaaaaggacgtggtcaaatcgattgctgaaaaatgtggtgtggctgatgaccttattttggacgaaatccatcggcatcccgaggaaagaagtgagtcgaccagccaaaacacaagaaaacccagaattctcaaaattccattcgcatccactgaatctcgtgatatttttctgaaaaaattccgtatggcactctccaatttaccaaattttccaaaatttctgagtgccagacgggatatgactcagtccgagctctccattctttacaaccttcgctcccaagcttataattcaaacagtagctgtggacttttttaa

SEQ ID NO: 73763 - DNA, 669 bp, Heterodera glycines
atgccttggattaattccatattaataaatgcccgttcaatcgcaaacaaaatagctgatttagaatatctaattgagacaaataaacatcaaataattttgataaatgagacttggttaaataccaggaatacaattacaactgagttaacacttaatggtaaatttcaaactgttctagcaaagacaataagagaggcggcggatgtgctattttggttagcaatgaaattccatttaaaataattttatcagaaagcagaaaccaatgtgaaatcattcatattattttatctttaaaaagtccaatacatattataaatgtttacagacccccaaattgcacaacacaaaacactaaaaaaatgctaaaatatttaacaagtgtaaatgaatcaaatagaataatttactgcggtgattttaacgccccaaatattgattggaacacaaataaattattagcaaaaaatgacccagttgcaaatgctttcattgactttattgaccaaaatcaattattacagcacgtaaaagaaccaactcgagaaaagtcaattttggatttgatttttttctggaaagccttccattgttaatgatattaaggttttagaacatttttctacatctgatcacaaaatgatcagctttaaagtttctcaagaa

SEQ ID NO: 73764 - DNA, 2832 bp, Heterodera glycines
gataaaggccaacaaatattgtagtttaaatgtcttaattttctctttctggtacagtaaccctccttccatccgttacagtatttggctgcccgacacgacactgtacaattcgttggtgatgaaagacgacgactcgcgtcgccttttgaatgccaaactgacaacaaatatgaccagaaaggtgttgccttattcctagatatttattttttttaatatttatttttatttatttccattttaatatttttatttcccattttccttttttggccgttttggtggaaatgctttacccgaccatttacaagttctcgtgtctgcttaacctgcgttactttccgtacgatctgcaggagtgcacaatgactttctcatcgtggacttacgacaataagggcaaaacattggaaaaataaataaacaaaaacaaaaaagcaaattgaaataattgctgaaattccttttgaaggcattgattatgtgccgtattccgacgaaattggcacttccaattatttggagaacgaaggatggtgaggaagaagggcaaccttccttttgcttctgatcattttcaatttttcataatttatgctccccatttttccctattttaaattttctccgcttttccttttcaaaatgatttcctcctcaatgtgtcccccaaaaggggtttaataattaactttggccccctttttgccaatttttcaaaaatgggtttattaatttcagtttatttcctgctgatcccccattaatctaatcccaaggtatttgctgagctcgacgatgcgtcgggaggaggtcaaatacacgtgctgtcccaacaaatacactcttctcaaactcaccgtttgagtgttctcttttcgccctaattacttgactcccccctgattttcagctttatctccgtcggaagccgctcttttatctgattaatcttatcattcccaccgcaattatcactttaattgccatcgtcggcttttttacgtctgtttttaatttcaaatataattatattcatttctgtgctcattttgcccttcagcacttcttctgcgagcggaatgcgtgaagagaaagtgtccctgggaatcaccactttactttcaatgagcattttgatgctaatggtcggcttaattggaattaccctaattaattgttgaaatagcaaattgaattgtttttttatttacatgaatctttttccataggtcagcgatcaaatgcccacaacttcgacttttatcccgctgatcggatggtgtttaaaaacaaaataaataaatcaaaaatgattaattaaggttcattttgggaatgatcggcgtaatcagtttgggcacactcgcctcctcagtggtcatagcagtgcaaaaaaggcacacaattcgcaaattcattttaattaataaaatatttaaaaaagtgccatccttaaattattatattcaataattaattttattttattttaattacgctgtgtttaattgctttaatttgttcagaggtcgcctcggcgaacggctgacaaagcgcgcggttcgaattgccaaaatatttggtgccatttcctacactgaaggtaagtgaaatgccattccttccattgtaacaacataattcgaaatgcctcctccaatttaatttgggaatgaattcctcaaaatgtcagtgccgcttcacttgcgcaagggaacgagcgagcacgcggaggcaccgccaccctccgcctcttaccgacgggcggccaaattggccacgcggttggccaatcggcgtacggaggacgacgacggcacagcgacgacaacggcaccgaagaaaccggagcggactttctcccaattgttgcgcagggcgacggtgccgtccccagcggcggcggcggcgacggctaacggaggcggcgaatcaatcggaaaaatgccaacggacaaatcgacagaaccgctgatcgaaacggggggagaagacgcggaaaaaggtgggaaattcgttgagagagcttaaagtggagagcacctctaagtttcagcgtatgatcaagccaagcggcattcgttcgtgcgccgttgcggcagtgccgtgccaatcgacgcaatggcggacccgacatcagttgcttcggcgcggagcagtgcgatgccatctccgcgtgccccgcccctccatagcgcagtcaaaacgcagccgctccattccaacgccaccgttttgatgccgttcagtctgtcgctgatcagcgccgacgacgaaagcgaagaagcgagccaagtagggaggggcaaatgcacagatatagctgaagcggaacggaaacaaagcaaatttaggccagcggatttgtgagcccaagcggaaggacggcgcccggcggactgcgccatggcgttgggatgttcaacggttcaaaagccataatgcgcaaaaatttggaatttttcagaaaatttgcgtctgagtcgccaattggcggtcaaagagttcgaatggatggccacaatcgtcgaacgctgttgcttcattgtgttcgccacaatgttcttcttcctctccattggcatcaatttgctcggtgcgttcattagcgtgcccttttttcgtttttctctcatttttcggcatttttttgcccttttaaatttgctaatcaataattaatataattatttcctaattcactggccttgtcactgactttatcagtttatcagcctaattaagcatcactttgatcctctaattaccttttgttttcccttaggctattggcactgggccaaccctgaattggcattcaacaat

SEQ ID NO: 73765 - DNA, 528 bp, Heterodera glycines
  unsure (1)..(528): unsure at all n locations
tgacgcggccaaaacgcagcgacggccgtcccccgccagcgccgaccctttcaacgcgttcgccatcactgatgttccgctgatgcgactgacaaagtcgggcaaaattaattggagataaattttgaaattggtggggtcgaaattcggaaaaggggggacagaacgccaaaataagtgcgggagggcctaacccatcccattttgtgatgagagagagaatctttgctgaatttcgtcattttttgccagggacattttggcccccggccgttacgacgttcgcgtccggccgatcattgaccacacgaagccgctgaaagtgcacatttcgatgagcctttaccaaatcattgaggtgaacgagccagcccaaaacatcaaaatgaacgtttggatgatccaaaaatggcacgacgaaatgttgcattgngacccgaggtggacggaatgccaaaaaacaaaaaagaaatgccaaaacgaaaaaaaacggcagagaatacgacatgatcaacagcaccattctgc

SEQ ID NO: 73766 - DNA, 1572 bp, Heterodera glycines
  unsure (1)..(1572): unsure at all n locations
atggcggatgaagcgaaagtcaaattgctgatgactaagctcaacccggtcgctttcggcgaatataagcgcttctgcctgccggaggaaatcaccaaattcggcttctcggacaccaaaggtcgtctaatcaaattgttttctcatcccccatcgttagctatcgatcgctacgaatgcttgagagtgtgccgagaggatggcgaaaattttgaaatttttgtgaaccgactgaaggcagccctccgcaaattccgtttttcggaattaaacgaagaggaattcaaatgcctggtcctgctcacatcgctgaagtcaccaagcgatgcaaaattacgccagcacatcctcgcgcgactcacaacagaggacacaaagacgacgaaaacagccaaattattcgacaaagtcgtcgaggatttgaacacgcagctaaaaacggaggctgaagcgaaaatcctggagcggccaaaattcaaaatcaatgctgttcaccacagcgatggccaatcatctccaaatgacgcagaaaaaggcaatcgatccgacaaaaatcgtaaattttcggacatttcggatggaaaatctcctcccaacaattgttttcgttgcggagagctgcactgggcgcaaaattgcccaaataaaactcaaatgtgcagcaaatgcaacaggagggggcacatcaaacaacaatgcgacaaaatccaggcctaccatcaaaataagaggaaaattgttcctaaaatcaacatggtaaatttgcctgtggctttcaaaaattcaggcaaattttcgaagcctttgaaagcgaaaattttggtaaatgaaaagccaatcaaattcaaactggacagcgcagcggatgtcaatgtcatcaataaagctgcattcaaggcaatcggccaaccaaaagttcaatattgtccagaggaggcacaattatttgacggcacacgtttcaaatttattggccgtggaatcgccaatttccaattcaatggaaccaacgcggaacaacaattttatgtggccaaagatggaacaccaaatcttttgggtgtggttacgttagaccgacttggattcctggaacaaataaaacgcctgatcaatgcctcgaatcncaatcaaatttcctccgaaataccggccaaaattaaagacaaatttcaacggtcaagtgctaaaataagaagggagggagctgtcagcagtataaatttcgacaaatttcgccctgtccttcgcacaccgactgtcacggccacggaaaatttctcaaattaccggaaattcggcaccaaatcccaaccgcccaagattggagagatcttcagtcgacgacacaaatcagcggcctggagccccggaaaaatcaaccaaattcggcaaaattcctacaccccatttcaggacaaatctcatggtaaaattcgtgccaaccaaccggacaaaatgaaggaaaatcataccggcaattatctcccgcaaattggtgctattcagctatgccatcgagggccgggtgatcatctgcgatcggaccccaataaattgtcccatgtgtga

SEQ ID NO: 73767 - DNA, 164 bp, Heterodera glycines
atgaattatgatgaattgagcattgtgaaggaagaagctgttgttaagacaaacggtgaacaattcagttgttgtgccggtggacaacacaataaaatatttttattgaagaaaatggaaaaataaaatacaaatatttggtcggaggaatggagcaaaaatag

SEQ ID NO: 73768 - DNA, 191 bp, Heterodera glycines
atggcgatttttcatctgatgattatggtaatgagaaaaagggaaacggtagaatttaaaatttggaaacgatataaaattaaatgacttaaaattaaaatttaaaataaataaaataaaataaaaatatttgtatattttcagaaatgaacgtagaaaatataaaatttgggaaacgatactgaaataaa

SEQ ID NO: 73769 - DNA, 681 bp, Heterodera glycines
atggaaaagcaaaagggtaagggaaaatagacaaggattactgtacataccgtaacattattttatttcaattattgtttaatataatcagttcaaatttaattggtttcagaaaagacactttttgggcgaatcggtgaattggagggacaacaaaaacaccaaaagcagcaaggggaaaaggagtcaaacggtgagttgttaaaagtaatatttaaataaatttacattttttaaattaaatatttcattattaatttattatattcatataaaaatattcttcatgttattagaattggttggccaaatcagacagttgaaagaagagcagaagaaatatttggaaagagtcaacgaattggagaagcaccagaaacaaatgcagcaggaaaggggcggtaagaaaatcgaaccatttaaatttattctcttggctataattttattttttcaataatttcttttttaaataaaaatcgttagattttcgagagcttagttaattagctaattatttagtttctattttcaaaagcgaaaatttgcaagatgagcagaaaagaaaaaacaattcaatggaagataataatgagaagcagatgcaaatggtgaataaataatggaaagaaatattaaaaattattattttattatatttaatttaaaactttaaataaa

SEQ ID NO: 73770 - DNA, 2443 bp, Heterodera glycines
gtctttcccatttttgtgctttgcttctcttttttcctcgccttttacaacttttactacaaacgcagaaaacttcctccaggttaatttttgttattaaatttgccattttcgttaaatttccgccgtttattttaggcccaattccgctgcctttggtcggcaatattttgacactcatccgaaaaaagccgggcgaagacgcatttttggaatggaagcgaaaatacgggccaatttacacttattggctgggagaaatggtagaattaaatagaaaataatttaatttaattaattccttccccttttagcccgtcgtttgtgtcgccgactacaaaaatatcgtcgaagttttccgcaaaggcggcgaagaatttacgcaacgacaaatttttgtggattttacgcacgaattcagaggcacaagccaaacataagcaaagaattttaaagatttaatttgctttaggcaatatttatggcattttcttcataaacggcgacttttggaaaggttttaatttaacttaatttttaattaatttatttaagttaattgactgacattaaaattttattcagaacaacgaaaatttgcgtccacagttttccgtaactttgggctgtacagtaatttaatggagaaaaaagtgagcattgaaaatcgaagtaataaactataaaattttcaattttaaagattttggtcgaactcagccgaatgttcgaacgaatcgaccgcaaattggcaaagagtgaaagcagcgaaatcaatctgatcgaagacgtcgaaatttcaattggatcgatcataaactgtactctctttggctacggttacgacaatgaggcaaaaattcgaatttattttttggttttttatttattttgttttttaggaacgaatcgacgaatttcacgaattgctcgcacttttcgacagcgctttcaaattggcatatgaaaagaatttgggcagtcttttctcaactttgattgtgtgctttccgaattcaacaaaaaatttgccattttttcggtttaattcgaaaatattttaaaaattatttaaatatttcagagagcgatacgaagctctgatggaagtgagcagaaatctgcgcaacttttttatgaaacgcattcaaaaaagagccgaacaaatcgactttaaagtgagtgaaaatgagaaaaaagagaaaatcggagaattcacagagcgacgaatacgacgattttgtggaggcatttttgaaggaaaaggaacgattggacggacagggcattgcgcactcattttcgtaaatggcaattaactaattgagactaattagacaatcagagaaaggaatcccacccaattgacagaatggaccaattgtggaacatttgcatggacatttggattgctggacaagtgagcaaatttaattaaattatagaaatgcgaagtgcatgccatgaaaatgcaatttgactgatgccaaattcggaaatgccttaggaaacgagcagtacaatcatcgcctggggcatggcgcacttgctgaacaatccgaagagtttggcgcgagtgtacgacgaattggacaaagtgatgggcgacgaacggcgactgatcaccgcgggggacaaagcgcggctgccttacacaaacgcaacgataaatgtgacggaaaatgacaaaaataaataaataaatattacagcaaaaatatttaaaaagggaaaggaagcaaaaataaataattaatttaaaatgaaaaaataaaataattattattttatttgtttaagccaaactgtgccattcccttttaggagtttctgcgcatttccaacatgatcgtgcagaatgcctaccgacgtgtattcgtcgacgtgaccattggcaactttcaaattcccaagggcacttgcattttgccacaaatttcggtggttttggccgatgacgaagtaacaaaaagacaaaaaagaatttaaatttaaatcatttaaattttaaaaatttaggtatttgataacccgaaaatgttccgacccgaaagatttttggacgaaaatggcaattttgtgacatgcgaaaaactgattccattttcagttggacggcggtaagaaaatttgaaaaattcaatgaataattaaaattacaataattaaaatttaaaaaaatcattaaataattttattgctttgtatggtttggaattttagaaaatgttttgccgaatcaatggccaaaatggaaattttcttgttcactgcaaatattctcaatcagtacagagtgcgtttaacaaccaaagaaagaatattaaaatttaattgcatttattttcagctttcggttggcaaagttttgccctcaatcaaacgcgaaatgggcataacaattcattgtccgaatttcgagtgccgagttgagaaaagaata

SEQ ID NO: 73771 - DNA, 1437 bp, Heterodera glycines
atggaagagaaaggagaaactaaagagggagaaaaagaagaattggaagaggaaaaagaaggggaagaagaaatggaagaggaggaaaaggaggtggaagaggaggaaaaagaagcggaagaggaggaaagagaattcgtaatgggaggaggaaaagacggaataaagttgcacaacagtgacagaacaacataaattgtaaatggcgaaggtgtgaaagttgaagcataagaaaaaagaacactcattcattgccagaaacgaataaagtgatgagataaagcattgatttgtagagttctcaattaattgcctaataaaaaccatcataaccctttaaaggtggcattgggctatcctaaaatttttgtcgtctaaatttttaagaaatgactttgcggttttcaagctgagatttttttgttaaatcatttaattttaatgacaataaatttagaaaacttagtttgccgattgtgagaaaagaattttgtgagtctcttaagattaaaaatgtacttggcaaagtcgaggtcatctgttattttttgtatatttaaaattggcttaatgtcagtttttaaaattaccttcccttttcattagtcccaaagtttggggcctacgggaaacgcatacaaaatgtttttctaaaaccaaatcaaataataagcaatcaaaaaggattttttacgcaatgggtgatcataacccgacgacttcttcagcttcgataattccagacgattcaccggtaaatgtacaaaatcctgaaaattcagatagcatttgattttaaggtcgatgaaaaagatatgccggcaacggaccgcgcgattgaaaaactttttgatggaattgacgcaatttacttcatggaaaacggattcaaagcgattgcgcacgaattggaagtgcgtgccaattggaattcttacaaataaacataaaatttttgcagtagatttagttaaatttagaacaattttagaaactttccgccatttgttccgaattggaaattgacgagttggaaagggaacggtttaagcttaaacggcaaatgcaaattgtgtcgaggaaaatgtcggcgttaatcgtcaaaaattcgctgtctttcaatcgacaagtggaaaattatgaaagtgtccgaacaaatgctgaacatttgttacgaataacgaggcgaatgcgaaggtgcgaagaatgaatccattcggattttctctgcaaaaatgcgccgtattttaagttcgattgaaattgggaagagaaagtgccgtgttttggcctccgttttggcttccgattacaaaagaaggctttgtttggtggtgaaacgcgaattggcactgatcgccacgctgcgcgacagtgagctcaaagcgagacaactcttgcaggcactcactgcttttggcttcgaatcgcagttta

SEQ ID NO: 73772 - DNA, 348 bp, Heterodera glycines
atggacgcagcatttgctgaacaaacgaaactgttcaacttggaacgctacgcacttttgaacacggccaatcactttctcgggaacactgaagtcagtgaaaatcatttgaaaaattagttttgattagagcggcgacttcttcaaacaattaattacctcttccttttgcagttggtctctgttaaattgagaaggcatttcgaagggtcgctttgcgatgcgtcgagaatggccattctcgactcgttgacaatgcggacgaaccccgaggggacaacggaacaatcggacgaacgcacaatcgacaatttaccatttgaacaactttgtcaggtaaaagtctaa

SEQ ID NO: 73773 - DNA, 1014 bp, Heterodera glycines
atggacgaggacaaattggcactgaaaaatggacaaaaggacgacacggggggaagggaaagcgaaaacagtgacaaacaggaggagcaatttgcagaagacaatttcgacacgaatccgttgggtggggctttttattattttcatttgcactttaaatcattcaaaaatttaaaaagcaaaaagcgaccccctaattaaaatagttcaaatgaaaggaaattaaagtcatttgaaatcaaaatataaaaaatgcccaaatacatctaattttgcaatttcattgtttttagttgagaaaggcgttatgcaaaagtcgctcattgacaatgccttcgatgtgttcgaatgcgcctcccaaaatttgaattgtcttttggccaatgccgagatgagtgccatcaaattcgaccagttcatcaaagttgttgagttggcggaaaggtcccatattttatcatttttattttgaatttgtaaatttactatcaataattattcaattaattcctcctcatttccatttgctcagattccggaccttcggtcgccaatattttggcaatccgtgccaactcatccgacacactttgatggaccaatcgcgcaaatatattgagcgataccatgccgagaaaatggaggaagttaaaatgtttttggagagcgaaacgttcactctttgcccggtgcccgtccaattcacactgtttgaccttccggtgagaaagaattggtcgtttttaagtcaatgattgacacttttgacggggttttccctaggttttcccaatggattgcattttaaaaaatgcttttcaaatttaggaatttttcttcctcaaagagttgcaacagaaacagcaaaatgatgaacaaacggaggaagagactgaacagaactcagtggagacatttgtccacggcaaatccatccgtttttcggtgtttcgacattcttcggaaatggacacggaaatattcccttattcgcctgaacaattcgacgaaagt

SEQ ID NO: 73774 - DNA, 1545 bp, Heterodera glycines
atgggcaacattttcgggaagagagagcatggacgaaggagaagaaagagtggggaagagaaacacgaagaagaggaaaaaagcggaagacggaatgaacggatgggagagggagaaggaagagacgatgaagaagaggaagaagggggaaatgggagagaagaggaggagaggcaaaaggaagagatagcgcaaagggagcaccagaaaaggagggaaggaaacagtaaaataccgaaatgtccacacgggttcagaccaatgaattatcccggaacccggtggacatttttggagtgtgtgatggatgaagaattgaagttgatgaagaggaggaagaagacaaagagaaggaagcaaaaggacaaaaggagaaggagtaagaggaagaaaagaagggggaacaaggaatgggaagatgaggtggaagaggaagaagcagaggagcagcaaaaaagaggcgacgaacggcatcaccgccagcaaagtgaaggggacacggaggtcgagtgggagacagaaaggaggaaagagggaacagtccagcacaaaagaaaaagggaggaagaagaagagactgtccagcacaaaataaaaagaggggaagaggaggaggaggaagatgagacggtccagcacaaaagaaaaacagcggaagaggaggaggaggaagatgagatagtccaccccaagaggaaaaggggcgaagaggaggaggaagaggaagacaaatcggcagtctgtccccgttggttcattcaaatgtcgaaacaataatcgtaaatatttgatttttaggcggctcaatttgtttaaatgcgcgggatgacccatttgggagggcgttgtgttgtgtgaagagggggaaacatttgaaagattacaaattgggaatggaagagatgaaggaagaggaggacaaatttcggaaggaacgaaaggacggcgatgaaaagaagcgaattgaattggccaccgaaatgccaacagcggcggtgccaatggcatttaagagaagcaccggtaaggcacagagagagagagagacattggcattacaaaaatggcattctgtagaccaggcatgcccttttctgatcgcgggacgcgtttgtcagcccgggtctaccgacatatgtgtagaggacggctttttctgtcagtacaacaaggagaggagggcattcgtttgctgcacctttaacgaagctgacgtagaaggcgagcaaagcgggcggaagagaaaagaaaattaaccaaaaaaagtaattaaaatgcaaatattaaaaaaaaaaatttccacaccaatgctgccattgtaattgatataatttagtttaaattatagctcggaaaaaaacttggtgagcggttggtcgaaagttccttgagaggagcgggatcccttaaaaatcactctctcctaaacccagtctatttttgacgggagtcaagggcgggtgcgggagtaatttgttatatatgtaatttataaaaaatattttatgctcaaattttgaaggaaaattcttattaaagcaaaaa

SEQ ID NO: 73775 - DNA, 2032 bp, Heterodera glycines
atgggcctgatcagtgagaacatcaccgaaattctaaacggacgccatggcataaagcatccggaaacgggccaagaagtgaccctgctggaggccatccaaattggcctgtacgatcccgactcgcgccagctgcgtgacatcaaaacgggcgaactgctgtccctgttcgactcgcggcacatttgccccaccgatgtgcagcaccggttgatcaaaatgggcgtgctgaagctgccgcccatggagctggagcaggctttgaagaatggtccgcttgaggggtgtgctatgtcaattagcgcttaattaggcgattagaccagacctattaccaaatggaggggattaaaggatgaatgtcgaaaagtgatcgccgatttcctctgatagataaaaaaatatcagaaattcgttgtaatactaaacaattggaaaaattataacccgcatagaaatgctgatcattctaagtttttttttgcccgttttaggtgtgttgaacccaaccagcggcgtgttccgcggtaaatatgtgcaggatcccatttcgctccgcgacgcgctcgcccatggctacatccaatttccgagtgcgcagccgctgctcgcactgacgctgaccgactgcatcgtggacggcttcatcgacgcacatgccggcgagtttgtggaccgtttcggttcgtccggcgagcgattcacgctacgtgacgcgctggaccgccaacgaccgctggtcaaggacaacgtgcgcgaatgcatcaacacggcgaccaaccaacggctgaccattgcggaggcaatgctagcgcatgcgctcaacccgcgcagcggcaaattcaccgacttggccacgcgcgcggaactgtcgctgcgtcaagcgtacgaccagggactcatccaaaagtcgcagacgctgaccgaagtggtggagaagggactgctggatacgcaggggcacttcagcgaccggggcaaccgcttcacgctgatggaggccatcaactctggactgcttgacgcggaggtgcggcacattgtgtcggagcaggaccaggaagtgatttccatcggggaggcgttggagcgcggcctgttgtcgccggacggcaaaattgtgctgggctgggccgcagacggggcgcacccggagcgccaactggacttacacgaggcgcaccgccagggcctgttgacgcgccgcgcacggcacacaatctttgacgtgaagggcgtcaaaaacgcggagctaggcaccacgctgagcttcaacgaagcggttgaagctggaatcatgcaggtacaggaggagattttagacccaaaattggcattttctcaggtgcaaaccgagcgggttttggaccaggcggtacgccagacgttgtcgctcagcgacgcctcacgccaagggttggtcgactcggcactcgccgacatcctgatggcaccttgcggcttgtccgagggtggcaccgaagtgtcgctgatccgtgccgtttccaaggtggggcattggcattgtggcacttttcactttttttttcttggtttagcatattttgcaatttctattttagttttttcaaaaatttctcaattgggacctcgaaaaatttggtttttatgaaatacaatttttaaaaataaaaatttcgcaaaataaacgctctttttcatccagggcctcgttgacgcgtccaaaggcgtggtggtcgacccgcgcttccaacgcgagctgtccgtgcgcgaggcgtacgaccgcggcatgttcacctcgcttcgctcggccatgcatctggccgcgctgctcgacgtccatccgtcactgatgacgcccgtgaagaagaagccgtactcgaagaagcgtatccaacgcccgggccagccagcactggcagaggaccaagtgaaggtagacgagagatctctggcactcgggacgacggcttattggcacttttttgggattaataagcttccccgccttcttgattcgtccacaatcatggcacaacatttagactaa

SEQ ID NO: 73776 - DNA, 1433 bp, Heterodera glycines
gcccaagagcaacgacaagctgagcgtgtggaagaggtgcacgagtttcagccaccaccaccggtgattccggaaatgccgcgcatcacggaacatgaggaggaaccccaaatgttccaggaggttggtccagaggggatgtatgatgatgatcatgaaaatccagcaaaagattcatgtcccctaatgtgtaactgttactgtattagtcttactgtaatgatcataaatcttgatcaaaatcatcaagttttaactgcgagtgattggaaagtgggatggatcatttaaataattttgagaatttcaaaaaaggtattgtctgggatatgattggagaacgtatccgaaaatgattagtgattataggtgatttaaaaaaggaaatttagtgggaatcgggggattttgggcaatgaaatgtttggggattattgtccatgaagaaatcccaaaaatgtccttaatatcatggacttcaagggttgggatatatgaaataattccaaaataatttcttcattttccgcaggaaaccgtcacaaagacccaattttacgagatggaaggcattctgcacaagcaaacgggcgaaattctcacctttgttgaggcaattcgacaaggcctgctgaatttgagtgcgggcggcgaattctttgacattgtcagtggccaaagcgtttcattggacaaagcggtgaggaaaaattggattaaaatgtggcttgtgattaattctagagcattcgcggatctaatgatagttcgagagtctcgacttatagaaaatttacattcataacaaaatattttgttataattctataagattttggatttggtcctatgtgttttccttttaccattcagaaaaacattagtgtttttgaacttgaaattttaaaaaaggaaaatacagaaaaattttctgtgaaaattttggaaagtatttttatgaagatatgcaaaaaaatttctactttttttgaaaaaaaaaatacaaaaatgagagggagcgaggggactgaagtgccccctgtttttcattcatgccattgattcacggattcttgattctttggaaattcgaaaatttacgagaaaatatttttgattgtaaaaactttctatgttttccaggtagacatgggcctgatcagtgagaacatcaccgaaattctaaacggacgccatggcataaagcatccggaaacgggccaagaagtgaccctgctggaggccatccaaattggcctgtacgatcccgactcgcgccagctgcgtgacatcaaaacgggtgaactgctgtccctgttcgactcgcggcacatttgccccaccgatgtgcagcaccggttgatcaaaatgggcgtgctgaagctgccgcccatggagctggagcaagctttaaagaatggtccgcttgagga

SEQ ID NO: 73777 - DNA, 401 bp, Heterodera glycines
atggcggatgaacaagaagaaacgcaagtcgctccgcctcagccagttttacacacagaaaacgtctcttccttcttggatttgcaaaccgagttcatcaaacgtcgcgatgccgccattgcggggaagtcgcagtcattcgccacggagccgatgcaccggcgcactccacgaaataacattttggccataagcaaagaggaaaaggcacaagtttttaagtgatttaaatttaaattaaattttagaaagcaaaaagcgaagtttcaacgctaagagcacagcgaattcgtcaaaatgaggaagcaatcagaaaagaggagcaacagagggccaagcagcagcaaatccttcagcaaaaggcggcaatttatgaacgaatggcaaagggcgaacgattg

SEQ ID NO: 73778 - DNA, 886 bp, Heterodera glycines
atggctgatccaatcgactcgaaatattttgattttgtgccagccactgaagagcagcagggtaatggggaaaatcacaataaaaaggaaatgcaattaaaataaatgattgaattcaagaacatacattaaaaaggaacaatgtgccaaagggtaaaaatgcgacagttttatgcaaaaaattctaaaaaaggcagtttattactatttttattttacaaaatttacgggttgaaaatctgtaataaaatgaataacgattttcaaaaaaattccaccggcatcgcttatgatgaatgatctcagcaaactcgctttatctttgaaatcctaaaaatgttcaaatggttgaaaatttaatatctaaaagattctcaaagattttcccatcatgtacttgaaaattaaaaactgagtttcatttaaatgggtatttgccaaaacaggcacttctgctgatgtgttcggtttgggccaatttgtgcccagtggcgccgtggtgtcgtcatcatcaatcggtgctgctgctggtgatcatcaacagcaacaaggacagcagcaacagcagaacacggcgatggtgggccaatttataaaagaaacaaaaaatggtggccaagaaaatttaaatcatttttaaaaatgacaaaaaaacaaaaaattatcaagcttgaattattaggtttaaataaattattcttcgaattgttatttttagagcccggaattttgaagattttgggcttgggtatgggcttagacaattgaccaggctagggctgccctatcaaaaaagcccgtttaaccgagcttcccggtcccaaattttctggggcgcccgcctggctcgggctttttccataatttgtggaagtttagttataaa

SEQ ID NO: 73779 - DNA, 180 bp, Heterodera glycines
atggaagccgctcaggcttttgaaatgccaaaattaggcttgctgaattatgccttgatttggcttgaaggttgtgcagaatatgccttgatttggcttgaagattttgcagaattagccttgatttggcttgatgatgtgcagaatttatctgctgctgctgactgcgccaaaattgtt

SEQ ID NO: 73780 - DNA, 1621 bp, Heterodera glycines
atgatacgatctctgaaaaagtcaaagtttgagggtcggataaaaaactttaaatgttccctaaagcagacaaattccgaggacaacagaaaacattctgatcattttgatgaaaaagaaaaattgaaaataattaaagaatttgacaaaaggagagaaatattgaaaaacaaaaacatttacaattgtaagcagcggaggctaattgaacgagaaattgccagggaattggggacataccttcacaaaattgaagaatggaaaagggaatttggactgataaaaagggcaaaaaaggaggacaaagaaacaaagttggcactgattgaacagtttgacagaatgaaaaatgagcgcaaaatgaaaaagggatacaaaaatgccgagaaagtcggcattgaatgtgaaattgccaaggaattggggacacatcggaacaaaatttacaaatggaaaagcgaattattaagtgggtgaaatagtagtgataaatagggattcgttgtttaggcacaaaaaatgtcgtaaaattggcatcaaataggcacaaaaataggcaaataaaatgttttattaatacatttttaggtagcaaaacaaataaaaaattaaattttagaggatcaatttttgggaaaattttcaactgcattttttttttttggtcgatataggggtgtatttttcttctttattgcatttttaaaggatttttccggaaatcctggaaataggaaccaaaatggcaaatcgaataaacaatttgaaatgtaaaaagtttattctttataggactttttgacattgctaaaatgaaaaaaataaaaacatttagtaatttgagaatttttttaggtccaccgacaaaaaagttttcaatgcagcaaagaatggaaattgtcgacacctttgaaaaagtgaaagagttatttgtgaaaaaattcaattttaaaccaacggtagaaattgaagaaaaaattgtggaaaaatttgggatttgcagacggtcaatttatatttggaaaaacattttcgagctgcgcatttgccgtaagaaatttttaactaaaaaatatatagttgctaaaaactgccaaaatcatttcttaggggtgcattttgaaaaattttcgggtcgattcttaggggtgtatgaaaatttttttaggtcgattcttaggggtaaatttttcgtttttacataattgcatttttgttaataattttgggcaaaactccaaatagtttaaaatagttttcaaattttttttaaagtttttaaaaatgtaaaagactaaaaaatggagccctaatcatgtaaatctttttttagcgaagcataaatactctgaagcggaaaaattggaattaattgaaaaattcgacgaggccaaaagcaaaaacccaacgataagcgacgaagaattggaaaaaatgttaccggtcaaaatttccacgataaaacaatggaaaagaggcaccaaaagaaggaaaactgtgaaactttaggctaggctttatcccagagtggccaagtgtccttatttctaagatttgtccttattgggaggtgccattttggcacgacctccttgctttgtgcttattcttggatttgaaa

SEQ ID NO: 73781 - DNA, 1337 bp, Heterodera glycines
atggtgctgcttttctctgttcttctgtttttgctgtctctcgtcaaaattggtgattttaattaaattagggtaatgaattatttattttcttattattttcaacttgtgctgctaaatgggcgtcaaaatgtttcgtgggctttcatggcacagtgccggacgaggcttttgccaaaatgttatatgaaaagttcggaataattgccaatgccgacatgaaagagaaggaatgcagtggcaccactaattatcttaagcctccatccaaccgctagattgcttttgaaacggctgcctgtaaggaattggtatgcaaaaaaggtgaattaaaacacttgcaaatttcagttaaatgaatatgaaaagaaattaaaattcatcaaaagtaaaagaagaataaaaagaaaacccacaaaaaacgtttaaaataattaaataattaaaaagcgaaaaaatcttaataaaattgttttacataatcaattaacaattttcttaataccattcgaaaaatattctctatgaatctataaaaatttcaaaaatttcgttggttataaaaaagttaaataaaatcatttttttaaatttccaagtaacttttttttgtacttaatataattttttgattatatgtgactatcgaatgggtagtaagaatgtttgatttagttgactttgaaaaaacgatgacgacttttttgtcaaaaaacttcaaatcgttggcaaaactttggcccaatacaaatcgtcctttgcccccccccccccccaccttaaaagattcagaaattaaaaagcaaaagcagatttgtaagttcagatccgaaggatgccaaactgttgttcgtgttcaacatttgcaacaaagtggacctggccggagtttgccatggggaaaccttgataaattactgcaacgaggcgaaacatcacttgtgatgccgttaactctgtgccgttcgttccgttcaattcgttttgacatttttcggcatttttctgctgcatagttttgacatttaaattttcattttttgatcatctttttattttaattaatgttcgtttcgctctgatttactatcacagttaaagtcagatcggttttacgggaagtggtcaaaccaaggaaaatttgactgtcccaaatacattctacgaatttattattaatgtttaaaaaacatttccatttcgttatgttttccttctctccatcgctttttgattcatcttcattttacatttttacaattgtgtcatccaagcaaaagcccttcctttttttgtgattcatttcttccatttccccgttggttatattctcccga

SEQ ID NO: 73782 - DNA, 66 bp, Heterodera glycines
gggtaaatattgatcataggccccaaactcaaaaatgcttaaaaacggtcagaatcgatgtaaaaa

SEQ ID NO: 73783 - DNA, 305 bp, Heterodera glycines
atgttcgaaaactttcttattttgaccattttctgttgctttgcaaatgccattgcccaaggccaaaatgtaagcaaatttagttgatgaaaaaatggaaacaatattatttgaattgttaaaaaattgtaaattgttttagggttattactgtcagcaggttggcggcttctactcgtgcataagctgcaatgagccgtcgctcgtcaaactttgtaaaattttcttacccgaaaggcccctgggattaaaaattgaaatggcttttttcgtttgtttgctttcataattacaatacttaatga

SEQ ID NO: 73784 - DNA, 617 bp, Heterodera glycines
atggcggatcaaaaagtgcaaagcattaaagacgaacagcagcagcagattgacttgacgcctgccgcacaccatccggcacaacagcagcacatcactttcacattcaaatgccatccgacaaatgaaagccgaggagaaaaagcggcggaggacggcgaagcaaaagcaatgccaattggagttgtggtgagttatgccaatgttgtcctttttgcccaaaatgccaagtcggagcttgaaaatgattaaaaatgaaattaataattaagggcaatcatttcatcaatatatgaaataataaaattaaaaaatcattaaaaatataaatttttctccgttgacgacacattactccaaattatgaaaaataaccaattttgctgaaggtctttgacttataatcccatttctttttcttttttttttggttttgcaaatttttttaaattattttaatttcactggttatctggtaattaaaataattaattgttttacaatattctcagattctccttactgttctcggtgtgctgctcgtcgaggccatcgttggctttttggtatttttgtgcatttcgatgagaaaaggcatttgaccgatggacagagaa

SEQ ID NO: 73785 - DNA, 105 bp, Heterodera glycines
atgacggatgaggagaagcgggcggtggagcagcgtctgagccggaagaagaagcagctgaaggaggaagagacaaagctgcaaaaggcatggaaatttgtgaag

SEQ ID NO: 73786 - DNA, 341 bp, Heterodera glycines
atgttttttaatttttttgcggatttggggcagcaattgatatcaatcagtggacaaaccggaggacaaatagggcgacaaatcgtgggacaagtcgggggacaaatcgtgaagcatgtcggtggacaaatcttgggggatatcggggaggtagtccaatgcgcggtacctctgacatcgggacactcgtggctggcggaactgtcgcagttggttgtaaggccttcaaggcttgggaggtaaaagttgtaatttccaaaatagttttgctgtttttttcaaaattaatttattgaattttaattcgttgttttagggtaaaggattttaattttgtttaa

SEQ ID NO: 73787 - DNA, 286 bp, Heterodera glycines
atgttttttcaaaatccaattggtaggtttctgcacaatacacaaatgtgcttttcttttttaaatctcataaatttgtaaattttatgatcattccgattaaggcatttgagtttattcactttagtagtaattttcagattattcatcagaaaagtttcttcttaatgatttttattaaaattatcttttccttcattattcctacaagactataattaattattttactattattttttgttttgaccaatgctgtttttatacgaaatttattatcaaaaaa

SEQ ID NO: 73788 - DNA, 884 bp, Heterodera glycines
atgttgaattttcaattcaaaggtcggtctacataaatttttatttatttactattcttatcaaatgtgcattattagatgagtaacaaattatctattggtctatgcggtaattttatgagttcattcttatttataaaattatttttttggaattataattttatttatatttttttaatttttttatataatctcggcatcttcactcagtcttaatatcattaatttttctatttttttagtatattttaaatattttcagttttatttatttgtatttttgaggtttaacattgtatttttatcattatctttaataaattcgttctgcttttccttttaatcttgacatcgtgaggctcttctctctcgcactcttgagccggaagtgttgttataatatgcatttgtaaaaatttatttatcacaatatttctgcatctaaaaacctctaaaatttaataaatcaatcattatttttttttgtaaaattttggaagtcttgaattgtcataatttgcaaacattttttctattttaatttctcatttaattaattttcattactaatgtataaaattattttattttacacatttattcagcttttgattacttattttttgaattttattataaattaccttatgtatttaaatatgcatttgaagtttggctgtccataaagccatgtcggaaagccgttctgcgctcgacgctcaaggcttttggagtatttactaatctagatctttattaacttctttatcttaatgataaaaaaatatgaatatcaatttttggtactttcctgttttgaaggcgcacaccatttggtacttgtacatttacacctcataaatttttttttgtttttaata

SEQ ID NO: 73789 - DNA, 1333 bp, Heterodera glycines
atggccgaagaagaattttgcagtaagctgttgtacgatcaagatgacgatgagaaagccgcggttaacattgaaaataaatcaaatatataataaagaaatatttataatatttttaattaggtttctaaattaaaatcaaattcataaaatttttaaaaataaataaacaatatatgtgtttaaaaaatcaattaaaaataaaacagaactatgataattaaatgaattattttttccaatgacagagagtcagagtgcattaaactcattaattagctttataaatgagatgccgcttcgaacaaccggcacgaatacatttatatcaaaatattatttttaatataataccattgatttctaataactgtgaaaacattaattactttgaataggtcttaataaccacaaggaatgaagataatacaattgaaaatgcacccaattcttcgaaagaattcttatgaatggtttcgaaggtgaaaaagcaaggtgattgaattgaaatgattgattgcctcaaaatcgaatcgcattttttgttgaatatttacaattatattaaaaattaagaattcaaactaccgcatatgctctaattatcacccatggggaattatttttaaaccactcagaaatggggggataattggagactgcgggattaatagagactgggcgataattcgagcatatacggtaagtaataaaggccaaagacaagaaataatagaaaattttataaaattcatatgcatttttaataaataattaaataaaagtttaaaacatttttatacattaaaaaaatggaatataaaaaatatacggaagtaaaaaatatatttaaaataatgatttaaaaaatgaataaattctataaaaaatgaatttcataatgcattaaggaataagaaaatatagaaaaccaacaaatcagcttttcaaaaacttggagaattcagcaagaaaaaaattaataaatataataaattaatttataaactttattaaataacaaaaaactttaaaatgcataaaattacaatcatttaaaataaaaatgaaatattaaaaataaaataattttgaatgttgaaagatggctcacaaatgaaacaaaatattgactcagagtactaaaaaatcacggtcaaaccaggccaatatattttttgaattgcacttatcatttcattttttcaggcagaaaaaattaaataaattaatagtgaatgctataaaactacaaaaaagtgggtactttcctgttatgaaggcgcaccccacgaatatgatgtccatttcgacccattcagatctcaataaa

SEQ ID NO: 73790 - DNA, 1784 bp, Heterodera glycines
atgatggaagccgaacacgcccgcgatttgacccaaacatttggagtgtttacactcgaacactgcaaggcgatgaccggacgaataaccattcagaagccgcgaacagacgcctacaatgcgcatttgcctgaaaacaaccatcgatttggcatttcattgaccttctgcgaaaggatcaaaagttatcagatgatgacttcgcgaagtgttcaactggacaagaaccaccgcaaaaggcaaagaaatatcgtgaagcagaccgccgaattctcacgatggttcaaaattatttgccacttaacaacgcagacaccaacattttcccaattcatcaccctttcaatcatctatttatcattacatttttgatcggaatttctcgaaattatgaaatgagaccgtgatttgaaacaaataaattttttaaaattttcttggatttttaatttcactgtctttttaaacttttggtatggaaatggcccaaatgcattggtagggaattggcggtagggaatcggccggtagggaatcggccggtagggaattggctggtagggaattggcggtagggaattggcggtagggaattgggtcgatccctcggcccagactttttagaatgttgatataaatttttctttttcatttctttaatttaccgaccactaatgtttcagttatatgtatatactttttccttaattttccattccatctctttttggtaattaaataattaatgtgaattagcgtcgatcacctgattccaccgactttattattttcaaattatatacataaaatattttcctctcacattaatttggtggactaaataaaatttaggtttgggtatttgacgtggtgtttaaagggcgtggcaccattttcgattgactttgtacaaatcagaaataaatatgcaacaccactccaatcggttgagcggtgcctttaacggattggccatcgatggcggcagaacggccacactgtcacaacaacaaatccaggcaaatttaatttttacgagtaactcttctctggcatttcggttcatttttactctcatttttagacagaaatccaacgttttgagtcagttcatccgcgcatttatcaaatttatgatttgctgaagaaattgcgttcggaccaaagcaggcaagcggaactcattgaacaaatccaagagcaagtgatcggcattgaaggtgatcgatcatcgcaattttttgattaaatcccaaaatatgaactttccatcattttttttaattttcagatgcatttgtcaacagccaagaatggacaattggcaggacaattcacgaaattcgagtggtaattgtttgttttgtttttataatgaagttctcttttacatttttgaccattttactccgaattacagggagtaataggttcggaggacagctgcaaaaactcactgattcactattttctgacgcgcaattggaactgggaggatgcgcctgaaggcggacgcttcaaaaaggaggtgttcatcgacggactcagctacctgttgctgatcagggacgagggctctcgtgagccgaacatacaggttgatttgaattctttaaaaatatttgtttattttacagtttgcccattggtttgatgcgttgctcattgtttttgccatcgaaagccatcaaagctttaatgcggcacttgaattgcacaaaaaagtgcattattttcgtccgttagattcgaccgatgtgccggtttatctgatcggaatgagg

SEQ ID NO: 73791 - DNA, 291 bp, Heterodera glycines
ggcgagagtcgatggatcagcattggcctcgctctgtcaacgcccacctcaacaatcacgccagtcaccagcaacttcaacactcggtcggctcgccgtacatggtcgcctccatcccctccacgccctcctgctccgcattggtcggcccccattgtgccgttgtcgaacctttgacgccgtcggccatttcatccgcattcagtcacaacaatttggccacaaccgctgcacatcaccagcagcaacacaacaacagcaaccattatgcaagttgcaacagcaccaatg

SEQ ID NO: 73792 - DNA, 169 bp, Heterodera glycines
ggcgagagtcgatggatcagcattggcctcgctctgtcaacgcccacctcaacaatcacgccagtcaccagcaacttcaacactcggtcggctcgccgtacatggtcgcctccatcccctccacgccctcctgctccgcattggtcggccccccattgtgccgttgtcg

SEQ ID NO: 73793 - DNA, 409 bp, Heterodera glycines
atgtcttcctcgtgcatcacttttctgatcggtgccacgggaatggttggcaaaatgaccagtgatcagtcggattcggattttttggcatctcttatttaaatttaaatcccaattttttaattgttttttttgcagaataaccaaccgctctcttcgccactgtgctttacttggcccctctccgcgtcccattccccggctttgccaacggacgctttcgattgattcgtttcaacgtttttggccaatttccggtcagatttgataaaattaagaattataaattaatttttaaactaaacacaaacataccatactctgacacttcaaaaaaacagtaactgaatgattatttccgagcagttttttttgatttctgttgacaatctgtgtccgtaaaattaaa

SEQ ID NO: 73794 - DNA, 3287 bp, Heterodera glycines
aattctatgaatctttcacaacaattctttaatttacttctccattttagacgacatgatctggtaagaaaattatcatttttattttttcaaattatttaaatggcaattttttccattttttgtcccaatgtttgcccaactcctcgggttacctgggaaactgagaaacacacacacaaatcgctgcatttatctaacatttatgtatgacattttttggaaagcaacagaaatttaccaacaaaaatcgttaaaattgttttagttttatttgttaaattagatttgttaaaaaaaaattatgttcataaatccattaatttcaactaaaaatttcataaaactttttaaatattaaatcgagaaatttaagtttaaaatatgtatcaaaaaataaatttattcaatatatattaaagtttaagtaatttttaaaattatatttttgaatatatttttttgctttttcgtttaactaacgatttaaaaatacaaaaatcataaatatttattttacaaaaatcgaaagcgtaaaaagccacgcaattattgcgtaaaatcaacaaagtaaagtcgggagaggactgtcatcatcagagcacacaacagcgacagagcgctgcttttctctcccaaatcgattgaataatcaatgttcccaatttcattttgctttttaaaatattattttcaaatttttaactaaaatgaatattttctttttttatgaaaaattctataaattttcatttttccaagttttatgataggcttaatcattttatgagggtgattaggctaatctaacctaagatttaacttagattcccctttcaacatttttctttaaattaagaaaaagaattcgaattcgaataagaattaaaatttattttataaattttttttaattcttaaggtagcatttgtcaatgagcatagtcgtctttatgctgaagcgcaaatcagtggtgattatggcgaatgcattgcacattattattccgtcatgtcaaaggcaaattaaataaaaatataaaaaattattaaaagcattttattacttaattacctcgtcaaaataaataattaaaaaaatctggcgctttaatcaattttatctaattagattaaatgtatgactttaattaaataattctttcaatttcggtaaatagaaagttcgttaatttggaatttattaatctttttttaaaatatttgatcgcttttttcctaataaaatttttatttcattttcatcttcaggtgatcaatgagtatttttgcggcagttttcattttgtgccgcccattcttcccccggaacatcaatcggatgaaaagtcgccatgtttgtgcaacaaatcgtccacaatggcactgcctgtcgcattgcggcaattgcatttgcgcattgggcaaaggtgtggaattgaaaaataaataaaaatgcattatataaaatatttgagggaatttgaaaaaaataaaattttatatgttataagaaaacaatttaatttaagggaatttgaaaaaatttaaattaaatagtataagcctaaatattggataaaaatacattgaaaaattatgcaaaatgcatgaatttttaaaatttacttttctaacagattttatccaaatttggctagagtcagttgatttgtctaagctatgcttcttcagcataaagataaacaccagcaggggatctatggagtttccataattaaaaatgcttaaatttttaaatgaagaaaattaatctttttaaattataattcattttcttacacaatatattgaaactgaaaatgcttaatgattggttaaattgcaaatggtttcaaaaaattcagccttgaattaggcccgggaaagcattgtttggacatcggctgtggcattggtgacgtcataaagaatttggcatttaccggagcccattttactgggctaacaattgccgaaaatgaagtattttaacccaaatctaaaaatacttttcaacataaaatatttaaatttattttaaaaaattattttccttttaggttcacattggaaatgccaactttcgttcgcttggcatcgacaataattgcttcctgcttttgggcgattgcactaaaagttctgcacttcaccattttttttctctctatagtccttacttcattaccgtacttaaaatatttttaaaggacacaattcgtaattcactttttcataaataaaatttaaaatttagctctttctattcaaaatgaaagcaaagatgccgcatttgcgctctattcactcaaatatatgccaaatttgggccatatttttgcggaattggaccgtgtgatgaaacctggtggcaaattgctaatttatgacctgttaaaaacggacaaatttgatgtgagcaatgaaaaacattggtagggaatataaattctttcaataaactttctttcaatttaaattatttatttaaaattattgtcttacattttttttgtcattttaaagcttttaccgattttttgaatatttatttttaatattaaatccattttgtaaatcacttttaattttaaaagaatttctttggattttttttattcttcttttcatattaagctgattttttccgagtttttaaatttaattcttttaattttgaatattttttctgtttttctttaatccattttaaattttagcaaacttctgtccgaacttgaatttgcctgtggcatgccgcccctccattcccgtagcgaactgttagctgaagcagataaagccggcttccaactgatccaagctaatgacttgcagcatgagagtggcatgccattttaccattgcttttcacattcgccgtttttcatgtggctaatgcggtaaaaaaaaattatacacaaaaaataataaataattaatttaattggttttattcatttgttcagttctcggctcacagaaaatttaatcaaagtggcgcaaactctcaaaattttacctcgcggttttcatgagttcaacaaaatttttattagaggtgggcccataaaaaaattttattttttctattttaatgagttttttcaataaaatttattcaaataaatttcaaattaaaattattattaaatctaccgcaatttatgaaattttataataaattttttttaatatttaattattaaggaactgtggtcaaaattgttgaggctggccaacttggaattctttctggctccgaaatattattattttgcaag

SEQ ID NO: 73795 - DNA, 846 bp, Heterodera glycines
aaaataaaacaggtcaacaactgcgacgtacaccgaccaaagaggaaaagagcaactcaacccccgaggggaggaaaagagcaactcaacccccaaggggaggaaaagagcaactcaacccccgaggggaggaaaagagcaactcaacccccgaggggaggaaaagagcaactcaacccccgaggggaggaaaagagcaacttcatccatcccctgagggtaagaggtggagatgcatcacaattcttcacttaatcgacgaataaaatgttgtgaaatttgaagtggtacaacaacagacaaaagagagaagaagagtagacaaaattgtcaaaaaaataaaataaatgataaaaatttgttaaaatatgcttaaaatttctaattttttgggatgatatggcaaatatttatattttcgatggaaaaaattcgaatttcattttgtccggagttcttagaaacaattttaaattccaatttgtccatccatgtctttgatacttaaacaaaaataccgtacctaattgttatttaatgggtttttcaaattatttatgatcatcaaactaaaaattcctttatgaaagaaattgtagaaattgaaatttttttttagaatttttttcccaaatctttcacgggcattgttctttcggcacacatttgtttgaaatcgaatcgcgcaccaatccgtcggcacattcacaagtgcaaggagggcatatcatcagagtgcaaaattccgggttcggattgtcacagctcggctcacatccattgcatttcctatcgccaggcttctcatttggagggcactttaatccgaagacaattagtgattaa

SEQ ID NO: 73796 - DNA, 501 bp, Heterodera glycines
atgttccgaatcccctgcttaattttatttttcgttattctaccattgataactgtacagagtttccatgatagtgaccatgatgatgatcgtgatgacgaccgtaatgatggacgttgtatggtaatataatgaattaaaaaccaattaattattaataatccattgtactaaaattattaaataatttaatcactaattgtcttcggattaaagtgccctccaaatgagaagcctggcgataggaaatgcaatggatgtgagccgagctgtgacaatccgaacccggaattttgcactctgatgatatgccctccttgcacttgtgaatgtgccgacggattggtgcgcgattcgatttcaaacaaatgtgtgccgaaagaacaatgcccgtgaaagatttgggaaaaaaattctaaaaaaaaatttcaatttctacaatttctttcataaaggaatttttagtttgatgatcataaataatttgaaaaacccattaaa

SEQ ID NO: 73797 - DNA, 832 bp, Heterodera glycines
atgttccaaagtccttgctttttcttatttttaattgtgttgtcctcttgtgtaattggactaactgctcaggctaatgacaatgttcgctgtcgggtaatatttcttaaataaaatcacctttttaatccattataaaacaaaataaaactcactgtcataaatagagtattttatttttaaattatagtgcccgttcaatgagaggccaggcaacagaaaatgcaacggatgtgagccgagctgtgccaatccgaacccgggattttgtacactgcggctgtgcccgccatgcacttgcgaatgtgccaatgggttggtgcgcaacttgaacacaaacagatgcgtgccgagaagacgatgcccgagaaagaaataatttgaaaatttcaaaacgattttcattttgaaacaatttttttcaaatgaaaattaacatgcatttattgtcatcaaatggaattcatgaacgcttggataacataaaaaaaaaaatttcgacggtgacattaaaatgtgagataaatttgggctctattccagtttatgcgtccaatcaatgatttcatattcattatttttcgcgtatatgcagaataattttttgtctgttgcatttatcccagaattctgctatacaaaaacttctgtagacttcaagctttcgattgataccaaaaatgtatggattgacaaagtaagaaaaaagttatgatctaagaaactgaggatagtctctgattggacgcagagccgaaatttgaccatgatctttttgaaggtaagaaatatttatatatattttaaaaatctattggatatttttaataaa

SEQ ID NO: 73798 - DNA, 1491 bp, Heterodera glycines
atgaactgctccagcgctgcaatgttgatgctgttgatgaccatcttcactgtgctgtccaatgtcaacgaggtagcagccgaggaacacgagctggtcaggtaatgatggaggatttgtgagattttcgtaccgattaatttacgggatttgcggaaatcccaaagcttttcatttcttcggttttgattcccggagactttttccattctgaatctcagggaaaaatcacatccaatggcatgaaaatatattttctccgctttagccgcattaagcgcaacggctacggatacagcagcggttatggtggtggctgttcagcctggtaagaaagaaaaaagcattttgaacattttaataaaaaaaatattaaattaagccaaagcagctgcaccacctgtggttacacatcctaccatgtaaattcaaaaattttaaaattttaaaattaaatattaaattttcttaaagaccgtgcctgcggctcccgctcccccgccaccaccgccgcctccgcacctgcgcccgtctacagccaggtgaggaattttcaaaatttctaatattaattttgaataaaatattttgaatccactaatttctggattatgaactaattacttgagagaatgtggtgggattaagtttttgatgggggatttcagtcttctgagtactaaaaaatgatttttgttttttggctttcatttctttttttgattaataacatccatgatccctaagattgctgaactacatcaaatttttagccaaaaaaaggcataatttttgtcatatttcattcgttcagtcttcctactcctcctgctccacctgcgggggcagctcctactcctcttacccgtcttcctcttactcctcttatcccgcttcttcctcttcctattcgtcctaccccgcttcttcctcttcctactcctcttaccccgcttcttcctcctcctactcgtcctacccgtcctactcctcctcttcctcctgctccacgtgcggcttgagcggctacagcaacagctggaacaacggtggcagctcgtccaacacgtggagcagcggcggctcgtccatgtcggcgggcaacggcggtggctacggctacggcggtggcagctgctcggtgtgcggaaagcgcaagtgagcgatgcgcagcgcgcgcagcgctgtttccgcacggacgcaacagcggcgagggcgcgcggacacggagaatgaactgacggaagaccattgaaattctcccaaaaatcttgaacccatccccaaccacaatacccatccaatccgtcccacattttgttaggctcagaaagcacacattttaaatggcataattattttaaaaattttaatttaccaattggcacccaaaacagcaccagcacactttgtttatttaattgtttaaattaatttttgtttcaataatgttattttttgtttgtgtgatcacaattctccaccacccca

SEQ ID NO: 73799 - DNA, 2183 bp, Heterodera glycines
atgaagctaattaatgcatttgagtttgctgtttgctccattttattaattgctgctcaattatttcaagtttccttttcgtgtgaaattggtaaattggaaatgaaattaatttattaatttttattcataattattcaatttttttagaaaaaattaacaaagcaattgacaatttgtacataaatttatttgagcttcaaaaaatggataaaagtcagcaaaattattttgaaaatgatcacaaaaattgggaaaacattttgttgaaaattgaatcaaaattattgtacagttcaatttgtacgattttgaagtctgcagaaatgccaaaaaatgcgcataaagaaaaggacagattgaaggaatttttagagaaatacaaaaaactttcatcagaattttcagattctatgctaaaaaattgcgaattttggaaagtttggagattagtggccaaaaacttcggtttgttgactaattttaaagaaaataaaaataaaatttaggaaaaaatataaaagtggcaaatggtgaaataaatttcgaatgccaaaacagaaaaattatccgacgcctcgaaggtgccgtagaagatccatttgctggagacattttaacgggtcatttaaatgcactttcgcaattattgacgccaaaaaagggcgacgaaaagccaattcaaattggaaaaatgagggaaaaagaaaataataattggtgaaataataaattttgacaaattaaaataaattttcgatttttcagggattttaacggattttttaaaaaagcaaaaatgaaaagtgagtcaaatattgcttatttattacgcaaaaaccgcgttgaaaaaaacataaaggggataattgaaataaagcaaagaattgagcatcattttggcactcaatttttggagaaaatggaacagttgcgaccaattgaaatgacattcggtgattatgatagtaaatatattctctaattatatccccaaatctccattaatccctcagtctccaattatcccccagtctacgaggaggatgaaaaataatcccccatgggggataaaaagagcatatacggtaacaagatcttttaaactatcaacaaaagtcgcatagaatttcaaaaactaaattctcggaggcataaatgccatagctgggctcagaaaagttcattcaattttcaaaaaattgttaccaaaaatgttcaaaaaatacgaaaactttttgaaaagctgagtgaaaaatgacgagtttttcactgatattaggtacaaatttaaagcaattttttggggagggtgcggctgtgaatttttgtaaattattgtataaacaaatcattaaaataattgtttcatggctatcccaacatacataagaaaataggaattttggcaacaaatttcaacttttacaattatcgattttaaattatgtagatataattgacgaccaaagattggccaattcatatgtaaaatttctgcaaaaagaggaggcggcgaaattggcacaacaaaatgaagcgcatttattattatcaacacgaatgttttttggccaaattattagcattttttcaatgaccaattcatatggaaaaatgaaaacaaaaaagcgaaaggatgtcgaaaatatgaagagaatttgtgcggaaattgaaacaatttggaacaaaaatttttacgaaatttgtacacaaattgaaacaaattcggcatattccgtcgagagcatttccaaattttggcacaaattggcgaaattattcaacaaaattccatttttgaaaaaatgcgaaaagtttttgattatttacgaagaattaacccttgagaaaaccaacggacttgaagaatttttgtggagggcaaaagaccaactgatgtcagagcatgccaaaaatgtgatcagactgaccgttggccaatcagccgagtgccaaaatgcactcagtcgcttcttggcaaattcacttggccaaatgaagggtgccaaacatcggctatataaatttttcacctcccaattcattggcatcacatatttcgataaattattgcaagaaaatgcgaattttgcgcaagtgttccgttctggtgatttttttatattttcggatgaatattaccgtaattcaaaaataataatcatttaattgcctttcca

SEQ ID NO: 73800 - DNA, 1633 bp, Heterodera glycines
atggacagtgacagtgaaactgatgtccacacgagagcactttttatggtcgattatttggcattttatcaatggtaaatagccaattaaccaagacataatgggctaaattaatgaggaatttttttaggaaaatttaattaaaacactaatcgttcaatgagtttttttttaaatttaattttaggctcaaaaattggcaagaaaaattgtcaaagagaacacagccttctcttgaacagcttctgttccaaattgaactgtacttggattttcttgccagcacaacagaatcggcgacgggcgaagcggcaaaaatggaacacaaacagaaaatgttggcactgaaaacagcgaaagacgcatttttccccgatgaagccgaagtaattgtaattgacggaagaggagagaatacggcaaatctattagcaattaaaatggaattgttgctaatgcataacgaaatcatcaaaggattgatcgaaaatgaagaacactttttggacaaagttaaaagtgagtgctgacgcgtaatgaataattaaataattaattaattcatcattaatgattggttaattgttttaaatgtttcttagcaatctttattgaccaaaaacgactgcgtataatgattccacgtatgtcacaggaataccaaattttaatagacaatgctaagggggaaaagcagcatgggaatgaaaataaaaacaatggaaaagaggatgaagaagaaaagggggaaggaggagaaataggagacaaaaaaagaagtgagaaagaagacgaaaggggaatagagaaagaaaatgaaaagggaatagagaaagaaaatgaaacggaaaaagaagtcaaaaaaagaagtgagaaagaagatgaaagcataggagaaaaaggcgaaaatggaagagacgaaaaagaaaaagaagaaaaaaaaggaaaagaaaaggtggaacaaaaaggagaaagtgaagaagacgaaaaggaaaaaggagacaaaaaaggaggagagaaagaagacgaaaaaggaagggaaaaagttgaacaaaaaagaggaagtggaggaaacaaaaaggaaaaagaagacaaaacagaaaaagggggagaagaagacggaaagagaagagacgaggaaaacgaagacacaaaaggaagagacggaaaggcaaaaggagacaaaaaagaaaaaggaggaggagaagacgtaaaggaaagagacgaaaaggaaaaagaagacaaaaaaggaagagaaaatgtggaacaaaagggaggaagtgaagaagaggaaaaagaaaaagaagacaaaaaaggaaggaaacaagttgaacaaaaaggaggaagtggaggagacaaaaaggaaaaacaagacaaaaaagaaaaagtaggagacggaaagagaagagacgaggaaaacgaagacaaaaaaggaagagacggaaaggcaaaaggagacaaaaaagaaaaagtaggagaagaagatggaaagggaagagacgaaaaggaaaaagaagacaaaaaaggaagagaaaatgtggaacagaaaggaggaggagatgaaaaaggaggcgaaggaggtggagcagaaaacaaaggatgcgttgattcagatggtgaaattagcctttaa

SEQ ID NO: 73801 - DNA, 3108 bp, Heterodera glycines
atgtatgaagattgcaacaccgtttttgcacggtgccatgacgcgaagaaagcgcgtctcttcattactttcacgaacaacagggaatggcctgagttcaaagagaatttacacaaaaacggtcaagtatttactgaccgttttgacatgtggatgcgtgtctggagcagcaaaatcgctgagttccgagaagaactttatgacaaaaagttcttcggaacaatccttggttacggtgaatcaatggagttccaaggccgaggaggcccacatgcccacattgtggcgcaaacagacctggacgcagttccatatgtcattcaggaatacatatgggcgcacattccatctttgcctgataaagatgacgacacgcccattgcaaaaatgcatcgcgaaatccgcgaaacaatgcatatgcaactgcacagatgcagtgacagttggtgtggtcctagcgacccaatttacgggcggtgcaagaaggggttcccagccccttactcaaaatgtacgattttgcgcccggacaggcccgcgatgtatttccggccttcaccatctgatggtggtgcccaattagaggtaaacggcttaatatacgacaactcacatgtcgtgccgtataatccttatattctgctgcgttaccgagtacaccataatgtactgtttgcatatggtaacaaagcaaatattaaatacgcactcaagtaccctttcaaagggccaggacattgttatgtcgagtgcaaagaagagtccggcaataaaattggaattgatgagccggctcaatatgccaagatgaacttccgtggtgcaacggaagcatatgccattgttcattcaatgccatttgcccgtctttcgcatcatgttgtcaaattggcaattcatttgccaaaccaacagcccattgtatatagggcattccagctggtgagcaaagctcaacaaatccagcaaggcgaactgccagaaacgcagtgttcagcctattggaaacaatggcaaaatgagtggaagaatgatccaaagtttaaggacattcttttcgaaaaagtcccagagcggttccgatgggcaaaggacaaatgggtcctgtacaaaaggcagcaaattaaaaggccacctatcggccgaattgttcctgtacccccatcggacccggaaaggttcgcgctctattcacttatgcgtcactttcctggagacccagaccatcttaagatggttaatgggttgctttgtacctcattcactgaggctgcaataatgcatggtcttcttgaagacgacaaaatttgggacaaaactctggcggaggcagctctgtcgcgctggccagatcagatgagatggctttttgtgagcatcctggtctatggccagccgagtaatgccatagaattgtggaacaagtacaaagaccaaatgtacaatccgcaaggcattattactctggcacagcataaagtagcagagcttgaagccctagccgacattgattggcggctgcacagctgctttaacttaagctgtgtgcattttagcctgccagacccgccaacttcaattgccaaaaatactgacgcggcaattgaagagtttttctttggcgatgatgatttgaatttgcctccagggcaaccaaatcctcgtccacagccaaatacccctccgccacttaacagcgaccaacagaaggtctttgatgctgttttgttggcaatacagtcgaaccctaaggattcgactgtcccccgccgtttcttcatatacggcgatggaggcacaggaaagacattcctgtttggccaaattattaggcgcttgcgaaaggccccatacacctacaaagtgcttgctacggcatccactgggtgtgcagccattttgctgccatatgggaaaacagcccattccacgtttcgtctgggtagagaagtgtcattagacaaactcccaagcattccgctggagagcttctttgcccgtcggattcgtgaggcccaactcatcatcattgatgagatcaccatgcttcacaacacggtgattgaggtcatcgaccgagtgtgcaaagagatggcaattcgccagcacaaggatctcctcttcggaggaaaaacggtcattttcagcggtgacttcaaacagtcgctgccggtcgtgcctcatgaaggcttaaccgctcaggtgacagcctgttttcaaacgtctccgttgtttggtcaattcaccacgatgaaattgaccatcaaccagagactgggccaaggtcagcaagcgtacttgcaaatgtgccgccaaatcgggctcggagaaaccggagagcacttctggattcctccacagttcctcgttaagagcaaggaagagctgatagattatgtctatcctaacttccaacaactccttggcaatgacaaagagctgctcaatcgtttgattctcgctccgcacattgacacgtgtgatgaagtcaacgagatcatgatggcgaatgtgccaggtcaagtgcgggaatacttgtccacggataagccccttgacgaccgcccactggacatcgatgagatcgagtccgaagtggctgcgttgaaccggcgcacagactcgggcatgcccccgcacagtctccggcttaaagtcggatgcgtcgtcgtccttcttatcaataaaagtgataaggaaggactgatcaatggcacacgcatagttctggaagaacttggcgatgatcgcctcattggtcgtgttatcaatagcaatgctattggcggccaagtgagattctttcttgaaagaacacgaaatgtctatgaagacaaatcgcctggcggcataaaatatgagcgtttgcagttcccaataaagcctgcattcgctatgaccattcaaaaaggtcagggccaaacaatccgcactgtcggcattgatctggaaagggaagtattttcccatggtcaattgtatacggccttctctcgggcaacagacggaaacaatgtccgtgttcatgctcccaaccgggaaattgatgcccaaggccgagccaaagtgctgaatattgtagctactaatatgctcaagttacaataa

SEQ ID NO: 73802 - DNA, 267 bp, Heterodera glycines
ggcctttaccgaacgtgcggcgtgaagagcaaagtggaatggatctgtgtacaatttgaacaggtcagtggggcttttcatttttaaaataatttaaatgtttatatgaattaaaatttttcattttttttttgccttttaatataaaattccaaaatttcagatcccttcttccgatgttgacattgacttgtccgatgtgcacccaatgaacattgcatcagtagtcaaattgtacacttttttattttcaattacctaattcaa

SEQ ID NO: 73803 - DNA, 974 bp, Heterodera glycines
atgtccgtgtccaacttggccgctgtgatcgctccctcgctgatgtggccgtccaattatggcacccattcggcagcaattagtgacgcccatcggcaatcgaaagccgtggaaatgctcacacgacatgcacatgtgagtgggtggggataaaatagcgaccaaaaagccgccgatgaatgatcagaaaaaagttttactgatcaaataaggtttgggaaacccaaaaattgatcatttagaggcgccatttatgatcaatgtgatcactgacaagcaaaaaatcagaagaaattaattattgggttgctaaagagtaattttacggaaaaaatgtgatcagctctataaattgatcatcaaaaagagttccgagccattttttgatcatcataaccaaaaagtattaatttatttgtttttagagaatcatagaggttgaccaaagagtgaccagaccctttattgatcaattttcaagcaaggtgatcagaggaccttgttggtctgagaacaataattgttcatcaaacactctgtgatcagtttgatgtttgcctttttcagtcccgctgggtgccattgcacttggccaatttctgcaacttttgcattgtttcaattagcagaaaattggcgtagtacaaaggttcccattagggagataaaaatggcgagaaattgccattattcatttttggaataagctggattatggggagaaaaattgcttgggaatcaatggaaaaatttcaaatgattgcttctgacttcaaaatgggtgaatttttatcccctccggcgatgggggggcacaaaaaagtgggcggtgtcgcccgggggcacttcttctgagacgacgggataaaacctgtgaaatgaatggaattggtgcaaaatgttgggtttttttgcaatcgcaggtgtcagaaatgaatgggggaaaagaggggacaaattagcgacgcgaacga

SEQ ID NO: 73804 - DNA, 881 bp, Heterodera glycines
atgcttccccttatggtacaggaggtgtttgacgtgaacttcgcgctcgattggcgcacctttttcgacacgcatccaaacgtgccggagccgacgaatgagcacagcagcgttggtgccatcgaccgaggtatcagcggcactcctcgtcccgagttctgcagcgacagcgtcgacggcgataacaagccgcgtcgccaggacgccggcgacagtcgtcatgccatcgtcggcgaccagcggcgcggtgccggaacgctcgctgcagttgatttgtcggcggaagacattgacgatgaactggtcgaagatgatgatgacgacgagaacgaagaggtggatgaactgctcgaggatgatgacgatgacgaggaagaagaggaggaggaactgatcatgacgtccgctgctgatcatcgccaccggcacggaggacagccgcagctgtcgggcggcggaattgccaaaaacggtgctggtgaaggagcggcacaaatgccatcgccggcggtggacgagaagaaacaacaccaccacttccactcggtgtttgacaagcgattgctggttgatagctactgtaagtggagagaaaaagcatgattgagattactgtattgggtatggtccaagccaaagaagtagtcatagccttgacttcgggagggggggggggaattaaaaaattcaatttttaggagtgtatttttctttttttagaaatcctgaattaggaggtgtgcttaacaggaatttgtagccgttttttgccaaaaaatgactattttttgtcattttgtccccgtttttcaaaaatatggtaaaataggggttcggtggtgcctttaggcgccgctgggaaaattttggaaaatttttaa

SEQ ID NO: 73805 - DNA, 881 bp, Heterodera glycines
atggaactcccccatttacatgcctggcgtttactgtttacatgccaaagtgtgcgggtaaaagaacaaaaacaaatagaccaatgatggcagaatgaccaaaaaataatttatccatttttcaattttcaatttttaaatctaaagatattttcaaaatgaatttcatttattttacaattaaaataatttatacataacgcttatcagtggaaaacccttacataaatccccaataatttacgtgatggatttagtaaaatgtttcattgatgtatcgtaagctaaaagtcttcctccttcaaaaacgaataaacaaattcaaaatgcgcctgcctctaaagatacaaatcaaaagctttttgatgcaaaatcttaaccattggaccctccaaataaactcaataatttttcaatttttcaaactttggactaaaacgtccagccctggttctaaagtaatttacattgtacaaaaacttgcagaggaccgttttttctccttaacattgacgcacgatgaaagaatttattttcgtataaacaaaactaatcacaaaaatagtttctttgttctcagctgggatattcattctttggctgaaagtgcgtcgttggaaatgggccacatttctttcaaatccaaagagcgcttagtcagaagaatggcaatggtggaagccgttcaaaaggctcggggagaaattcgagtggaatttgtcttggtgcttgtccattttgtcgatcacgaattatgcttcgacagattgggcaattgttgtttttatcaagccttaatcacagctaatggatcatattttattaagattttgtataatgaaaaaataataaaatttaaagcttcatatttaattttttaa

SEQ ID NO: 73806 - DNA, 653 bp, Heterodera glycines
atgcattcaattgtagtcatttttgcattaataatcacggtgcaaagtcaatgtatgtgggatggatataagtattaaaaaatagttgatcaagcatttttaattttttttatatgtgccagatattttttgttaattttaaattttgaaatttctactattttgttgcaaattttttgaaaacaaggactaaaattgaatcggcccccatattttctaattttttttcttaataaatttttttataaatgattatttaaaggttcaccaccaaatgaaagaagcaaaaacgaaagtccaagcaatgaaaagcatcatcaaaatgcttcacagtcaaaccaaaacgaaggcggtgtgagtcattcattggagaaaaattgtccaatttgtcttgatgagtttgaggaaagcgacgggcggcaaaatcaaaagaatgagccaataaaatgtggcgtaagttaagcacagattggcatacaaaagaaaacaaatcccaattttttagcatgtatttcataagcaatgcttggacaaatggtaattatgggtagaattaaaaattataaaaccaaattcttgcgtaaaagtcactcaaaattaaatatttgtacaaccaatgcacttgcacattcaatgaaacatcaaaaaataaa

SEQ ID NO: 73807 - DNA, 405 bp, Heterodera glycines
atgagttgtgaagtaaatgaaagcaatgagaaggattataatccagcagatttatcatttgcttatttatgtgcatattttattctgaaactcgaacaaaacgaagacattttgctgaaggttgagagggtagccaaagaacaatggatggaagcaagcttgtatccagcaaacaaaaaaaaaagccgagccaaagtccaggcggaagaggacgaaaaacgatggggaaagagaacggatgaggcgaaaaaagcactagaggataaaatggccgagattttggccaaagcgaaagaagaggacgagagagtggcgaaagagaaagaagagacgacaaagaaggcgaacgagcgagcagttgtgtacccggggagggaatgcccggatcgccgctcggtcgattga

SEQ ID NO: 73808 - DNA, 873 bp, Heterodera glycines
atggaactcccccatttacatgcctggcgtttactgtttacatgccaaagtgtgcgagtaaaagaacaaaaataaatagaccaatgatggcagaatgaccaaaaaataatttatccatttttcaattttcaatttttaaatctaaagatattttcaaaatgaatttcatttattttacaattaaaataatttatacataacgcttatcagtggaaaacccttacataaatccccaataatttacgtgatggatttagtaaaatgtttcattgatgtatcgtaagctaaaagtcatcctccttcaaaaacgaataaacaaattcaaaatgcgcctgcctctaaagatacaaatcaaaagctttttgatgcaaaatcttaaccattggaccctccaaataaactcaataatttttcaaactttggactaaaacgtccagccctggttctaaagtaatttacattgtacaaaaacttgcagaggaccgttttttctccttaacattgacgcacgatgaaagaatttattttcgtataaacaaaactaatcacaaaaatagtttctttgttctcagctgggatattcattctttggctgaaagtgcgtcgttggaaatgggccacatttctttcaaatccaaagagcgcttagtcagaagaatggcaatggtggaagccgttcaaaaggctcggggagaaattcgagtggaatttgtcttggtgcttgtccattttgtcgatcacgaattatgcttcgacagattgggcaattgttgtttttatcaagccttaatcacagctaatggatcatattttattaagattttgtataatgaaaaaataataaaatttaaagcttcatatttaattttttaa

SEQ ID NO: 73809 - DNA, 1053 bp, Heterodera glycines
atggaggttgggtaaatttctactttaattatttaaagtaaattattatattaatttattaaataaatttctactctattaaatagaattctattttttattaaataaatttctactttaattaagtaaattttttcctttttttaaagtaaattattgatttaatttaaataaatgaaaagattttctgaaggcttttcaaaaaaatttttttgcctacaaatttttgttcaactaaaatttgaaattaaataataatatgtaaatatttttttttactaaaacttgaaagaatgaaaaaataaataaaatttcaaaaaaaaaatataattcattttcatttttggctatctgagatttcttgagttcggcaccaaaattttccagataaaatgttgggggtcggcattccataattgcttccattagggttaagctccaacccctcggggtagaaattctcggggatcaattggggtcagggagcgtaaaattgtcggtgatccggggaccctgatcggaaagaaaatgcccaaaattttatttcgactaaaaattttcgcttttttttacagccctatttcgggttcggctcaccgtcagccacacccgtgctgcatcatcacaacaattgcaccaccggcaccatcggggccggcaattttccctcaaatacgccctccacttcatcggactcggccgccggcacaattgggcctgtagaacaacaacacctccaattacagtaccaacaacaaaacggtggcggcggctgcagcggtgtacggtcattgagcagacatcgactggtcatccgggacccatttgacgacgactgtaacaacaacaacaacaacaacttcgtcgaggacgagcagtacagcaacggcaacggttgcctgttgaacggcggcgcccattttggcatgccaccctcatcttcggcatcatcatctgcctcatcatggttttccaacaacatgatgtcatcatcggcggcggcacaacagtgccgaccatctgctgcatccgcaccaccatcattgatggatg

SEQ ID NO: 73810 - DNA, 1174 bp, Heterodera glycines
atgacaactgctgctatcttccagcaactgttccgcaagtgcatcataatatctgacacaataagtcaggtataattatacaatgagacattaatttttaatttattaattaatagtctattgaacagagattgaatgtaataaattatgaaaataaatactcatttggtgggttctattcggggatacgattttacatggaaatccaggcatttggccgggttttgttgggccgtgccaggcattttgccggatttgttggcccgtgtcaggcattttgccggatttgtttgtccgtgccaggcattttgccggatttttgggccgtgccaggcattttgccggatttgttggcccgtgtcaggcattttgccggatttgtttgtccgtgccaggcattttgccggatttttgggcgcgtgccaggcatttgccgaattttgggtctgcatttgcccggttttgaggattcatgccaggaattttccctgatttgggctcgccatgtgatccaaaaatacgtaaaattggcaattttttggtctacaatctgttaattaatagagccagacgaagcctattaataccgtaggacgccatttttttgaaaaacggctaaaaattaaaccgaataggcctagtccttgactagtccagtttttcttttttcaaaaattctgattgcagtacacagtgcatgaacgccctgaatttgttgcggcttgggattttgttggcacaagtgctgtgttcgtggcaccaccaccaccagcagcagtgccacctccgcttgcttgcttcttcaatgcgggcaaaacgtcgacagaaaaattgcgggcacctgatgaagaaataaaataaaaatttgaaaagacattttatgttaaaacaaatattaattcatttaattaagaatagttaatttaggataaaatgccaaaaatataagtaaaaattttcaaaacaattctcgtaccttctctcttgctttaaaaatagtaaatgccgaaaaatgtacaaaaattaaaatttaggaaaaataggcgttaaaatctttgtgccctaaaaattggtgagtttctgatcatttttaggatttttatgagtggtctaaatttgcaaaaaaaaaaaaatattaaaaatgtagaaaattaaaaatatttaaattaataaa

SEQ ID NO: 73811 - DNA, 1664 bp, Heterodera glycines
atgaaaaatccgcaaaattggcttcatttttctatgcaaactcctcaacgcaaagcttaagcgagctgagcacttccaccacacttttgtatcggtctggtgagaaaaaaaggggtaagttttttttgttttgttttatggcttaaatttatttaaaatttttgaaaattttttacattttttttttttgcaaattttgatcacgcataaaacgtctaaatgtgaccggaagctcatcaaattttactgggatatttgcaacacacaaaaatttttatttcctgtaatttgctgtgtttattaatttaaatatttttaattttctacatttttaatatttttttttttttgcaaatttagaccactcataaaaatcctaaaaatgatcagaaactcaccaatttttagggcacaaagattttaacgcctatttttcctaaattttaatttttgtacatttttcggcatttactatttttaaagcaagagagaaggtacgagaattgttttgaaaatttttacttatatttttggcattttatcctaaattaactattcttaattaaatgaattaatatttgttttaacataaaatgtcttttcaaatttttattttatttcttcatcaggtgcccgcaatttttctgtcgacgttttgcccgcattgaagaagcaagcaagcggaggtggcactgctgctggtggtggtggtgccacgaacacagcacttgtgccaacaaaatcccaagccgcaacaaattcagggcgttcatgcactgtgtactgcaatcagaatttttgaaaaaagaaaaactggactagtcaaggactaggcctattcggtttaatttttagccgtttttcaaaaaaatggcgtcctacggtattaataggcttcgtctggctctattaattaacagattgtagaccaaaaaattgccaattttacgtatttttggatcacatggcgagcccaaatcagggaaaattcctggcatgaatcctcaaaaccgggcaaatgcagacccaaaattcggcaaatgcctggcacgcgcccaaaaatccggcaaaatgcctggcacggacaaacaaatccggcaaaatgcctgacacgggccaacaaatccggcaaaatgcctggcacggcccaaaaatccggcaaaatgcctggcacggacaaacaaatccggcaaaatgcctgacacgggccaacaaatccggcaaaatgcctggcacggcccaacaaaacccggccaaatgcctggatttccatgtaaaatcgtatccccgaatagaacccaccaaatgagtatttattttcataatttattacattcaatctctgttcaatagactattaattaataaattaaaaattaatgtctcattgtataattatacctgacttattgtgtcagatattatgatgcacttgcggaacagttgctggaagatagcagcagttgtcatccggaaccacaattggatgtgagggtgaaattttgcaaaattttatggaaaattgaaaattatttcacaaattataaaaaataaaaattattttttaattttaaatgaaaattaattttcagaacgatggtggtaccaaatgtgtgctgaatcctgtcttttgtactgacgaagaggagggcggcaacacgaag

SEQ ID NO: 73812 - DNA, 856 bp, Heterodera glycines
atgtacaacaaaatgcgaacggcggaatggacacgacaacggggacaagtgcactgtttgccaaaacaggtgggaaaatgaaatgcaattaattaagcaattgcgacagcgaaaaacggagcgacggaaatgccaaaaatactaaaatattacactgaaaaaagcaattaaataataaataataaaagaatttgtttttttaagtggattcattgcacaactttctctctccaaatgttgttctgctgccagtcgctttccactcattggccgatgagcagcacattcaagtgggaagcaaaagaaatgatcaaaaaacattcattggcatttaaatttccatgtccaattcccctcctccctctttcagcttctcggcatgccccaaacggtgattcccatcgcaattcatcccgaaatgcaaaagcaattcgctgtccgtccgctgctcatcgaccaaacaatggcggtgagtcatccgcagcaaaaacagaacgggcgacacagcggtggcggcacagtgccaaaacacattggcatcggtcggctgccgacggaggacaatggcaccaccagcggaggcaatccgccgcatcagttggacgacgcggacgataatcactaccaattccaattgccgctcgcttttcggtcatcgctggtccatccaacgacgacaacggcacaaaatgttcagcaccatcaattacttcagcagtcgcaactcaacgccaccattccctccatggaatggtcggtaattggcactaattgcgtaattaaaattaaattttatttttttaagtgtttccgtcattcatcccaaaagggagcaacagttctccgcttctgttga

SEQ ID NO: 73813 - DNA, 1227 bp, Heterodera glycines
gccaccaccctcaatgtggcgtccaattcgcacaaccaatcgctgctcaccatcatgatgagcaacaattttgtggagctgaaaggggccgtgttcaagaagttcggcaagcccaatctgttccaaatgtcgtgcagcgatgtgcgcgaacgtttcctctcaatcattttgttggttgttgttgtgctgcgcaacatgacggtcggtggtttctgcttttcgtaccaaaaaattcattagacgaaaaaaaagaaaagcaatttttaaaaaatttgtggatgagtaaaaatttaatgcaaaaagtgaaaaaaaaaatttttttttttctctgaaattgattcggcgaaatattttaggcagtcaattggaaattggaacatttgaatgacatgacaccggatttggtaataatattattatgtttttgtgtaacttttaaatatagaggggatatgtggcagtgacatttttaccaaatatcgccgaattattctatttttgtcaataattttttgccgtgattttttttctacatcaataaaaaaaattgaggcgcgggagagtatttaaaaaaaaaattttttttacaaattccccaaataaattgtcagatgatgatcatctttgccgaacacattgttgattggttgaagcatgcgttcatcaccaaattcaatgagatcagtgcatttgtttaccggggtttgtttttatttttacttttttttccccctaaatttaaaaaattcgaccctcttttaaattaagaatacacaattacgattgcttatgatgtgctgagaacccatgaaacggactcattttccgacttctctgaccaagtgagttcaactacatttttgccatattttttgttcttcaccagtacaacaaataggaattaaaatccggatttgataggatttgctaccgaaattaatattttccaaaaaaaaaaaatttatgctgctctcaaaattcaaacaaatctgaaaaatcaagacgcttgtaaatacactgctaaaatccgtggtatatattgtaaatttaatttccacaactcttttaggtgagccgacgaatgggatttgtgccgattccggtaattgtcttctttttttcgttttttataattcttccccctttcattttaggtcgtcattcttctcattagggtcatttgtcagtcggtcgactttgagaatcctctttcagttgccgcattgg

SEQ ID NO: 73814 - DNA, 2094 bp, Heterodera glycines
atggacggtcgtggtcagcgacaacgtcggcccatctgtcaatggcgccgggtgtgtcgtgcgtgtggacgtatcgcctacgtggccacacatcagtgcccacatgaccagccagccgacgatggaatctgtcggcgctgcaatgggccccacaccgtcgatgagccttgctacatccagcccattgacgacggctcagttcgacaacgtgcatcgattgctgttgacaacgacgattctgacgacgacgaggacgatgaagaattgccgcttcgtctgtgcttctttgacgctgagacgtcacaggatacgccattacagctgaacaaccgcaccgtccagaagcacgtgccgctgctcatcgtcgccgaagtcatctgcgaacgttgtctgcaggctggcatcagcgtgaacgatggccttggaagacgggctcctggctgcgtctgcatgacaggaatggtgagaggtcaactgtttcgccagtggtcttcgccaccctttgccaatgcaccgggagacaacagcgcttcgccagttggagcaccagcattcaaccagcgccgcttcttcttccattcgtttgacaacgacggcaacgacccagtggaccaatttttggattttttgctgcagcatggcccaaagaaggcacacacggtgtgcatcgcccacaacggtggaaagtacgatttccatctcgtacttgaggcactacaccgccgaaaccgtccacccaagcatctgtgcaccaccggattgagatctactcgatgcgtctgtccgggcgtaaccaaagacgaatcaccttcaaggattccatcaactactttttttgtgccttggacgcgttggtgaagagcttccaagtgccggaccatctggccactgtgaagcccttcttcccgtatctctacattcgacgacaacatctgtcgcagcgcctcaacggtctaccggctcaagagttctacgcaccggacacgatgaaggcagagaaacgggcgcaatttcaccgttggcacgccgacaacaacggcaatggattccagctacgcgagcagctcataatgtactgcgtcaacgacgtggccattttgagggagtcggtcatccgattccgccaactcatcgccgacaacactcaaggcctcgacccattcctccacgcgtcaacagctgctggtcttgcgctggcaacttttcgccgctgtttcctgcccgccaatcgtctggttcactcacccgagggcggatacctgcgcggacgccgtgcttcggcagaatcgcagcgctacatccgcttcttcgagctggagcacccggaggcgcaagtgcaatgcgccagctggtcggtcggagaggcgcacattgatgacagcggctaccgcgtggacggactttggcgacgagaagcgcctctccgtcccctggccattgaatggcttggatgctattttcacggtaaacggatttttctcgtatacaaaatatcttaaaatttaggctgtcccgtgtgctttcccgatcggcagcaacaattggcggcagggcggacagcggaagatctgtacgaacggacggagcggcgcctctttgagctagagaatgaccacggctgcgaaatccacaaggtgtgggcctgccagtggacggagcggctccgtcacgacccggacctgaaacgccgttacgatgccgtgttcgtcccttgcccgctggacccgcgcaacgacgcactgaggggagggcgcactgaaccgttcaagctgcaccacgtgtgcagtgacgacgaggagatattgtgcattgacattgtcagcctctacccatacgtgatggtcggttttttcttttaaaacatgcgcatattcatgatgaaaagctgaaagccaatcgcttccctgtgggcaacccacgggtcctgacgcgcgaggtgctgctccgtccaccaacgacacccctcccgtggaatgcaccggaaaggttctgatgttatgatttattgtgattttatttatttttgtaatatttcctttaattaaatatttattcattatgtttaaatttgtacaaaatagtgtgaccaataaa

SEQ ID NO: 73815 - DNA, 441 bp, Heterodera glycines
atgaggcttttgaaaattttcatctgcgagccctgggtaagtcccacaacttttgttcgtacacatgaacaaaaatgttaattttctactattcagaacgcgttgaaccgccaacaaaaaaatgatttcaattacatgaaattagcttccctaatgaccccgccgtattcacatcgccaagctcttccatcttgtgaacaatggaaatttattttgaaaaatgagaaacactaccaacaaaaaatgtatgccaaacataaaaacaaaaaatgatatctgataaaaaaaaaattgtgtcaattttaagcgtatttaactaaggaagtgatttccgcatcaaaatccatctttcggcgtccattaagtccttccaactcgatgatgacaaacacagcctgacaaattggcattttgttagaatcggataaatcccttccaaaa

SEQ ID NO: 73816 - DNA, 370 bp, Heterodera glycines
atggatgaagaaaagctgaaaaacgaagtggccaattgcatccgctccttccctgactttcctacaaaagatgttctgtttaggtgggcggtaattttgaaaaaaataaatttggatatttcaagggacatttttccattgttttcaaatccgtcgctgatccgatcaatctgtgcccacattgtgacactttatcgacaaaaaattgatgtggttgtggcgctagaagcccgaggtccgtcttacttgggaagggggtgaggagggctaattttttttgaaaattccaggatttttgtttggcccaattgtggcgcttgagatggacgtgccatttgttcctgttcgcaagcgtggaaaactgcccggg

SEQ ID NO: 73817 - DNA, 966 bp, Heterodera glycines
atgtccgacattgctggtgcttccagcagcgctttttctgccgatgcttcttcaacaaagaaaaagggcgattttttgtttctcgctgagttgggcgaaggtgagctagctgaactgctttactagggatgccatcgtcaaaactcaaaaatccggcatacaagttcgaaagttttttttttttcaaaaacggcaactgaaaaaaatcgggaccgacccgcaaaacacggacaaatgccgtactttttgaggcaaaatggcattcctgctggctgcttgcttgatttcctcgttggcctctactgagggcaaagaaatttttcatgtaaaggctgacaaaacccgaaaattttgagaaaaaggcaaaaatcgataaaaatttttgtttttcccattttaaggctcctattcaaccgtttatttggcttcagagcgccaaaccagtcgaaaatttgcagtgaaaatgtgtctcaagaagaaaatcatcaaagaaaaaaaggtgagatggcgcacttaatcaagggctgcaaagtttataaaaataagccattttcgcgattgtgtcttttttcagggtataaaaaagatttttcaaaaaacagagggctgaatttggggtatctaacttactttcaataatttcatattaaaaatccataattctttatatctgggcgcctgtttttttagattttatggaaatttaaacattttttcaacgccttaggcccaccttttaggtgcagcaaattttccgtgaacgtgacattctccgacttttgtccacgcccgcaaatgcgtgcccatttgttgtccatttgttttgcacatttcaagacgatgagtcgctgttttttgtgctttcctatgcgcccaaaaaggaccttatggcccggctgaaaaagctccaacggttcagcgttggccagtgccaatttgcgatggccgaacttttcttggcactcg

SEQ ID NO: 73818 - DNA, 1423 bp, Heterodera glycines
  unsure (1)..(1423): unsure at all n locations
agcacatccatgcnctggacgtcatccaccgtgatgtaaagccggaaaacattttgttgcgcgaggacgggcacattttgttgtcggactttggctgtgccaagcaaatcattgcaaagcgggaaaatgtggcggaggaaaatggtgacaaaaccgacggacagagaggagatgatggccagaaagcagagaaaagtgctgacagcaaaagcagcaaaaaacgggaggaggaggaggcgacaaagctggcactgagacggcggtgctcatttgttggcagtggcgcctatgtgagcccggaggtccagttttgttcaggcatttttttgatagacatgggcaccagcagggatttaattacatcgaacgcccacaaatggttttttttcggaaatctgaaattcgcgtgccaaaaaatgtagtcgcccaaaaaaagtggcacaccaaactgttcaaaatcgggattccgttacatttctgctgggtacaatcggcggatgaccaaaacaacagggcgccagttatgcttttttggattaccggaaatttttaatttttaggttctgaatggcaaggaagtgacgggtgcatgtgattggtggtgggtttgtttatgaaaattggaaattaacgcattatgctgcattttttatttaccgttttaattgagccctcggggggttttttttaacttcccccctcccccccccccccccccagtatggattctttgttggagttggagaaagctacataattgagtaggcagcaggcctatttctccaatttttcaatccctcatttttcctattgaaagaaactactgtttttctgggtcacctccaacccgcccacccatgggaaatttttttgaatttccaaaccatgaatttttcaaggaaaaccctatccaaagaaattttctacttaaatgttttttcttttttggaaaattcattggtaaaattttcacgcgagaaacggaggcgggaaagggtggaaaatcaaagtattgtagaatgcctgctgttttcttttttcttctcagtggagggcggctttattaggggacaaatcaagcactttctttcgatcataaaaaacacacattctctcccgcagggcatttggcgtcactttgttccaactgttggtcggccggctcccattctcggccgacagtgagtatttgctgttccgacaagtgctcgcgctgtcctacaaattcccggacaatttcccatgtgccgcggcacgccaactcgtccaagcattgctagtgcttgagcctacgcaacggattggtgctgcggagatgggcgaacccacgacaatgcggtaccatcccttttttgacggcactgtttgggaaggcattgagaagcgcaaatcgccactttttgattcggcagagaatggctga

SEQ ID NO: 73819 - DNA, 990 bp, Heterodera glycines
atgccaattccgccggttgtgctccgtgagtttgtgccgggcactccgttgggcgattgggtcgtttcaacgccaacggcaacacgaacattcattgaccggtgaagaaaaagaaatgaggcgggccgggttgagccacaagccaaaaataagaaaaaaatccgagaattttttttttttttggaaattttaaaattgcttcgtctttcacaaataagtttttttcttattttactctttagtagtgtggtttcttttttatttaaaaaaaggatagttggggaggtttcgttaaccctccccccccctttttttaaattcgatgcttttcaaatttatttttacaaaaaataactaaaaaaaatttttaaaagttttaaaagttttttgatattttcataaaatttttaaagattttttgaaaatgaagcctgattgtgagaaaaaccgattcttgaaaaattcatgtttttacgggatttataccgtaatataggaatactacaaaaaaaaatttataccgtatactaatttgcatcactatctctctcttcacagagtggacactttctgtgaacaaattggcacaatgttgggcacatttcatgccgcctgcgaccggcacaatttttgtccgccagtgtttcgccaatatgcgccaattatggcgctggagcattggcattttcattggcgcgagtttgaattgcaaaaacggacggacaaattggaggcaaaaatggccaaacagtgtgccgaagtgtttgaacagtttgagcagaaagtgttggggaggagaagcgaatttgagcaaggcataagcccaaaaagagagggcagaaaaatggacatttcatatttaaatacttatatcgtattctaaaattacctatatcgtattctaaaatagaaaccgattccttacggtattgtagggagggggcgcggtggagggatggaattcggcacaattttttttcactaaataaa

SEQ ID NO: 73820 - DNA, 1299 bp, Heterodera glycines
  unsure (1)..(1299): unsure at all n locations
atgtactcaaaatatttttttgaaaattttatgaaatttttgacaatttttgttttcattggcattcactcgtcaaccgttgctgaagttattcatcagcttcctgaagacaatatttgtgccaagttcacagttcaatttttggaggaattttatcagtaaaattaattttaataatttaaaatctttttaattattattttttatattttaaataaaatttatttataaatttctttatttagacaaaattcgtcttctccaatgttcggatggattacagctgaaggcgatgtgacacttggccaacagaatggcacccattttggcattaaatgtttggcattggcactgtccgattgggacttcgtcgtcgaccgtgcatgcttaatgcaaacaattttgaattgctttaattattattattaattaattaactaactaattttcacaaactttcaaagatagatataatttgaatattgtagttaactaaattaattttaattccacaccttaaatattcaaccaatcatttaatttttatgccattattttttcataaaaaaattgggttaattgtgaggcttataattgttttcttgtaaaagaaaattgtgttaattatgaggcttaattaacctaactaactcaaattaggccattaaggattttcaatttttattgaaattttactctanataattttttattaattatttaaaaaacaatattggaaacatttttaggacattggcaccaccaaattcccatcggcgttttattgcaagcccatggcatcaacaaaatgatcaattgaacaatggcacaaatcaaacagctgatcaaaatgtcagctacattgtaccattgaaaagtgctgaagtgcgcagtccgcaactgatcagtgtacggaggcaaatataatataaaaaatgatttggaatacgtaatacggcatggggactgaattggccagactctgacagcaaaaaacgcaaagatttttctagcggttgagaaccaagaaaatatattttggagacatcattaattgttggaaattttcttaaaattttggaaactctcctcttaatattatttattggaaattctgcaacaaatattgccatatttctcgaattttttcaaattctggcaaaaacatgagaacttcttggcttggccatttttaattatatgtctttaaaagaattgagcttattaaccccaatttatgaaaattcttttcttggcattacaataattcttaaatggcctttttaatatttttgccaa

SEQ ID NO: 73821 - DNA, 2259 bp, Heterodera glycines
gaaagagtactttggctgatcgctttctgcagttaaccaacgtgatttctaccgaatctgatgcccaatacctcgacaaacttgaggtcgagcgcgaaagagggatcaccgtaagtaaatgaacggctaatttatagaggtggccactcgaataaaaagtcaaaatcaatttcaaaattcacatttatgttcgaatctacatcgaaaacattgagagatttttttagatcaaagctcaaacttgctccatgttccataaggtaaagaaagatatgcgtatttcatttttatattttatttacatttaaggattttatgctcaatttggtgtaagttgaagactgcttgccttgccttttgtcgtctaatcagccattcattcggatcgcggtcataatgggtttttaagcgaaccaattgggtaaatggttatcatttgattggcttatgaacaactttagaaattacaattactacctaattattagtattagcaaatcagtaaagaaaattaatgaatggatggcagttggatgataaaaattatcggacactttttttcacatttaagcgatactcctggccatgttgactttgggtcggttagtactttgattttcatttatttttgtttttttagcttcgaggttaaacgttctctcataacctgcgacggagcaattttgctagttgctgctaatgaagtgacgaaaataaaacattttctttaattttacaattttagggtatccaagcgcagacccttttcaattttcattcagcctttgagaataatttgagcatcattccggtcatcaataaaatagacatgaaggcaaatattgccaaagttgaggaagaattacaacaatcgtttgggtttcatgccgacgaaatttttaaagtgtctgcaaagacgggaagaaatgtaccgaaacttttggaggcaattattcagaggtagaatgattgtaagagaaaattgtagtaataattatctgaacaggataccaccgccacaagttaaccaagaaggaccgtgccaagcccatgtttttgattcttggtaatgttcagataaaatacattacagtgtttttttcttttttaattatttagtttcgatcacttcaaaggtgctcttcttttcgtcgtggtcaaacaaggcattttgactaaacatttgcccattcgattcttcagtagcccagaaaaagaatacgtcgtgtcagagattggcattttgcatcccgagacaacgccgacgaacgtgaactatcttttgggaaagagctgttattcaaatcgagtttccttttttaggaactttaccctggtcaaatgggctatatttattgcggaataaaatcttcgagggatgttttggtgggcgacacacttttccacgcgactgaacgtattgaaactgtgaaaccatatgtggaaattggcaatgttaaacccacggtttattctggacttttccccatggaaacaacggaatacgagcgactcagagtaaaaaagcgaagacatagcctattaataaaataataataattaatattaagaatgcagttgaaagtctccaattgaatgacccttcggtgaatcttcagatggactcgagtgtggtttttggccagggatggcgggtcggatttgtcggcaatttgcacatggaagtgttcggacaacgcttgggtaatattcgttgtgccttaaccaagtgagaaaatatttcaaccgcagagcaggaacatggcgaattggccgttttcacctcgccaagtgtcaaatatttggcaggttggtatttaacgatgcagaaacacactgacaaaggtccttcagatatcgttgacaacgaaggcattcggaaacggcgacacaaaggacaatcgcaaattgccatttgcaagccatccgattttccggaagtgccaacggatgtgctaaggtttaggcatccttccaaattgacattgaaggagtatttattgttggtaatatatttttccactttgagatttttggaaccaatgtatttggtcagtattgtgacacctgccgaatatttctcgaacattgaaagactttgccaaaatgcccgcggggaagtgcttgagacgacttacatagacgaaaagcgaatgattctgaggtggcggttgccgttggtggaaattatcgtcgatttttttgacaaactcaaacttacaactagcggatttgcttcgtttgatcaaaaggatgacg

SEQ ID NO: 73822 - DNA, 1377 bp, Heterodera glycines
  unsure (1)..(1377): unsure at all n locations
atgtcagatgccaatgagtttggatttggacgacgacgaagaggaggaggcggaggacgaagaaacggctgagggcgaagcgcacccccacaggngcaaagaacgacgaaacgatcatcgaaaaggcactgactgcggcaccggaaagggacctggtcgacttggccggcattttgggtgatcgaccatcacaaattaaaacaaatttggcattccctaatttatttttaggaatgcataatgtgctcaaccaacctcaatattacaacgcgctgaagggcaaaggacagaatgaggagaccggcatttccttcagcggagtgatcaaagcgtttcagcctcgggtggttccggacgaaccggacaacgagacggacgtggaggagtgcaccaggcgagcgaatgctgcatcattttatgacacttaattatagtaattatagattgggtcgaccccgggacttactggcgaataattcagtcccaaaaatacaaaaaaaaaacataacataaaacggatgtgttcaggaggttggagagtggcgacgtcaaattggaggaggtcaacctaaacaacctgaaaagagtgtcaaaggaacgcattcggtcgatgctccgagcggcgtgcaaatccaaacacctgaagaagctgtgcatggccaacacggccatctccgaccaggaggcacgggtaatgaataggccggggagcagttcgttccccctccttttgaaaaatcttcggctaatttttgaaagaatcgctcagtttctctaacttttaaattttccgggggaatatgactaattattgaattattattaataaaaatgattttgtgcccaatagaaattctctttttctgcgcatattacgaaatttgctgggcttttgggtgtaatttgtggaacaaaaatggagaatttaacttaaagttaagccattagtcgagcttatcgagcacagcgactcactgaaagtgctgaacatcgagtcaaatttcatcagtcccgaaatgatcgccaaattgctcagggcgacgctgcaaacgcaatcattggtggaattccacgccgaaaatcaggcaattcacaacaaataatgcccccccccctccttttatactgattattgcatttcagaggcaatccgtgctgggcaatcaaatcgaaatggttttttgttccccaatttttgatcattccctccctcccccatacgtttaggacattatgctcagcgtggaggacaacgactcgcttctccgtgtcggtgtttcgctgcaatcgatggaggcgcggaaccgcgtgggggaggcgttggagaggaattacgagagacgtaagtcaaataacacagaaaaacagatgcagaag

SEQ ID NO: 73823 - DNA, 971 bp, Heterodera glycines
ttattacgcggaagaaaaaacgctggcggccccaaagcaaccattggccaaaagggcgggcggcgtcggcggattgaccagcggtgccggaaattgcgggggagagaaatattacgggagggacctgagcaattacgacgacaaagacattgagggattgctgtccaatttgaacacggacgaattggaggagttgaacaacgactttgacccggacgtaggaaaaagaaacggagggatttaacaaattgagaaagtcacctcatttttgcgggaggcaaaaatgcctttgccctcccccagtgggcttgtttaaatttatttgttttcaaaactttttgtcataaaaaatactgcagtttacgcatccaattaaggaacatcctcagtttcaaaggccatcattttttttcttatttggtcaatgccgacatttttggtatcaaacgaaaatttgaagttttctttgaacaactaaattctgaactaaatgcaataaacaaaaaattgttgttgaataaaattcgaaaaactgaatttcttgttttatcattataattgttttttttaatgtcagtatttgcttttttcttttttttaattcctgacaatgagactttaagctatcgtttgatatcaaaaatgtagttcattggctaagtaagaaaaaagtcattgcttagaagaattgaccagaattgacaacattcgtaatacggtcaccacgaaaaccttcagattggtcttcacggatagacgacataattttcaaaaaatttatttttattgttttcttggctctaattcaaatttaaattcagaattcgctgctcccaccctcccaacggtgtcgcaaccaaacggacaaaaagccgaccggcccctttaaacgcgagaaactgctccaatacttggaggagaaggccaaaagtgaaaaggactgggaggaggcagttccattcgccccgggc

SEQ ID NO: 73824 - DNA, 1853 bp, Heterodera glycines
atgctgctgttggcatcatggcttttcctcctccccatttttctcattgttcagccggcgccgaatgtttcggcgtggacaaccgtcgcgccaacggtggcactttttgttttttgttttggcatggcactcgtatatggcacagcataatacagactgacacagacaatgacaatgcccttttattagcgtggcaaagggttgaatttttaaaaaatttaatcgattttttgttgggtggcaaaaaagggtaaaaaaattttatagggtggaaaatgaaataaattgagcctagcaatttccgagggttaaatttttttataaggtgcaaaaaatgaaatatttgggctgatgtttctttgcctctcttctaaaaaacttaaaattatattttaaaaatatttttgaccccgacaattttttttaaattcccctcaggggattattattatttatttgtttttaaatatttgatttgtttgagaattgtcgggttttccgtccccttaaaaatgatccaccaagagagtttactgtttttttttcaattttgaggatttaaatggatttaaaattttttttattttgcgaattttcggttttttggagggctaagggtcaattttttttgtttttttgaaaatttttatgccttttcagcccaacatttactcgacggacaaggtggcggaacagaggcctgcagcggcggacactttgctgctggtgtccaccatcgacggctatatgaatgccatcgacgcgcacaccggggcccacaaatggcgcttccacgaaggtgccgtgccgtcctcggcggagggccgatttgaattggttttgatggcattatccccggctttattccaatttatgcgtctaatcaatgaccattctcagttttgaaggccataactttttccataattggccaaagcatacatttttggtatcaatcgaaagcttaaagtctctggaatttaccaatgcaagaaaagggcaaattgtgagattagaaaataattaaaaatgcgaaaacattgaaagtcattttttcaagtttattcaaaaataattttttgtcttttttattagcccccaaaatttagttattcaaaacattgaatggacgcataatagagcctcatcctctcctttggcattcgaattttggcatttttggcggggtcgaggtgatgcttttcggcacaatttgcgcagagtggcgcttattaaattgtttcgattgttgacttttaatttacaaaaaactgtgattcgtctagggccctggacggaattgggattcttcggatttttccgggatcctggtcccggctttttctaaatttccaagccttccacccaaaatttgcatttttttcctgggtttccgacaaaaaccgggacttggattcaagtgtcaagattcacattccggcaaaatagggaacccgtgcccaaattccgtatttaatcctgatccccgacttttcaaaattttggggctctagattggacatcggacgggtaaccggggttttgctttttgtctaaatttccaacccgtcaaaatatgcattttttaattttattcaaaatatttcattttttgccaccccctcggcattttttttaatttaaattttccaccccaaaattaaaaaaaacatttgcaggccccctgctgtcctcgccggtgagcatccagcgcggcttcaccttcatcccgaacccgcgggatggccaactgtatttggtggtcgaaggtcggctctccaagttgccgttcaccatcccccacttggtccgcgtgtcgccgtgccgcagcagtgacggcgttttctacgcag

SEQ ID NO: 73825 - DNA, 2236 bp, Heterodera glycines
cgaactggtgaagagggacgactccggttggtggcaaggacggctggacggacgtgagggacttttccccgcaaattatgtgaccgaagcgtgagaagattatccaacagaagggaagtgactcacaatcagctgattttgatctaaccgtgccctttattatgcaggcttttattatttcatatgactaacttttcaattcggaaaagctttctttgtcttaccttttttgactttaactttttcaaaaagacaatttctgctctaacttattttgttgcccattttacctgtgataaatctgttaactcttagctaataaattatgtttatttcgaagatgaataaatctgatctcgatcaattgtttttattttattttacagttaacggaacattccgagctgtaactaggaaaatgcatataaatgacatatcattggatagagcagggtcgacttctattgtgaatttttaattttagcggtgcattccgcctgcttcaaaagttacagggcctcaaaagtcgaaattttgtgcttgagggctcattttcaagctttttcactttacatcgatttttatccacttcataatgacagaacacatttattttaaacaaataaataattttaatgcatttttcatatttaaaaatgtatttttaaaatctttaattggttaaaaactcgtggctcgaaatggatgcactgccccccatattttctgcgaatttttcgagaaatttttcaattaactaattcctggctgaaattttctgttttttaaaaattttctggggaaaacgatacgtaggagacgagctgttcccctcacaaatttccccccgcctctgtcgccaaaaattttctcggttttagttttttaaattctattttttatgcttttgggaaacaacctgctcccgatggaacggatttcgctcctttattaattgtttttcctttgtctcctttttgatgaataattaattgtctgggtttttaggcaacgaatttggccaccccgaatggttggacttcccgcgtgagggcaacaatcaatcctaccactattgccgtcgccagtggaatttggcggatgtaagcatttttctactataggaaaatggattttaatttgctcgagactcggaaattttggggattgctaaattgacagataaatccgaagcattcggagcccagaaaaatgttgtcgcctgggcgcgatactcactccaagccgaattcctgggattattcctaagatttttagcccggtttaaattaaattttcggggttgaaggttgaatcactgtccaattccgggcccacgcctagctggcagcggcaaactgtccggcgccgaattgtcctatatacctcttcaaaaaaagttttccaggacttgacacttcgctacaagtacttgaatgcatgggatcgggcaatgaaccatctggagatggattccgaatttttgagtcatggacatgtaagttggggactaatttgcattcactctttttcggcgagttggggggggggcttggcaagttcaaaaaggtaaaaaattccccccaattaaattttttgaaattttctaaatgtatttttataggcctacgtgtcctggaaacatgatggggacaagctggtcgtgttcgaacgtgctggcctcgtgttcatcctgaacttccatccggagaaaagttttggtgattacaaaattggcgtggagatgtccggggtgtaagtcgtctaatatcaaagtttttcattggttttagaattttaaataaaaaataatgctttttcaccataaaattttaaaattgaaatttctttagcaaatcaaaattcaaaaaatgacgattttttatattttttaatagtaattatgggtgggttttgtaagtttacataaatttggcttattcgaataattaaattttttattttcaaatttttaatggatttaattaaaaggggaacattttcctatttccaaatttaaatttagctactgtttggcactgaacagtgaccagtccgaatttggtgggcacaaccggttgaagcaggaccaatgctaccacacatttgccgaggggttggcaaaatttcgaaaaaaaatttttttttttaattttttaggtacgctggacgcaaaaaccatctctgcgtttacataccgtcccgtgtggcgattgtgttgaagaagaaatagaca

SEQ ID NO: 73826 - DNA, 1676 bp, Heterodera glycines
atgcgcattttactcataatatggcgagaatcattcagcgagtcgcattatttattgcatagaaaattggctgaactgctcgcatccgatgtacaaaatgtggaaaaagtggtaattcaaaatttaaaatttttaataatttataaatattaaatttaaaaaatataaaatattaaaatgagaatagcccatttcagccaatttcttcatttcgcaatttattattattatttttgcatttattttagcaataataataatatgcctttttccattaattaagttggtactcgcggtgaattcaaccagtgactttcagcccacagaagaacctgctgaatatgaaggacgacttttagtgtggacgaggacggtacttaaaaggtacaaaaatgcaccataaaatattatgtaaatttttaattacgcagcaaaagtcattttatattaatatattttggcttgatttttaatattagatcatattttttatttttatcgagcgaaattactttcaccatctactgttcttaccttaaacagctgctgaaaattaattattatggccaccaaataaataaaaatattcgaaataattattttaaaaattaaatttttggccgatcattttatttaaagctaacctttttaaatggtactttaatatatttatttagtgaacgcaatactacggtatacacttaattacatttaggccagaacacggtcagcaggtgtccatttgggaacaggacattactgagttttttttgccaaatgccaacaaagcggactcttttcaacttggtaaggaagaagaaagaataattgataaaatcttttttttttttgctaaggaaactattaaaattaaacattttataacttttagaggaaatgggcgaagaggacaaaaataaatttttactcttttgcgtaaatttctaatttaattaagtttgctaattttaccgaaaggtactgcccgggaaaattattgaaattacataacatatttgttaaaaaagagttcatttttcgtaaaacaaataaacgattcggttatgaggtgccaggaggaaaattgagatttttttaattctgataaatttgaattttaaattattatttttttgcagattttttgacgaattattatggcatcatccagcaattgtttggcttccaattcaatgttggcattatggaaacatcatcatgggacttttcgttgagcatttttcgcgcattgccaacaatcaaaaaatttgccatctcacaaagcgcaactccaacaatatcgcaatggcacaatttgggttatgaaaaaatagttggcgcaatgccaggtgagacatttggcgttttgtaaattccacggtgcttcgtcatttcgcgacaagtgcaaaaagggcacttcgcgacagtgcaaatttaaccgaaagagaccgggcctcatcagtacggtgtctctttgggttaaataatttaaattaattattatgtgtgtttcggccctaaaccgtatacacacaaagccacagcaatcaagcaaagcaaataaattttattaagcaaaataaatataattttatttatattggtttatttatttatttatttaagttaaaattttttaaactaattttatttgaatatgtttatcattgaataaa

SEQ ID NO: 73827 - DNA, 861 bp, Heterodera glycines
gaactggagaagaaaatgaaaatcaaggtggtcaacaacaaggaggaggaggaaccaataacggacgtggcaacaatcgtggcaatgaaaatggtggccaaaatggcaatggtcagcagcaacagcaaccgcccgccggcggtgccacctgcacgaacagggccaccggctgtgacgtcgcctattgtggcaacacagactttgcccgggcacattgtgccggcacatgcagaagctttttgaacgagtgcagtcatttggcttcggtgccagacccaagtgggtgctgaaatattaagcatagaaataatttatcattggaaaacgaaaattgtattggcatcgaattttttggtcagttttctagattttgggacaatagttgaaaaggatatattttaagtggtgccggcaggctttatgagggaaaaacattgccaatattttaggaatgtaaaataataataataataaaaaaattcaggcgttgcttgtggcaacccggcaggcgattgtgccatgaacccaaacgtatgcagtgtaagtttacagcatgggtttttttaatgttttttacaaattacataatgtattacatatgaatttaggacgatgttttggcagtgtgtggttgtcctagaaaatgtggtcgttgttctgatcacacaacatacattatgcaaggcaaatgcagaaatgtgctgtgaatgtactgtagcagatcgacgagaggaaatgcattaatggatggcagatgcatactgtagtggcgtttttgaatttgttttacatacaaaagcagccattcattgtgtcaaatttttaaatttttacatacataaaattacaaaggatgaatga

SEQ ID NO: 73828 - DNA, 5044 bp, Heterodera glycines
atggccgttgtcaccaaactgtgcagcaaaattgagccgaccgacgccaacattggcgagtgcagcagaaaccttggtgatttgcttgaacatgacgatgagagagtggcagagtgtgcactgcgatgttttgccgcaatgaccgatcgtttcgtgcgacgtcaaatggacccaatggcgttggcctctcccagcagattggtggcgcatctcttcgaccttattggttcatcttcgacagcgcacgaaaatgctcccactgaattatcttcgaatggggaaaactgcagaattcggaagagaagttccgctttcatctctatggttttctcactctttgtcaatctgtgcaaaagttctttcgccctcactgaagaaattctttcgtgagtttccaatttatttttcttgcatttttaattctcttttagctcgtccaaattggttcctgctttgaaaatggttctcaatggaaaggatgaacgttgtatcaacgtaagtttgtcaacacttcttgttttttattttggtactttgttttaggattcgttgcgtttcattgaccttctaattgtcttactctgtgaaggacggtctgcaatttccaaaaaccgagttttattaaacgattcgggtacacaaactcctctctctctctctttctttttttttatccaaattcttttaagttgctcctcccgcttttgacaaaacgcatcgcaatttaattgacgcaattcgattgcgtgacacggacgcgttaattgatgccgtcgaaaatggaacggttgctaaaaaccgtaattctcaaagactcgtggtttcaggttgacccgaactttgtcgacgacgttggccaaactctgctcaattggtgttctgctttcggcacctccgacatggtcatttacctttgtgacaaaggagcagaccccaacaaagggcagcgttcttcttcgcttcattacgccgcgtgttttggacgagtcgaagtgagctgcatttggatttattatttgctgtaataaccaattatacttcaagattgtaaagatccttcttcgctacggagcgaaccccgacctgcaagatgtgctgcccaatggcattcattggccaataatctaaaaaacaattaaggaagagggacggactgcgctcgacaaggcccgagaacgaagcgacgaaggtcatcagcaagtgtgcgagattctccaaaaccccggtgcttacatcagcgtaataccaacgagcgcacaaatgcacaaacattccgatgcacaaggccaagtggacgcaaaagtggcaccggaccatgacaaaattgactctgaattgggagagaaattcatccaacaattgttacccctcttttgtacaatatttagggtattttcttatttcttgtctttgttttatggttttacattcagaattcgttgactgttggtgtaaggcgaacaacgttgactttgattcgcaaatgtgtgtttcatatttcggcaaaagcatttttcgaaattaccgaagcgaaaatgaatacaaatggagaagaaaatggaaactttgtggagtctttggttggagttctaatgggcgtctttgaaagtaaagaaaacaatttggatgcaaagcaacaagcactgatggttggtcctagaactgttgccttttcccaataaaacgatttagacaattaaatctgtgttggttaaaagccccgatttttggactgaacagctggtccggcttggactgtctgagaaaattgagcagttggccatggaggcggtggatgcagcgacaaacaatgcttcttcatcttccctcagtgcggcgaatgttggtccgaatttcccagaattgtccgcttctgaaaagcaattgacccaaagaaggaccatttcgactgattgtacttctctcagaaaagaaataacgaatagtacgacagacaggtgatatcattattacaataatggtaacaaatctgcaagccttggtctttgctttaagtccatcgtccccttctgtgagtctccgttccgagtcagccgcgccatcaaacgatgcttcacattactcggtaattatccatcaaatttgtttcttttaagctcaaacctcgacccacttgcccaaatggcggcaatggtcaattggtgtcccgacgaaaaaaattaaaaatttcgcagctattttttctaagcttaaaaaatgtgctgatcacgaatctgaacttagattttgaaaatcattgatttttatctatgatttttcatcaactacttgatatttcaaatttttttattgtttttaaaatttattttacaatgaatttgggttagaaaaatgcactaaacactaatttgagttctaatttttcaaaaacaatatcttgtctatcatttctcatcaaacatcagaaaaaataatccacagccaagcggattcgaaccccttattaagggccaataataaaatttcaaaaaatcgtaaaaaactaaaacttaactcctccaaacctcattcgaaagccctttttgagctctacaacagctgcgtatgagttttttacaccagattaattgtctaaaattttttgggaaaatcaagtatttaatgaaaaatcatagataaaaatcaatgttttcaaaatctgagttcagattcgtgatcagctatcttttaagtctagaaaaacaagctgctttaacatttttttttcgtcgggacaccaattcttgaccattgcccaaatggcttttgaacataactcatttcaaaattacagaatgaagaaatcgctgttcatgctgataattcaacaccatcgccgaccgttgaaatattacacagacataatgcaccaaatactgaggaagaactctcaccttcaaatcacggagacggggccaactctccacaatttgataatgaattggtggaggcagccactaccattgccaatgttcttggagtgcaaatagtgcaagacgtttctgaatcatcatgtgaactcaaccagcaacaacagaggcaacctcagaactcagccaaggacggctcggaagatgtgtggacggtggaggagaaagtgttctatcgctggaaggactggaggctgatccgctccaaagattctctgtttttgtggtgcgacgctgtcgcattggagttgaggtggtttggttttgtttgtcatccaattattttgttccatagtgatggctcgaacggatggctgcgctttctgatgaatggcaggctgagcactttgtacagcagcggtacccctgaatatggggcggacaatgccgaaaaccgcaccgaattcgtcgaaaagttacttaaagctcgggcaaccgtgccagctggatcgcagaccaaatcggtcctttccgtgccacgctctgtgacattggaaattcaatcgggaaattggaatttggcatcacccgaagtcggcacactgttattgacaaatcgagaaggcactcaacagaaaatggtcgtgaaagaggaccttccagggttcatttttgaaacgacgcgacatcaaaaacatctgttttcagccgattcaactttgggtttatacttttaatcaacatggaattcagaattattcaataataatgtaggacatgattttgtgacgggttgggccgcgcggggtggcggaagacgccttcgctactttaaactggaggttcaaaaacagaaagtgtacgaattggcgcaagagatttgggacgcttacctgaaaaaagctcgggatgagcccagagaattggtcttggaagttcagaaattttcgaatttgctttgcaaattgacgaaatcaattgcgaaaatggaagagaaagattcttgtgccaattcaacagaagaagtaagttcaactgaagaagtaatggtttcattaatttctaaacttttattttagctgcgaacaattcttgccaaaatccgtgacattttaattgacgagcgtcttctgtccgtatttgaaatatcagtgtcaggattggtgccctctttcctgggctttattgagcaggttcatctcaaccgaagtggagttctcgccaaatctttcgcagaggtcttcgacttatttattaataatagtattcccatactttagattttctctgatgcaaaaaaactttctctgttggtccgtaaaattgttctcgtattggaatttgttgagaaattgcctcaatatctctacgatgtccccggcggttctccttttggctttcaagtgacccatttgctcattttcgaagctacaactcgattttagttgcttacgcgacgtttgcgctttcgttttgaattggaaaatcagggaaaaggcaacaaagcttcgaatcaatttgcgaatatgtaatggaattcggcttgaaattttacttgtcaaatttcagaacaaatcgctttttgaagagtgaaccgcttgtgtcagttgcttcattgaagtcgtatttgtaccaacaactcacgaattccaccaagtcaccaaacagcttatcaggaggcatattatattcttattttgcctagtttttcgtttttgccgtttagtcactccaagcgatgacccgcttcaccagccgaatgtgtccagtgctctctcgaatctcagctttggtcgacctcccaccgctgcttctttgagaatggcgcgcaaactccctaaaacagcggcagataaaagcgccggcgtttcttccgtcactggacataaacacaatgtcacgtccggcggtgatcttttgtctgctcgttccgcttacgtcgctgctggctgtttagagaaagtcggcgggaccatcaaagtgaaaaaatcatttgggtccgggaaagcgacgaaaaatacgacaacgaagaaaggaggagcaaatttaccgaagagttctggcgaagcgccgtcgaaaggacagcgaaatgcaaacggacgggaacagtcgacattaaatgaagtgagccaatgtcaattgaaaaatcaaagcatgaaattcaattttaaaaa

SEQ ID NO: 73829 - DNA, 817 bp, Heterodera glycines
cctttgtcacaaaggtaaatgaccatgtcggaggtgccgaaagcagaacaccaattgagcagagtttggccaacgtcgtcgacaaagttcgggtcaacctgaaaccacgagtctttgagaattacggtttttagcaaccgttccattttcgacggcatcaattaacgcgtccgtgtcacgcaatcgaattgcgtcaattaaattgcgatgcgttttgtcaaaagcgggaggagcaacttaaaagaatttggataaaaaaaaagaaagagagagagagaggagtttgtgtacccgaatcgtttaataaaactcggtttttggaaattgcagaccgtccttcacagagtaagacaattagaaggtcaatgaaacgcaacgaatcctaaaacaaagtaccaaaataaaaaacaagaagtgttgacaaacttacgttgatacaacgttcatcctttccattgagaaccattttcaaagcaggaaccaatttggacgagctaaaagagaattaaaaatgcaagaaaaataaattggaaactcacgaaagaatttcttcagtgagggcgaaagaacttttgcacagattgacaaagagtgagaaaaccatagagatgaaagcggaacttctcttccgaattctgcagttttccccattcgaagataattcagtgggagcattttcgtgcgctgtcgaagatgaaccaataaggtcgaagagatgcgccaccaatctgctgggagaggccaacgccattgggtccatttgacgtcgcacgaaacgatcggtcattgcggcaaaacatcgcagtgcacactctgc

SEQ ID NO: 73830 - DNA, 4173 bp, Heterodera glycines
atggagaacactgctcgaacaaaggggagtcttcaaattcgcaaagtatgctttataatggaaaagcatcctaattattgtggtatgcgatgaacaatggtcgagcacccgatccccccccccccctccgtaagacggacaaggaatagaaaaaattcctcaaaggattttaacaagctctattaacctgcctaatgattatcaaaacaatgtcaatcttaaaaaagtttgaaaaactacaaaagttggactattcgttgtctgatggtcaaagccttgcacaaatgtctcacgatcaaccaaactttttcagctgaaactcgtcaaaatgtgcctggatccagccacaactcatcttcgcaaattcaaaatattggttcaaatttacgcgttaaactgggaaattacgccgaagttttccgcaatatgatgcagcaagtaaaaaataacaaaaataaacataaaatcaaataaacatttaggtgttggagtccggtgaaaattccgacatttacgacgtggacgaattcgacaacgacatttacgaggacgagttacattttatcgagtgcgatggcatttcatccattttttcttctgctaatttgattcactttagcgattgtgaacatcccggaagtgatcatggaggagggatcagcatctcttccgactcttcctcaattgctgatcgttttgcagagcatgttcaaaatatcggaagcacttcggtctccacggggccactgggcacaagcggtggcggagctaacgctgcgtcatcgatgttcagcgatgccacaacggcacttcaatcccaaattgagtctttttcgtccgttgcctctgcttttcgtcgtcagttttccacctcttccacttccgccaaccaatcaataattcccaacacgggagcctctcgtgccgatgcttttgcagccatccgtgccgccattgagcgaagtgaaaacataatcccttcgttaccaatcgatgtgatcatcggatcatctcctgtcaatgaagggcgaaatcatcgatggcgacaagccctactggacgaattcaatgcttttattccgccttcaatgggcagtcaaagtgatggacgacagcgaagcaacgaagaaggaaattgtggacgagcggctcgaacaatggcaaataaaacggcgatacaacccggtggttggaatgacgattttgtgcttcgtcgtcagttcggggcactcatcccagccttcgaccctcgccccggtcgaaccaatgtcaatcaggtctaaccaagcgcttccatttcaccgtaaaaaacactgcttcagacacaagatgttaaattgccggacagtattcaattctgtacatacagacgcaaagggtcgttgattagagaggagcctaaaggagggggaacttcttccactgccaaagaaaagtccccgattcgattgtttatcaaaatgactggcaaagaccaagtgaaaaatgaggaggaagaattggtggaactgaaggacgatgactcatcactgttccgttatggtgattcccaattgttcctaagtttactcttattaaaaataatgcacttaagtgcaagacttgctggtgacgagtcagaaatgcggacaatcgccgaatgtgtttagcgctgatgcgaattctctgatttgggaaaacacttttacgctgatttattcggttaatgagaatgaggcggcagaatgcccaacggaggacacggagaaggctatgactaacaatttggacgagacaaatcctttggttgaacaggtgggcggggaagcgtatccagggagagggaagtttctatctgtattttacaatttctcaattttcaatattaaggcattgaacgtgatcaaaatattacacgaactttctcgctcaattagcaacttcgaccaaattattggtgttgaagtcacttttccgactcttcctgaagaatcatttcacagtacaaaattgtcgcaaaaactttgccaagaactgactgatccattagtggtttctgcaaaggcgttgcctaattggtgcaactatttgggtgcgttatttaaacataaacctttgaattataaacattcgaatataattttttagtacacaatttcccatgtcttttttcgatggacatacgaacaagttttatgaacacgacaggtttaaaaatatattttttctattttttaacaaaatatttagcttttgggacctcacgggcaattgcgtatttacaaagtcgacgcgatcacttacttgaccaaaatcgttctgctacttcttcagccgcttccaacatggcaggccttcgaagagaggaccattaccctgagtacagaataggacgagttaaacatgaacggataaaagtgcaccggtcggcagaactcttcctggaaaatgccgtcaaagtgctaaaatttcatgcgttgcgaaaggccattttggagattgaatatttcggcgaagagggcactggcctcggcccaacgctcgaattcttttctttggtttatcggcattaaaattcaaaacaatgtatgatgtttgaggttgctgctgagttccaacgacgggacctttgcatgtggcactgtgaggacagtgttttggaaaacgaggcgaacgatcagaaaggcggaggattcattgggtcgaaacctaccggtttttacgtgcactcaaatgtcggtcttttcccagccttttggccgtcaggctctaatgaacgagttttaaatctcttccaaatttttggaatattcattgcaaaagcaattcaggtgagcttctttttcttgcttttcatggccccaaatttcaggacaatcgtcttgtcgacttgcccctttcgaaaaccttcctcaaactgatcacttcgcctaaggttttcttgttttgtttgtgtatttctttatacccattttgcagcttgcctcaggcgatgggccatcaattgaatccgttttggatttttccgatttcgcactgattcaccccgaaaaggtcgtttatacaacaaatttactatttaagcactgcctattttagatgcgattagtaactgctctgctaaaattcattgagcaaaggaaatccatccaatcggacgaacactttgactctgccgaaagggaaaaacagttcgacgaattgcgcgttgaaatgggtgaagccaaaataacagttgaaggtggaatccagcccccacattaattgtcttatcaattattctgctcatctgttagatttgtccctaactttcgcggttaatgctcccgctcgatgtttcccctacgaatgcgttgaattaattccaaacggcgcttcggttgaggtgaatggttccaatgtcgaattgtacgtgaaaaggcttgtcgactttcatttgaatgaaggaatccgtgagcaggttcatttaacatttgcttttctggacttggcttttccttttttagcttttcatgttccgcttcggcttcgacttggtttttcctctttcatctttgacttgctactcgaccagcgaacttcaggtgtcaaatttctcagcaacagtagtaattcatcttttgctcttacatttagactttgatctcgggagaacagagtccaagatggacacgagaagatttgttacggtattcggaaccaaaacttgggtgagaactgaccacagtcacacgattccaataataacccattcttcaacagttacactcgcgactcagtcggttttctgaacttcgtcgaagtgctcatgggtttcaattcggcggagcgtaaggccttccttcagtttacgaccgggtctttttctctttccttttttcgcatttttgggtgtttttaggtgctcttctttgcctcccggtggcctcgccaacctccaccctcggtcggtcttttcacttccctttgtaaatgcggaaatctgtttttcagtctaactgtcgtacgcaaagtcggttctggagatgggtcttatccggtacgatttttcgctctcatagtcagtgtaaatttcacattcagtccgtcaacacgtgtgtgcattacttgaaactgcccgagtacagcagtgccggaatactcagagatcgtcttttggcggcaacagcagaaaagggattccatttgaattga

SEQ ID NO: 73831 - DNA, 716 bp, Heterodera glycines
atggcaaaggataaaatgccaataaaagaggaaggaattacaaatttgctggtgttggaagagaaattcgaccaaatcttcgctgggattcgctgcaaaaagcacagaaaaaaggaaaagcaaagggataaaatggacaaagagaagcgaaaagaacggacgaaattggcaaagcattgggacaaatggcgaaatttgctccttttgttgtgagtggccgttgcacacaaagccaaaaattgtgataattggtgacgcagtcaccgatcattgttattgtccccccccccccccccctccgtcgtccgtcgatcattcgtctcttttcgtggctaatcattcccaatccattaacaaccaacaggttctaatcgcaataggcaattcatccgttgtacatatgtacatatacctatccaaacatctcatatcccttttgataaaaatgtacgaaatacgaaatttatcatttattccctttttctttttctctttcccttccttccttttcccctcttctctctcctttgtctctctttcctcttttctctcccccgtccctctctctctctctcctctttgtctctctcctctttgtttctccccttttcctttcctctgtctcttttctcttctctctcccctgtctctctctctctctcccttttctctcctctttatcattcatctaaatatttcttctctaccataataaa

SEQ ID NO: 73832 - DNA, 128 bp, Heterodera glycines
atgcctgcgttcgttcttggatttcaaacaaaagtgccaatcttcgctcttcaagtgttgtcgttttcacgcggccgccccctcaaaaacaaagccaaaccaacggcagtggcaaaggagcaaacgca

SEQ ID NO: 73833 - DNA, 618 bp, Heterodera glycines
atgatcaaatattccttcacttcttcccaaatgtcttcagcacgtactcttcggtaagatttattttaatgcttttccttttttcttatttctctgatcagatttcagtgggctaaacggtcgatcagtttcccttttttccagcaataataatatcattatgaccatttttgagcttctatttgcctgaacaacacttttgctctctctgtctgatcatcctaaccgttttctctctatctgaccaatctgatcacttcttctctgtctgatcactttaatccctttgcttttttccttttccatctctgatctctctaatcatttctctttttcagtcactctctccattttgtgctctctgtgctccttctgctcgctttggccaatgtgctgacagtaaatgccactccgttgaccattctgacccgcgagatcagtcccgaggctgtggccaacaaattattggcgtcgttccccgaggggttggaccacatggaggaacagcacttgagagaggcgcgattctttggccaacgatgaaaaagagaagcgaagggacggacggaccttttgaagaatgatctctcaaattatgaccagttttttggcaattca

SEQ ID NO: 73834 - DNA, 593 bp, Heterodera glycines
atggtcacttcgctggcgtttgtgccgcttgaggaccttacaccggcgctggcagccctagaagatcatctgccgggtgaacttgagggcgttctcgattggtttgttgagtttaatttttttttcaatttcattattgactttaaaggtttgtaatcaactacgttgggcgacttcgcaacaatggcacacgcactcgtcttttgtttcgtcccgaagcatggagtgtgtatgagcgcacaatgaacggcaccgaccgcacaaacaacttcgccgaagcgtaccatcgcacgttgcaacatgcgatcggacaaggacacccaacaatatggaaattcatcaatattttgcgtgagcaccagaaagtaatcgacgttgacttcgaacatttccttgccggaaatgctccgccgccaaaagcaaaacgctaccgcgacacggacacaagaattctaaggattttgcaccgttacaatgaggaaaaaacgcagccgcaaatcgacgatgatcaccaatacggccaaaatcaaaataaccggaatttgatcattgaaatgcttagggggatttccagcctttatcaaatggattaa

SEQ ID NO: 73835 - DNA, 614 bp, Heterodera glycines
atggacaatttcgaaattaaatcacaacggaactataaaaaactcgagcacaatggctgcttgtatgtttttcacaaattaaatgcagattggaacgtcaaattctggcgctgtgaacaccaacacggagaattcaagtgccgagggagaattcactcgacactcaatgatgtcgtgctgaagactattggagagcacacttgtcgccacagcgcggcaaatgtcgtcgcacagaaaatcgtcacgggcataaaacgacgtgccgctgagacgatggaaacgccagcagcaatcagagcccacacgcttcatcaaatcccgactccagtaatggcaagcattccgacaaaaaacgccaccaaaaaagtgaaatcttttttttttactttttcatttttgatttcaagctggtgaagcgagtacgccatgaaattgaactgccgccgccagtgccgagaacgcttcaagaattggaactcccagagcagtacaggatttacaaacgcaccgaagaagcgcaagagcttttccttctcgctgattcaacgccctccgtgccaaacatccacaatgctcaatcaacttttgcctattccatttggtgcgcaacatga

SEQ ID NO: 73836 - DNA, 95 bp, Heterodera glycines
atggaaccgcaaaagtttagtttacgaatgccgcggcgaacttcgtcgacaaattgtcactttccgaattacgtcgacatttggacacattatga

SEQ ID NO: 73837 - DNA, 77 bp, Heterodera glycines; identical to SEQ ID NO: 68612

SEQ ID NO: 73838 - DNA, 520 bp, Heterodera glycines
atgcagtatcgttattgcgactttgacaacaattacgtttcgctggggccatgccaaacgccgacattggcattttgtgtgaggcggcatgacgcaattgggcagttcaagccccagccgtactgggtggtgcaagccgaggtaatccccctcccatcatccaccgattcctgttgagtcatggccaaattgcaaaagtgaactcattaatttcctcttattgttagtatttttggaaattgcaccgaaaaaaaagattggattaaaaaaaaacgctttgtaaagatttattagttttttgaaaaacttagctattcatcataaaaattatgaaaaaaaatcgctagggaaattcttcaattttatttcattaaaatttgttttaaaattttctaatttcaacacatttattcaggtcgaattgccaaatggtggccaatcgctgacgttggaatggtgccgaacgaggcaattcagtcgcgaagctgcgcaaacactgctcgacaagatgaaagtatcg

SEQ ID NO: 73839 - DNA, 793 bp, Heterodera glycines
atggccgcctatttcacccattgcgacattcagccggtgcacaagattttgacactgcgcaccgccgccaatctgagcttcaaaaacaaacaaatgcgccactgtgcttcgttctgtcgacgctgcattgaattgggtttgaaaacaaagggacatcaaagtgttaacaaaatttattgcatttaaagctcctaagccggaaattgccgcccaaatgcgcaaaatgttagcggtggcggaacgcgacaacaccaacgcgttcgaggttcagacatttaaaatctccattttgcaaacattgtttccactgtgcagctcaactacgacgagcacaacccgttcgtgctgtgctcgcgctccttcgtgccgctgtaccggggcaagccgcagacaaagtgtcccttctgcggcgcttcgtatgcgcccacatttgccggctctgtttgcgacgtgtgcgaagtacgtcgtttttgtaaaaaggaaaaaatgccaataaacagatattttgtttcggtacaaaattagagcgatgaacctgggttccaggcctggttttttcctggacccaggtccagattctgcttattttcggcaaactggtttttttcttgacccagatttttccacctgtctaaaatctgttcattttctaaacaatttccatgtggaaattagaatgtttccctgaaacgaatgaatgtcaaaccaaatttgtcctttttataatgtgcatcactatttttcaggtggcggaaattgggcgagagacgtcgtcgaatttgatgatttctaa

SEQ ID NO: 73840 - DNA, 80 bp, Heterodera glycines
atgttcacgccagaggggtgtgttttggatttggcaaataaaatttacggccattttggaatcgtggataatgtgaaatg

SEQ ID NO: 73841 - DNA, 584 bp, Heterodera glycines
atgggccaaatgcttggtgtggcggtagcacttggtgcctggtttttcatggatcgatcaatccgcagatgtgaaatgcgagccgttatgtctcgtgaagaaaaacctcccatcaaacacttgcttgcgctgcatggacgttctgatttagtggattgcttttacaacatattggaaaaaaaagtaatgacaaaataaatggaagtgtgggctttccgcttatttgttagttttttaatttccttttttttttttgattttttggaaaggaggtgccaaaattgcattgaattcaccccttcgttcctattttaattcataactaaaatttgaaaaactttaagaacacaaaggccatggagtcggtaaagcagcaattgagcgacctcggcttggaccacgtttccgacgcatttgtggagggctacaagcgagttgaaatggataataaatcaaaaaataaatattttaattaatattcaattcctaactttacaaaacatttagcacgaaaatggtttgtgcaaaatgtgccaaaaaagtggaacacatcgatgagctttgttactgcatggaagcggcaa

SEQ ID NO: 73842 - DNA, 118 bp, Heterodera glycines
atgtctttcccatggagcagaagtagcaacacaaacactggaaagcatttaaatgtaattcacaattaaattaaaaaagttattttcaattgcttatttaattgattttcagaaatag

SEQ ID NO: 73843 - DNA, 1083 bp, Heterodera glycines
atgcaattagaaaaagacgaaattgtgccaaatattgtggactgtcagaagccggagatggtcaattgcacgcatttcaccagtgagtgcgaaggtcaaggcgggagagcatgttgctacatttgcaacacggacggatgcaacaaaagttggaaaaagtaaaatattaaccggacaaaggaattcaattaaaattgaaaaagacccattaaatgatcaatcatccgatctctaattctaatataatattatagtccccgcttaaataataatggaaaaaatttgataccgtaattaggaagttacggtaatacgaacaaatacccccccccccaacttttccaaacatttatgggaataaatgataaataaaaaagcaccccgaaatcgaattataaaaggtgatcctaaaaattagacatacttttcacaatattttttggtttttccttttccttatctttttttcaaatttcgaatttgcctttttttcgcaataataccacaaaattataccgactttttccgcttttgtaattttttttggcaatttttatgatttttgaatccactttttgatgattctcgtatgcttttaaatttggattttgagttcaactttctcttccactactccgacgagtacttcgaccaccaccaataaattgtcctctacgcctcccgcggaaatcaaaaataaattgcaatgtttggcatggaatatttgcaatttgttagttttttataatttgaaagttaaaatttatcattttccaaggcacatgaaattgaagcagtcaaaggtttcgcgacggttttcaattggtcaaaactgcgaggaaatggccaaagactggggacagattgaagaagatgaaaaaatcggagatgaatacgaccaaagtgccgacaacaatggccaagtgtttttggcggattttttcgttgggcgaattaatgcaaagatttaattgattttcaacaaaaaatccaattgatttggtttaattgaaagaaatgggaaattaattcaataatttaaaaaattcaattgcccggggcaatgacaaaaaaaataataaa

SEQ ID NO: 73844 - DNA, 138 bp, Heterodera glycines
  unsure (1)..(138): unsure at all n locations
agcgctttccccanncacaacagaactcaattgataatgttttgtatgttttaaaataacaaatgagggccatatattaccaagccacgcatgcacaccatagccgactgtccaccctagtttatatatatgttatat

SEQ ID NO: 73845 - DNA, 1191 bp, Heterodera glycines
atgtttaacccttcgtttgcaattccttttatcattattatttgcctcctttttccattatcattatcaaaaacaaatctatcggtgagtttcattttaaaaattgtttaaattttaattctttttaattaggttgacgaagaagacaattagcctgcaaaattgcgaaaaatatcgttaaggttcaaaaaagttatggccagaaaaatttaaaaaaccaaattttccaacttttttggctcgaactttttttaaaccgaacaaaattttttggaattctgcaggctaatagagtatcagaagggctatcgaatgataccaacaatgttggatttggttgacaaataaaaaagttattgtccaaaaacatgtgttcgtacgaaaacggcctggcccgaacaaaatcaaatctgtgaatttacagcgaaaaaaatatgaggcgcaccttggcattgtgtattttttaagaaagaattggcaatgtgaaaaattaagaagaagtttgaaaaagaataccaaaaatatcgcaagtatttgggcattttgtacgaatatttgttcagacaaaacttcggacttcccggcgttaagccaaaatttgtgtttataatagaccaaacggaaataattgttcatttgttcaagtggtatattacttggccaaaattgcatgtttttattttgattccaatttgcgtgaaaaatatattttcattattgcaaaaccacgattaatgaatgagaaaagattgaattttgaggcaccaaaaagtgaccaaataatgtcaattaatgaatcgattttgcaattagcaattgatacgtcctatgaatggccaccaaatgaaagtgtggacggattaatgcgacaaatttttcatcatcgaatgcttttgattttggccttatcacacgtaaaatttttaattaagtggcaagggcgattttcggggggttgtccttaattaattaacgggaccgtaacgggcgagaattctgttcacgtcatccagcataatcgatttactgtttaaaatttttgacttttttggctccggcgccaaaagtgatcagaaaaaatcgatcaaaaacccgaaaacccgataaaagtggtcatttttttcaaaaagagggctttttaaaatattcaaatttcatttgatgcataaaaaatttattcatataaaaata

SEQ ID NO: 73846 - DNA, 654 bp, Heterodera glycines
atgccagaaggaacggagtgtaggagaaagtgggataaaggatctgagaggaccgctaaaaggagcgcccgtagctcagttggttagagccacggcactgattgcttggggtcatgggttcgagtcccaccggccgacttaccttaaatgaaactaatttttgaaaacaaaatatccattcctggccttgagtctattttaggagtttttttttctccaaatccactaaaaatgggagagccatttaatgtaacggccatagctcagtcggtccaatcattagacggtttagaatgcccatgggttcgagtcccaccgggcgagttacatttttgtatttggcgaaaataatttgagttggatttacctggtaaatggtattttagtctttactaatgaattttttgaaaagcgacatttaagcgaaaaccggtcggcccgcaggggtaattaattaataggtgagtgttaatttgaagggaaatggaatttgatgcttctcacttgggaaaacacttctcttttatgtcattcatttacatcaccatcagttaattttcgatcggagtaaatatttgatcatttatataaatcaatttttaattttttgctgcgttatctgatggatttttttattattttttaattaataaa

SEQ ID NO: 73847 - DNA, 902 bp, Heterodera glycines
cataaatttgtgttcccgaagtggcaactttatgctcgtttttcaccgcttgtgctcggattcggcattgaaccgttggcttacaagacattcaaattgcttgatgctaatgaaggtgatgcacgaaatggatcagtgataaactatgaaatcctgcttaaatgcaatatcagtcctcataaaaacgaaaactatgtaatcgggagcgaattttatcagcatattggaggagaagccggttttataatccaagtaaaactgtacgacattgagatggcacgcttatgctatgaagatgaatatggcaatgaaaatagcatttcaattaaaataagaaaaaacacgaggcttttgaggtaaaatttaataaatagaagaaatatttaaacagtaaaattgaaaaatttttccaattcttggtgtaatcattttcgcaaatttagcaaaattaaaaaaaataataataattaaagattacttctaagcaatgaaaattttattagaacattcattgttgaaaaatccagtttcattaaactcatgaattcgaacttgatatgcgaggtgatgttgaagttgttaatttattaccacattcaaaagtcaatgtcgaagctggcacgagctcaaatagcagcaggttaaacgcatcgataatttgtacgaattttagaaatggttatatttaaaacctaattttaagaccacaagccctaactgtcgatgataaaaaggagataaacccattcaaacactgatcaaaaagcaatagacttgtggatcggctaagtggatgtgatcagatggaaaagccgtaccccccccccacaaaagatagatcatttatgattagcatgaacagtatataaattgttgttgtcattatgtaaacctttttttaa

SEQ ID NO: 73848 - DNA, 353 bp, Heterodera glycines
atgcatcatttaaagacattgccgctgctggtaggtatggtacaggagttgaagagcttaaccaattaatgttgctttaaatttgccagaattttcactgtgtacaccgagaattataaatttaataaaaacaccgtcgcgatagtataaaaataccgtattcaatttaccgatacgataatataccgtatacatattttgcagtgggatgtacgagatcgggaccgagccggcaaagcctcggtcatcacaaatcccactcccggtagtcaaccgataagcgggaatgataagcattgataagaatgggagagggggtctgtgagtaaaaaattatggatgaaaatgataaa

SEQ ID NO: 73849 - DNA, 1267 bp, Heterodera glycines
atgaatttccttatttttaccttcatatttttatatattgttaatgtatgcaatggaatgcataatatactcaattccactgattatgatagtaattataataagcctaatcatactaatgataatgatcagaataatcaaaatgatcatagcaatggcttggcaataaattactataataatttgttaataaacaatgacagatcggcacaaaatcaacctgataataataattattattatcaaccaaatttggacaatttaacacaaaatttgcacacatttgacaatttgtccacaaacaatggcgacaattatgatgaaatgggccaaaatggcattaataataacaacaacaacaacattttggacaaggtttcaacacaaagtgcagatttcaactcttatttcaacaattttgtaccaaattggcacacatctgacacattggtcacaaacaatggcaacaattatgatgaaatgggccaaaatggcattagtatcaataatgaaaatggacctggaaacaatttggactcaaatttcatcgatttaacttcaaatttggacaacattggcatattggccaacacaaacaatgacaacaattcgggccacaatccaaatggcattaatggcgcattgaaaattggcacaagcagagacagaaacagaatgccaagccgagcaccatcgtcatctgtaggaacattaaaacggaaaagatctcgacggcgagacccatcacgtcagactaccacgatacatattgacaaacaaaattttcgtcaagctgtccaagaagcaacgggaggaccatttaaaccgtcgatgatgcaaaacatgaaaaatttgttgccaccaccgcatggattgaccttgacattaccaggaatgcggacaacacgaaaacagttgatggacattttgttcaaaatttcaaaaaaaaaaatcattaaaaaaagttataaactgagtaactcaaaaaaccaagttttttttttgttttgaacatttttgataataatcttcttgaaattttttttaaattttgtagctaatagaaaacatttagagctatcaaatgatatatagaattaaaaattttgttgctttagaaaatttttcagttgatggttttcgcctaacggcatagcatcggttgaactaggtggctcctccacgggtcggggtcactttggcgcggaatattttggcgccgcaaattttaaagtgttataactattttcttatcaagccaaataaa

SEQ ID NO: 73850 - DNA, 1311 bp, Heterodera glycines
atgactgcaatcagcgaggatgtttttgtgtgggcgaaaaaggttcgtaaaattaaaaacatttttttaaatttgacaatgtttataaaattcacttttttaaaggaatagtttaaaatggtcaataaaactttaaaaaatcaaatatttttcaagaaccatatatgaagggggttcgcaaaaatttttttaaatcgtaaattttaaggctctcttgggccaccaggcccccaaggtccacccgggacggcaggaattcgcggcttccctggcccagatggactccaaggcctcaaaggacaaaaagtgatgaaaatttaaaaagatttttaatttaaataaattttttcagggagcccaaggtccaccaggctcggctggcataaaaggcgacagaggcccggttggcatgccaggctttgccggaaatgatggcactccaggacgcgtaaaataataatttttgtttaattttataaattcgaaattttcagcccggcgaggcaggcccgcctggtccgcctgggtgggacggctgcaacggcacggacggatttatgggcctacccggcgtacatgggccggctgggcttcccggatttcctggacagcctggaacggacgggcccaagggtgagccggcacttggctatgctggcgctcctggcgaaaaagtgatggcggaaatttttttttaatccaaaaaaaattttcaagggtgacggaggagtgccaggagttcccggactgcccggaacacctggccgagacggatttcctggtgagaaaggtgaccgtggtgatgttggactgccagtacgtgaatgaatgccaatttatcaaatttaatcgtaaaaatggtttttttcagggccctcgaggtccccctggcgaacccggtttgcccggaaacccggggattggcacggttgggccgaaaggcgacccggtaaaatttattacgaaaaaatatatttaaaaaataatttcagggagagcagggcctagttggactgcccggaccgcctgggcctgccgcgtatggcctcggtgcaaaaggaacaattgttggccccgaaggccaccctggccacaaaggcgacaaagtgagtctgattgggggcgggataaatattattggacaaacattcaattaaacagcatttgggaattggtggaaagtttgattttattattagtgaaattaaaaataaaaattaatacttgtgtagttttcagcaatattaatcaaattttttaattggcgcaaaaaacatttgctaatgacatcaaattaattaacttgattaa

SEQ ID NO: 73851 - DNA, 118 bp, Heterodera glycines
acacggcgagtcaattttgggctccaagtacaattaagttggttttttcgtcttagtggtctgtgagttagtcaccaaaaaggggctctaagttcaattcctccttgtgtttgtgtat

SEQ ID NO: 73852 - DNA, 711 bp, Heterodera glycines
tatcctggccacgctgaaaaagaccctgttgtttctccggacgacgcactgagcggacccgaggataggaggtaatcaatgcaagaacgaaaacgatgtggggggatatgtaactaacatttgcttttttcaactgttgttgtattggtaattgacccctctccgcccccgtccccttaagagaggtcagcggcaacaaaaagtgcacttgcactaaaaattgctaatcaattgtttgcggtgtttttaaaaaaatgagcagcggtgccgatagaatttttcgacatatcgttaatcgattttcaccaaaaattgctattttatgggcgttcgcaaaaatttcgcgttattttttggaatttttgtgagattggatgtggaggggtatcaacaacaacaaaaaaaccgagatttttagctgctatttctctttaaaatttcgagtgcggataggtcttggggttgatagtcttgttggtctaactaacaatgaatgttatgggaaagtcaaaacgggtggaaaggcacatttttcaatcggccgaaaatgggagaaacattgtaaaaaatttaaaacatattcagcgagcaaatggaaagcggaattgtggaggaaaagcagcaaaagtccaccgcatcagcaccttcacaagaagacgagacggtccagcaacaaaacgggagcgaaaattcagttgagaggatggaaag

SEQ ID NO: 73853 - DNA, 1168 bp, Heterodera glycines
atggaggagaagaacaccgagattcgagggcacatgtgccgaacattggtcaaatcgcgcaagtgcaattaccactggcaattggacggtgcgttttttctgtttgttaatttcagtttgttcatatgaactcttttcatttgtcagcggatgatctgcttattgacgcgatgtacaaagcagaaacggacggaaacgcaatggacattgaggatttgatgaacgcggcgcgcaaatttcggtttaaaatgcatttttttaaatgtattaaattcaattctttttagccactgtcctttttaccgggctcgtcaaatgtacgactcggctgaccttatcctgctgccctacaattatcttcttgacccaaaaattcgcaaaatccattcgattaaagtaaattccattttttttctttttttatattttctttcgtttccatttttaggtaaaaggcaacattttgatttttgatgaagcgcataatatggtgaaagcggcagaacaaaccccaaattctataaaatttattatttgttaggaatcaattgcagaagagtcgatgtctgttgatttctccaccaaatcattaagtgttgcaattcgggaggccaaacatgttttggaaatggttgtggacgaggaggaaaatttgcgtgacgaaatggtcaccaaaagtgttgatagtttggccattccgttgtttattttaggaaagaaatggcatttcattcgccgaattgaccaaaaaggagaaaggcaaaggccaaaaggacgacgatgaggaggaacagcagcaattgaagaagaatgacgtggcccatttgctaagtgatcgaaagagtcggcactttcccttcttttaatgccttccgtcgattaagcgcttctccacaacttcgaggagcaaatcgatgctttggtggcggcgggcggaggcgccgtcatcgacagagtgccgggccgagtctattcgggttttttcggatttgaaattgcaatggaaatttatgttttctcaggtgaaaaaatggttgaactgatgaagaagtcacagataatgcgtgttcatcgggatagaatttgcgctttgatcgataaaattggtctttttctcgccggacatggtgacacttcagaagtgaccaaaagaattaattaatattga

SEQ ID NO: 73854 - DNA, 340 bp, Heterodera glycines
  unsure (1)..(340): unsure at all n locations
agtacctgcaggtattcattgctacgccagcgttgaaacacctcaaattggttttgattttgcggttgtcccccccccccgcccncattttttctcgtacaataattgagtttcacttccgttacgggttttgcgctttcaattccattttccccaacttccatcagttctttgtgctgttctcgcgggtccaaaatgttttccttttgctcaacaaaaagttgaaaatgacgagaggcatctgcaaaaataaacaaaaatgtgtacaataatttaacaatttccattaaaaaatgcattaattcatttcaataattgaagtcagtgccttcatcgctct

SEQ ID NO: 73855 - DNA, 1450 bp, Heterodera glycines
atgtgtcgctctgccaatggccaatacctttgggatcaactcgaacggcaaaagcgtctcctcgtggagccgaaagacaaaagagaagtgcccgcattgttcagagagttcgatgccgccgtgcgcgaaaatcggccgtcggttggaaaaagtggcggtgcacttctgttcgctgtttgccgtggaaaagttcgccgcccttttctctgctggtcctttgacctatatttcagctgagtgagggcattgacttctccgactcgcactgtcgtgccgttgtcatcgttggcattccctttccgcccctttacgagccacggatcattctgaagaaggcgtgtttgacggaacagcgcaggaaaggccgaaatgtatatagagtatttcattggaaaataataattgggtttcttttccgctttcagtcgcttaatgcggacgaatggtaccgaattgagggcatcagagcggtcaaccaggcactggggcggatcattcggcacaaggaggcgagagtcttgagcactaacagcaaaagggtataactagtcccttttacccaatcccttttaggactttggagtcgttgtattggctgattcgaggtcacttccgcattcgttgattaattgagggcattttcgagtgtttaggtatgccaacctcaatcggcagatgttcccgtgttggatccgaaattccatcaaggagctgtcaaatacggctgcttttggacaaattgttgtccgtttcttctcagaacgtggcattctcatccaaaaatcgcacgacgcaatggttcaacaacagcagcagcaaaatgaacggaaacgacggagaacagaacagacgacggaccaacaccaaagacagcacccttcacttggggggacactccgaaacggaaagtcccaactgaatttggcactgctggacggaatttctgatctttacacgattgacgacggattgtcgacgccgtcgacctcacaaaatgcaaacggaagggaaaaggacgaagacgaggagaatgatgacattcaggcaagaaggagtgaaccaccgattatcaccgaatttggacaaacttatattttcaattttgcaggtaatatgcgttcagaaaccaatggacaacaaatcgagcagaacgccaaacccaccaacgatgaaaatactgcccgaaattcaatttgtcggacagcaattaaatggggtcaaacgggaacaacagcagcggcgaacgatggacagagaggacgaattgcgactgactttaagtgagaagtccaaatggaagagggcgaaactgcgcatggccgagctgaacccggcatattttgaggaaattggcgagcattgaagaagcaacgggcagcagtgaaacgggcaccaattaacacacacttaccggatgacctttttattgttcatttttactagtggaaaa

SEQ ID NO: 73856 - DNA, 210 bp, Heterodera glycines
atccgaacgagcgcagtgcggagattccaaggtgaagccgaacgcactgaaaagacgctaatggaaagcaatggacagaaaagacgaacatttcccattgcactgtttgaacattggcaacggggccaaagtgccggaggcgagaacgatggaccgagtgccacgtttctattcatatcataattaaggaaaacagcagagccaccagta

SEQ ID NO: 73857 - DNA, 2976 bp, Heterodera glycines
attgagcggcatgttcggctcaatggaaaagtgcacaaaatggtagtcgactccggctcaaaattgacaatcgtgagaaagctcatttgggtcaaattgggccaaccgtttctcacagaaacaaagctcaagggtcgttcattcacagggaacattttcacatttatggggaagttcaaggtccaagcagcattggacgatggaatgcccctcgatttggaatgttttgttatcgattcgagggacacactcgatttgatgggacttccatggataagagcatttgaacgcgcctacaaccaagtggtggcgacaactttgtcaatcgaaaatgttgccgacagtcgttggtgcaaccgatcaaacagcacgtcgacgcaattggagatggatttacagaacacatttccaaaaatttttgaggaaacattgggactttgcaccaaaatcagggcccatctcaaaattaaagaaaattcatctcccgttttttgtgcagcacgaccaattcccatcggcgttaagcaagaagtggacaaggaattggaccgtctcatcgatatgggcgtcctgaaaaagaccgactacagcagttgggcggcaccaattgttgctgttcggaaagcaaacggaaaggtacgtttgtgcttcgatttcagcacaggactaaatgccgcattggaaccacaccaccatccactgccacgacctgaacaactttttgcgcagctctccggcgcgaaagtgttttcgcaaatcgacttcaaagacgcatacttgcagatcgctgttgatgagcagtcacgcaagtttttaggcgtaaacactcaccggggtttatttgagtgcagtcgtttagccttcggaattaaaagtgccccaggcatttttcagtgggtcatggaccaattgagtaacggaattcccggagtgcttggctacatggacgacttcatcatcgcctcccgttcaatcaaagagcattatcgaacgctttatcaatttttccaacgaattcaggaatttggtttccacattcaactggggaagtgcaaattcctcgtccagcagatcaaattccttggccaaattgtgacaccaaatggaatcaaaccggactcgtagaggacaaaagcactgcaagacatgcctcaaccacacgatgtctcaactctccggtcgtttttgggtgccatcaattattatgggaaatacatcaaaaatttgcacgaaattcgtgcaccattagactcattgctcaaaaaaggagctaaatgggaatggacacgggaacatcagaaatcatttgatgaagcaaagtctgtgttgctgtcagacttagctcttacacacttcaaccccgatctcacaatcatcgtcaccgccgacgcgagcaacaaaggaatcggagcgacaatttcccaccggttcaacgacggaaaagagaaagttttccaacacgcagcacgaactctcaccaaaacggaacaggcctattcccaaattgagaaagagggacttgggctaattttcgccatccaaaaatttcatcaatttatttttggacgaaaatttattctccgtactgatcaccgaccattgttgggaatttttggctcaaagagtggcatccccatattttcagcttcacgattgcagcgttgggcactgattctgctcaactacgacttctcgattgagtttgtcagaacggactgcacaggacaagccgatgctttgagccgactgatcagcgaccaacgatcatgctcaaaagacgaagacgtcgtcattgcacaattgttggccgacacggaagcagatgtggcacatgtattcaacacgcaaacggaacaattgccactcaccgcaagggaaattgccgaggcacagctcagtgacccgctgatcagagaagttttagagtgtacaatgggacggtggccaaacaaaggccttaatcccgaaataaaaccatattttactgtccgaaacaatctgtccataatctcagattgtctcgttttcaacggacgtacgatcattccacaggcactgcgcgatcgaattttgaaggcacttcacctcgctcatcctggcatcgttcgaatgaagagcctagctagagaattggtctactggccgtcgatggacgctgacattgaatcacttgtcaaaagctgtgttccatgccaagaagccgccaaacaacccacaaaacatcctctccaaccatggccatcaacaacatccgttttcgaacgtgttcacattgatcttgccggaccatgcagtaatggtaaaacttacctggtggtaattgacacttattcaaaatggcctgaaattttccagttaaacaatacttcgtctcattcagttatttcacagctacaatggttgttcgatcgttatggtgttccaaaaacgcttgtgtctgacaatggaccccaattttcgtcatccgtttttaaggaattttgcaaaaataatggcattaaacacattttcagcccgccatatcatcctcagtcgaacggagcagctgaacgctacgttgactacttcaaacgccaactcaaaaaatgtagtggtgaccgaaattggcttagcaaatcacttctctcatatcgctcaacaccaattgctgttttaggccaacgctcaccagctgaattgtttttaggccgaaaattgcgcacaaaattgtcactcatgaggcccgaaaccattccaaagcaacaacatcacgaacacacgtccaaaatgaaattgcaatttgacaaaaagcacaatgtaaagccggtacagtttaaaattggagagcaagtccaatttctcaattaccgaaatggcaaaacactttggctttttgggcgcattgtttcaaataaagggcttatttacgaaatccgttcccctcagcttggcaatcgaattgtcacgcgtcatgccaaccaaatccgaacaacaatg

SEQ ID NO: 73858 - DNA, 890 bp, Heterodera glycines
atgatgcgggagataatgacgaacggacccatccaagttcaagtggattggtatgtggatgcctatttatatggccaaaacagcacacaggtcaatgtttacatggtaagttggtgttgaacaatgatcaaatactaaatgctgataagcaaaaattcaatttccgacattcaaaatcattggaaatatttgttttaagcattcagaaaaaaaattctgtagtggaacctaagtgaccgacgataagaatgtttctcggctctacttgaaaactgagcttattgtaaatcattaaaaattcaattatcttttattttgcatatttttaaaagagatgtctaatcgtgaaaacgagtttctgggcgctgtcaaggctgctaggcagaacttgacattcattttggtccattccgaattcctaacccgaactcaacaatcgattattgttcgagtatgggttgggtattctgaaatggtattggttgaaaacggatatcgaatccctgcgagtattcgtacatgagtataaaatttggttgagtgaatattcgatattctatttactgcatgtagattgttaattaaaataaatgatttaaataaaatttaattgattaaaaaaaaattcaaattttattaaattaaaattgtttgtcttttggtaggcatttatcggtggattttttgtgagtcttctgtgcgtacactaacccatcaaattgtaaaaattttattatacaaaatccttttagcacaccatcgtcaatcagactgacaagggtgattaccaagaaggatcattgaaactaatcggatggggcgaggaaagcacggacaaaggcgagctggtcaagtactggttcggcgtcaatagttttggcactgagtaa

SEQ ID NO: 73859 - DNA, 1819 bp, Heterodera glycines
  unsure (1)..(1819): unsure at all n locations
tgttttttacataattaaaatgaagagatagtacgccaaagtgagacaaattacaaagaaaaagagaaacgacgagatagtactaggcttttctctgcacagtggagttgacccatagtgtattgacacatgtctcgttttttgactcggtgtgttaacaacgcccaaaaaaactaagcccaaattcttggtgtcatttttaaccatttgtaatggatcaaaaaaaaataagttagaacccaaaaactcggcctggtgcgaaaacgaatgcggactccgaccgaatgttcaaaccaaaaagtttatgtttttttggcgttcttgttttttaataaaaataaacatttgcattggcactgggaacccaaaattaacttgctgtttgttttaaatgttctgaaattaattttatgatgtgtggtgtaattgttttgtattcttgggtttttatggagttctaattttaaatccgtgctgaaaacgtattatttcgctagatggttttatattagttttgaaaatgtagtgtccaatttattagcatttatttagctcgataaaattctaactcagttagacatggaccgtaatttgaagaggaatgaagacagtgcgattagaaatgagcaacggataaaggctaactttcaacttgcacaattagtggtctgtttgttttttttatttccttaaaaagcttacttttgtttagcctgatgttccgttaagagaggacgaacatttgttggaacacagctacgtattttcgtattttatgcgaccgcagggaaaattcgaccccgaagattatgcgatgttagtagtgagtgaatggttgaaagcaaacaccgtcagagggaattagagaatttgttgggttgggggaaaagcgggggaggaggaaggacagtcattgcttaaatctaaataacttcaggtacgtgcaaccagtctcaaagatcagttcagtcgaacagttttggcaagtgtaccgattcatcaaaaggccttccggtttgtttatttattcagggaagagcacgcgcttgtaccttttgtgctgtacttattcggacttcctttctctctattttagatatagcggaaaaggtcgacttccatttgttcaaagagggagttaagccaggtcaaaccattcgattcgtctcttttgtctctatgattttttggttttcagtttgggaggacccatcgaatagaaacggagggaaatggattctcaggtaagctacaaaatgccgtagcttgaattgtatgccactcagtttttcgtcccgcttaactgcttatagattgaagaaagggctttcctctcgcatttgggagaatcttctgctcgccatgattggtgagttacaatcaccccattaacgcttcatgactttttactgccaaaaagtggaaaattgaatttttaaaatttttggcataattttctgaaaacaaatgaaacggaaattttactgcctataaaaaacttagatatttttgaatgcttgaagttattaagcattttatggtcttgtgaatttttatgatcgtgcaagctgcaatagatccgtaatttttttgagttgcgcttttctttttttgaggcgaacaatttctcgtcggtgacgaagttgttggcgcggtctgcagcgttaggaaccaggaagagtgtgtttaatgggaaaagcaaaggaaaagcaatttttctttggtttagcattgtgtcgctaaggaatcgaccgnccgattctcncccggtgccactttaaaggcgcactttgcggagagtgctcaatttgccaacaaa

SEQ ID NO: 73860 - DNA, 350 bp, Heterodera glycines
atccaacgcagaattaaagtacaggctatagggaagctattcccgaaggattcggtctccccataaatctgggcgcatcggttcggggggactgccccgaaaacaaaaaaatcgattttttcaagtgtccgtttggggtactcaaacaattatggggagcaaaaatccaacgcagaattaaagtacagactatagggaagctattcccgaaggattcggtctccccataaatctgggcgcatcggttcggggggactgccccgaaaacaaaaaaatcgattttttcaagtgtccgtttggggtactcaaacaattatggggagcaaaaatccaacgcagaagtaaagtac

SEQ ID NO: 73861 - DNA, 1155 bp, Heterodera glycines
atggcctcccaagtcgaccgcgtgttaatttatgggggccgtggggcgttgggcacggctttggtggagcatttccattcgaaaaacattgtgggttctaaacagccgaaccaattcaaagaattcattcattgggcaatgcttttggtctgtccctccattcagtgggttattagcgtggacttggccagcaatgaaatggcatctcacaacattttggtggaccccctccagggagtgcaagagcaggagcattctgtgctcgcggggttcgttttgctattctctgtgtatgtttctcggagttgggcttttgcagcgtcgatggtgcgctcggtggagaaaagctcgacgctgtgctttgtgtggccgggggatgggccgggggaaacgcggcgcacaaagactttgtgaagaatgctgatttggtgggcctcaatgtttcaattccgaaaatggcatttcctattggcagatgtggcgtcaaagtgtgtggagttcggcattagccggttagaaaaagcggcaacggggggcgggggggggtcattttttaaattaattttttaataaaaaacaatttaatttatgaaaaacgctttttgaaataaaaggcatttcaaaacattatctagctgggttgtctgtcctcaaccgaattgtcccattggctgggctttaaaatatcaaatgcttaattttttatcaaaaggaattggattgaaaagccgaattttgtgcctgagtttgtattcttgtgattagttaaagttgacctcatctgccaataatgaggcccttttagccaaaatcggcactcgctttctcaaaaccaacggccttttgcaatttaccggcgctgcggcagtcggtgacttttttgtgtcatttttaacggttttcttcaggcttctgactcgaccccgggaatgattggctacggaatggcaaagggtcggtcgatcaactgacaaatgagcattccttgatttggatgtttcattttaagcggccgtccatcaattggtccgaagtttggcggatgcaaaggctgcggggcttcccgaggggacgtgctctttcgctttgttgcccgtcactctcgacactccgatgaaccgaaaatggatgccaaaggccgaccattcctcgtga

SEQ ID NO: 73862 - DNA, 705 bp, Heterodera glycines
atgctaaacatatccgcttacttctattgcagttctctctgtttccaactattcatccacagaataatgatcaatttgccaagtgttcagttgaaaagttattgatctagaaatatcgcatacaggccgtatactagtcatacattcctttagtacatcaatgggtactaaaagacgctgccttcccttaataatgccttagttcctttgagacatcaaataattccctcctaaacgataccagcgctgtcattaaaattttcaatgtcattacatttttttctcattaattgcctctgtaaatacaaattttccagttgagaagatagttgtggtagaatttgtacctagacccttcattatatttaaaagatttatgtggttgtttttagtggatggggatattaaataaattgaggagaaaagttttactatttattgtcagtaacaccataaattgaatttaattttagatataatttacttaattttaatcaatactattgtatttattatttttattatattttaatacaactttaatttaatttttttattttatttttatttaacatttattttatttttaattttaatcttttttatttttattttactttttatttgaattaatttgaattttattttactttatttattattcagttaatttaaaggagttgttcagaacctctatccaataaa

SEQ ID NO: 73863 - DNA, 377 bp, Heterodera glycines
atgacaaacaatgagatggctgagcaatctgcatttcaatcgaaattaatgttactacggttgaagaaggttacccatttaccaattgatactgacataaaaggaaatggtgagaaggaagctgaatttgtaagagagtgcaaagagaaattagagatcttaacccaataaagatagctgtgaaccaagaagagtaggattgttaaactatgcttgaacaatttgtgcgacatatttctttacgaaattacagactttaacagactttacttcaataatgatgtacttgattttggagaatatttgggataatcgttcaatagacgtaatggccatcgaggattgaaaggtgtatcatgttttgatcacctacgaaa

SEQ ID NO: 73864 - DNA, 1711 bp, Heterodera glycines
  unsure (1)..(1711): unsure at all n locations
atgaatacatattatcatgtccattttttaaagcattccaacaatcaacggccagcagatggtgccactgggaatatgaacggtgctgaaacgggcaaaagccgtaccgcttcgtcctcattttcgggctccagtgaatcggtgccaaacagtggtggccgaaattatgatgaagcacatgagcaaggtgggattaatcggtggatggataatttaggtgtatcaatcccatgcaatatgcctattcgtttgttgcccttgattatattgaaagttttttttttgacaatttgaggcatcaacactttttaatatttgttttgtgggttttaaaaaattttaagaaagttttcatatgcttttttcggcctttttgacaaataaaaaagtataattataatattatcatatttaagacttccatacatttcataaccttttgaataattttcgatttttttataaaaaaaacgcattacaattcaaaagaattcataatattgaactttaatctcgtaaaattaccaaacaaataaacaaaagtagagcgggaccgggacttgccgggacaccaaagtcgggaccagaattcccgactcagtccaggtcccgttctactctactaatgacaatttttacaacccaaaaattattcctaatgaatactaaaaactaaaaaaataatattatatataaaattaacaatattatacaataagttttaagagtccgagtcaaacatcgatcccgtttatttggcattgaaagaagcaactgaaaaatatggaaataaaggtgagaaattattattaagacaataaaagtgactcttcaatagaatttaaatatataattttctaattaaaaaattattagttaataattttttatcgcagctggcaaaaatcgacgtttttcgcaaaacattggttgtggcggcgcaggcactggcgattcgaccacaacaccaagcagttgctcgcgcaacttgtctcaagcgtcgctgctcgactcgggcaccttttcggttagtggcgactatggcggcattggcatcagttccaacaatgccagcagcacgcgactgttcgtgagcggtggatcgacctcacaacttgaaggcggtcagcaaaattcattctgtacggtcgtaaatgtttaatgcacaggcgtaaaatttaactaaaaaatgaaattatttaaaaaaagataattttccctatattaaaaaatttacccacatctatgcaatttcttcagccaaacatacaattttatttgtataaattttcatggaattctgatcgctgcctttgcatcagtttagcctagaaatgctattaagtcaatactatatataaactgttgcttcataaaaaaaaatactggctctttttttttaaattttgttaattttaagacattttaaacacctattttacggcatttctacggcattacaagtaattagaattataattattaataaaaatttagccactccaaaaatacataagaaaattagtacaatttaatgtacttagtataacacaatgtttaatcacttcacccacatttacattgtttttcatatgcctaattcaatctcaactgtcatttacacacgaaaaccttttgtttgtttattttccattcgatgntagctaatttaggagcgatattttnctttatttttgttataaaaaataaa

SEQ ID NO: 73865 - DNA, 651 bp, Heterodera glycines
atgaaaagtgcacgaaggcgtgccagcattggccatctatcaaattggcatgtcgacagatgccagccgacgacacaaaattcgctgcgccatcatcgaactgttcttgatcaattgatagatgatgacgattcgtcggcatacaaaccggttggacgccattcttccatcttgtgccagccggtccaccgactatttttggacaaaaatggtagtggcgatcgtagtgcaaagctgcagcaagatggtggtgttggtagcggtgttgatactgtaaaacaacagcgacaacaacggtactattacagtagtcagcccaactcgcgcaagacgtcggacaaataccgtagtaataatgatgacggtggcggtagcggcacatatggtagcgtcggcaacagtcctcggcacatgccatcgcaacccgcagtgacactttcgcgcttggcacgcacgttgccctcagcaattgtgccggccatcgcttcgctgcgcggtactgtcaccgcttcgtgtgccatggggatgctccagcagcagcagaatcgtcgtcctgttactgctcggaccggctgtcgactgcgccaacactcgctgcagacgttcccattgcaaccgctacaaaagcgttcagagccacagcctgtcggg

SEQ ID NO: 73866 - DNA, 273 bp, Heterodera glycines
atgaaattgaccatcaaccagagactgggccaaggtcagcaagcgtacttgcaaatgtgccgccaaatcgggctcggagaaaccggagagcacttctggattcctccgcagttcctcgttaagagcaaggaagagctgatagattatgtctatcctaacttccaacaactccttggcaatgacaaggagctgctcaatcgtttgattctcgctccgcacattgacacgtgtgatgaagtcaacgagatcatgatgccgaatgtgccaggtcaa

SEQ ID NO: 73867 - DNA, 1632 bp, Heterodera glycines
atgttaaagcgttcgcccaatgattttcgtccgcttttccgtttgaacgaccctgaacaactgaaagaggagagacgggcggaaaaggcacaaaaccaagcgatcagacagcagcaaaaccatggaggacgcccgggccgaagaaagggggaaaaaatggaggtggactgagaaaagagacgcgaacgatttgaccagcgatttgtttcattgttttcttccctgtggcgaagaccaaactgaactttcagctttttaatttattcattctccgcttgcatttatatttatcccaaggactttatttattatgctcgaaactggaaaatgaattttaaataagcaactttttgttcatactttctattttatttttaaattggtaaattttctaaatttaaaagattaaattttggtaaaatgtttccactaaatccaaactttgctactgtcctcggcgcacgcactgacgcgggtaatccgtgcgcaatgactttgccgtccattttcgaatatttggcgcaagaatctctgagcgggtcgatgaagcagggcattcgcagtgttttaaatgtaaaaagcgggtcaaagtcggattgtgattgttttctccccgttttgccactttaattggtgccgttgtccctaattgcccattttcagctgttttcccatttttcgggccgtcgtctctctttcgtcgactctcattttgacgagctgtttttgctgcttcatttgttgctggagaatcgctttctcaaacgattttgttgtctttttttataaatttcagcaattctcaaattaagccgcttcattttccgagaatttctatgggatgaaaagggttccgtggcgaatgaatgcgtcgtccttttctcggctgggccatcgctttcggtcgctttttctaattgtaagttcaaaaacgtttaattaattaatttgagaatttgttcctactaaaatccttcaggttgttttgccttacattcacgacaaattcgaaagattaagtgaacaaattgaaagtgaaagggatgcaattcggcaaaaagtcagtgcaaaacgaaacaatccgaaaaaaggcgaacgacgcacttttgcccttatctgaaaaaccttattaatttggttttaatttccctcggatttgcccccttgctcttcccggggtccggacaatccgtcagtgaaggacaatccgtcagaaatttctcgggggaaccgatgcggggggggggggggggggaacgtgagtgcccctgttcttcctgcccctcccccaatccttttcccttcgagggatggcgtcgtcttttccttcgcttttatccgtctctgaaagcccttctcttcctcgtcacgttgctcttccaattggccttcgtcttttccttctcttctgtccccagcctttcccttcttttggccaaatgtcgtcttgagaagttaactctctccgacgtggcgcaattcgacgctgagggccaattgccttttcatttgcggaggacaaagtgagtgatcggcggggcgcaaatagaaacacagaacgccgacaataccgtacccaataccgtgctcatcgcggcacttctaaaaatggcaaagtttatccgaaataaa

SEQ ID NO: 73868 - DNA, 129 bp, Heterodera glycines
gaaccaaaaacaaaggaagttttatgaatatctcaattggaagtctgctcagaaagcgaaccaaaacgagccaacaaattctgttgatcaatttggatgatagtaaacggttatgttatagattttgaa

SEQ ID NO: 73869 - DNA, 1212 bp, Heterodera glycines
atgtctccaattgtttttactttcatttttcatctgatcacttcaccgacaaatgcattgcctggcttaaatttctttaaatgtacgttttaagctgatcactggtttttagaattattaagcaaacatatccaggggaagtgtaattaatgttcggtgtgttaccgtatcgtcgtccccctgtcccctccctaattaattaattaaattatttatttgctttaacagccatttacattgacgtttgctgtgagctccaatttctctattccccttacggaaaagcgcggaacactttgctggacgaattctatttgtcatattttacagcgaaaaatgaaggaattcggcaaaaattcaaatcaaaaattgaaatttacacgcatctttacattctgagatggaaattggatcaaaataagataattttgcttgacgagaatatgcccaagggattaaatggatatcggaaacataaagccaacttagcaaagtaaaacaaacaaatattattaaatcaattcatttaaataatattatttaatcaattttccatttaaataaatattctttaatcagctttcatttttggcgttaggcgccaattggaaaattttgaaaatttaacgaaactttatgagaaaatcattatttttcaatttgttcgttttttaagaaatagcttaaaataagaacattttaaaaatcaaattcaaaggcatacaaataattattattcttaatcttattaatttagtatccaatttttcttcgcccgttatgaactctttgacgaggccatgtgcttattgttacgtctcaaattcgaacttttgcgacttttaaattcacaaaatttgccatataataaaattgagagaatttttgatcacaaagaatgtgaaaatgagaagagagcgaaggcaatcgttgacgaattttctgaacaaattaaggaattccttctgagtgaccttttacattcattggggcaaaggcaaaaactgctcaaatattttgggtaaattaaaaaatgcaaaaaaaataataaatttaaaaaaatatttaagcgatttatcgacgcaaaaaaacagaagagaattgggagaagcgcaaatgaatttcatcgacctcctcggaagtgtgcgggtggcaatgatttgcgattggcaaatgaaagaattggccacactttgtgagcagataccgtag

SEQ ID NO: 73870 - DNA, 865 bp, Heterodera glycines
atgcagcaaaatgtggagagagatgggcaccaaatttggttggaaatgccaatcatttcgccaatatttcccgaaaaaaatgtggccaatcgaatcgatgtgaccacagcaaaacaaataaaagatgaatttgtgaatggtaattaatagtggaaaaatatattaaataataaaagacaaaaaaatttgtatttttcgcttttaaaaataattttgacattttgcattttaagcatttaatttaatcaaaaaataatgcggaaaaagaagagcagagaatcagcaaaagaagggaaaagggaagcaaattcagaaaaaaacatttttaaaataatttttaaatcattgagataattttgtgtataaaaagttacaaaagtaaactagccaaaaaacaaaaccatgcttatttataaatgtactcgcacaaagacagataaacattaatgatgacatttaacatttatttaagcattgcttttacgaaaaaaactaaattattttgaagaaaattttttaaaataacaaagttttttgttaaacgattccaaattgttctacatgacaattgaactactcagctaaaaaaaaatatgcgacagtggaaaatgcgttgatgacgcattattttccaaaaagatttaattatatcaaaataagttgaaacattagaaatagttttttattatttttttaaataattttatttatttttaaattttcaattgccttttaaattatgtaaaaattttgagacgaatgtacattatgtgataattggggttataaactgtgtgattttgcatatttatttctgctcatatgctatgaagaaaggggctcaaaaatatcatttctacgttaa

SEQ ID NO: 73871 - DNA, 132 bp, Heterodera glycines
ggtcccggttttgaccagttttgaccgggaccggggaattcccggcttttttcccggttttcccagccaaaaagtcccggtttttcaaccaaaaaagtcccggtcccggtcttgcccaaatttcccggtccc

SEQ ID NO: 73872 - DNA, 1690 bp, Heterodera glycines
atgcgatttttaggtaagaaaaatcccagaataggtacttaaataggtaaaaaaaaatctcaaaataggtattaaataggtacaaaaattccaaaataggtaccaaaataggtaaataaaattttttattaacgatttttagtggaaaaaagcaaacaaaaggggaaaattttggttctatttctttgtaaacgaataatttaaatatttttaatatgttcttagaaaatattgacattttaaattaaaaattttgttacataaaaaaacaaataaatttttgggaaaaattttccaattcttaggggtgtattttttgattttattgcatttttgttaaggaattctctgaaaatccttaaataggtataataggtagaaaaactccaaaataggtaaaaataggtattataaaagtcatcgtagacacccaaaaccaagtggaaaatgcttttttcgtgcttatctgtgcgtattaaatgcgcaaaattttaggtatttaactaaaaatcgcatccctagtaattaccccgggaaatgaaacggagacccaaatttaccgcgtcggaagcgagacgcccgtgcccactctctcccggccccgtacaaacgaatggggcggaaaaaccattaatatgacttgatgaaaaattatttgtatcttagctcaaaaggaaccaaatttttaattcttaatatcattcaatagccctaagaactctccataagtctacaaaatttcaaaaaattttgttgagtatcaaaaaagtagggccaaagatgggcgaaaacaaggtttttgagttcctctagccacaacttttttgaaacttaaataaattttttgaaattttgtagactgatagagaataatcgaatgatatcaagaattaaatttggtttacttttgagctaagttataaataatttttcatcaaatcatattgatggtttttaaataacgacatatcaccaaacgaatgaattcggagggatgaaaaacaaaaataaaataattataattaattaaaaaggacaattattatcagtttagagaatggtggcaattatgacgatgaagcaattatgagaatattgaacaaaattgaaaggctaaataaaagtgaagaaaccacaaaaaaaggagagaccgacagaaacgaaaacgaagaaaatggcaaaaaggaggcggaaaaaagaaggcacaaaatggaggaagtgaaaaaagcaatgaccgttttgtggagtaagaatttcgatggcatttaatcatttaattgtaaaaattcaaatttaaacagaccatgccattcacttgaaaatcctcgaacttttgctgaccaaaaacgaattcaacagaatctatcaccactcggacagagaagtgatgaacggaagcaaattgagaaatttcagaacagcttatacctatttggaattatgggcgaaaagtgaaaaataaataattatttattaaaaattgctttaataataaaataataataataatatttagggaggaactttttcgatgcccattttggccatttcaattcccaagttttgtttgttatgctgaccaaagtgtttttgctgtttccgggcgatgtttcggtgccatttttggtggagaaattttatttgatttactcaatttggtaatttttaattttaataatataataataaa

SEQ ID NO: 73873 - DNA, 666 bp, Heterodera glycines
atgaacagagagtccaccaaaccgtttctgtatatgcctgtcaacaagatactcaccgtaaacacaatgtttggacataactatgtaatgaaaatgttggtcggagagtcaaaatgcgtaaaaaaagtaagtgcaacaatggactgaaattggcacaaaaatgggcaaagtcggcacaaatactaaaatactcaaaaaattttcccggcagcacctatcggcaccgccggaccactattttaccatatttttgaaaaatggagaccaaaacggcaataaatagtaatttttggcgaaaaacggcaaaaaattttgtaaaatacacccccccctaatttgggatttcaaaaaaacgaaaaaacaccccctaaaaatcgactgaaaaaagaaaaatacacccctaaaaatcgaatttttgataaaataatgctaatttttaaaggagccgctgcagccgccgccaaagattgactacacaaactgtgaagcgaaagctgacccggcggcgctgaaacgggcattaattaattcataataattatttattaattagcctaagccctaattaattactcttcaggattacaattacaccgagtgtgtgtgtggcaaactttggtgaattttgagtcgattgaattcgataaaaaaacattggtaaattta

SEQ ID NO: 73874 - DNA, 1093 bp, Heterodera glycines
gcatttgccaatgcttcatcccctgctaatttcattgttgtcatattgtctatgttgtctttcgatggagatgactccgttgtgccatttgatctgacgaacgaattcactcgggaacaattggcattgaaaagaactgactattgctatcgtcttctgttggtccgttgtccaattgtgcgcgacacggacaaatgggcaaaatgggaggaggaagcgattgactggcaatttaatcaccaatggaacataatcgacattcaaattaataatgagcgtaagatgggtcaaatgcttattaaaaaatgcgaaattgttgcttttttagacgtttcacgcaatgatgggcccaagtgatcaggagaagtgaatgaatgatttgctgagaagtgatcgaaccgatcaatttgaattgcggtgttggagaatgaatttgagcccatttgaattatatataatattgttctttttgttgcggtgatcaacttttatttgtgttatgtgtatgcatttaggataaatttagtgattttctgaaactgtaactagctttaagaatttaaacaaaagcttaaggtctatagaagcttttgtataactttatttttagctaaaggcaatagacaaaaaattatactcggaaaagttgaatttcgtattttttcattgtaatttcttttttaatgccagtatttgctcttttcttgcatttataaaatctcgagacttttgtctttcgcttggtaccaagaatatgggtattgaccaagtaagaaaaaagttatggcctaagaaactgggtatggtcattcatgggacgcataatctgacatgggacgcataaaaccgactagaacccaacagttgttattgatgtattgtcgtgctcattaatagtgcttatatttttaggctctaaaaatagccaaaataggggtagactttaggtcctaaaaattcccaaaaatcactttttactatatattaagcgagtaaaagccatgcccctttatggtttttgaatttgcgtcaaaaattcagggagcggttcggtgggcaattgattccattccctcgttgaatttaaaataaa

SEQ ID NO: 73875 - DNA, 764 bp, Heterodera glycines
atggcaaaagcaatgtaaaattaaaatgccaattttcaatttcaattttaaattttattttcctttttttcagtttcatctccggcgacggttggctttgtgtgttcgatttgcttgagccttctcaattgggccttggaattgcacttgtcagccaccgttttgacttttacgtcgacgaacacttcaagacgcggcgctgggcgctcaaagccatggaaattaaagccaaatttgaagcggatggcacaaatggatgggaaattgtcaattgcgctggaaagcctttgccaattccacaaaaagcgttgccaaagaaaatcgtcggattcaaggacatttcaatcaagtgaaatgaatgattaattttttgttttctgtttgtaaaacgattccttaattttcacagatacatcgaccaaaatgccatcgcttttctccaccgttttcgtcaacttttcacctcccgtccaattaatttggccatctacacgggtggtgaccgcactttggagttcattttgcgcaaattttggccaatgatcgcgaaaagcatttgtgccatgcatttgtatgccagaattttctaccgtttgcgacaattcatgccgtcaattctaaacgattgtccatcgcttcgtattatcaattcattttctgatggtttcttcgccgaatttccttgcgatgacagtgccaatgcttcgaatggacaagcatttgccaaatggctgttcactcctcgtcctgacaatgtgccaaag

SEQ ID NO: 73876 - DNA, 1189 bp, Heterodera glycines
atggacaatcagcagggaaaggatgatgtgttgtcgtccaatgcatttgcatatcaacaaattgttggaccacagaatataacggcagtgagtgtttttttatgaggtggacaaaaaaaaatacgaatttgcgattatttgaaaaaattaaaaaaaaaaaaattaaaaagtgcttggtttaatcctattagatttatatattttttacattttttcgggtaaatcataaaaaaaatttttttttatttcctgattttttttataatgaattccataaattttttcaaaggcactccccccgttgaacagcaataaattgaattcttcacccattcactataaggccattgaaaatcaatcgcagctcgaggcaaaaggtgaattaaaaatggatttttaaatatgcaaaaaaattaatattaatttaaaataatgaattatttaaaaataatttcaattaataatcaaatttaaaaaaaactaattgtccacagcatcagcagtaaaaagtgtgaaatcaaagccaaaaaatgggacaacaaagaaggttgctgcttcaacatccgcatcaccaacaaaaaatgtaaaataattaaataatgggttaattaacgaacattaattaagcaaccgccaaagggagggcgccaaaatttggtgtgttccaattgtgatggcagttcaacaacattgtggagacgtaatcaacatggggagccagtgtgcaagtgaaacaagcaatttaaaaaataaaatttaaaattaaaattaattaaataacataaaaatttaaaaattaatttaaaattacaaattaataaaaaaaaaattctaaattgacacattttagtgcttgtggtctctattataagctgcataacattaacaggccgttgaccatgagaaaagaggtggaaaatatagaaaatttatttttttaaacacttttatttaatttaaaatatttaaatttatatatatttttgaaatttttgactgtccaaacgcgcaaacggaagccccggggcggcatcacaaaaatggaagaaagtctaatgaaagcgcggaaaaatgctaatggtggtggaagccaaaaaaagagcgggaaaaaacaggcggagccgctgaataatgtgaatttaaattgaatatttgtttgattattaaattggttttcgactttaataaa

SEQ ID NO: 73877 - DNA, 1410 bp, Heterodera glycines
atggaggctgccccagtggagggcaacaacagcacaatgaacaacaacaccggcacgttctatgcacagcagcagctgcacaacagcagcaactcatggaacagtcaaacaccacaatattacattgaaccgttgcattcgtattttgctgagtaaaaaatcatttatttatttatttatttattttttgcaaattttaatatatttaatgtttaaaaattttttacaaagtttgaaatatgttttaaattcatgttattttcatttttttatattttaatacacttttaaatgatctaagaaattaaaatatttttttgaaattattaaaaaaatttaagaaatagaaaatatgtttttgaaattcttatttatttatttaaaaaattattaatttttacgtcctttttaaattttcaatataaataaaaaattttctttatattaaatcatattttttgcagttcatcctattttggtcagccttcgtcaatgcttgggggctcagcttcgctcgattcgctcaatgcctatggccattttggcccactttttgctggacaacagggtgaattaattattataattatccatttttaaatcatttaaatcaattaatttatataatttaagaaattgagtattctgctaatttttcaacagcattttcagcgtttatcactggcggcattgaagcagcagcaccgatgcaataccatcagcaacatcatcatcacatggttggccaccatcatcagtccgcagcacttggcggtaaaattcaaaaaaaaattttatgattaaattcggggtgggcccccgcccgaactttcgggggtaaaaaaaagtcgggggagtcagggtttgtccagatgcggagcgcccgggtcggggtataccctgaaaaatggctacatttttgagtgtaggggtcggataataagttttcgaggatatgggccacggtatatttcaaaaaatagcctaaattttcggggtaggcgtctgggtcctccctctaccctaattaattaattcaatttaataagttttattccacaattttttttattgttttggcttttttaaaaagttttttaagattttttaaaaattattttccaaaatatcttttttataaacatgtaaaaagttgtctgaattgaaggtggcggcgattttctgatgggttcgctggttgttcatccgcttccatcgcaacagctggccgcagctgcaaccgctgctgaccgcgagtgcatttcatgtggtggccgtttatatgaggctgaatcggtccgcgttgatgcgcgcgggtattccaatcaatcaatcaatcaatcaatcaataaaacaatcatttaatcaaacaattaaaacaatcacttaattaattaatcaattaataaa

SEQ ID NO: 73878 - DNA, 194 bp, Heterodera glycines
atgactgttttattactaaaattttcaaaagtgagtattatccatagcttattgtttacaaattcaaattttagcgtcaaaggaaatgccgccccatttggcactgcttgccattggcaaattcgttgattaacggacaaaatttgccgccgccacttttcggcacgttcaaagcgatggcgacgatggcatag

SEQ ID NO: 73879 - DNA, 437 bp, Heterodera glycines
cggaggagctcccaataatgtggtcgcattgccccgcactggtggctcatatccggccactgcggtaatgtgcatcaattaaacaattaaacccaattagtgtggctaatttcaattaacacgcaatttttgcagatccgtcaaaaacgtgagcacacgcctatggcgtcggcaccatttgttgggccacttttgccaaacgttgctgctgctgcggatgaattgtcacgtcattactcaatgtggatttgacggaaaacacaatgataaaaatgccgaaatacaccgttgtaatattcactttttgcgtgctttttttgcaataccaaatttcacacgttttttgtagctttgtattttttgtctgtgttttttaactcaattttacaaaccacttaaagtgtgctgcttttgtttggtgtttgaacaataataaa

SEQ ID NO: 73880 - DNA, 535 bp, Heterodera glycines
atgatctctacatttcgtgctccaactgtttgtatttacgtgaaaaggaaaacaatactagatctattatctcaacagcagtgcttcgacaaggagttaatcttattatgttgcgctcggaacataattctgagtgtaagccagaaattttggaaaaattaaaagccgaacaaatggaccgagaacaaagaaaagaaaatatacaatgtatatctgagggaaaaatttgcacaaaattattcggtatgcagacaattatattcattgatgaaacaaattgagaggagcaattatcagctatcaatttacgggattcccgacaaattgaaaaaggaggtaaaaatttcatgagcttagaattctattaaaaacagacaataattggggtgtaaacattatgatcccgaacttaacttttttaattatttgagcttagaataatcagtggtgattttcaggtttaaaaaatctgcataaaagtccaaaaatccaaacaattaattaactaaatgtattcgaacaaaataagcaacaa

SEQ ID NO: 73881 - DNA, 1416 bp, Heterodera glycines
atggaaattgatatgataattgctccttatatttatttgttgcttctttgtttgaatacatttaatttttacgagttgaataacggacgattattttggcactttttcagctcttttgttagtaagtaccggatttgcgatttgaagcatctaaaaatcctttctcgaataatcccgtcacgtgtgctccgttcccgttttccgtcctgcttttgggtactttcctgtttttaaggcacacccatttattaatagacttacatattttggaggcataaaagcaaaacaatttctgccaaattggaatgtccatcatttcattgtttttttcctgttttttggagtccttaaaattttaattggccaaaaatgggatgatacaaatcgcaactgcgtcgatttgagtttagcattcataacattgactttgacttcacatgaatatataaaggtggatgaaacacaatttcacgcttgatttttgtgcaattttttttattaattcaaattggcacttctttcgcctcgtttcgatgttttagtggacaaacatttcgatggcaaaagcgaactgacaattagaaatttgataaaaattagcaagatgcgaacaaatgcaacagtgtttgttgagaagagacgatttccgttgccgaaatatccgctgccacgtctacactcgcacactgaacggggaagaaaggacgaacaaccacgcagaggcagaacatcaccgtcttcaaggcgccttcaactgccgtcatccatcgatctggcacttcattgacgttctccgccgtgagcagaagggcaccgatgggaagtatgcgtcatttcttgctggacgtgagccaccgcagaaagctaagaaatacctaccaagcggctgatgagcgcctcttcaatttggtgcagaattacatcccggtgaacccgaacaatgaaaatgatcacaattaccacataaatccaaattttcatattattttggaatttcttcgtggcatttcgcgcaattatcatatgaacccgtgaattgttgttattttttcattttgttaaattttacttatatttgaaaaaaaaaatctttttcctttttttgcaacatttttgaaatttacgtctttccctttttaatttttggcttcgcgccaaaacgtgggcgccaaaacgaccctggcgccaaaacgtgggcgccaaaacgtgggcgccaaatcgtcggcgccaaaacgtgggcgccaaaacgacccagtcccgaaatttggcccatttttgcgccaaagattcaccatttgaaatggttgcacactctgacaaaaaatggaaagccaaagcaattgagttgtgattatacgtcaaaaaccaaaagaatgatcaccaatttcaaagaggtgtggccacattttcaataaa

SEQ ID NO: 73882 - DNA, 1121 bp, Heterodera glycines
atgaaccgacggtaatgagttataaaattacatatttcattgaactaaacttttttaaattcaatttcagttgggtgtgtaatgacgtttggatggacattttcctgcatcttgaccatgctcaactcggcctcaaaatggcacttctttcgccacggttcaacgcgttggtcgacaaacactttgatggcaaaagcgaattgccacttttgagacaaatcagaattgcaaagaaaggaacaaaactatctgtggctacgaagagcaatccgttgcccatcaaaatccgctttatcaaccttcgaatcgagtaaatcaaagaattactaaatgatacatctaaatgatttccttttcagatacattggccattccgtcatcgaatttcttcgttccaaccggcaaatttttgagaaaggcacccatatggatttatatttggatttggataatttgcattatgacaacaaaggcattgtccagccaatttggaatttttttgctggtgaaatttggcccattttcgtgccaaacattcggcatttgattggccatcatttgggcgatttgcgttgtcacatttcaccgacaattttcaccgattgcaaccaattgaattcaattgtctccgataatttgttgcccgcggcgattgctgatgatgggccaaatgcaactgctcgtcaagcattgaccaaatggttgaacacaccgacaaaaaatgggcagccgaagcaattgatttgttgtggctctgcgtcagaaaccaatgaatgtgtcgtcaacttcaaaaaggtgtgccaatattttcgtaaaattttggattaaatgccatttgcttttcgtttcccattttttaggaatttctccgtgccaactcttctgccagttacataatccaattcaaaacttacacctcaattgcgcagtttgaattggtgaacggacggactaaagaaaagctgacattgaaggcagaagatgatgatgatcatgtatatacacatattaattgcgtgttggagcgatgccaaattgggcggacgattcaatgggaggacaaaaagacggacaaattgaacaatgtcatcatttcgctttatggaaattgcattgggtga

SEQ ID NO: 73883 - DNA, 750 bp, Heterodera glycines
atgagtcgtgtgcacagctcgccaaagcccaacgtgcttttgatgctgctcagcaacggcaccgtttggctcaattacagagtttgtccttaaaagtccttaaaaagcatttttcccaatttgaattgtgcccttttccattttcggtccgtgttgaggcgccatgcgaatttcgtctgtccgacttcccaatggacaccgttctttgctctttggtctcgcaaatcaaaatacccttttcactctgattttgaggtgttcgagagttactccttcaacaccgctaccgtaaccatcgattggctaccgttggccgcggtgactctccaaacggcggagatcagtgcgtccgactttgagctgacccacacaaaacactacaaacacacggaggtaagcagcaaacaaaggataggaatcccgtattcccacacttacagtactacaaggcaggcgaatggtatcggcttacggtagaggtcggcttccgtcgtcgttacggctattacgtgcttcaggcatcagctgcccattatcccatttattgcttatcatttgctgtttaaggtgtatgccaacatgtacatcaacgtgttcctctcctggatcgccttttgcatctctcttaaggctttgcccgcccgagtgatcctttcagtgaacacgctgatgtcgttgtgtctccaggcaattattggaaaataccaatgccaaaatgcccgttctgatcacttcagtttggcaatgtga

SEQ ID NO: 73884 - DNA, 1339 bp, Heterodera glycines
gcccgcgagatgcaagcccgtgccaccataaaattggtgttttgcattgcctatgccatcctttttctgctcggatcactcggcaatgggtcagaaatgatcaaatgccaatttccacttggcaatttccttctctgctcggctgatcagtcattggtcccaatttgaggttggtcattgtgatgatttgcaacgttttgtccacgttgtcgcgcaatcggaggaagacgagtcggaagatgctgatggcaagtgcggaacacgtgttcatttatgtgctcggtcagttttatccccgtccaatgctttttcctccgcttaatccctctattttcttttccgatgattcttcccctccatccggaaaattggcatcagaaaaagggacaccgaaaaagcttattcgtgcaattcaaatgaaaattgcgatttggttgggataacgaaatttcttgatatcgatgccgaaatttgaacccgaaaattaattgttttgagtataatttaccgtctttgtccaatactctccggcgatgtccaattcttacaaattattttccgatttttttatttccaattcgccccatatgatcccccactttccgtccttcctcccaggtctgtccatcgtcgatctgttcgtcatcctccatcttccgcttctcatcttcgaaatgcgcgaaggccaatggcccttcggcgaatttatgtgcaaattgtattggtttggagaaagtgtgaacaaattgttgagctcatttttgatggttcgttgattgggtcaagggttgctcgatctcagctctcaaatcggggaatttcccggctttttggtgtttcgctttcgacttttggccatttagtttctattaaaaaagattttttactcccttaaatttcaaatatagttttgtttttggcttgggcctttcttttctcggttctctcgagcagtccttttctgtttgccgtttttcttcaaactaataaactgttcagacggtgcttagctgggaccgttatttggccgtttgttcgccaatcaaatcgatgaagtacttaataatctttatcaattaattgctgggttataaaacaatcgcaaattttaatcaataactcattaattgattgactaattattttgttaattaaggatgcgcaccaattcaggtcgtccgtcacttccatcgtttccgatcacttttctcttcactttcccaagtcccttcagtggccatcaccgttctgatcagttgctccgcgttcgccactcttctcctttaccccgtcctgaaagaggccaccgttttgcgggtcaacaaactcaccggagtac

SEQ ID NO: 73885 - DNA, 278 bp, Heterodera glycines
atggtgagaaggaagctgaatttgtaagagagtgcaaagagaaattagagatcttaacccaacaaagatagctgtgaacaaagggaagcggtcgattgccaaactatgcttgaacaatttgtgcgacatatttctttacgaaattacagcctttaacagactttacttcaataatgatgtacttgattttggagaatatttgggataatcgttcaatagacgtaatggccatcgaggattgaaaggtgtatcatgttttgattacctacgaaaataaa

SEQ ID NO: 73886 - DNA, 683 bp, Heterodera glycines
atgctaaacatatccgcttacttctattgcagttctctctgtttccaactattcatccacagaataatgatcaatttgccaagtgttcagttgaaaagttattgatctagaaatatcgcatacaggccttatactagtcatacattcctttagtacatcaatgggtactaaaagacgctgccttcccttaataatgccttagttcttttgagacatcaaataattccctcctaaacgataccagcgctgtcattaaaattttcaatgtcattacattttttctcattaattgcctctgtaaatacaaattttccagttgagaagatagttgtggtagaatttgtacctagacccttcattatatttgaaagatttatgtggttgtttttagtggatggggatattaaataaattgaggagaaaagttttactatttattgtcagtaacaccataaattgaatttaattttaggtataatgtacttaattttaatcaatactattgtatttattatttttattataatttaattttttaatttagttttatttatttttaacatttattttcttttaattttaatcttatttttattttactttttatttgaattaatttgaattttattttattttatttattattcagttaatttaaaggagttattcagaacctctatcca

SEQ ID NO: 73887 - DNA, 1358 bp, Heterodera glycines
atgtcgcacaatccgaagaaagcggagaaagaaatggaaaaagcaatgtgaatattcaaattttaattcccatggctaatcacttcgctgtttcagcttcatctctgccgattgttggcttgaggtgttcgatttgcttccgccatctcagcttggactggaaattgcgatgattagtcaccgatttgaccgccgcgtggacgaacacttcaaaacacgaaaatggaaattgggctacatgaaaattcgaagcaaaattggacagaatagcgcaaatgaaatgataattgtcaattccaatggaaaagaattgccaattccgcaaattccgttgccgaacaaagtcatggcattcagaagcattgcgatcttgtaaaaattaaattttaaatggtttctgccattatattttctgattttcagcttcttcgacgaaaatgtgatcacttttctcggccgttttcaacgtttttacgacatttgtgaaacaatgttgtacattcgcgctgaaaatgttcgcattttggagtttattgtgctcaacactttgccaacgctcaaggacaccatcaaaaatcgattgcccagacctttgcagtgttagtttcgaaggcgccatttttcccgcttttccgcccgacgacagtgccaatgcgtcggatggccaagcggtggctaaatggctgttcacgcctcgtgccgacaatttgtggaaggtgctcagcattgtgaattcaacgatggaacagtggttgacaaatgtggaacaaatcaaagcggtgatttgcccaatttaattcattttttaaaattttttttgtcttatttttaggcattttcggatgcttcttctcctgtttctttcgtaatttactttgaatttccgccgccctttccgattgattccattgcgtcatttaaacggaccaacgaattgaccagggagcaattgacattgtcaccgtttgaagaagaagcaaatgttttgcagctcatgcgttgttcatgtgaagaaggaagtgaggaaaaatggcaaaaggcgctgaaagaattgttttgttttcatccacaaaaccaaattgacatttggatcggagacgacgaatgcgacgatgggtgaattcaattttaaaaatctaaatggtaattcttacatttttattttttaaggcttatcggtgcttcttccgccgggccgagtggtgatcagaaagagcagaaaaaatgaatcgatggttgattgattggttgatgtgattatgtgatccaaatgttggacttagccatttaaatattgttgtatttgatttttgcttacaaatccattaaaataagttaggctttaccaataattttaa

SEQ ID NO: 73888 - DNA, 483 bp, Heterodera glycines
atgaaaaagaaagtgggaaaatttgatttaaaatttgtgaacgaattaaaagaaatggtcaaaacaattgacgaaaacgatggacaaaaattggaaaaagtgaaggaattggtgaaaaaaattctggaaatgtttgaggaaaagaaaaaagcatatggtgagaaaatggcggaagaaaacgaatgaggacaaaaagccaacaaattccgattgaagggcatttttgcggatagctttattggcatttagactaatttttgggactatttttttttgagtgattcgtagggcgaattctaattttttttcgattttctgggccaaggaaatttgattttatgattgaatttttgaacgccaacattttaaggattttaatttttaaaaattatagaaatatgttctatcagtagaaaagaatctggaagattattaattatataaaattggaatggttccatagggatttggcattttatttta

SEQ ID NO: 73889 - DNA, 611 bp, Heterodera glycines
atgcttcgtccggcactgtcacaatgtaagtgcgcccgtctctgactagtcgactgtttttatgttcagctgacatgacgcaaattttttactgatttccacaatgctcaatccatgttccttggcttctcttcgctagaaataaaaaaaaaattgttcaccaaaagatttaactgatgacaattaagcataattaaccaaatcactataaattaaggtcttggattttattttaaaaaaacacaattataaaaaagttttccaaaatcttgagatttcgtacttaagcctccaacttcataagcatattttgtgacagatttcagcttggtagtaaataatgaagtctattatacatggagggtaaaagttcggagatttagttcagatacatttttttaatagtttacccattgtaaaattcagtttctttgaccaggattcctgttaaatcagcacttatcccatcctattagtcctgtcctggtgcgtctcggaaataatggcaaaatcccagccctacttgtttcggtccaagtgttttaggataattaacaatttgccgtttatccatggtaattagttagtaattactcaaccggaccaattca

SEQ ID NO: 73890 - DNA, 675 bp, Heterodera glycines
atgaattttgtttggcttttgttcaccgttttgccacttttcgttatggtgccatgcactgaaatgttgcactgtgagctgatgcttttggatgtgactgaaactgatcctccgccagcagatttcccattatttttgccatcacagtcatcgcttccttttacaagggtataaaaaaatacaattatttccaaaatgttttcaaataaattggggataaaattaaaaatttctttgaatctataaattaaacaattcgttaatgctatatatttttttcgagttttgactaaaatttaatttgataaattatgaaaaaatatttgaaactgaaaatttttcgaggtctctaaagccgagacttttcgagtcgagatagatatatttttgacaaattgggaaggggtaaaaaatttgactaaaaattaaaataattattattttctagatttattccattttttaaaatattttcctggagattaagatagaaattctcgtcaaagtcacaacattgtgttaccatgccaagtgctgtcgccggggcgaatacagtaaagaatttttggtggaaacaacggcggacagaaccattggagaagtgacaacaaatctgttgggaatgttggaattcaggtgcaggtggatgcataaatattctataaaattaataaa

SEQ ID NO: 73891 - DNA, 536 bp, Heterodera glycines
atgttctgccagcttttgctctttggctttttgcttgcaattagcatagtcaccgtctgcgctgctaaaagggaaataaatttgtccatttatccgcctcccatatccaacgactacaattaccgtataaaaatttgctgtaatcaaaacagtaatagtggagcagctgttgaagtgccatcttcacttcaccaacagaagttaattgccgaacatactctgtgtggaacgaaaaattcagagcagaatgtgaacgaagggcaattccccgaaaatggtaaaaatggaattaatcagtcccgttaccaggaaaacaagggatgccaaatgtcgcaccccctaaataatttttttttgaaaagtaagtaacaggaacatttggctgttattcgccctcccctttccgaagaaataccccatttgaattttaaaatttttgatttaattcagagaaaattgctgaaaatttgaaaaaggcaggccaagttgtttatatactagcgctttccgagcgtctcggtctcgagtccctctag

SEQ ID NO: 73892 - DNA, 916 bp, Heterodera glycines
atgaaaatttatttcccttcacattatatgcatatgcataaaaagatattcagcgataatgtaagtgtaaatcacatgaaatagggcaatacatatagatgaatgaatacgaatatgcgggcgagcatttttacaaatgaattttatgtgcattgattttgcatttttctcagaatatacaacataaatttattccgaatcatattacgattagggatgggatttatatatatttttaaaatacatattcttgctgagaaatgcacgaaaaagacctttgtagcgcgaaattcttaggtttaatctccaatatccattaaaaaatatttgactcttttttatttagtaaatattttggcatttttcataaatacaaatcctatccataattatatattcataaaactattaatgtttctatattttatagttcgatttgtccgtaacccatgtccgccatcgtcgctgacgatacacaacccaaacatcgaccaaataaacagccgagcagagaggcgaaggcccaccacgaggccgcgaagaggccgagtgagtaccttcggtgcaggaaaattattaaattttaaaaattttttaattgctttttaaatatgccaaaaaatgtaggcttaacttttttagtgaaaattcgatcactcatattttttgctaattgagcagaagcgtaccaaactttgcagggatactccccggtaaaggactaacttacactgaaatgagcgccgagctagctggctcaaaaaaattttcgaaaatctgagtctttcgtttttatttgttttttgcataattaattcataaatatttttttcagaaaatgctctgaaacgcaccaaattttatttacatgctagtttaggcactctgatgctttttctatcaaaaagggagatga

SEQ ID NO: 73893 - DNA, 725 bp, Heterodera glycines
atggctgttgtccaggtgacttttgataatgccgtcatttggaagtgtccacccaaaacccctttaggactacgcgaggcccctggtcattggcaaaacgttggccaaaatggcgccggctgtcccttacatcgcttccgttgtgcttttggttggcttactgatgttcaattacaacgacgttggactgaccaaagcctttgaaatggtcttcagtttataggtgtcgatcatttgttaccgtagcattttaaatactgtataaaaattttatggaatatcaattaatggtgcgaaatcgtataaagttcattgcagcaaatacttttctctttttcaatttaaattataatttgggtaattaaactttctttatgtcaattaggccgtcgttctttgtaaattcgatttgaaatgttggacaatcgcaatttctctttttccactactcgaaatggcattctgctcacttttctgaatttgatgttcactgttaactcgaagggttttcttctgaccgcttctctcatgtttcttgtcgaaattggcatcgttttccaaatcattcgattggtcccatgtcggtggtccttttattgcttttcgcttttcaaatcaattttagacacggatattgactggtccacttacatgcagcacgttggagtttatgaagacggacagagaaattacacacaaattcggggggacacaggcccaattgt

SEQ ID NO: 73894 - DNA, 2640 bp, Heterodera glycines
atggcatgggacaattcgtgccaagtttttggacaagagtggaaaggaaaaatctatggaccagttggtctggaggatgtgccagtgaaaacgaatgtgataagtgcagaggcgcaatttgagagttggctcaggaatctcacggagagattcggccagaccttgaccaaactgagagccaaggagtactggaaggactgccatctccaaagcaagagggtattggttgtgagtaaccaagaagccgctgagctggtagccaaggaatttgaggaagaaggctcgagctggttcgtccattttggtgacaaaccgttgcgtgaaaagatgttcccggccaattggaatatcaaaattatcttcaatttggagctgaggagggaagaaagagaagaattggaagtgttcaaagaagacataaaagatatggcaagggcaggactggaagttcatttggcgactcggaaaaatgcacgtttgccacgagagtttgaggaattcgccgagatgcaaggctgtggaatttaccaatacgaaaaaattggagaactcgcagcggcgatcagaggaacaccggccaacacgggaacaaatcccgagtcaggagagtcagcccagaagagtacaaccggatggaggcgagccgtaaccaaaagtctgacaggattgaccatgctggtcatgttattgatcacgctgttgcaaccaatgatgatcaatggacaagtcattcggccggaacgaaacggcagatggattcctgtaaatcccttcggaagaccactacgaatggaggaactcgttggatttgcggagccgacggtacctcggatgagcctcgacaagagggggcaaatcacgcccactttgccgacaacagcggcggatatgtccattgcgcatatccgggaatggtacaaaaaggcgcggatgcaaacaagtggtacgactcaaacttcggcagcaacgacgacagtgcgtacgagtaccagtgccagtacagtaatgactactctacgaactcccgaaacgacggtaaccacgagaacgacgacgaaaacaaagggagtcaccacgcaaccacagcggaagactacgaatcaagaaccaaggatggactcaagacggaggcagtggactcaaactccaagccgtcactggactgatcgaatccgagcaaccacggaaggcccatctcaagccagtgccatgccaacaacgacaaagccgaacccaaccgagggcacggtgaccgatgaaacgaaaccggcggtacgacgactcaatcgagaattggaggaagttcaccgtggagccgaccccatttattggtgtgcccacaaaggatcatccttgtggagaataccggacgcggataaatcaccattctgcaaaccaccgccagggctcacctctcagtggaaaagattgaccatctcactctacatgccgtatcggaagccacaagaagtgaagaaggcctacagatgtgccatcaaacgaacgaaggagtatttttatactaaccttctgggggatcagttcgttcgtacggagaaagaattcttgccagtacaaaagagaatctgcatggccatgatcgaacagcacaaatgcccgtacgaagataagccaatgactccgattgaaggaggaggatggagcagcaacaacccactgaacgaggaatttccgggaagattctcaagtctaatttcgggggagcgagagagcgtaacgctgaattgttttgtcgagaaggcgacgctgttttaccgccctcacaattttgagttgatcagcccgctctactcacacttggaggattgcaactatttgaccggaaactgcaacatggcagacaacacaaccctaaattgggaaacggagtgcaacgagagctgtaagccatgcgactaccatttcgtcgaaagtatggacggagagcacacaggatcaacggattgggcaggcggaacatggatatccaaaagcaaggaacaggcgctaacgtttagcaaagaggcgaaaatggaaacagcatgcaacggaaaaccgattcgcttgtcggaccaatcgtttggaatcctggaggatgagtacctgaagatcgtcaacgatcgtggattgggaaaaagagccatccaggaggaacaactcgcagcacaattaaccgcaggacaactcgccacaagccgatcaatcgcgcagcttttttccaaggaatgccgaagaagttccagaggaggaaatccgaccattcaggccagacgacttttacgacgcaaggatgttatggccaggtggctaaacgaggacacgatgcaaatcttctcgtgcgctgagttttcaatgcaaaatgtggaatatcaagcagtcaacaactgttaccgctacattccggtccaaatccgcattgacaagaagacgctcaacgcattcctggatccggagcttcacatcctcacagcgtcatcaccattcgcagattgtggaaatttttgctaccattatctgcagctgagccagagcaattggatcaaaatcgacacacgctccgctaccgatgctatcgaccgtgtttatatacgcatattttcggtaatggttatttgtagtggtcccataaaaaaggaataa

SEQ ID NO: 73895 - DNA, 598 bp, Heterodera glycines
atggccgaaatgcaaaaaagttatggccaaaatagacttttactggccatttggtgcagtgcgccatctttttttgaaccaaatgtaaattgaaaaaataataatgaatgcttaaatttactgacatctacttcttttgtagatttcacttctctgaaaacaaaaaaactgcctcctgcatggcgccaacacgtcggtgccaaaaagatacggactctcgggcggcaaatttatcatttcatcaccacaattgtgcaacttgcatcatttaaaatattcactttcacagctaattaaagaaataaatttgtcgtaagtccattttttaaattgaaaagacacaaatttcgttttgcttattctatcttggacaaagcatcgcaaaattcagagggagaagctatacttattaaagcaaaaaaatacaaagttttagtccggagcctacaaattagcagtcctttcggaaccgataagctgcggcagtctcatgcgcaatgattttgaaaactgatatgatccagatttcatatagtttacattactcccattggcccttgtaaaagcattttctttttttataatgatataaaataaa

SEQ ID NO: 73896 - DNA, 276 bp, Heterodera glycines
atgaacagatcaaacagctttcgcctattctcaagtgttggcagttgcaggtattctaatcgattttggtatggaattggcggaaggctgcatttaaaaaaggctcccggacaatccgacagtggacaatccgacagtgaggacaatcggacagaagtggacaattggacagtggacaatcggacagtcaaatataaaatagataagaaaataccggtcgccgcaatggaccgattgtgccatatcaagaaaaaacaaaataggcaaataaactaa

SEQ ID NO: 73897 - DNA, 990 bp, Heterodera glycines
atgacattacatcctataagctatagactttaccactgtaagtcgaaatgttattcagtcttcggtattaaaatgtacactcttcaagtatgctctactacttatgtaatttttaaaaaattagtaaaaatttacaaaaagttgtaagcaagaaagctcaaaaaacttagagtgaacagttttgactctaatttttttcaaattcaataaaatttttcgaaatttagcagaataatagagaaatctttgggctatcttttcgtattaagcacggagtcaattaatttaagtttgaacaattttcatgcatttaaacgaccttacattttttggatgaccataaaaatatgacactattaattctttcataacttttttctgaacgaacgaattttaattttgtttatataattagatagcccaaagatttctctattattatgttaattttcgaaaaagtttattgaacttcaataaagttagggtcaaaattgttaagtcaaaatttttcgtacttttttggttacaattttttttaattttactaattttttaaaaaattacataaatagtagagggtactttgagtgtcgctaaatactaaatttcattaatttgacaaagtttaagctatttatgattaattatttagccaatttaattaaaataataattaaatttaattattacaaacattcagacttttgtcacttcggctcaccacgaataggagattatgcgaaaaagaaaggaaaaggagaaaaccaactaagagaaagaaaaaatgagaaagagaggaaaaaaagtgtaaaagaaacggtcaatgacaaaagaaaagcaattggcaaaaaagaaaaagcacttcagagaaggagccaagcaaaaaaaagagcaaaaaaggagaagcaactcaaaatatttacatcaatggcgtcgtctgaaggtgaactttccacgtggcgagactccgactttccggcatcgaactga

SEQ ID NO: 73898 - DNA, 283 bp, Heterodera glycines
ccccccccctttcccccccccctctcctttttcccctttgctaatttacgtcccctaatttgtaagggtattctcggttcgggttttgccctgaaagttcaacaacatcagcgccaaaagcatttgattcgaaggcgcgtgccagctgcccgactgattcagtgcctttggcgtcattactggttggcttctttcggcatttatgccgttacgacagaattcctttgcttttcctcagttcgatgccggaaagtcggagtctcgccacgtggaaagttcacct

SEQ ID NO: 73899 - DNA, 2611 bp, Heterodera glycines
ttgatgcttctcccccctccctctttttctgtcctttttaatcgtttaatttctttttaatcatcggctgaccaaaacaatgagattatctttggtcattttattattcgctttcccttttcttctttttaaattttcctgctaaataagggcctcaattttgtccttatttataaaaaaatatttcgatttgaagggtccaaatcttacaaatttattccttatttgtaagatttgcccttatttctggatcaatgcaattttttttttctgatttcttaaaattgctaattaattttggtcgccgtcggaccaaaactcataatcctttgaaaaattactcaacgcaatttttatttaaaatttaaaatattattaaaataatttgagaaattatggcgtcaaaacactttctccttactccaacagaaattattggccgtcggccccaatgaatgcgccgaatttggcgccgcttcgctttcttcgcgccgattcactcgccgaagccgccgctcgaccaattcgtcgtctccaaaacgccccgcggaacaaaaaagggaattggcgcacttcgccggtgcgaacacttcgccaaacgattcgttttttgaaacggtgagtcatcgcggcaaactcgaaaaaaggcaacaaaagtgaccaattggttaagttttattcaaatttaattatataatttgccaacttacgccgtccgttctccgcaatttcggcattgaaattacaaaatgataagaaatattcatagaagacgttttttcattctttttgcggtttttcttttgaccaatattacttattcacttattaaatgcttccactctttctcttcgcattgattcgcccaatcgcttttcgtgccaaatccccgccaaatccgcctttgcctttcccttcacttccctcgtcagttgcccactaatctcttttatgtagggcgtaaatgccaccagtcccatcaccggcggcacaaactctcccgccgtcggcactcagcaaatcgctaatgatcggcgtgtcgttttccacgacattctgaaaagtttggaattcaatttctgtaagtgcagtgcgtccgtttccggcccggcctctgtcttcgattgtgagagtggcctcgtcgtccgtccgcgtccgtcgccccttcccgcggaggcggcgcgtcaaccgaagagttccctcgccactgtccccgccctttctttgcttcagccgcctcccctccgcttttcccgcaaccgttccgattcccaagttgccccctcaatttttctgttaatttttgaaatttcttttcggtccggaaaatgtccttggttggcaagccgttggtctacaaaaactacagtaccgatcaacgctttcgacgagttcagtccaaaatgcacaactttttggaacggccccggggatggaaggcggccagctaccatttggctgtgtaaggcattcttttgcattcgtcgctccccactttatccgctttatccccctcccccgacagtctcgtcatggttctgacgtgtcttgcactgagtgtcttctccacaatgcccgagtttgaggagcagtccacgctcatcctttattacattgtatgtcttttttggacaaataattgacataaattcattttttgccaatttcaattaaataaaatttaggaaattatctttgttttttggcttgccatcgaatacatttgccgcgtttggagtgccggctgtcgcagtcgttaccgcggtcagtgccatcttttcgtcgaagcatttccatcccccgcaggcattgccggccgaattcgattcgcaacttcggcatattgcataattggtgggaacgagctgcaaaagtaattgcgtttataagctaacgacactcttaagatatcatcgtgatcactgcatcacttattgtcctttgtatgggtgcaagggaacaggtgaaaatgagagagcaacagagagagagaaagaggagagagaaagggaaggagagaagagagagagagataagagagaggggaagagaaagagagttgagaaggatggaagagtggagggtgccagatcgaaaaaagaaagttttaaaataatattttttatttgttaaattaaattaattttaattgccgtgttggcatctttctaaaattgccattcttctcacttttttaatggaaaagaaattctgaaattttctttaaaaatttaattcggaagtgaggggaatgttcaattataagaaacgtcaatgtcaaaggtcgcatttgcacaggctcagctcccctccagtccgcttcaccatcgaatgttcgccgcgtcggccatccgcggacttcgcttcttccaaattttgcgaatgcttcgcatcgaccggcgagcaggcacttggaaactgcttgggtctgttgtttgggcccatcgacaggtgccgttttcctttgttttgctttgccaatgccacggcactctttaggaattgctcaccacactttacatcggctttcttggcctgattttctcctcttttttggttacctttgtgagaagagtacaacgacaagtacaccacttttgcggatgccctg

SEQ ID NO: 73900 - DNA, 345 bp, Heterodera glycines
atggccgtccgtcccctccttccgtcctcctgccattttccccgccactttgccgttctcccaaacccccgtgcgcatttgccgcgcccgtgtctgatcagcaatgatcgaccgcatcgtctcgctggcgtagttcagtttgggtttccgtcgttggcgaatgaatcgtcgcacaatgccacaaattctcttttggtaaaaagtgacacagcaaagagaaaggaaggcgtggaacagaggcgacgccatcagaagacaatgcgaaagctgcaaaaaacaaaagcaaggccaatgagaaactgaatttttagcagtgccatattagggtgtaatcattaccgaata

SEQ ID NO: 73901 - DNA, 2598 bp, Heterodera glycines
atgccatcatcgttgaattcaaataaaaaaagaaatgctaattaccagggcacttcctcagtcaaggaaatcgacgaatcattaattgaaacgacggtaattagggcacagagaacaaaggtccatattcagttcatttgtaccactttttcttcactctattttgtttcatttgatacaaatttagccaccaaaaacccccaaaatcgacggcaatggcagtgccggacagacgccgtccccttcgcgccctcactaccaaatgaacgcactcgaggccgcactgagtcactatttcagcccaaagaagcgctcccccggccgtccggcgcaaaggtcaaatcgaacggacaattgacgatttttggaaattgaaatataagtcaaattcgctttttgggagttacagctttaaaatttagaaaagtgcaatttgatgatacatcatcacattcggaagggtctgatggggaagaagaagttgaggaagaacgaaagtcggaaaaatggaccaaatgcgattccaacagaagcgatttcgccgctgtcaaatgttgctttgaagtcgtgcctttttatttattggacataatgtattcatttagaaattggacaatcatttgccttggaagttcaaaaggaatctaaacggagaaacattcggcagacatttctcccaatggtttcactttttggagagcggccaattcagtattttagtgagcagttagttcattattgtttttcacatttttttgggatttaaactgttattccaacattcatttttagctccatgggcttggttcaaaacgtcgaattttggaggattttcgcgactttctgtccctccgaaaccgtcggtcgttcgtcggtgatggtctcaacccttccgacacaatgccaaaaatgattgaccgaatgacggaagagctaaaactgaagggaatggccaaaacgaaggaaaaatctgtcgaagcggcggcaaaaggtaaaacaatcagaaaatccgtcccattttttctcttctgttatcaaattaattttgttaattgggctggtccgccactttcctttctcaaaatgccatcctttgctgtggttttggctagaaatcgaaaatattgcgaaagcgaatcattcgcaaaaattcttttttttgttcctcacgaaatattttgctttgtaatacaattttatttttgccttttcccttcgtttagctttacgaaatgctgtcgatgctcagctgcgttttccgattgttttcattttgctgaatatcgactcgccccaactgaggcccgtcagacaaatgccctttttggtagcaccaaactctgttcagatctcgggaacatcagaaggccctttccgtgttggccaagtcgagcaaagtccaactgatcgcttcggttgaccacgtcaacgctgcgctcatttgggaccaagtgcgacattctctcataatttttttcaaaattgagctatcaaaaagggttttttgtttgaattttcactttttgcgcctctttttgccttttttctgtccaccgtttccccatttccctttcagtcccttcgcgatgcgttcgcttggcttcacttcccaatttcgactttccattgctattgggccgaagtgatggccagtggaactgagttgctcggccttgacgacaagggaattgcgaaggtaccattagtccaaaagtgacggccatcgaccgaatggtcggactttttcgtctctcttcctcagcacactctttcctcgttggacgccttttggggggcgaccacttcgaacatgcgcaaaatcctagcccaactggcgctgcacgccccgtccagggaggaccgtggtcgcatggatgcgctgggcattccgaagttctgtcgcattttacggtaggcagatcgatggaaatgccaatatttctttaaatttaacggcaattcgaattcgtgggttcagagatgagttcgccaccacttcggagactgtgctcagacagcagctgatcgaattttgtgaccatcgcatcatccaattggacaaaaacagccacattcacttggtacgaacattttaaatgaacggaatgaaataaatggcaaattgcaatcaaaaaaaaacagctggtggaccgtcaattgctcaacacttttctcgactcgaaaattggcaatgaatgaaaaaagaagagaaaagaactgacgactcaatttactctttccttttatttgattttgtttactcttctaccgattaactctttgaactttaatttttcagtttaaattctctgtttggtattatttgtatttattattattcggtaacaaagagaaatccctaattttgtgaaattattaattaatatttgaattgtaataagtgaaagggaatacatttttgaagcatttataacaacaaaaaataacaaagatttgatcataaaattggccaaacttttaaaaaaacggaaattctccccccgtccctccgtttataatgagcaaatgaaaattcaattgcctaaggcggtgactttattcttccgtttgatttgctcccgaagaaaggcaaatgta

SEQ ID NO: 73902 - DNA, 1308 bp, Heterodera glycines
tcaggcctttgggaccaattggaagtggtgttcaaatttcgtcgtctgtacggcttttacattctccaagttggctcgtcacttcgagtgccaatccgtctcccctccccctccccttttcccataggctttcatgcccacttatctgtccgtgttcatcagttggattgccttttggatccaaacttcggcacttcccgctcgcattaccctcggcgtcagttcactgatggcactgacttttcagttcggaaatatcgtcaaaaagtaagtgaatgttcaaaactctgtccaatcagtgagcaattcgacttgaaatggctttttcaaattatttgccatttcttttctcagtttgccgcgcgtttcctatgtaaaggcattggacatttggatgttcggctgcatgggcttcattttcctttcgcttgtcgaagtggggcagagggagggggggggggacaaaatttggagggggcgaaacggcgggtgccaatggaattggggggggggacggcaaaagaatttgattacttatgaaaggaacaaaatggcacttccgaattcgaaagtttctcccccctaaagttggccgtcgttggcttttttgacaaattggaggcgcgcaaacgccgaacgcaaaggacaaaagagtttctgatggtcaactcggacagcgagcagcaatggctgtcccggatgaaccgtttttcgcgccaatcgatgcccaatacccacgcatttcgaggtgatcactgatcagaagggggggcaattgggaactgtgccaatgccatgccaaacagcagcagaaaatatggccgagaaaagaggttcgaggggtacaaacggcggatcaatggacaacggcacggccaaatcggtgacactgaaagtgagcggcacgagggaacgaaagacgagcagaccacgctggaagcgttcaatggccgaggatggggaagaggacagttggtacatgctgaacggagaattcatcgacgatgtgagtcgggcggtcggcccctccccggcattcagtcgcccgtggcagggattgggtcggaccgatcggaaagggaagtcccagcggattgtccgctcattccctttttgtattggggggctttgcttcggtctccccggagaccgtctcaattccctcgccttttccatgctttagccctcttttggtgtccaatgtttgtgctttttgttaagctctccgccaaaatgttccccgctcttttcatcgccttcaatgcctgctattggttttattacatttgcctttcttcgggagcaaat

SEQ ID NO: 73903 - DNA, 1188 bp, Heterodera glycines; identical to SEQ ID NO: 10662
  unsure (1)..(1188): unsure at all n locations

SEQ ID NO: 73904 - DNA, 962 bp, Heterodera glycines
atgttgcgcgaaaatgcggaaataattgtccgggcacgggacgagggcgaagcgctggtggcactgaacgaattcaccgacaaaatcaccgattctaccgtcaaaaattccacgcaggtgaggggaatggatcaaattggtacataattgttgggatggatggaatttggcacataattgcgagtgatcaatttgcaattttttttttttgcagattttcatcggcgatctgatcggcaagtcgtacaaacactttgcggacacgttcaccaacgaaaccattgagaagctgaggctgaaacatcggctgaaagtggtgcagaatttggaggacagtcaggtgggcaattgcacaatttgatgagtgccaatttcgaaggtttttggtcaactttttttcatttgcatcatatggcggtgcctattgacaccgctggagggaaatttagacgaattttataagaaaaattccctaaattttcaagaaaaaatcctcctatttttctgttgtaaatctccgctgaacagatgaagtccatcgtgaagagtgtgggccgcgagtgccgtctgctggccgacgagctgtgccggctgtacagcgtggtgcgtcaggaacagctgttgacctggagaggcgtccgtctcactggaagcagcgcgacggggaacggcgacggaacgcaacggcacgacaaaaagacggcggcggagcgcaaggcgagcagcgccagcggtcgcgcgggcgtcgaacggtgcgaaaaacagctgaaaattaaatttaaaacatttaattgcttaatagaagactaaacgagatttttggcacagtttatgagactgggttttgtgatataacttaaaagtaacacgaaaaattcttaaaaaatatacgaattttttccgtcattgcacaaatttctgatgtcaattttatataaaatgaattgggtaccaaaaaacca

SEQ ID NO: 73905 - DNA, 728 bp, Heterodera glycines
atgctctcttctgtcccaattttcaatactctgctgatggagatgatgatgatgatgatgctgcttcttttggttgtgatgtgtgttatgccaaaagtgaccacattttgtgtccccgagggaatggaatcaaaacggcgacttcgcaattaccaataatttaatttgttccttcaaccaacaccaaaattccttcttctatttttgtatttcattttgtcggcacatgcaatttttaggaaatatttttaaatgtttgaatttgccttattccaatttatttgtttattttttgtttcgcttgctctctctttctctctccgcactttttgcccatttattttattattattattttttagtaaaacggttttcgtttgttccttttccttaattctctcccctctctctctctctctttctattcctactgtaatgatactgtaatgtgtttgatcaggttgtttttatcgtgccgagactcgatcccttttcattcaaattttaaatttttcctaccgacaaccttcttatacagtatccattacagtagtattcacctttatctgttgctgctgctgatgttaacgcgagtgtatactgtaatttgttctgtgcctttgttctctttctcttctttctctctaatttacaataattgtcagagttcagtctccctattacgcgttgtatacttttaggcacaatttttgcaaatttattttaaa

SEQ ID NO: 73906 - DNA, 280 bp, Heterodera glycines
atggatatttttgacgaatttattgttgttgacgaaaaagcattcaatggtctgaaagccgaggattgtaattcatcagcagcaggtgttaacgtttatgtgccaccagcttggcggagtcgccggtaatgcatatgctccagggatggatcggatccgactcccgaaaattatgagctccggaatcttggtttctaaaaattttgggccttgaaattacaatttctgtaattttgtacatcatactgtaattccgatttccagatgtattgaaacctag

SEQ ID NO: 73907 - DNA, 1385 bp, Heterodera glycines
atgcaaattgccagtggcagtggtgttggtggcacaacggagcgtgacgccgggtctgaccgggtgctgaggagtgcaaccaaggcagaactgatgaaattgcaggtaaaatttgaaggagttttaaacgaaaagccttttttcgggtgtaaattgtcatttttttttcaatcaggcaaaacagcgtcgtcaaatgggcaagcggacgggaggcgcgccacgcggaccaaaaattgtggcaggtgcatgcgcgtcacccgagcggaaaaaacgtcaaacgaaacattacaataaattaaaccgagcaaatgtaaataaaaaataaaaaatttttcattttttatttttttgaaattttaagatcaccgtgaccaatagtgccccgaatgttccaacaataattagaacgcttgaaggcgagaggagttaccgcgtgaaagctgtgttggcgtcctatactcatacgaacgggaaaacagcgtatttcctcgactggttgcgtaagtggttgtgatacaaattaaaaaaatttttattttcatttcttctcacatttttgtcactatttgtttggttatggacgagttgtcaccgaatagctcctccataatcaaacagtccggggtttgaatgtttgttgccgagttgtcgctgaatagctccgcgcaagcgtttaaattccgttccccctctttctctctctctctcttttaattttatatcagagtcgtaaatataatgattattaattaggcgcaaggggtcaagagtgttggattcccagcgagtcgtgtgattgtcttgaaatggcaatagacttcacaaagaaggcgaatgtccacgatgttctccgtggattacttggcgagccaattgctgaaagtttggccaaagaaataatggcgagtcccaaatttatagaaggtcattcattttttttttttttgaattttgaattttcacaattattctttaagtttgtgaattattgggccgggaccctgcgacggtgttgaaatttgatgaattgaatatttcttttgctccgtcgctcaatgtggaggatattcaatataaaaaagtttttgttgttaaaatttttaaatttcacttctttttttttccaggcagttgggcagttgggcgaatttataaaaaattgtttggaagcggcaccggcaccagagcaaagcgatagtgaagacgaatgaaaggaaaaggctaacaataacaaattcaatcatttttaacatttctcaccaatttgctcttacataacacattcctcactatatttcctctcacaacaacataaacatttctcacccatttctcactaatttcctcataaacatttctcaccaattttacaattttcaccagaa

SEQ ID NO: 73908 - DNA, 398 bp, Heterodera glycines
atgaagagacgcgttgctacccttgctactgctcctgctgagcaacataaaataattggtcccgagtcgcccaagccacatgaagagacgcccaaaaatgttgagccgaaggatgagttggcaacaaagaaacgcaaagtggacgaccgagagttgtggaaattggcaaaaggcaaatttttgctgaccacctatttgtgccatggtaatacttactaataatttctgcaaattttaattaaaatttttgagatgattggaatcgtctgtacaacaaccagcagaaagtgaagcgcctggagggggaccgttttgccttcggctttgagatgtgtgaggaatgcgtgtgggccaactgccgcgcaaccgatcttttggcgccaatgaagaaaaaatga

SEQ ID NO: 73909 - DNA, 778 bp, Heterodera glycines
atggttcttgtaagcacattttgcgctcagcttctcaactgccctgtcaagtcattgcgcgaccggctcaaccacccagaggatcgggcgcttgtgcttaaacacatcattgggcgcaaagcacgcaccacatacaacgaccgtaatggattgaccaaaactttcttcgtcactggaatttcggtgcacggcgccgcctttcttcccgcatatgggcaattgcgcaacccattcaacatcaatgtggcggcgcatttttatgcacggcaccgcataaagcttcacttcccgtatgcaccgtgcataattgaacgcttttcggggggaggggaggaccggcactatccaatggaacttcttgagctgattgatgacaacatggacatggacatcaacaacaatgagcattggctgggccgtcttttcactgaaattgacgaaaaacaatcgtcgtcaaactcatccgacacaacaatgcgcctagtatttgagggagacatggatgaagacagcggacgcaatgaatgctcacagagtactgtaccgttatattagttttgtttttgctcactaattatgcatttttcttccttaaaatgaccacttccatctattaatttgaaattgcattttccattccttaatttttcaaaaatcgtgtcttctttagcttaattatgcactttttctacctaaaaatgacatcttctaatgcttaattatttcataattacatcttccattcactaataatgcacaaatttttaattaaaaacta

SEQ ID NO: 73910 - DNA, 4649 bp, Heterodera glycines
atgcaaaatcagcctcccaagcatccctttttgttttccattgaccaaattctatcggtcccaagcaaaaagccgcgtcgcggctttctcatcaatgaattgcttggagaggtgcttcaagagggcggcggcagcagctcatcatcatcaaagtctgcaaaggaatacgtcaaaaagctggacagcaccgttgagcatgtgccccgcttccagtacagcaaagtcaagtcgcggttcagcattgaggatgtgccagaagcaaatcctgagggactcctggccggcatcttccagtactgccttgacgcagcgatggaggagagtcgtggacgtggaattgaacccacgcatctcggctgcatgatcagcagtccgttgctcaccggcggggacatccccatcccggttcgacaaatcaccgacaacaccgtaaacaccatcctcaaccagttcaccaaagtggcacagagcaagcagcagcaaaacgtcacactgtggggcgagccattcactgtggtggtgaccacagttgaccgttctggactgcccggccgaagggtgctgaagggcggtgctcggcgaagtctagcaccagtgcatcatcgggtgacggaaacttgtttgattaaggtccaacatcacaataaaaaataaatttggtaacaattttgttaagatttgcaaccccgacggacactgcctcttctacgccttgcaggcgacaatggtggccaaaacgtgcggttggccccgttggagattttacgactacttgcacagtcggaggggacaacagggatgtctgaggcgggatgctttacaactgatgcagcaaattggtgtacggaccggtcggaacacctatgatgctgagatttgtgtgccgcgtgtggtcgaccactggaacaacacgcaacagcagcaacgatttgcagtgttcatctttggatcatcgggacaatacaagcccttgtacaaatacatcaacgatcattacgacactcccattgtgctctatttgaacaaccagcattttgatggtgtgcagaaattgcatggcttgtttggacaaccctactgcctcgactgcgaaaagccttatgagcgtccgtcaaggcacctcaattcctgtaaggcgcgctgtttgctttgctcacgtgtcgggcctgcattcccgtgtgttccattgggcggctttttccatcaatgtgcgggttgcaataaaaagtttcgcaataacgggtgcctccaacaccatttggcatccaacttttgcgccaagtcaaagcaatgcaaggactgcggtgttatatgggacacacgagtacataacagagatgggagaaaagtaaacattaaaaataaaataaaattttgtatttcttgctggatttagggtcacaaatgccacgagacctattgtcagctgtgcaacacatttcacaatcccgagcgggggtgcttcattcagcccattgagccaaaagagcaggacccgtaccgcattgtggctttcgacttggaaaccatgcagcatcagccagtggacccccagcagccagagaagagagagcaccagcccaacttcatcgctgcccgagtcgcgtgccctgagtgcattgagagcggaaattggcggagggtaacagcgggctgtagaatctgtggtccacatcgaactgtcgctttctgccatcggccctttgaggacactcgtgtggacaaacgtgttgtggcggacaacccactgcaggcatttgtggattggctcatcttccaactaccagccaaatacgacacatatgcctactcacactttggcggacggttcgatatggttctggtctttcgcgagctattccggattgggttcaacccggagatgcttcgacgggtacactcaattatgatttttttgtctaaaaatattttaaaaatgtcagggcaacaaaatgtatgagatgaaggtacgcaagcagaagaggcgcaacccgaacattgtcttccgggactctttcaatttgatgccgtgcgcgctggcggcactcatcccctcctacggtctggacgtcgaggacaagcccttcttcccccatttggccaaccgacccgagaactacggccgtgagattcacccgacgcccgaagactacttggctagtggaatgatgcccagcaagaggcagaaatttgacgaatggtacgccgagcatcgccatgagccctttaaattggatgaggcgttagctaggtgtgttcaaattattttacaataccaataattttgttggatttccagttattgcaccaacgatgtggaaatattgatggcagctctggtcgcctttcgccgggaattcttcgaaatttcacggcgccaagactacgttgacgggattgacgataaggagaaccacgacgggatcgatgtgttgcgtgagtgcatgaccatcgcaggggcatgcatgcgacacttccgcacaaaccacctgcccgacgagcacttggccattgtgcccgagcgcggctatgacaacgcgcagaaccaaagcctgctcgccttacgcttcttccactggtacgccaaggagcatggagtgcaagtgcagacagcccacgcggctggaggggaaaagcgcattgggccctactccttggatgggtggattgaggcggaaaggcgcgcaattgaagtcaatggtaattgagttaattatttttcaccattattataaaatgggcaattttaaggctgtacgtgtcacgggtgcaaaaggtgttaccccaacgacaacatgctgctccccaatgggaagactgcgggacaagtgcgcgaacgggattccaagcggatggaatttctgaggggaaaggtcaaccggatggacgtctactgggaatgcgaaatccatcggatgctggagaggagcaaagaaatgcgcaaggcatttgacgactacgtcgatgatggcccgctggtgatccgcgacgcgtttatgggagggcgaactggaccactgaagctgctgcgcaaggctggaccgggagagaaaatctcctattatgacttcacatcgctctacccgtacataaagtgagcacagttaaagttgtaacaaattaacattgtttccttcacagcttcacaacccgttaccctatcggacagccaaacgtgcatgtgttgaaccaggaagtggattggcgcagtgcagcggacaacccctaccctttggcactgctcaaagtgtgggttgtgccaccccgtcgcgtcgacgtgcccgttctgccggttaaagttggagagcggctttgcttccccctgtgcatcacttgtgccaaagagcatccgactggtggtgtgaatcccaactaccactgcgagcacaatgacagacagcgggggtgggtgagcacgtgcacctccattgagctcaacgaggcgttggacgagggttacctcgtcacaaaggtcttccgcgtgttggagtatgagcaaagtgacgacaagctcttccgcccgtacatcgctgagtttatggcccagaagatccaggccagtggatttgacaacagcatcagaggcgatgcggagaaggaacaacagtttgtccgagagtgcgcagagcagttcgacatcaccatcgacccaaccaaaatggcggtcaacaaagggaagcggtccctggccaagctctgcttgaacaacttatgtgagtactgtcgtccattattattatatatttttaaaaaattagggggtcgattttcgcttcgcaactttggactcgctcaaacactcatcactgacgacccagcgactttggcggagtacctggacaacaaatccatcgaagtgacatcaatcgacgagttggacgagcagcacatactcatcacctatctgcagaagaaggactgggtggatgagcactcatgctccaacattggtgagacacacacactcacaataaattgttaatttttataaaatttcagtcatttcactatggaccacctcagcagcgcgcctcgttctactcaaggcaatgcagaaggtgttcagatcaccgggctcggatctgttgtacactggtaagtcaaactaccaaaaaaaatttttgtgcacaaacatttattttagacactgacagcctcatcctcgtccacccggaggagcggtgcccgctgaaaactggtccccatttgggccagttcaccgacgaataccccgaccacgacattgtggaattttgcagtggcggggcaaaacaagtgcattttcagttcatttttgtttacttttcaattttaccaccttttagtacggtctttgtctgcgacgcaagggtgcggaagagggagcccaattggaacatgtgctcaaagtgcgcgggctgacgctaaattatgatgtgatcaacaatcaggggatgcgctatgagaacttcaaagaggaggtggtccggtacgcgacaagtggtgaatacgagccgatatccatcacataccccaacttccttcgtgcaaacatcagggagggaggtcgggtggtttccgtgcctttgcaaaagtgctatcgcccatttgtgggaaagggaatcatcggggccaatttcaatgtgttgaattttggacacacattgtaa

SEQ ID NO: 73911 - DNA, 661 bp, Heterodera glycines
atgcatttcatatttttaataattttcattgcttttaaaattgaatccggcaaaatccgaccaaattttggcgaaatattcggcaacgcatgggacaataataaaagagaagaaaaagcgatcaaaattgaacaaaatgagcaaaatgataactcagcgacagttgatcaaatgggtgagggaaatggaacgtacccaaatgatcaaaagaaaagtgaaatcattagcaaatttgatgcaattaaacaaaagttaagagaaaaagaaaattttcacgaaaagaacagaaataaaattgctagattattaggcgcaaatcgccataaaatatataaatggaaaaaagaattatatttaaataaaaataaaattttttatgagaagaaaaagagagaattcattgaacgatttgatgaatttaaaagtttatatggccaaggaaaacagaaagaatttgtgaaggaattgggcatttcttatgacacatttcgcaaatggaaaaaagaattggtgccaaaatacaataaaagtaagataatttgtttttctttttttagagaaatttgagtgaatttattattctccaccttgcgcagcgggtttcaaaatttggtcgacttttgcccggattcaatttttaaatcaatgaaaattactaaaa

SEQ ID NO: 73912 - DNA, 843 bp, Heterodera glycines
atgaatttgtggcttttgttatttttaataattttcattgcttttggaattgaatccggcaaaattcgaccaaattttgatgaaatattcggcggagaatgggacaaaaatgaaagtgaaaaaatgttgataaaaattgaacaaaatgagccaaatgtgaaatcacaagcagcagttgatcaaatgggtgaagaaattggaagtggtccaaatgatcaaaagaaaagtgaaatcattagcaaatttgatgcaattaaacaaaaattaagagaaaaagaaaattttcacgaaaagaacagaaataaaattgagtggaaaattggaaaattattaggcacaaatcgcgacaaaatatacaaatggaaaaaagataaatttaaataaaaagaatttttatgaggacaaaaagagagaattcattgaacgaattgatgaattcaaaagtttatatggccaaggcaaacagaaaaaatttgcgaaggaattgggcatttctaatgaaacatttataaaatggaaaaaagaattggtgccaaaataccataaaagttagaaaatttttgtattatttttaattttttttttcgttttaagcacaaaataaatattccaatgaggacaaattgagaaagatgcggaaatatcgcaaaattaaagaaaacaatccaaaaattagtgacaaaataattgctgagaaattgggaatttcattttcaacactgaacaaatggaaaacagtttcattttcgaattgaatgattttgaagtgtttagaggatttttgatttgaatggctttcgtctttatattatttttttttcttttccgatatttttatcataa

SEQ ID NO: 73913 - DNA, 847 bp, Heterodera glycines
atgaatttgtggcttttgttatttttaataattttcattgcttttggaattgaatccggcaaaattcgaccaaattttgatgaaatattcggcggagaatgggacaaaaatgaaagtgaaaaaatgttgataaaaattgaacaaaatgagccaaatgtgaaatcacaagcagcagttgatcaaatatgtgaagaaatggggacagacccaaatgatcaacaaaaaagagaaataattcgaaaatttgaagcaattaaagaaaagcttaaggaaagaggaaaatatcaacggaaagaccgacacaaaattgatgtgaaaattggaaaattattaggcacaaatcgcaacaaaataaacaaatggaaaaaagaattgaatttaaataaaaagaatttttatgaggacaaaaagaaagaattcattgaacgaattgatgaatttaagtatttatatggccaaggcaaacagaaaaaatttgcgaaggaattgggcatttctgaaagagtatttataaaatggaaaaaagaattggtgccaaattattataaaagtgagagaatttttaaatttataattattattttatcttttaagcacaaaataaatattcgaatgaggacaaattgagaaagatgcggaaatatcgcaaaattaaagaaaacaatccaaaaattagtgacaaaataattgctgagaaattgggaattccatttgcaacactgaacaaatggaaaacagtttcattttcgaattgaatgattttgaagtgtttagaggatttttgatttaatggctttcgtctttatattatttttttttcttttccgatatttttatcataaataaa

SEQ ID NO: 73914 - DNA, 935 bp, Heterodera glycines
atggcgaggctggtctgctttgcgaccatagccaaccgtgtcggtctgctttgcgaccatgacacagtgccggtctgcttcgcgaccatggcacacatatcggtctgctttgcgaccatgatatggaaagcaagcccagacttgctctcgccaagagatgcatgtggctgggccgctcaatggtggcgccatgaattccttatcgttgctggccaacagccggtgcgaagctggtcccgcactttgtcaagaccagtggactggtgagaagtaacgtaggaaatctgagttcatcaaaataaatgtggactgccttttgaggattgtggttcaatggccagtcccttaaaggattgtagttcgcactatgctgatctttcccctactggggaaagattcgacaaaaaatgcataattttatctgcattcttaatgggatgtgtgagcgatcaatttctgcactcaatgaccttttgtgcgaaattggacatgtttgattcgcagcggcatcactgtggcaaacaaggaagatggaccttaatttttcacatttcaatgtttttgataaatatttgattaatgtggtttattggttgttttccccaaatattttgccgcatgtacacatcattgcttcatttttgttttcagatgccttcaaaacaacacgctaaaagaaagaaggagcaagagcggtaccaaaggcagatggagaaatctgtcagccctggtcgctcacccgtccctgacggaagtgcagatgagaatggggtggcatcacacccgggcaccacaacgcccaatattagtgctttgcaattaagcacaccggcttcttccattggaagtaaaagaaggggaagacccccaaaagccggagcggagtcaattatgacttcgcaacacagtgtgtcatctgctgatacacaaatcac

SEQ ID NO: 73915 - DNA, 1592 bp, Heterodera glycines
atggtcgcaaagcggaccggcacgtgcacaaatctcatcatggtcgcaaagcagaccgataagatttgcaaacaaataaaaaatgtaagtctcaaaatgggaataggacaaaaatctttacaattgactcaactgacattttttttaaagtttactttttttaaaagtttacgtacatataaagtttaagtcaactgtaaagacttcttaaattcatagagcttacacgtgccaaagtgtacgaaacttatttcctaactaacctcagatttgggttagtaaaactatttactaagtgtacactttgccataattttgttatatgtgtatctgaaaatattttgttgtattcaactcagtcaaaccgatgaattttatatattttaaccggccaaggaatttccttagaacattttttaatttacaaaaaattagtggaaatggtttcgcccatcaatgcttatttcaaaaaatcacaataattgattttaatagaatgcaaccaaaagcttttcagctaaaaacatttgaccggttaatttgagaaaaattgaaacatgcacaacaatccacctttgccattgaaatgttagtcctcagcgcatcgaaacgttgcaaaagcagtgccaatttgaggcgagttcagcaaggccacagaaggggaaaatgtccatccaaacgtcgttgcgcacgtgctgaaagtcacgaaaatttttataaaattgcaaaaacacaaaacaatgaaaaaagcttaaagtaccaggcacttttaaagaaaatacataaaatgtttgttgaatttttaaaatttttattttcagagccattttgataatttgaggccattataaactcttgacaagctaagtctaaaaatcaaagaattagtttggccgatgccatcagagcactgggacatctgagtcgaagtgaaaatggacatttcagttccaaagaaataatggatggataaaataataattaattttagatttagctcgtcaagagctttcgaatgataccaaatttgagcgtttaaagggtctagagccccccttttccttcaatttttcgagttttaaaccggttcaaaaaccggtttaaatgcatctccgcatctaattttaagcttttctgtcattctcagcacctaagaaaacctataaacatgtttttaggatttttttttgagttggtaccgtattcggcaattttaccaaaatatctgttggattagtaaactttttagtattttcagactcatttgagaccattaaacttttgtgcacaaaatccttcaaaaaaaacaaaaaaattcacttttacaaaaaattggaatttgaaaaaaaaatttctgaaaaatttttgaaaattcgggccgttatgatttttcgggccgtggccaaaaaaacagaaagaaaacccaaaaaaaacttgccgaatttataaaaaaaattcgttggtccatcaaaatgtttgtccaccagcgcatagaattggagcgaaagcagtgccaatttgagccgagttgagcatggtcaaaagatgggagaatgtccatcaaatgtcacatgctgaaaaatttatgaaaa

SEQ ID NO: 73916 - DNA, 128 bp, Heterodera glycines
atggacattctcccatcttttgaccatgctcaactcggactcaaattggcactgctttcgccccaattcgatgcgctggcggacaaacattttgatggaccaacgaatttttgtataaattccgccag

SEQ ID NO: 73917 - DNA, 372 bp, Heterodera glycines
atgatgagaagaggtacaaaagtgattaaaagaggtacaatagtgattaaaagaggaagaacagtgatcagaagaggtacaacagtgattaggagaggtacaacagtgatcagaagaggtacaacagtgattagaagaggtacaacagacagtgattaaaagaggaaaacagtgatgagaagaggtacagcagtgatgagaagaggtacaaaagtgattaaaagaggtacaatagtgattaaaagaggaagaacagtgattagaagaggtacaaaagtctaacttgttatgagatgtacaaaaataatttcataattttaaatataattttatagagttaggtttatttaaaaattaaaaaaaaactaaata

SEQ ID NO: 73918 - DNA, 637 bp, Heterodera glycines
atgccaaattctcctcctccgtctaaacgtccccgccgcttttttattgaagagttgctccgtgagccattcaatcagctttcgccaccgcgcaaatcaccaaaagattacgtaaaactgctcaactccgaaactgagcttgtcccaaaatttcaatggctgaaaaataagtcgaactttatcatcgagaatgtgcctgctaatccagaagcccttctaattggaatatttcaagaatgcatggatgaggcaatgaacgcgtgttgcgctttcgaaaactcatcggagaacacactcagggcctcgatccctttttggtgtcttcaacagctgctggtctggctttatcaacgctccgacgttgttttctaccgttcaaccgtttggttcacttctgagggaggatacctccgtggacgacgagcttccgccgaatcccgccgatacatccggttcttcgagcttgaaaaccctggagcccaagtgcagtgcgcggattggtctgtgggagagtccaacattgaagacacaggctatcgtgtggacggcctctggcgacgagagcctccgcatcgtccactggccatcgagtggatgggttgctactatcatggtgttttatcgtcttaattttcaa

SEQ ID NO: 73919 - DNA, 1350 bp, Heterodera glycines
atggaaaaggatttggagcgatattacaacgattttaagcggcctccgttcgcgcccacttttcatcccacggatgaaggtggggggaagcaataattcttgaattaggcatttttaatttttttttttttttagaatttgccgatccgatcagttatgttgccaaaattaagccacaggcgcaacaatttggcctcatcaaaatcattcctccaccggtgagtcgtctcgtccgtttatggaatgaatgaaaacgaaattaatcgacgatttctatgccattcacaagttttgaaccaatccaaaatttttttttttatttgtggacttttattgggacaaaaaacaggtcttacctttccccctgacattagaaaatggtaaaattggagagagaattttggcccgatgaaaaataaaattaaaaatttttttgcattatttttttttggttaaaaatgcgctaatcatcacaaacaatgcgaactcaggttttacaaaatcattgattttatctgattctttcaaaacaattttttttctctggggttcaaatccgcttggctgctgattgttttccataattattagatttcaaaaatagtattgaaaatttattttgccaccaaaaaatttcgaaatcaagtgcattatcgataaaaacggggatcgtcccgggactcgcaatttttacagaatttggattcagttaattaaattagtcatttttgcagagtttggcattcaattcaatcaaaatttactatttttacagaatttggattcaattaattaattaatcattttgcagagttttcggccccccttttgcattgagccggccaagtttgaatttgtgccgcgcgtgcaacggctcaacgaaattgacgcgctgttccgcttgcgcatcatttacatcaacaaattggtccatttctggaagtactccaaggaccagcagttccgcatcccgtacattgacaacaagtacattgacttgtaccggcttcgtcaggtttccaagaatttttttccgtaaaaattcaatcaatgttttacaattccatggtatatatgagcgaagactcattaatggttttaccaagatttccgggacccaaagttcacataaaatgatgtcaccgccatgagtattcttaccaagattcctggatccggagatttctaacttcccaacatttctgtatacggagatttctgaaaaaactatcatttccatgaatgtcctgccctcctggtacacaatatccacgaaacatggaaaaattttccgaaaaaatccgctaactattaaatttaacaagtgtttaagtcatggattcgaataaa

SEQ ID NO: 73920 - DNA, 76 bp, Heterodera glycines
atggaaccctttcaacgcttttttgcaattgtttgtgttcttatagcatacggcatgtttgaatctgtacaaagcg

SEQ ID NO: 73921 - DNA, 797 bp, Heterodera glycines
aactcagtgaaaaccaaatcgcacctccggcggtggattatgtggtgataacacacggacatcctgaccatgcagggaatacaaatgattttccagtaattaaaaaataattaaaaattcttttctttttttatttacaatttttaggatgccgtccattttcaaggctttatgtcacattatcggactaaatttaatttctcgaatttatttgaagtaaaaaataatgttttaattcatattaattaatttttttaaacagaatgtcaaacaccaattgacagaaaatgtcgcattgattagcacacccggacacacctcagaggatatcagtgttgttgtcacggttaatattaaagcgaaaattaaaattttacaagaaaacaatttttgtaataaatgttttttattactttctacagaatacgcttcgttacggtactgtagttgttgccggcgatgttttcattgcagtaaatttttttttattaaaatttttaatgagagaaaaatagttagacttaatttaccaaacagtcaaataaatgcttttttaaaaatagtataaattaattaaaatttaaatcttctcagcatgtttttattcaaattaatagggcccggattcattacttctatattcggtaaggattaaaaaaacattttaggccgaagatttgagtcgaccgatgatgtggcgtccattggcatggaatgacgaggttcagtcgcataaccggcgaatgattttgtgcacggccgattatgtggtgccggggcatggaaaaatgttccac

SEQ ID NO: 73922 - DNA, 1068 bp, Heterodera glycines
actgttgatgccaaaagttgggacggaagtgttgagaaagtgaccacgttgaagttgagtacttcttcttcttcagcaccagcaactgctgctgatcgtagcacaagcacagctgataggtcaattcagaagcaattatttggacggataattattgaagaacagaaaccaaaccaaacaaatcggtaaattatttgtataattaattaattaaggtgggcaattatcttttgtagatatcattttagagatatttgggcgttcctaaaaccgccaacatgggcatttttggcatttcataaatctgcaagtcagaaattgtctttaaaatacaaataaagacaaaatatttgttatcaaacaatcaaaattctaaaagtaattatcaaaaatattacttttttgtctcttatctgtgtaacttatgatatgggttatatcaatagcaatcaactataaaattttaaattatataatattcgcaatttattttttcgaaaaaaaataattaatcttattagatactaattatattttaaaatatttttcactaattgtaaaattatgaaggggttatgaacctcccaaatatttttaatatcgttcacggtcaatcccgttatttttggttccgaatccgggttttttaattcagatttccataaaattctgctcattgatgcgattagcaatatgcatattacatgaaagtattttttcatttagaaaaattgagtttaatgacgatgaaaaagagcagtcatttttctaccaagtccaaggcaataatgatggaggaattggacaaagtgcaaatattgaaatattgcgtgaggtaaaataattacttttaattagacccaaaattataaggtaattatgataaagggatatgcgcgacaattggacgctgattatgtgtttgtggccagcataacgttgatcagagatggcgcaaaaataattttggttgacacgggaatgggcactgacatcaacgggaggactgatctgatcagaagttggtaaaacaaatagtaaataataattgcttttacaaccattaaa

SEQ ID NO: 73923 - DNA, 1594 bp, Heterodera glycines
atggacatgtcatcgcagcggaaggttcacgcagacgaaggacgacggctggcaaaggtcattaagtcaattagtgggcaattaaacggaaccatagctaatgaggtatacggtaccacaaaattttgaatggtagatcattacggtatcactggtataattttgtgtgtgtgagtgaaacgattccaaaaaattagtgattatggggcatcacaaaatatttggtgtgagtgatacggtaaccaacatttttgtattatgattttttcagatcataggtgaaattttgttaatttttctatcaaaattattgaaaatttaccaattttttaaatttagaggcatttatctagctggctaaactagaaataagtcaggaacaaatttttagtcttttcttcaaaaattgtctgaaagttttcttcttttttcggttttgtctctgccatggtcccaatttttcattttttttccccacttcaaggcgtacaacatcgatgtaagtgaagcgttttgtgcccaactccatgtgccatttctgtccgccaatccgttgttgttcatcccccgcgtcgtttcccccgccccaaaatttaaaaaaaaagaattttcaagccgagaaattaaaaaaatcttaagaaagttttaataagaaaatttcaaggaaaaattgaaaaatttctcagcatttttggtgttttttgaaaattcatcataaaattttgagaaaatcgctgaaaattctcgaaattttcttatgggaaacgacgggggcgggaaacgacctgctaccccactttttcaaccagttcatggagacgagtgccaaaacggggcacaatgtgcatgacgtgttcgctgaactgagccgacgcctggtgaaggcgtgcgacccgcagcggcggctgcgaccggcgtctgcaaacggaagcggtggtggcggacgcaaaagcgcagcagcagcagaggcggacggtggaatcccattgaaattggctaataatgctaatgacgacgagggcggcatggctgagcagtaccagcaacaacaggcattgtctctatttgggcattggcacttttggcacggggattcccccctctgcgggggtgtagcacatggtatccggactttgtccgaaggcaaaaatattcgggtcgcgattcgggcggcaaccgaattccagggcccataacatgcggatcttgtccgaccattttttagtccacctccgatatattagacagatcacgaaaatccgccgcctatctccgaaaatcctgtcccagaaaggtcctggtcatcggtcaatacggtgacgggacgttagtcaaaaaccatcaaaatgggcgttagtcaaaaaccatcaaaatgggcgttagtcaaaaaaccatcaaaatgggcgttagtcaaaaaaccatcaaaatgggcgttagtcaaaaaaccatcaaaataattttatgcgtagctgatcaaaacgggcgttagtcaaaaaaccatcaaaataattatacactatacgattatgccctatatgcatgcaccactcaattaatgcaaccacttccaaaatatttgccgcactgattatta

SEQ ID NO: 73924 - DNA, 870 bp, Heterodera glycines
atggttgataaaatgactgataacgtgcacaattcattttgttgggttcaattggcaattatgtgaggaatttaaatttatagaaatattaattaactgataaaaagagaattccttcggtcaattatgattatttaaacgatttgtctgcaaggccaagattcaaaaaaaattaaaaattaattaaatcccgaactgtgatatgcgttccataaaatatttttttattgctatctcatactctttcaatgtcttcaaactgagccaaggcctgtaaagcgtcgagaaatcctgacagccttggcccttggcagcatcctggcgctcgtcttaactccaattgtcgttggttcagttgtcacgggatatattatatcatataatattcacggacacaatggaagatgtcagttaaataaaaataattaaaaatgggatttatttttaaaatcaaaatttgggagaaatgacaaagtaaaaattctaaaaaatttctaatccccagacgcagagcaactgaaaattttcttcccgcttcggctgtcgattggggactttgatttcagcattgatcagcaaaatttcaacaatgcatacctcttcaaaaagattggggagatttggaatatgccaaatcttgatgagatttgtttcataggttatttaaaaaaaagctaaattagtacagaaaaatttttagatcacgaaggaactcggaagaggcacacgcggaccggccaaatcgaaatgtttatgtactacgctgtcaaaaaagacaactttaggatttctctttgttgaattgaaaaaatttaaatacaatttaactttgttggatttaaaaattatctgttgttgaatttaaataaa

SEQ ID NO: 73925 - DNA, 1333 bp, Heterodera glycines
atgggcgttagtcaaaaaaccatcaaaataattttatgcgtagctgatcaaaacgggcgttagtcaaaaaaccatcaaaataattatacactatacgattatggcctatatgcatgcaacactcaattaatgccaaccacttccaaatatttgccgcactgattattaattaatgccaaactatcatcaacaaaacaaaaccaaatatttacgcaaatgatgacggcacaaatttattaaaatattcgataatgccaaccaatctccaaatcaccaaaaaatataaacattttattcttgatttttcattaataatgtaaataagcataaaactctcatttagttattcatgtaatttattaaatataacgaataaaaaattaaataatttctttttaggatggaaattccaaaatctgtttatataactattattttttttattcgttttattctctataaagcgaaatcaaaatccatctataatatctggaggaggtagaacttcaaattttgattcgtttataaataatgaaacgatcaaaaatttgctgattaaatatgaaaagggacaaattcattcaattaatgaattattagatctaattaacgctcaatcttcggtgaaaattagtaaaccaacattagagcgctacatggcaaaaatcaaaaaaagtcttggagctgcttattttgtagcaaatcaaaacagagttgctgactggtatgataattacaatacagctaaagaaattaggcttgacttaatggaatttttggaaaccgaaatcgatttacataatagaaatgttgaagggcacaattggtggcagatgtttgagaattctttgccaaatctaacacagtacattaataaccacaaacaccctgctatggatgcatcggaacattttaaatgggcatctaatcttgacttcctatgtgctgcaaaattgttcaaattaaatgttatcgtttgtagcccaaatccacaaaattccaaaaacaaaattaaattcgtatggaatgtttatacaccgaattcaaaaaaaaacacggtaaagaaaatattttgcaaaaataattccttctctaggtattagtagaccaagatccagaatacaagtcagtttttatttattatgatggaagtggccattttgaagcaattttaaatccaataccaactgcagactgaaatatatgaaatgaaaaagaaaagagaattaagttatgtgttttatgattaattcttttaaacaattaatttgggaattttttatgtaaaatattaattttcttataattttttgcaaaattctttggaaataaa

SEQ ID NO: 73926 - DNA, 2573 bp, Heterodera glycines
  unsure (1)..(2573): unsure at all n locations
caccggaattgcttctgaagacactgtaaactttgaggaccaattgcgtctttcatcgtacaatgcatttaaagaaatattctttcgctacaaatggaaggtaattaattaattagttaattaattaaaatgcaaatccaaattcaacaattaaattcctttttttaaagctggaaaatgaaatgaaaacccaaaaagtgcgcgagtataacgaggaggttgaaatttgcataattaattcattaaatattttttttgccaaaaaatcaaaattaaatcataaacaaacaataaaaaaaacattttttacaattttaatttattaacaaaaaagggtgcatttttgtgaatttaaatttttttcttaaaatttttacttggtattgcctatttttttaaatttcaaataaattatgcaaaaaaaaatcggtcaaaaatttatttttaatgtgaaattttttgcaaaaattttttcacaacagtatgacgcttggaaagtgcagcatggtcgtaacaagataaccaaaagtgtgtgggccatcaaatatgatcagttgaaggatgatcaaattgcggacaaagtgatcaatgcgatggcattggcggctgatcaattagcggaaacaattaaaaaaatgaaaaatccatggaaaaagccaaccgaagaagaattgagaaggggaaaaaagggaaaagcggaaaaacaaacggaaattacacaggccgaaaagcaaacgtcaggaaaacagatggtgtttctgttcggggacagaccgacaccggtaaacagcaaaaaagacaattcctgggaaatgagtgcccattttttgcgccaaaattgtttttcgaattatttttcgatagtcctttgcagggcaggatggcattccgaggccccaaaaattttcggaaatcggaattccgaaggtcaaaaaatttttcggaaatcggaattcccaggcccaaaaattnttttggaagtcgaaaatcggaattccgaccccaaaaacgtttttctgttcgggaacagaccgacacagataaaaaaaaaacaattaggaaaaatcttattttttgactaatttttttaccttgacaaattttgaattgtttcggtagccctaaatgttctcgattagcctataaaattcaacaacaaaaaaaagttatgggcaaatatgttggaaaataaataatttttttttttaattttttggccacaattcttttgaaaacccaatgaaatttttttgaacttttgcaggttaatggagaacattttcgttttggcacttttttaaaatttgttaactgtattgggaatttttcatgactaaaatctaacccttgttgttagcatacactttttattcaaaaaacactaatttaaataaattaatttgaaattggcaggccgacgcctcactgttcgctcaccttgtccaactgtttgagacaccattgaaaattccaaaactggaaaatcacataaaaacggtgaaggaacagtccaaccatgcccagcatgtactgctccaatatgttgaagaaatcaaagagcaaattggatgggaacaaatgaaacacagtagtgaaaaggcggtcgaaaatccattcaattttgaatgggtggaagatgcgaaaaaaatggaaaaatataatggcaagtttttggggaggcgggataaaaataagtacaataagtgcacatatgtagttccatttttaataaaccaaggaggacaacaaattagtgagttttgatggtaaaatgcaacaaaaaaaggggtcaaaaaataaaaaagtgtgggtcaaaaaatcaaagtatagggggtcgaaaaccgaaggattagaaaccaaggatgccaggcattccgaggccctaaaaattttcggaaatagaaaatcgaaattccgaggctcaaaaatttttcggaaaccggaattccgatcccaaaaacgtcggaaatcggaagttgaaagcggaaatttttgaaaaaatataaaataaaaataaatacacagttctcatgatgttcaaaaaaaaaaaaatttatttcaagctgaatttggctctgtgccatcatcactgttcaatttttaaattcagcctattagcgacatttggcgggatttttccatttaaaaattactttttttttaatttggccaaaaagcagcatgtacaaaaattaataaaattattttttacattttaggtccatttgacatcaaattttaaaactaaaatgtgattctaagcctatttgggtcatttttatggcatttagcgcctattatttttccaaaaaaaaagcatttaagaattttatttacatatttgggcgcttttttttagatatatatatatgtacaccagggatggcacggaattccgacttccgagttccgacttccgacatttttggagtcggaattccgacttccgacttccgaaaatttttggggcatcggaattgcgacttccgacttccgaaatttttgatgaaaagtcggaatttttctgagttttttttttcaaaaaattagcaatttttgtacaatttatgtta

SEQ ID NO: 73927 - DNA, 630 bp, Heterodera glycines
atgattgagttcgatggaatgttcatggtatttcctggtgctgaacggatgcatgaacgggaagagtttggtgcggacaatgaagaggagaaggaggaggaggaaaacgaggatgaggaagatgatggaaatatcacggaaattagagaggaaaaagttaagacagagaagtcagagcaatcgataagaatgcgtacaccaaagagggaaaagaaaaaaggagcggcggaaaacactgggaaaaaactgtcggcgggaggggaaaagaagacagagaaaaaaatgctgagaaaagatagtagcggcagtggtagcagcagacgacaagagcgaccagggaatgagcaaaacccggaggggcaagagatgcagactgtttataatgagcaggaactcaagtccttcgcaatgtactttgaagagaaaacatggacaactctcatgaataaacagatgttattcgaggtacagtatatgtacagtatgggattatatgtggtatttggctatagccatgggcttctaggccaatgttattgcatggcttctagctcagctcaaagttatccctatcgtgtcttctcgaccatgttttatgttatacatgtccacctaccgtatttgctctaa

SEQ ID NO: 73928 - DNA, 2371 bp, Heterodera glycines
caaaattgtggaattggaggaggaattgcgcgtcgtcggtaacaatttgaagtcgttggaggtcagcgaagagaaggcattgcaacgcgaggattcctacgaggagcaaattcgcaacctcagcgcccgtcttaaggaggtggcacaatgcccgcgggcaatctgacaattcggcgccttttgcttaattatttgttgctttcgatctgttaaagccaaacaaaggctttgaccaatcaacaaaatgaggaattgctaattggattatcattaggggatagcattcgaaacaaaaaaacaaaatttaaaaaccaaaatttacaaaatgcgaatgtttcgaagtacaagcagttttgctatgcttttgcaatttcgatattggataaggttttcttaaaatattttgagtgattgtttgctgtcgcttatgctttttgtaagaaaaattaggggattaaaaatattttttggttttaatttttggccttttcctttttaggctgagactcgcgcggaattcgctgaacgttcggtacaaaagctgcagaaggaagtggacagactggagggtgcgctcttttggcccattttttttacttttttttcctttgcctttttttgcaatgctttgggagggaaaagccatgggacaaaaagaggcaaaattacgcgggggaatgaccagcagaaaatgaacggatcaactgattgtgaatgggttccgcttcttcgtttaaatttggcgttttgctttccgcttttccttttgtcttttccttttgtctttgcttttgcgtttcgtccgttcgttcatttttcgtcgcttttccctaacttttgtccgtccgttcgacagatgaattgctcgtggagaaggaacgcgtgcgcaatttgacagcagaaattgaacagactgtgcaggagattcagggctcttgaactgttttggcttcttcagaatttgtgacgatgtcaaagtgtggccatttgtcattttcgtccgttctctttttggcattttgtccgttttttggccgactgtcctatgtccaaattttcgttaagactttcattgtccatcattcgttatgagcttatctagctttttgctttcttttgcgtaaaatttacactatcgcgaaattgggtgtttttctccttttcctaacactttatctctcgtatttaattggcaattaactaattaatctttgtcccaattgccgtgccattgcttttaaccccattaacaattttgcagatgaacgtgaacaggcagtgaccaacgggaacgttgtgcaagaagaattggaccgattggtgcatgaattgcatgccgtttgaggggttccctcttctgttgacggatgggtgccaatttgagtcgtaaaacggaaggataatttgccaaatgaatttgattgggggcattaataagccttttggcacccatccatcccccattttgttaatgcatgaattcgtcgactgctgatgaacggccaccgtggaattaattttgtcactaattcatttgtattcctttgctttcgatgggatttgttctaacccattaagtttgaaagattcactgtatcgattaaccaataattagggcgaggtttatgttttgaaattccaagaatatttaaataaattttatgaaaaacgcaaaaatatttatgaaaatattgaacaaaaattaaaaaggttgcagtgcaaaaaaaaagaaaccgtacgctaacacaatcaaaaattattcattgtttaaagttccaaaaattctgaatttcgagaaatacggaaaatttaccaaagattgctaaaaaaaaatgccgaagtatgttttttttaaaaaggcctaaaaatatatatatatattttttatataaattatggatattgacgtgaaagcgaagaatttcctacgctaaaaaaataattcctgcatttctcagcaaaacaaagaaagcttcatgaaaatatttaaaaatatataaatcctcaattactaataaaaagaaataatgataataactgcgtgattatcgttattttttgggtttatttgtgaccattgggttatttcgttgatgggccaattagttttccgacggtttttgtcattgtcgtgtgtccaccccttgacattctgcaacaatattttgctgttttgagttcaatttgaaatttgtttgatttttgcagacgaattggtccacgagaaggagcggtacaaagcaatttcggaggagttggactcgactttccaggtgaataatgattgtatgaggaaaagaggacaatcattccatccctttggaggagctttccggctactgatctgttcggtcaacggatgcgagcggaa

SEQ ID NO: 73929 - DNA, 1223 bp, Heterodera glycines
atgggaatgacagacaatccatcaaacggaacttgtcaaggccgaggcggacgtggccgcactgaaccgccgcattgtgttggtggaggaggacttggaacgcacggaggaccgactgaaaatcgccactcaaaagttggaggaggcgagcaaagcagcggacgaagcggaacggtgagaaggcgcgcgagcggaaaaccgcgaaaaaatgcaaaaaatgccaaaaaaatagttaaaatgagtgccaatgtgaagagagagctgcgagtgtgaaattgaatgaaaatctgcagagtttgtgtgccgaagttggccgaatgtgccggagggattggtcagtccctcctcccaaaatcccctgtgggcaatttccatttgctacggtttcttccccgggggttcattcccccccccgccgcccctcctcactttttatttggctttgctttgtcgccccaatgacgtgggcttaaggctgaagccgaagtggcgtcactgaaccgtcgcatggttctgttggaagaggagttggacaagcttgaggagcgccttaaacttgccaccgaaaaaatggaagaagcgacggccaattgcgacgaatcggaacggtcagttcaaaggaaagggaaggacagagccaacggacagagagaagagaacccctggccaaatgggacaaacactccgctaattgggccaattaattatttgacagaggagggaggggtccattcgtacttttgcgtactgtacgtattactgtggtgctgtgtgtatgtgttgtgtatgtgtttgtttgtctgttgattttagattgaattggcatagctttttaattccttggcattccgcccgtcgcttttcaaatgctttttttcttcgcttttgcgctttgctttttgtccgctttttgtccaattcctttccgtcgtccaaatcagcgcccgcaaatcgatggagacgcgttcgcaggcggacgaagaacgcgcaaacattttggaggtgcaagtggaggaagcgaaagtgatcgcggaggacgcggaccgcaaatacgaagaggtgagcgaagggaagcgacggtggagggagagacagacagacgagacgcacttggacaatgcctatgccaatggctaatatggctaatggcaatgccaatggctaatatggccaatggaaatgccaacggcaaatatcgccaatgccaatggcagcatttttag

SEQ ID NO: 73930 - DNA, 901 bp, Heterodera glycines
ttgctgccacaaatgctgattactgcgaggaggacaacctgtacactgttcaatgtgatcaacgacccaaattggcaccaattgtgttgaaagttaatgggaaagacattgtggtgccagcggaggaatatataattgatgtgtgtgtgaaatttgatttaaaaataatcaattttaatgaatgaattaatcaatagttgaatttgccggatggaaaatgtgcccttggattgtttgggcaatatggcgccggattcacgacggtaaaatttttagaaaatttttatgtaaatcggtgattttgggtaaaagaatttttatgcaaattgtgattatgggaattttgaggaaaattcgattcttttttcaggaaaatctcttaacaaaaatgcaataaacattaaaagaaatggtctttcaattttgttacaaaactttttggcacttccactttggcattttcagcccaatctgtgctgattgagctgttgattcattcaattccaggattggggttgatccataaaactttccggcacttttggcatttctacgtaaatctgtgctcattgtgccgttgttaagtcatttattcccaggattgggtttttcccaggattggcttatccctaagactttttggcacttccattttggcatttcactcacaaccaatctatgttcattgagctgttgactcatgctgattcaattccaggattgggtccttggcgctcttttcctgaacgcatattgcacaatgttcgactacgacaagggccaggtgagcttcgcgagctccaaggacacaatcccgtacagggatggcgaggaattcaacgcgtcattgcacgtccattcacgccaaattctcctacatgaacataaggaggaattgtga

SEQ ID NO: 73931 - DNA, 333 bp, Heterodera glycines
ctgacctgacccaccattcaccatcattgatcacggatgattttgagaccaaatttggcattttgatcatcattgaccttttttatttatgtttttgtccgtcccatgagccagcaattgttgatcatggatttagcccaattatatgtatgtgactagtatgactgcttgcatttacataaaatttaaagttatgcagctaattatttactctcacttcccccattaatgaaatgatgtaattaaacgagaccaggcttgatcaacctgctgatttaaattggtatggatttgaaactttgcattaaacgtcactctgacacatttacattt

SEQ ID NO: 73932 - DNA, 3551 bp, Heterodera glycines
caatttccaagtgatcacaatggagtcgtgcaaccgattgagcggtgtcgaacacggcgccttcctccactatttgcgcaatgccagcgtgtactttgggcccgggtgcaacaacggtttggcagggaaaaagggcaaattttacccaaaaaccattcagaaatgaatgtgatcggacgattggcttcacgatggaacggtggggaaggcattccccgttaatccctttgataattgctttttgtagtgccaatcattgcgcacctttccggcgacgacgccctgtcggacagaacaagttggccaaaaaaaagatacttgatcccatgaaattttgaattaatttttcaaaaattcccccccccccccctcagttttcgataccctcggctctgtcgcgctgacttcggccacagaaatggcacgtgccgcgctgactcttctccaattgtacgggtggaaacaggtgaacagcgaaggtttcctgctgctgctcatctccggatttagtattaaacccgggttaacgagtataaatcctgatttatttttccataaatattttttttgcaattaaaaaaaataacagaaatttacaaatgctcatttgtcagaatttaccagatacataactttaggcattttgtaaaacttaaattttagttgaagcttttgattttaaagttaaaactcaaattgacttaattatgtaattaattcgatttttaatcaataaatttttgcatttaaaataatcaattttaaaagaaaagaaaaaatcgcatttaaacaaaaggaagatgaaacgattttttatttttaacctgtttaacgaaactcggggatataaaatgtccgatctctattaataaactcggaaatgagcacgaggccatacaaacggaatgccaagaataaaacaaacagacaattaatgagttgacagatcggtttggtgaaggcgagcattaactttgaacgcctttcgttgcattcgctgaagaattttttgaaggattcgcaaattgaaagtgagcgattaaatgagggaattcatttgagcgaattaggggagaaagtgatactccctcctcctaatgacccaattagttaacccatctttcaagtaaatgtcgaaatcgaattggacccgtatatgacggcggacgaaatcattgccacaggcaaattgaaactgttgcggaatcgcgcgagaagtaagcggacagagaaagcacaggcaaaagcaaagaattgggcggatggacaacaaagaaataaactcattagcccacgggaaaaccaattaaaatgattggaaatgggtaattaaagacgggcaaaattgtcattcccgcaatagttataatcgtcgagatgggcatggacctgcactcgtctcgcaattttatgatcgccgcccatcggtcgcacatgaaaacgaatgactacgtctatctgatcccatggcttgcccatgtgagtcttttccgcttggattcacacggtgtgggagaaggaaagggattcagttcaaatggcgagagtctcggcaaatgcttttcctttatttatattttcttttttattaaaatttttgatcaaaatttgcttgtccatttgaatttggctgattgtctcgacagatgcacgaccattacccgtgggaagcgacgaacattgagaagcaggagacaaagacggcatttgacgacacaattgtgatcacagctcatgggtacgacaagaagttcattgaggagtttgagcatcgcttcaacaaagtgacgggaatcatcagcagttatgtgaggagggagaaacaaaaaaaagagggggtagagagaaagccagacagaagaaacaggcacaaagagacgggcccagagggtatgatagctaaagttctgttcccccccccccccccccaccactacagtaccctcatgaccaaaatcctgggaccgtccccggctgaccatcgagaaaatcagtgaaatatcccaaaactctctgtgcatcgcccattccttcctgcaacacttacagtacgccacgctgtcttacatgtccctgtacgatgcgctgtttctctacgggttggctgtaagggattcggtggaggagtcgcgcaaccaaaacatctttttggacgggcgatacatttggaagaaaatgaccgcacgacaatttattggtcgggagaaggcaaaatcaactaatgatcagggaaagggtcaatcaatagccaaatgattgttaattcgccaaatattggccaaattggtccaccgttttgaatttgtctcctcaggggtaacggggcaagtgctgatgaacaacaaggcgatcagagtgcccagctatgccacttaccatgtgaagaacggcacaatgcgaattgtggtcgaactgaccgcgcgactcagcgacaagcacaaatgcgcactgtcggagaacgactgttcggagcatgtgagcaattcgggaacaattggaaaaggggactgatcagcaaatgaatgtttgggaattgatgattggatagttagagtagtagtgactgagactgatcagagaatggcaagggtgggcaaatcagaggcacaactgacggcgatgcttttctctcttctcgcgcaggtggcgcacgagacgatgagtcactattggggctcctacgacggatatatgccaagcgacatgccaaagtgcggctttgacggcaatctgtgcgactataccaacatttacatcacaatcggagtgttggccttcttagctgtgagcattccgctcggctatttgctttatttgaaggagtgagtgggggagggagatccgaagggatcggccgacacgacaaaaagtggcatttaatgcacaataaaccagcaattagagggcaatcgaattagccctcaaaagaggtaatggtaaaatccggcaccaacaaagtccgttgggcgagactttgctgggattatcagccgaattcgttgtcggttgacccttaggggagagagtgatttgggttaataatttccattgtcatttattcaggaaggagcgcatgttatacgacatgacgtggcgcatcccacgggaacagattcgactgttggaggagaggggaatggttggcattggcactcatttagcaaattaattgggtggggttggagggggattgaattgaccggtacgaatagcccttgaaaagggtttggtagtcggtcatcagaatcaattaggaaatgctttcgttttccgactcggccaaataaaacaccgcttaatgagtaagcttttacgcttcttgcagaagtcgggctccctgcacagcaaaacgttgtcccacgactcgtcctccctgggcggaagcctcggctccgcggcaaaggcaaacgcgcgtttgtccgccaaacaagcgatgtccaacggagtgaaatgcgcgtacaaacggtacagccaaatgcgcagtttgtccttcaacaaaaacgaattgaaacggctgaaggagctgaagctgatggagaacgaaaatctga

SEQ ID NO: 73933 - DNA, 1962 bp, Heterodera glycines
  unsure (1)..(1962): unsure at all n locations
atgnatactgtagcggcggcgtcatgggcgacccatttgaatttggcgccgcccgctgaaagcattggccaaatgttgtcaaaaggggagggccaaatgaagcagcagcagcaaacagtcatggcaaataataacaacaacaaaagcagaaaagtgccgaagcgacggtcgccgtcttcggacgcattgacgcgatgttcggcggcaccagcggatgccgcgggggccaacggcggcgcagggcattggacgcccggtaaggaaaaagagaaaaaatgagactttttgccattcgccgtgggaaattttgacttttttgattaacaataagtttttccagaatgatcaaaattttcaaaaaaaaaaaatttttttaaccaattatcatttaattttatttttttggtgccaataaaatgcatcgtttggtggtggcggtgccgaaagaaaccgccggaaaaagcagtagtgaacgtgttttttaatgagatgctgtaagattttatgacctatttttcagaaagccgtgccgtagggcaccgccggaggaaattttagaaaatttattcataaatttgtttgtcgcttttgcaaaaaaaatttcacattccatataaaaatttaaaaaaatatgaaatctcccttaaaaatggctgtaaataatggtgggattcaaatttttttttttaatatccttctgcctaagggctaaaaggcactgatgacaagaaaagaattgaaaatttgccaaaatttaattatgtataaaatttagaaaatttccccaaaaagaatacatttaggctaaatattaaatggccagcggatcatttactcattttttggtctctaaaatgccatcgtttgatcagttaaatttaatttctcaattcttcagtcattcaacagtataagcatggcccgtcgcaacaacagcagcaaatgggcaccgcttcttcttcttcttcttctgttggcattggcattaataataatggtctatgaaaaaagaaaatttaaagcaaaaattgttttaatttgtttttatttttagcgaaacaattaaaaaacgtgcataaaaatgtgatggaattggcagcaggtgaacaaatattatattatatgtactctaaattaaattaggaagaattattgaattttataacttggacttccaaccaaaattaagaaaatcttttaagattattaatatatttgttcaaatgccaattataatagatttttatgccaaaaataaggaaaaaaacacaaaatcttcaaaatattacaaaaatttgcaaatcttaattttgttaattagagcttaaaagaataaatattacatgaaaatgcaattttatatcctttttcaattttattgattttctaaattaaattcattatttttaataaatattttatttaaataattttgtctttgaccgaattaataattctccccaattttccccattttccctttttgatgtcacttgttcctcctcttcatcttcccattttccgcttcttccccctcctcctcctccttttcttccgcatttttcttcttcttccgtccctccgcttccgtcgttgcccaatttcaccgcccctccgcttctccaattgctaatgttacgcggccgaattggcggtgccattgacgagcatggcatcttgggtaaacgattaacatttaaattaaactaaattttttatttttattttaatattaaaatttcaggtcctccattggatctccaaattgatcagccaacaacaaaatttgccgattcaacaacaacgacaaagacaacgacggcacatgtgccaccgatcatttcacaattggtgggcactgacagcagcagcagtagcagcagcagtagcaacaacatcactgaacagcacaaattggacgcaaatggaggcaaaataaaaaaaattatttaataaataata

SEQ ID NO: 73934 - DNA, 2860 bp, Heterodera glycines
atgtttttgcgacggactgtcaatgcgtggcatttcgcccactgtttgaaaaatgtgccgcgcacattgtcctgctacgttctgttgctgttgatcatccactgggacaggtacaaagtgttttggtgggcggcacagcctgccgggcagcagcagcagcagcagagccaggcgcccggcacggcgccgacgacgccgcaggcgcagaacggcgccggcgggcgcgaccacgtgttcatttacagctcattcctctacaacagaaggtcagtcaaagcgaggacacaaatttggaaatggcaaacagagctgatcagctttatccatcatgtggacgttgggcgggtagtgtgaattttcatcgaaatttttgaatttttctgtttcgagtttgggttttgcatttgccactttttaggatataagaaattctatcctaatgatccggttttttttcttctatttattaattcccgggactttaagctttcatttgataccaagtttaagcaaagtaagaacaaagttatggccaaagaaacagaagatttggactcataaagtgcgctagagcccatggcacacagctgtcagctcaccttatccattgtttttgggttttgttgatccgtatttttcgcctctgctggtttgactcagtctgatcagcatcaggatgaatgaccgaaacattggcatgactgttttgagtggagttggcacgaaaagcatttttaagttttaggcctccctcaaatttttcggagcctggcaaagtgcaattgattgtactctttttggcacataagtttcatcgaagcactgacggattggtttgtgttgtggccaaaaatgcgatttctgttcagaaaatggcactgcaaaaggtaaatttgatctatgagcatttaaaaattgaaatttcccttttttttgcattttgtcccttctttttaccattgttttggcactttgtcctttttttctattttttggcatttttccctttttcattcttttttgacaattttaccccttcttttgataatttttggcattttcgtcccttattttgccatgtttttttggcattttgtcttttattttgccatatttttttcggcattttaccccttatttttccattgttttgccctttcccataggaaattgttcattcattgggcatttgtgccttggatttgttcgtgctcagctgctctgtcgacggactgcccagggacagtacgctgtttgaggacagtaaccgctcctacgcctcgtaccgtaacatttacagtttggtgttgacggacgggccaaggtcacagagacagtccaccaaattgacagtaagtctaattcatttttaagtattgattcttgtaaaatccatgagggaaatcccctaaaaatttcgtgggcgggaggggggggttcggttgagatggcacaaaaatattataaatcggagtctgtgattaggtgctaaaactatgccagaattgtgccaaaaattgcatttaaaattccatttttcattgcttcagctttttttaattaaaaaaattttaaactatatttcggttatttaagctttacccaaaagtgcccagctacaagtcgcgtggactcgttctgtgcataagccgagtgtttctgttcgagaaatggcaattgctaatcaccgccctggagacgtatcgcctgtttaaagttaaatgaggaaaatttcattttgttttttaatgatttttaatatctgacaaaattttaaaatgcaatttaatttaacaacttttaaactaatgcatttccttttaaattgaaaagaattttatattttttattaatattaatgaatatttattaaattattttaacttattttaaattatttataatttttttatccatttttggtcgatttggtggtggcgtacgtccaaagtgccattttggccgtttacgagctgatgaaggcgtacgagcgggaaggactgctgcgggttcgacccggcattcgttttccgcaccagcgcggaatgccatgggacccaaacgcggaaacggagtccgacgcaaattaaaaaaaagatttaatactctagaattttaacaaaatattttaattgccctaaatttcaacaattatcaaattttccaattaatcggggctaaattgaatatttgaatacctctgagcctaaaaccgcgaaaatatttcattttggcatcatagcattaagcaaaattcgccattttagcatcttttcgacaaatatggataattttgcttaatataaaccaaattttgcaattttgtatcgttgatagcccaaaattttctttattatcctgcaaaatttcaaaaaatttggtaaacgtttgaaaaagtagcatgaaaataaataatacatattttggccataacttatattaatttgataattttattttaaattttggatgctaatagagaaacagctggggatatcgaatgacatcaaaaatctaaatattattaaagtaaaactatgccatattttgtcgaaaaaatagctaaaatggtgggttttacgaaagcatgagccttaggcaaaattgcagattcaacggccaaattctgcttgcccacgactgcttctacgagtaccggcacagtgcccaattcattgggctcatcgactgggacgacttgcttgtgccgtcccggcactttgccacactgccggaggcatttgcggccgcttctgccgcccacccggacaccgcctactttttggtcaacaagctcgaggcaagctttgaggagcagctgggtacggtgtttttgtgggggaagaaacggtatttgtga

SEQ ID NO: 73935 - DNA, 3427 bp, Heterodera glycines
atggaattattctccgatgcagtttcactgcccgcccggctgcttctcgtgcactccgatccattgccaagcctaccagtgcattcagccccaaatgatgccaatggtccgctgctgttgccggccaatgttcatttccagaagccaacccgacttaaaaagtgagttatcctccgtcttgtttcatccattccaattcactgcttttccattagctgcgtgtgatggcgaggaggcggtcgcggcatgtcttaacggactttgtggccaagggtacttttgccagcgcgggaaattttgctgtcgatgtccggtgggaaaatccatcggtaattaaatcacaaagtgtcgtcatttgcattaaatgaacgcgatgggaacactcccaaaatcaactccattttataatcttttcagaatctctctcataaaaccgttcttcggatttgccttcgtaattaatccgttttcaggacgttgtgttaatgggctttgtccgattggttacgtttgtaattcaaatgacttttgctgtgccgtcggtatcactacagggtaaatgagaaaatgatttcggaaattgggtccaaaagtcacaaaacaattaattaattaattgttggctgttgttgtaataattgaacaaactcaaggggtgccatcggaccatgtgtaaacggagaatgcccggaaggatttgcatgcggagaaggggtaagaaaacagtgtcaaatgggcttttgtctccacaattaactccgtaaaaggacctttgctacccgaactccgtcggcacttcgcttgtggaagaaccgaaggccccgacgcggaatttcccattgaatgttcgcgctaaacgaccgtattgggccacaaaaacacggaggaggggcgcacaaaagggacggaaaaacggaggcacaaaaagacggtggtggggaaggcgcgaaaatccgtgggaagtgcgaaggacacgcggcggatggaccgacggagtgtgggaggaaagcggcgagggatgggcagccgaaagtaacgaactccgataaacaaattgtgtagggtaagaagcaagtggagaggaaacgaacagaacggccaaatgcagcagatcgattgatcggatataaaatctattgtttcgattgagatttgtgagcaattaagcggctctaacagacaatttttaatacaagatgggacaatgaaaaactagtgcccttatttgttaggtgctttattcgagagtatctgccacggttagagaaaattctcgggttttttggaggtattggtctcgaaccgtgtctctgtttatttgtttaacgaatgaatattaaaaattttttcaaatttttccacaatgacatgtaacattctgtgtgtggggtagacgacgattggcgagtttaacgaaatttaggctatagtttacggtttattgaatttgttgcactaattttaaaattgttattttcaattctgtttgaatccgggttcggggttcgatgggcctaaatatgggtcggatccgagttctctggccctggaataaataaaaagtcgaatttggacgccaaatacatcataaatttcatggcgtcgggaatgaatttagtctcggatggctcaaaaatgcagaaacggaagtgatagaaatttaaaggaggaaccgccctccgtttcgccatgctacatatgccccttgtgtttaattccctaaatcagttcttaatttccttccacttctctgttcgtctcttcgctctgacttctttttgctctctttaaaataaaatgaacgaaaaggggagggagagtaaggaaatagtaatagtaaagtgatgtaaaagcaaacagaacagacagacagacaaagacagtcggacggattcattcgctcgttggggttggaagtgtagcagtcgtcagccactcactcattcattcaccccacagaaagccttccccccccccccccggctgtttgctcgtcgatcgattcccttttctcattctccagccgatagaaagacacgatatgcgctgaaattggtgaggtttctcagtttcttattggaccccatccatcttctactttttttatttagggattttacggttttgcggataaaaaagggctgaagtggacggggaaagttttctttctcttaatttaactctttattaggtaaaggggtgaagtcttcgaaaaagtcgtttcaaaccgcaatttttgctcatattttcgttaatagatagtctttacaaaaatctcaaaaactaaacgattggagagttccgcctaaacaagttttattttatgtatcaagctaatgctaagcaattaagtaaaaaagataatgaccaccttaaaaaagaaagttcctaatgtatttccacttgaatcaatctacctatttgatttttaatggctaatacagtacatagttttaaagattttccgaaaaattatcattttggtccgcacttacgaaagttataattttctaaactttggtgctctcaccagacggactgtcccgccgcaaaatggccgaaatatgaaaaacacaaagttcagttgaaactgtggaaacataatttctttgaggctgaaaaattaattttccctttgaccctaacaaaaaaaaccaaattatttaattttgtgcatctcatgtaaatctgcacttctttgataacatttaccaattgattaaatcatagatttgttacacgttaaattgctgtctgtgatagcaattcaattttttccatatttgcaaatcaacaccaacatcacgacgagcgggacactgaacgaagggagtggcggtggtaccggcactgctgcccctggtcaaaataatacgaatggtgacatcaccggaggttcttctgctgccgctgctgttgccgggaacgtccatcggtgtcaatcgcccattatggaagcagaagttgccgaagacacgtccaacaaaatgttcccttctcatgagcaatcgcaacaactacagcagcaaccacaaggagtcaagaaggaaagtgttggttcttccaattcgacgacttcttccacacgggtcgcttccgttgtacatccaatagaaaccacgaaagattcgaaacccaagccatcggtcaaagacaacacaacgatcagtccacaggcgcttaattcaatgctaagcggctctcctctaataacaactccgtccattgcgcctcagcagcgtcatgcgccaggggactacacagacgcagcggtgactggcgggaaaacgcgcggaggtgtgccccatcatttgcatcagtaccagcagcagcaggtggtccctcatcagccgatgctcaaccaccgtcatccggcgggttcccctccatccgtcgcggctactgctgttgagggaacgacgatgag

SEQ ID NO: 73936 - DNA, 858 bp, Heterodera glycines
atggcaatgggcaaagagttggagcaggcaaaggaaagtcagaagcagaaaaggggcacaaaaatggaagaagttgccgagtgccatgctgacaatgaaactgaagcaacgaaagggccaacggaatatttggaagaaagggaaggacggaaagggaagcgaagggaagggaaaagaaggcgaactccgtccgaagcagcagcagaagaagaccgaagaagcggacgaagaagcgaatgcaatggccagcgggggctgagtgattagccggtcattatcgagtggagtcatcgccgattagctgcagcggtggccattgtttcagtgcaaacaaaatgggggaggagagatggactgtggcaagaggccgtgccccaagtgccctctctcctgaaactgaccccggcgatgatccaagcggccggggggggggagacggacttcctccttcacccatcgccacttttgtgcccctcccctccacccgcttggcccatttctgtccccttttcgtcctccccccccccctcgtccatttgtccttaatcgctttttccttcgctccccgccgccgtttcaatcggcttttattcctttctttgctttgcttttcatttgccatcggttgcgaattgaccaatgttcggatgtgattcattaactcatcgaagaggaatgaatgaatcatcattctcattgtttcacaaatttatttaaacaaatttgagtttaattgaccgatggaacaaaaagaggttgaaaatgatgaaattgaacaatataattagcaatttgaaagcaattaactgtaatttgatgagataaatgaagaattttgaagggacgaccaacgaagga

SEQ ID NO: 73937 - DNA, 593 bp, Heterodera glycines
atgactttattagtaatagcgtgtttggcgattgccgtattttcgggtaaaagataataattaatttatgttgaaaatatttttaaaattttattttttaggttcatcaatagccaatcgacatagctttgtggagcattatgacgcgacaaacattcaagtacacacaatggttcttataatttttaaatcaaaaatttcataatctcagaaaatcagagaagtatttttgtccttaaataggaagagggtcctgaaatggtaaataaaaaaatccgcaaaattataatttttaatgcaatagaaatattcttatttttaagctgaaacaaataaatttttttgattttttaaaatctttattaaattaattaaaattataaaaaatgccattcttataacagctgcgcgattccgtgccgaacgatcttgtgccatggatcacggggccccgcagcaaaaaataccaattcaacattggcaaacagtcatggatggctgcgcgagaaaaatgtttggcacaaaatgccggtaaatttaaaaaaattgtaataatttaaaaatatatatatatttaattacagatttggtga

SEQ ID NO: 73938 - DNA, 1954 bp, Heterodera glycines
tgacccgacctctgaatttggtggtgagatcaccattggcggcactgatcagcgacgatttgtggccccaatcacttacacaccggtcacacacaaagcctactggcaattcaaggtatggtagtttgccatcatactgtagctttatacaaaaccaaacccatcagagagtgaaaattttggaaaccttattaaaatttttgaaaatttcacgacagaaaattttattttactaggtcatatgcctgtctttacatattggatttctgaaaactaatgttacagtatttttgtataataaagaaattttatttatttttcttggccatttgttttatgccaattcaaaaatgtctgtctccatttctctctcgttttacagatggattcgatcagtggaggtaatggcaaacttgcgtgccaaaatgggtgccaagccattgcggacaccggtaaaaaataattaaattttcaaatataaattaaagagcaattttaatttgaaggcacttccctgcttgctgggcccaaaaatgacattgaaaagattcagaaacacattggagcaattccgctcttccatggcgaggtgaaacttttcgaaaattttcatattttggcatcttggtactggaacaaaaatgataaatctgtcttggtttagcttcaagcttccataaaatgcaaatcctggcacaaaactgaagttcacaatttgccatataattcaaccgattccgcaaaaaattacttaggctttttccagtttaaatttagagttctcaattaaaaaaaaagcctggacctaaatatggaccgggatttcatattgaagctggtggatctggattttcaatctgactaaaacagtatgcttaattatccataaattctttgttgcaattgcaattatacagtatactgatcctattttcaaaatacagtatatggaattatagagaatattaatccaattttttctaataattggactcaatctgacaaacacatatgcttaattattcgtaacccttttttgtttcattttttttattgcaacaaaattatacagtatgctgatcctattttcaacatacagtatatgatatcatgtgaacgtattcccacactgcccgatgtgacgatcaacatcggtggcaaggcgtacacgttgaagggcaaggactatgtgctgaaaatgaccagcatgggcaaaagcatatgcctgtatgggcaaaatatttgaaattgtaaaaataaattaattttttagttccggttttatgggcattgatttgccggaacgtgtcggagaactttggattcttggcgatgtgtttattggtgcaaaagcgtttttttttctttatttttttaaattataaatttacgtttttatagaatttattttaattttttatttcagttaaaaaattatcaaataattttagggatttaaaagaaatttttttttaaattcattaatttcaataattttttattatgcaaaaacaaaaattcctttatttaaatcaatattttatttcactaataaagttttcttctttcttacaaaattttcattattttttaattttcttaattaaaaaaaaattcacatttgccatttggctcatacctttccttttttgaaattgaaactttatttttttatatttgtttaaaaattccaaaatttatccaaattttcaggtcgttactacacggtgtttgatgtgggccaaagtcatgttggttttgcgcaggccaaagacggaaatgagctaaccaaatttgattttttttttaaatttccaaaaatttttctagaattccaattgagcctcaagtgcgcgattgcgtaaggggaggcgcactttgctttgatcattccaacggagttgacgattctgatcagcagatggttgagggcgattttgtaatgacggactga

SEQ ID NO: 73939 - DNA, 250 bp, Heterodera glycines
atgccatcaaattcgcagccacgaaggtgaggccaggctcacttaaaaaggaaattttgttgaaatttttaggcctagcattagacatgcctggtcgcttcagtgaattcctgtttttgtacacaaatgtttgccatacaaacaatgtctttggaaacaaatctgtacaataatattttaaattaaatttatttaaaattttttatgaaaattataattataattatttgtattttaattgaattttata

SEQ ID NO: 73940 - DNA, 960 bp, Heterodera glycines
atgccatcatcagcggcacaacaaatgaacaccgcaagcaatgccagacaatacgatgaacagcacaatcaggaacatctgagtattgatgccaagctgcaaaaacaggactcgggcctgaacttgttgccgcctgagctgcaacggaacatgaccgttatgtcggatgaggtggtggtcattataatgattaattaatttatttattgggtaattaattattaatccagggattaataattcttgaaaaagtcaaaaagattattctcaaaactaataaattgttaaataattaacccagaaacaaaaaagtaaaattttataagaaaattttaagaaagaaattttttaaaattttcaacgatttttagaaaatttaaaaaaacagtaaatcatcataagcctttggtaaagttgctaaaaaatcttaaaaaaggatacttttctagaaattttcttaagaatattttcaaaaaaaattttgaaaaatttctatttgaaaatctttttttgggggtgcaagcaatacatatgaatgaggttggggggaggtgaaacaagctgctcccgcaataaaagacaaatttatgaattttgtaagatttttttgagaaaaaattgcaattattagggaaaattacttattcagcccacaccatattagatcatcaccactaatctttgattaaatgccctaataagaagacattgtctttattaaaataatacttaattttttatacaaattattgccgatccaatagtgatttgatcatttttttggcatttttcagtccgttttcgaacgggagaagcgcatggtggtgttgctggtgaacaaccaacaggacaagccgtcccaattggctgtgattgatgtggactttcagagcccaggcttcagcagagtaaagaaaaaagataattagaaaaatgaaattaaatttatcaattaaatga

SEQ ID NO: 73941 - DNA, 1436 bp, Heterodera glycines
atggctgtccacatgcgacatgcgcttgcattcaccacggaatggggtgatttggacaaaattctgtgccaaacgccaaatataaaaccgccaaaaatgggtacaaaaaaattaattaattaataatttaattttaattatttgtcaggttcccaagatttgttgcaaaatgatgatttccttgaaacattcggaaacaaagtgaatgtgtgggacatgcgaaggcgaacattgtttcaaacggtaaaatatttaataattttaataaaataattatttttattgcattcagataaagcttgagcctaaagaggatgggcgctggccaatttgcattcgaatggtttttgagccaaaaaatttttaaatttaattttttgataaaagaaaaatttattttttaggtacaccaagctgaactaacacacgggtaatgtgctttaggaaaaaaattttattaaaattttttttgtaaaatatatttgtaattgtatttttcggaacccgtcagttgggccccgccatgtttgggcccccagcggttttttggctataactttttttctttgccaaccaaatccaatttttggcatcattcgaaagctgtaaatgtcctctattagcctggaaaattttgaaaaattatttaaaggttcaaaaaaaattatggccagaagaacccaaaaaaccagatttcccaacttttttggccataaatttgttcaaaattatcgaattttttttgcaaatttgcaggctaattgagcatctgaagtgctttcgaatgataaccaataattaatcattaaaattaagaatttaaaataatccaatcactgtgagcttttggaaaaaatttattccaatattttatataacatatctgtctaattgtatttttaaaagccttttaaattcatccaattttcaacaatatttaaaaaattaataattcaaaaaataagcaaatgtcagttaatataataaaaacattttaggtttatttgtacagcattgggaagctcaatgtaagggtgaaaaaatacaaaaaaaaaatttttttgtaaatttttatgcctttagatttcatttacataaatctaccgtacgtaaaagagagtattaccataatctatggaattgattatcaatttctcagaaaacgggtcttttttctgctgatcgtgttgtcaaattttcatctgtcactgttggagaatggcctggtaggtgtgcattttttttcattatgtatgtatcagggatgggcttttgcgtttcgctttcgcatttcgctttttttggcactttcgcgtttcgcattttggcgcgaaacgcgacttttacacccctaagattggattaaattccgctaaaatttttttaaattttacccataaattggctaattttcagtgaaacttgtttataaatga

SEQ ID NO: 73942 - DNA, 1483 bp, Heterodera glycines
atggatgatcagcatctgtatgtgtgtgctgctttccatggatttgtggcacagctgaacatttcggacccattccgaccgacactaacccaaaaagcaaaaaaaaaaaaaaaaattttataatttttaaatattactttttaacaggttttccttggtggaattgtgtatcgaaccatgggaatattacacggagacaaaatgccattgggcaaagacagtgccatgcgagtaattatttaaaaattaattaattttttaatttattgaaatatagaaattaaattttataacaaattattgcaattttcgaattccgtcaataaacatttcttacttttaatacatatcatatggaaatctttaatattaaaaaaatattttttaataattattagaaatattatttgatttcttttctcaatattattttatttctaaattttttttttgtaaataaattattgcaatttcaaattttctcttttaataccgtatgcctctttattattaaaaaaaacaaaattttttaattattattttttattttgttgaaaattgtttaattcattaatatttcaatgtattttattttattttggtgtatatacatataaaaattttatttaaaaaatcctaattttttttttcagagttacaacaccgagaggcgttttttcgcgggtcgacccttcgagggtggacctgcccggttgcaattgtcgttggatggtcgacgattattcgtgtccaacggttttctccgaaattgggatgaacacttctttcctcagttgatggagtaaattaaaaaaaattttaaaaaataattatttttattttcttagacgtggttcactgattgttctggtattttatgttttaatgagcagtttatttcttaattatatatttttacatacatatattttaataatatagcaagattcttgtaatttatttaaatatatatttatcataataaaaaaatatatatctttttatattagttgttttttccgaaaaaaaatttctaaaaatctttaaagcaaattttctgaataatttttaattaaataatatatttttttattgttaatagttttgttcggcaaaatactttcttaatgttaatttaattattaaaaataatatctaattaattacaaattttaaaatgaactttctaaatattatttttttaaataattaaccaatttggagtgaagttttttcaaccaaacaggttcacattgacccagtgggcacaaatccgatgaaattggacccaaacattggcatcaattttgagccggacgaacaacagcagcagcagcagcattctgtgaacgatcatcggaaacgaggaggaggaggaggagacaaaaacggaccagcaacacaaccacaacaacagcaacaacatttttatgcaagagaaatgcgctttctgaacggtgattcgacctctgatctgctctga

SEQ ID NO: 73943 - DNA, 285 bp, Heterodera glycines
gatttcaacgaacacggagcaaagccgagatcaagaataaacacggcgtatgacatcatcctgatcacttgtgatcacaaaaatgaaaaggctgtccacggaaaacggcacatttcattgccggacattgtgattgatgctgcaactccaaagatggatgaaaagagcacagcagaaggtgatgagagacagaaatttattaaaaattctaaataaaacaaaaaaaaaattcaagtacatttcaagattggagaattcattttcaagttcaagtacctaccttaa

SEQ ID NO: 73944 - DNA, 378 bp, Heterodera glycines
atgatggacagtagcagcaacaacaccaccaacaacggtggcagcagcagcaacgccaacagtgtcatgccgtctccgttgtcgcgtcataatttgccacccggacttggtcttggatttggacttggcggtggaggtgttggtggtggtgcaccagcaccgccgccctccttggtcagcggcatgggcttggcaaatcgtggtggtggtggtggtgctggtgacgatgctgaacaacaacaacaacagggcggtcggccgggcagcaatgctggtcctgggcagcaaaatgggcgtggaccgtctccgcaaggtgtgtgtgttctctttggcctcactgttaagctgtacaacaacagtgccccatccgaatcctga

SEQ ID NO: 73945 - DNA, 893 bp, Heterodera glycines
  unsure (1)..(893): unsure at all n locations
atggttctcattttgggaaacgacccatcattgacgacgaagctgagaattgggtaagctggcagaagtttttgggaaatctccctggcctgagggctagaaacaaagacgtgtacacgcaagtaaagaagtctgattttaaaatttgtccgggctagtcgaagactaaagggacttaaacaaagagaaaaagaggtaattgaatgaatttatataattttcaacaaagtttcatttttttaaatttttccagattttattatttcacttcaataatttggtggttttttatacataaacgccctttttgatgggttttatataacaactcagcaccattcatttaataaaaaagatggatataattatttatctataataataattgctatagcgtatcaatcaacaaattataaaacatttgaattttaatttgaacacttatntgttnaagatagtnaaaagatctttcattactcacatgaattctctataaaaaattttcagcaatttcctatttattaccaaatatttatttcattttttcgtcggaggaaatccacgtcttaaaagtggcattcgctgccctttcattgcatatttaaacggagacgatttggcaccccgtattaaataataaaaattttaactaaaatttatttttatttaaaaagatccgtgctgtcctggcaaccaacatgtcgtctcgatgatgaaaaatcataccggcactttctccgcttcgatgccaaagccttcgctttggcagagtgccgaaagagtcgccgctgcagtggaaaaccaactgaaaacaatttcgtgctctggcaatggtgatcaagctgatcaacgagatcaacgcagctcaatcatcatctggtaccaatggacaa

SEQ ID NO: 73946 - DNA, 422 bp, Heterodera glycines
atggctatgcttataattggcattaaaatggatgaacataatgcgaaaggagccattgctcagccaaacttggagcccttgggacttttggtgaaaatttttaaaaattttaatatttttaaacaattttaagttttcatttcccggccaaaaaatggaagcaaatggaaacaacgcaaaggacgaggaaaaacagccgccgaagggaaatcaaaaaagtgtttattataattaattatccaccaaaataaaatcatttaattacctttttagagtgcattttaattaagaaagttttcagagaagccgaacaagaagccatttttgataaagttgcaacggggagggcgtggcaaaagggacgttttagggaatgacgacggatttgccggaggatgggaccatccaattgactcgacggc

SEQ ID NO: 73947 - DNA, 66 bp, Heterodera glycines; identical to SEQ ID NO: 53774

SEQ ID NO: 73948 - DNA, 657 bp, Heterodera glycines
atgccaatgatttttatgccgaacattggcattttataccgtttgatttcactacaaatatgcactttagtatcatcatattcatgcacttttgaaggttttgtttggacagcttatgcgtaggcaaagtcaaagaaatccttatttttaaatttttgtctctgttttttaaattttaactatttaaagataatttatgaatttaggcaaagctattccaaatttgacctgaagcttttcattatacccagtgtcatggacgtttcaaatcattatgcgcaataaatgtctcaagttgagcagtgcaatttttttgtccaaggcttctatgtcaaaacacaaaagccggacaaaattcttttaaaaaccggcatttttagccggtttcgcaatgccaaaaaccatagaaaacattcaacaaaacatttatctccctttttaccggtttgtttggtaaagaaagaagcaattcataaaaaaaatctttttccatcaggttgcctgttcttagaaattgaactcggtcacaattctgtcattcataatacatttttgtattttttttcagataacatttaacatgagaggtatactcgcccaattatcgaagtagagtaacttttttattgcaattaggagttcgaaatttgtcagaaa

SEQ ID NO: 73949 - DNA, 1508 bp, Heterodera glycines
atgctgatcaaaaaaggtagcaacaccaagttgatcagatcactccttcatggtgatctgatcagcccattttggctgggaacgagaggtaaatttcaaaaaaaatttctagggggttgagaaaatttttctggaaattttgagtaggcccattttatagagcacaaaatttgctaccgaattgcttttggaatagtgggtctacgatttaggcccgctgagatacgtcgacttatatttcggtgcctataaaaagtactgtatttcttaagaaaatagtgcattttacactacgtcaaaattgaggcagaaagactaaatcgttcgataattgaaatgttacggaaaacgatcaccagtccttgggaatgggacaaacgaattccttatgttgtattttcatataatgcaaccccaaatgagtcaacgggacattccccttttactatttttttcggacgtactattcagtttccaaccacgttaacagcaccaaaaagagttaatcctgcaaatcatttggatgatgtgcctattaaagtgccaattgaacatttggtttcggcaccaattgaaatttccgatgaagttttcctaccaaaccaaaaaaggaaaaaatttctaaacaaaatgccatttttgccggaaaacaaattagaacacagaaaaatccaaatcaatttatttacaaagaaaccatcaattttagacccggaggagacctgtggaatgtgccacaattcgttgtgcagtggaatcgaggagcacagcaattgtgcggcaatcactttggcggatcttcaccctgcttttgccgtgatggacaaacttcgaaatgtcaaaattgagacgctcggggagctgatctcacttatgatcgcaaaggatgtcccaattgcgcaaattcgaaattgggcaacaaacagaaacacacatggacctgattttcttttaaaattcagttcaaatctgtccccatcttcccaggaatttatctcaatcatttctctttggattgaccggtgcgactttgcttttcacaacctccaggcttcagggtgcaaaaaaataaaatttttaatccccaaagaaaataagggctatccattccaaaaagcgattgaaaatgctattgaggatgtgaaagctcgatctgtgttgggtctgtcgaaagtaattcgaagtcctttcattgtgttcagtgattcggttggagaagtaatgaaaaataagttggaggcggaaatatttttggagaggagctacacggcactctcaaacgaaattgtcaccacctattttggtgaagaagttaaagaaattttgattatggccggcaccgatgacattattggaaatgtgccaattgaagaaacgaaaaaggccattaaaaaaatttcatttcatttatccaagttttccatcaaaacttttattattccccacgcctattcatttcaaaaaaatcaagggcacatgaaaaatttcttgatttgttggatgaaatt

SEQ ID NO: 73950 - DNA, 2198 bp, Heterodera glycines
atggccagcggatttgggacatttttaccccgtgaaatttggcactttttttcgacaaacattcgccacttgggcttttacaatggtgatcatttggaccatttgcttcgtcaaatttcgccgacaattctcatcgatctcaaccaattggtttcaatccattcatttgatttgttgcccgaggcgattggtgatgattttgatgtgccaaatgcaacaatttctactggtcaagcattgtccaaatggttgcactctccgagaaaagatggccaacccaagcgattgcgttgcgataattactacgaacaaacgaacttcgattgggtcaacaatttcaaggaggtgtggcccaacatttttgtgatttttgttttggcaatcatggagtttacttgtcccgttttttttttctttaaaaatcatggaaaaattttttagggctattttactgtgctgacaaagggaggtggccaagtgtccgtgggatttcggaatgaaacttggttaggtggatagagcaccaatgggttcttaagaaaaatggttttattttctgccaaatgagcacgagtgccgagttaagacgtgccaaatttttaatgattaaataaaagaaatacctatttgcacaagagcacggtgtccagtggtgtagcggtagtgcgctagtcagcatcttttagcccagggttcggatcccctacgtataaattagtttttttatttttgtcttttacgccaagtcaattataaaaatttattttatgaaaaaatttttatttttaattttttttaaattttttaatgcgcaaaatattcaataaaaatattcgccaaaaaaatattttttaatttgacagaatatgtattacatttatgtttaatgcaatttttgatttttaatggaataaaattaaaataaatattttgataaagaaataaaatttgataattgaattgctcacaaaaagcaaaaataaaaattacaaaatgaatttacacataggggattcgaacttttgacccaaaaaaaattttgactaacgaattacctctacactaacaatttctttgaagaaaggaaatagttgttccttttctttaattataaaaaactaaaaactttggcacgtcataactcggcactcgtgctcatttggcagaaaataaaaccatttttcttaagaacccattggtgctctatccacctaaccaagtttcattttgaaatcccacggacacttggccacctccctttgttagagttgaaatacttctttttttttttgaaaaattctgaagttttggttaaatttttgaaaaattttctctcagaatgaaacgatgcggggagggggaaattaagtgaccccttacatttatttagtgatagaggacggacggttgattgttccaaacccggctttcgaaatccggaattttttttttttgctgaagcggttgctcatttttcaccactaacaggcggcgatttccgaccccaattgtgccgcctttatggtggagccaattcagggcgaagcgggcgtaattgtgccatctcctggataccttcaatgtgtgcggcaactgtgcaccaaatacaacgttttgttcattgccgacgaagtgcagaccgggcttggtcgaacgggaaagtgagtgttggctaataatggcgggaaaaccgaaaaacggagtgaaaatgccttcctcttggcttaatggctccctgttagtggcaaaatgcgtcggtgatactgtgttttttcaaataatatactgtactatgatgctaaactagcaccaaaatgaattcacagtaaccttcaaatcatatgggaatttaatcctggaaacaacaattaagttcttagaaacattcaacaaaccttgataaaacatactgtaaaacgggttactgtaaatttattcctgtcaattcacagtaaccacttcaattcgtcatgctaccgtacgtgtctcagttttcaaaaacactgacgcatttttatactgacaatttaccatcacgggcttaatcagtcagtccttcgatcaaaaattcctctcccatcatcgccgtccttcttcagaatgttgtgctgtgaacatgacggcgttcggccggacattgtcacattgggcaaggcccattcgggtgggctttatccgatttcggcggtacttgcgga

SEQ ID NO: 73951 - DNA, 83 bp, Heterodera glycines; identical to SEQ ID NO: 69364

SEQ ID NO: 73952 - DNA, 987 bp, Heterodera glycines
aaagggtgccgtgtgtgggacgtgaacggcaaggagtacttcgactgtttgagcggttattctgcgctcaaccaaggccattgtcatccgcgactcgttgagacgatgcagcgccagtgccaacagctcacgctcacttcacgcgccttcttcacagacgcgctgggccattacgaggagtatgtcaccaagctgttcggctaccaacgggtgttgccgatgaacaccggtgggacaaacaaatcgccaaattgtgtatttttaaatcgccaaattgtgtatttttaaatcgccaaattgtacatttttgcatgaattcctacggtaaaaattcctacggtactttgcgagataacgaaaaaactgaaaaagcgacagtgaaaaatgagcgagttcattagaatttcttgaaaatgaggtacggtagtatggtgatttaattttatgcatgaattgaatggaacaaacttacagtaacccatttgtagtaaatttcatttaatgaatttaaatttttttgaaattttacagttcattttccattgaaaattttttacttcttattggtattttttaaaattttcttacactttgaagcttcctttcaaataatcatggcattattaatttaattagtaattgttagatatttcctcagggactgggtcgttttggcgccgacgttttggcgccagcctcagtttttttattataactttttttcttgttgaccaaatctaacaatcttggtatcattcgaaagcccttcagaagctctattagccttacaaaaaacaaacaaaaattttagcttctaaaaaagttattaagaaaaaaactcaaaaatttcgacttttttggaatttcatgttataacttttttggtaattgtctaatcgcgaagcaatagcttagaaatatcttctaaacatgttaagctttcgattgataccaagactgctggattaggttaacaacaaaaaaagc

SEQ ID NO: 73953 - DNA, 1926 bp, Heterodera glycines
atgaaacggtctacgagaaatgcgtcaaaaagagaaaataaaaaatcccgaagttcggattcgctaagacaagaaaaacaacaagaaaaaagtcaaaattgtatcaaaaaaatagatgaatatacaactagtagtaaaaagtttcaactattaaggtcaaaatcaaaatttgtcgttcaaaatatagaccaatgtgataatcccactaaggagttagaagaatgtataaaatcgtcaattaatgaagctatcgaagatgctaagagaactttgggtggcgcggataaagccggagtagttatttcttcagaaatgttagatcaaggagacataattgtgccgataacacctattagctcaaatgtggcagacgcagtcttcaaccaatttatcaaagtagaacaaagtgtagcaagaaaaagtcttaacatttatggaacaccttttgtcattactgtaacagttcttaacattaatggattaagaaaaaaataaagaataaattattattattattttttttttttgtaaaattttataaaaaatgtgaataaaatattaaaaattttaatggttaaaaatatgtcacacccttgaaaactgtcccagatttccaaggtaaattgaaaatttactcccaatttggtaaatgaaaaatatgtaagatttcaaaaaaacagcttcacgttcttagaaacccaaaacttgatatttgtaacccctacaattgaggaccatacattttgggaccctactttttttgggacttgacattagggatctgacatttggggaccctacacttgtgagcatttggggatcctacatttgcagagttgacgaggactctacattttacgaccctacagtgggacaacagttggggaaccctacagttggggatctgacatttgaagacttgacactttgggaccctacatttttttagggaccagacatttgaggaccctacatttacggaccctcgacatacaacatttgaatacccacagtttatgaccttattacatttggggaccagacatttgaggacttaacatttatgtaaccgatacttggtacctgacatttgagggggaccttaaattttgaagatttcaaacagaaaaataaaaatgatattacattttaggagggtcaaactatttgattcttttttagaaatatgaaaaaatacacaatccttgaaaaattgactcacaccctcaaaaaacttttcccagattttcaaacgtattttaaaaattgtttttacaccttattttaaatggaaactattccaacatccttaggaaatactaaaaaacaaaggatttattaaaactccccccacgaaattaattaccaataaatcatttgcagccaagagggtttgaacttaacaacggaaatctggtggactaactacttctagagaccaaccaacccttttcgataaataaatataattaactttttgagcaatatattttctaaatttttatacttcttagaatattcacggtttttgagtcgatttcaaaaataaaggaaattttggagctccggcggtgccgataggcgccgccggtgaaaattttgaaatttttagtgcattgttaacagatttagtccaaaaatgaaaaaattttgcgattttaattgttaaattttattaaatttctgtcgaaaaaatgaatatttttgaaaaattagaagaaaagcaagtcaatcactagtggtgcattttcacattgaaaactcaatctttaggggtgtatttttcccgaaacttcgggtaaaatagccgaagccgaagcacgaagttcgaagctcaaaaaacccgaagttttcgaagccgaagccgaagtttcgcccagccctggtcccgagacttgtgccacaaacccgttggcacgtttcaag

SEQ ID NO: 73954 - DNA, 169 bp, Heterodera glycines
atgtcagacaatgtattcgccttgttggatgatttcgacatcgaaaacagtaattaaaaaatcattacatatatatacatttattatatatattatattatttttagtcgacccgagcctaaattttgcaaatgatgactggatggaggaaatcggtgaatccgttacg

SEQ ID NO: 73955 - DNA, 268 bp, Heterodera glycines
atgaaccgacggtaaaagaattttaacagtcacacaaattcatcatttatttaactaaactgttttccataatttcagttggatttgcaacgacgtttggatggacattttcccatcctttgaccgtccccaactcggcctcaaattggcacttctttcgccacgtttcaatgcgttggtggacaaacatttcaatggcaaaagcgaattgacaatttggagaactatcgaaattcgtcgcaaggacaaaggaccagaaccgaaatga

SEQ ID NO: 73956 - DNA, 1141 bp, Heterodera glycines
atggactttgatctgttgataaaaaagttgcagtatgtgatcagaaaaagtggtccatttcgaaaaatgaagcgcgggaaggcgaaggacaaacagcaaaaacatgggaatgatttgatcaaaagtggcgccgaccagcagcgcaacaggtgatcgatcaacggccgagcaacgaaaataatttaattaattggacggcctcgtcgagcggcgaaatttcaagaggggggaggaaccgttaacaggtggaaagagtggggttaatctcgagaatttctccttctcgagaattcgacgaatatgtgcttgggggaaggggaccaaaaaattaggggataggaactaatgggaccaattagggttagagtgagcgaaatgcccgaaattgtgctctgagattgtgattgtttgtgatcggttaaaattcaaaaagatttttatttcgtttcgttaatgaataccataatgatcatatgacaaacatatgcgcgagtaattattttgatattaaaaagaatttttaattatgatctgtgaaattgaaatatttatgagaacaatgcgtaattatgggttagaaaataaatattaaaaaaaaagaaaaaaaagttgcgatacgatgcgctctgtgtttgccttttcagtttcataaaattttattttttaatcggagaaaaaaaatattcaatacttattgaatcttaatcttgctgaattatttgcccgtttataaaatcatatttggtttgatcagaaagtgtgatcatctgccctgaaagagtgaaaagtatgctgatctgattctgtaaaacatcagatcaatgattagtatatctaatctgcagcttaagaatgatttgattgatcataaaattaaataataattttttctttcgattaaaaatcaataaaaattgccatttttgatgtaaaatttattaaaattttcaagattttccagtaaaaaatgaatttttcaatataatcagttgataatcctacgagtttaaatgtaatattttagattacttatcagaacatcattcagtcggtggccagaagaagtcaaaaaatctgggtttttgaacacttttctcaataattttttaaaacaaaaactgtaatttttatgattaataaa

SEQ ID NO: 73957 - DNA, 3603 bp, Heterodera glycines
atgtctggagtaattaggagtaaaatccccctcctaaacagagttataaaaaaggaaatagagtcggccaaaaccaaattggaggagggcaaattcgaatatgatcagaataacacagacgagtgcctacgggtgttcaataaaacaaaagaaattatacaaaaaattgagccaaactttgaaaaattaaaaactttgcataaaaaatggcaaaatttgatgagaaaaatggacaaagaacagtggaacaccgaatggaaaatccagaaaatttttcgcgaaaaacatgattatttaaagacaattaaggaaacagacgaaatcctcgacactctgaaagacataaaattggaggtaaaaagaagacttaaagtaatcaaagcaaaaccctcttcagacactgaccaagaggatgaatcaaatgatgatgaagaagaaaacgaagacgaagaaattgaagaagaagatgaagaagaaaaagaatacgacagtgaccaggaagacgattcaccggaattgacctcaaatgatcaaacaaaccgtaaacaaacaccttttgtcaattatcgatcgagaataaaacttccaccccaaactctgacacacttctccggaaaattctcccaatggcccagcttttgggacgatttcaaatcctcagtccacaatgacccaaacttagagaacatacaaaaactgaaatacttgcgaggacttttacatgacgaaccataccgaattgtgtccccttaccccctcacaaacaaaaattatcccataatcgtcaaattactcaaatcccgatacggtaatccacaattgatcagagaaaatctgcacagcgaattaagaaatttaagaaaaccaaatgaatccacaagcgaactgagacgatttatcctattcattgaccgaattatcctacaattacaatcccaaggcgaagaaataaaccatccccaaatcaagcaatccattgagactaaactccccttcaatatccgactaaaactgagagaaaaattcaaactttactcgacaaaagaattaatgaattttctcaattcacacactcaagctcgtgaagacatagaacgaatggaagattcaaacagacaaataagaaatttcccccctcaccggccacctcaaaacagaccacaaaggcaatcatatccaaactattcccaaccccagctaaaagcaaaccaccgaaaccatcaaaatctgcctctctcgccctatcccatcacttctgcattaacaaccaaatcaaaacctgtccgtttggcagaatttaaaccaaaaccatcgcaacccaaaccacaaacaaaaataaaattttgtcgattctgtgaaagagacaatcacttgagcaaagaatgcaaaatttattcaaccacggaaaaaagaagtaatcgagcgcgcgaattaaaactttgtctaaactgtctgaaaaaaggacatcatttgagagaatgtaaatcatcattttcatgtttcaattgcaaaagcaaacacaataccctcctatgcacccgaaagcaaaaccaatataatcaaagagaaaaatttacaaaagtaaacgtcacgcaaaaccccgaggaattcgaagaaacccaaacatttatgtcaatggattccgatcaaaatcagaaaattatacaaaatgatgaagaagaattgcttatgaccacggaagcaccagtcttaaaccccgaccaaaacaaaacacaaaacgaagtaattttcttcgataatgggtcgcaaaaaagctatataacagacgaatgtgctgattctcttcaattacccacaatcgaagaaaaattattggccatatccacctttaaccaaaataaacccaaaatcatttcatcaagactagtcaaaattggcatcaaaacactaaacggtgaaatcgaatacgtaacactacagactgtggaaaaaattactgaaaaaatggtcaatagagagactgttgatatattcaaaaataaaataccgataaaccatgcctatccacaaattctaattggtatagaccattcttggcactttatgctgccgaactcacaaattcaaatactcccctccggattttactcaatcgatacaaaattaggaaaaatattatccggaaaaggtacgattgaagacacaaatgtcaatcttgtgaaagaaaaacgaaaaaaggatgagacaaacgaaatccttcaaaaattttgggaattagaaaatatcggaattaccgactctccgcatttgacggacgaagacgcagctctcatacactttgacaaaaatgtcatttttgaagaaaatcgataccatatccgatggccatataaacgagaaacaccgaatttacccacaaattttggattatgtttgggaagattaagaaatgtcgtcaaacaattgatcaaaaataaacagttggaaagttataataaaatactgcaagagcaaatggacactaacgttaatgaaattgccgacttcaaatccaaaaatttaattcactatctcccacatcaccccgttataaaagagagttcaaataccacaaaaattcgaccagtttttgatgcttcagcaaaattaagaggaagcaattcactcaacgacgaaattcaccaaggaccaaaattattacctgatttatgtggaatgattctccgattcagactcaaaaatttcgtcttattaggcgatttagaaaaagcttttctaagagttggattaaatgaaacagacagagatacaacacgctttttatgggtaaatcaatcatatttggacgaaataaaccaaaaatatcgagaaatcgaaatgagagacgtagaattaagacgtttcacccgaatacccttcggagtcaatgcttctccgtttttattaactgctgttgtgaatcttcatttatcaaaaacagatgaaatgtttgaaaagtttaaaacacagcaaatagacaaggagttatgtcttaatggaaaagaaaaacaattcaaagagctatgcacagaactgaaagaaaacgcatatgtcgacaattttgtaatgatgtgtgatgacgaaaatgaaataaaattcaaacattactggagcaaagaaatattcaaattagcatccatgaatttgagagaattcgtgtctaatcacgaacaaagcaacaaagaaattcagaaattggaaggatctgaaataccaaaagtgacaaaaatgttagggataaaatggaatgttgataccgatgaactcgaactccaaataaaaataccgttaatgagtagagagacacgacaaaaaggcaaattttgaccatgatcgcaaaaaatttcgacccaatgggttggctatccccagtaatactcaaatacaaactatttttccaaaaattatggagatcaaacaaagactgggacgacaaattaaatgatgaagaaataagagaatggaacaatatttcaaatatagacgaagtttccataccacgctcaccatttacaagtcaaaatttaaaatgtgcttctttacaccttttctctgacgcttctgaattagcttacgccaccgccgcatatttacacgcaaata

SEQ ID NO: 73958 - DNA, 1746 bp, Heterodera glycines
atgaatttgagagaattcgtgtctaatcacgaacaaagcaacaaagaaattcagaaattggaaggatctgaaataccaaaagtgacaaaaatgttagggataaaatggaatgttgataccgatgaactcgaactccaaataaaaataccgttaatgagtagagacacgacaaaaaggcaaattttgactatgatcgcaaaaaatttcgacccaatgggttggctatccccagtaatactcaaatacaaactatttttccaaaaattatggagatcaaacaaagactgggacgacaaattaaatgatgaagaaataagagaatggaacaatatttcaaatacagacgaaatttccataccacgctcaccatttacaagtcaaaatttaaaatgtgcttcattacaccttttctctgacgcttctgaattagcttacgccaccgccgcatatttacacgcaaataataaaactgacttattattcgcaaaaacgagacttactccactcaaaggactaacaatcccaaagcttgaactattgggactattgatagccgcaagagccgttaaattcatcgtaaaagaatcaaaattaaaatttgaaacgatatgtatctggtgcgattcaaaatgtgtactaagctggttaaaatgcaaaaagaatttaccaatatttgtaaaaaacagagtggaagaaataaaacgaattgtgtcagaatttcatatcactttctattacgtaaaatcagcagacaacccagctgatttggcatcaagaggtacaacaatgaatgaaatgaaatacaacgaattatggtggaagggaccaaaatggcttaaattaggaaaagaaaactggccagcccacagtttctatactcctgagcaaaatgattcactttatgatgataacataatggaaatcgaaaacactcagacaaatttagtcaaaatggactaccaaggatttattgaatggaaaaaatgcaattcatgggataaagtgacaagaatttgtcaaatattattaaaatttgtattttttacattaaaagactctcccgaattcaaaactaaattcaaaatacagaaatttcaaaacgaattgagcttaaaattcatggcacaaaaaatgctaatacgcataattcagaaagaaatggaaccaaataatgaagaagagagacaattaggaatttatagagacaatgacaatattttgaaatgcggaggaagattgaaaaatgcacagataaaagcaacaaatccaatattcttaccaagaacacattttggtactcatttaattattatggaccatcaccaaagaaatttacacgctggaacaatgacaacattagcagaaattcgtaaaacatattggatccccaaaggaagaagaattgttgaccaaataaggaaacagtgtttctattgcaaaagatataacgcaaaaccatatcagcaaccaaaaatgcctcagttgccaaaatcaagagttcaaataacagagccttttcaaaacgttggcctggattacatgggtccacttcaagtaaaaagtttcactgaaaaatgttggataatccttttcacatgttgcaccacgcgtggaatacacctcgaattagtgacatcattatcagtacaacactttctcaatgcatttcgcagatttatttcaagaaaagggacacccaaaaatatttggagtgacaatgcatcacaactgaaacttgcctcaaaa

SEQ ID NO: 73959 - DNA, 582 bp, Heterodera glycines
atggccaaaatggtctttttatcacctcggtcattgtggatcgacgcgaagtatccatttcgaaaaacgccgacacgagaagcgctcgtgccaagatcgatgccaattgcatgtgaatttcgcggcattattttatgcgaattagaaatttggtaaatcttaaatctggtttattttttaccgtttgttggtaaaaattatattggtttgattattttttggctctattgaagggagtcaacaaataaattattaaaaaattttatttgaagaaatttgaaaaatttctgattttcgacacaaaaatatgatttttttaatttcaaatttctgcttactaaatttttctgtctattttttctttaataaaggattgtccttcaaatttgtgcattaaaaatatttttgttagtctttaattaactctcgctcccgccctggactcccgtaaaatttcagcgggattttaacgggattcccgatcacgctcccggaaattttttttaacggactctatcaaaaaggaaaaaaatatttggcaactctaacaaaaaattcgaaatcgtaattctgcaaaataaa

SEQ ID NO: 73960 - DNA, 239 bp, Heterodera glycines
aatcgaacgctaacggacgacctaatggaaaaaaatccccgaaggagagaatttaattaaatccattccttcgggggaccgtgccgggtgccgcggggtaagcagtgctggttcgtttcatcacggcaccgaaccttttggctagtcagcaatcgttgcttaacttgccagatcggacgggtgcgcatgattccactgttccaagcaccccaccaaaagcaaaacgatataaccaaaat

SEQ ID NO: 73961 - DNA, 1653 bp, Heterodera glycines
atggacaagatttcagaatttttccggacttcttatccgggggttcatttctcaaaaactactaggacaaggctcataattaatgtaattttttttgatggatttgtattctttccaaaaagtgtgtataataattttattgcatttttaaaaatatcccttagccgcggaaaattggattcgaaaaatatctgtgaattaccgttttttctctaattatcctctaatctccattaatcccacattctccaattatcccgcccccttctgaggaggttgaaaaataatgccccatggaggataattagagaaaatagtacaagtgaaaaaaaagttaaaaaatgtcgcgctaaacttcactggctacaccaaatatgagcgccacacctgaccggccctacttaatgtgttggtcaaatgtagggcaattcctacattttgtcgaaatatttattttagctgaatcaaatctgactaattaaagagcaatttcctttttttgttgtcaatttcactttgagggaaaaatgttcataattgaaacacctccacggtgaatgtctgctgttttccattgctttgcacggcaattttggggcgtccgtcctctccaggcacaacgcgaaatggccaacgattgatgttcgcctgaactgctcggtcaacgaatttccgtccgatgagatgaaaaaagtcgaaaatggtgttagacggatttatggccaactaaatgccaaaatatgtaattagcgtatgccggcaaattatcaagggaacataacgaactataaatatgaaaatgtactctctcttgtcacttaaattgattgaattggatcagagcaggggtcaatcacaattacgaacgacaaacgccaaatctgtcgtaaaatatgtcgtttgtcgttatctccaatcataattttaaaaaatctgtcgtttgtttaccgaaatttgtcgtttttcgtctgaaatttggcgtttgttgttcgtaattgtgattgaaaccaacgacaaacgacaaatttcagacgataaacgccaaatatttggggggcgttcaacttcgcccctcaaatttggcgtctgagaaatgtcccaaaaattcaccaaattattttgatctaaaattttttatttaatattaaaaacatgtttccaggtgtaaatgagttcgttggtcatgaatcagatctcagattttaatttctatacttttatcgatgatttttaaatttattcgggtttttcgaatctattagatttggaatctacaatacttaccaaaaaacctctagaaaaaccctttagccatttttcaatttttttgcattttcctgagaaatgttggttaattcataagaaaagtgacgacaaatttacggtagattttgttaattgtgattggacgacaattcacacgacagagacaaactgaaaacggcttattcaacgatataatttgttgtcgtaatcaaaattcggacgattgccaaatttgtcgttcgtaattgtgattggccccagatttccttcttttaatttattttagttttgaaaccaattttcataattcataaaaatattcctattaaatgtttctgcctgtgcttttgccgcgtgttgggtcgtttcttaattcaaccaaataaa

SEQ ID NO: 73962 - DNA, 1134 bp, Heterodera glycines
tttagcagcaacaacattttcaaagtgcatcgtctcatgttggtgctcgtcttcctcaaatcgctcactttgcttttccacggcgtcaacttttactttgtctctgtttatggccacgaacgtgagctttgggccatcatttactacgtcacgcatttgtgagaatggcattttctttttcgtcttatttcgtaattttaggcttaaaggtgcgcttctcttcggcacaattattctgattggctccggttacacttttttcaaagtgaatttcctttcaaattttatttgtcgtttattttgagtgtttttacagcaatttttgagtgacagagacaggcgactgttcattttcgtgttgcccctgcaaattttggccaacatcgcaatgataattctggaagaatcggagttcagcgaccaacgctatctgttctggctggagatgttcaccttcctggacattgtctgctgcatgagcattcttttgcccattttgtggtggggacaaaagaggagagagagagggagggaaaaagaaaaggaggaacagagaaaatgaagaaaaagagggacagagagataagtgagaaaagaagggtagggagagagaaaagagggacagagaggatgagagagacagaggaaagaggggggagagaaaaacgatagaaaaaagtaaggaagaaatgacgatagggaagcggcgaacatattcatttgaaaagtaataaattaaggtctattgcctttctgacggagtgtgccgcaaaaacgacggatgggaaggcggcatttagtcttgaaagacttcggctgttccgtcgcttttatttgcatgtcattgcttacatttacacaactcgtggtgccaaattcactcttgaagtactgtggaatgttttaaatgtccaaatcattttttatacacataaagtaaaaaaaaaagaaattactcacaagcattttattttttagtattttttgccggacgaaaagcgttgggtttccgaggcggctgctgaacttgcgtctttgtttttcttttgcctcgttggagctaagttcaggccccggaaaagtaacccatatttgagaataaacctggaggaggggggcgatgtggaggccggc

SEQ ID NO: 73963 - DNA, 846 bp, Heterodera glycines
ccggggccgggaattggccaatggcgtgcagaccaacccgcacctgtgccaactgcaacagcaggaccagggcattgactcgctgttcttcgttttcgatttcaccgcccaacggttggtcgttgttcgttctggacacatcaaaagcatcaaattgtgcacgaatttgtcaaggcaaggacaaaaaaaggacataaaatttaatatttgtcacggatttgctcttttcagctgcccctattcggaggatggcgaaacggtctttcccccccccccccttttttctcccttaccaatttctgttcagcgcaattcgacctcttccgtcgtggcttcgtccgggggctttctttcccatttgtttgggggttcttcctccagcaacgatttgaagctgccatactttgactatttgccaatcggacttcataatggccaatattcgactcaggtgattaacggggaagggaaggaggagaggaaatggatttggttttaaaaattgaatattttcgttattttccgccattcgcttcttttttgactgtttttctctcagttcgctgtccgtttcaacgaacaacagaagggctttttcttcctgttcttccacaattgcttcaattatcgtgaacatggatacagcgaccgcgtggcggtcgatttggcggtgatttccgttgggaaaaaagaaaataattaaatgtttaaggcgataattgtcgagaaaaatgtcaactcttttctgtcggttgtggacattcccaagccgtctctttacgtttatttcgcttttcttttcgcgttggccacaattttgtgggcaaatttattgtgcaaatcgga

SEQ ID NO: 73964 - DNA, 454 bp, Heterodera glycines
atgcaacaaaagtcatttgacgaaatatttggagaaaaatgggaagaaaaagagatggaaaatcatcaaaagaaaagtgaaatcattcaaaaatattacaaaattaaagaaaatatcaagcaaaaaggaagaaaatatccaaaaaaagaatggaataaaattgaaagaaaaattggaagaaaattgggcacaaatcgtaacaaaatttatgaatggattaaagaattagggcttaatcaaaagccaaataaatgttataaatcaaaaactgatgaagaaacattagaaattgtacaaatgtttattgcaatgaaaaacgaattaaagcaaaaaggaaaacactcaaaaaaagaaaggcgccaaagagagggaagattgatagagaaagagaccgactgtgagagaaagaaagaaagagagatagagagaaagaaggaaaagagaggaagcgaga

SEQ ID NO: 73965 - DNA, 1871 bp, Heterodera glycines
gactcaccggtggattcaaataattctgacaacaacagcagtgttgtccaacggaagctgtacaaagcggacgaaaacccaccatggccgctgacattgcttttcggccttcaggtcagacattgagagggacggacggactaaatgcttaattaaactcaacccatcgattaattcaattttactgagtctcgtaatattcaatgtattttttttaatttttaaataattaccccccccccccctccaatggttttagcaagtgatggtgtccgtctccgtgcttgtctccattccgtttctgatttcggacgaagtctgccctggtcaggaccgtgatcagcttcgggtccgtctgattgccggaacttttgttgtttgtgggcttggcaccattttgcaaactgcgctcggactgaggtaacgaacgtaaataacttttgattatgcaattaattttctaattattttaatcgcaatgacattttggaaaattatatttttaattttaatttaaatataaaaaatatgaataacaaaattattaaagataaagaaaggggacgccatatccctttaatttattctatttaattttaaaattaaaattaaatgtttgttgttgttttcaggttagcgctgctccaaggggttgcattcgcctacattccatcagtgctttttttgaatgtttcgaatttaatcaaattaaaaaaattatttggtattgttaataaataaatacaaattctttttacaataaatattaaataatattttcattttcaggtgagggcgtatatgaatttggaagggaacagatgcaacgcgacaattcacgattttgtgccggccgaagtgtacgaaaataaattggcaattgttcgttttgaaaaataacttttttaataacatttatttaatttttatttaaatttttgaagattcaaggcactttggtggtggtttctgttctcaaagtgctcgttggggccaccggatttatcgggaaaatgaccaaagtaatgtgttcacagagaatgtaaaattggtgcaaggaaaaaccattagcatattacagtacattggcccgatgaccgtatcttcgcttctcatccttttgatggttgagtcggtgacaattactgtgaagcgaatggaacagcattggatctcattaatgtataatatagcaattaattatttttattcaccaaatcattcccctatcattcagaatggcggtcgcacttttcgccaccgtcctttaccttccccgtgtcaatgtgccgtgcccggcctatgtcaacggcaaattcagttttgtcggcttcaatgtttttggccaatttccggtaaaattaatatttttttcaatatatttaaattttattgctaatccatagtatctgactgccattctattctcctggttcctctgctggctgatgaccgtttttgagttaatcccaaaggatagtgtggcacggacggacaaaaacggcacaatgatggccattcaaaacgcaccttgggccagggtgccccttccaggtccatcgaaaataattataatttgaaaattcaaattcatttccaggacagtttggaatgcccaaattcaatgttggtctgttcatggcattcatcgtttccggcctgaccacaatgtttgaagcggttggaaattatcacgcggttgcgcgggtatctgaggcaagtttaattaataaattttgagtttttcaattatattttattttatcttttttaaggagcgtcccccgccttcccatgcaataaatcgcggcattgttgctgaaggattgggctgtttaattgctgcgctaattgggccatgtgttggcatc

SEQ ID NO: 73966 - DNA, 315 bp, Heterodera glycines
atgactttgccaatgttcgtcggttcgttcgctgcctttgtgcttgacaatacggtgggcggtgccacgcgtcagcagcggggccttcgcgagaggggcgtcgtgtgggaattgtcagccgatggacggggtcggcataaatttaaaaaataaaatttaattttgatacaattttcaacagatgtttacgccttcccgggcccacttcagcgaaccgttgaggccattccgttgctcaaatatatgccatttatgccaaagcagaaaaaggcaaatgccaatttaagaaacggatttggagagaacaaattctga

SEQ ID NO: 73967 - DNA, 753 bp, Heterodera glycines
atggaagctaattcgggatctttgtcggcttcgttgcaagcagcagaagctgaaattggctccctgaaggaaatgatcaagctacagaatgagaaaatgaaggacatgcggcactgttttgtcaacttccgctcctggctagatcagctggaggcctgggctagtgacgtaagctgttaacaccattttttaaattattacagtatattttagaacaaggaaacgaaatttgtgcgtcccgacacacgcaaacgagcgttattggacgattcaccagaaatgccggcaacatcaaatgctgcttccggtaactttttttgattgatacacatttctgactttatcctcactttaggcggacgtcagcaatgctttcaagaagaattttttgaggttaaactcaaaaaattcatgaaagagaagttgtaggaggcgaaggtctgcgcggaattcgcaattgcagcggctgagcgcaaaatgcgcggtgccggcgactggctcttcaaagcttccacgccgcaaaagaaatggtggagaagaaaatgggatgttcaattttggacaacgactaaatttttttttaaaatctacctcccaaaaattgaacgtcatcctactcctcctgcatgtgatggttttgtagttcaaccaactccatacaccgtggggttggcaccacgtcttcggaagatgaatggcgtcggcagtatgggcatgtgccgggaatcaattctccttcgggagtccaactaa

SEQ ID NO: 73968 - DNA, 882 bp, Heterodera glycines
atgccaacaagcacatttggggacagaagtggcaccaatttggaattgactctgtgttcaagcgataatgatgatgatgaacatccgatttgggatgttttggcgcgcgaaatttggccaatttttgcaccaagcattcgccatttgggctttttcgatgacgaacaatttgacgctttgtgccgtcgcatttcgcccacaattctcactgatcttgatcaattggtatcaatcaatttcgatcagctgatacttgtgattgctgatgatggacagaatggaacttctcctggccaagtgttgtccgaatggttgcacactccgagaaaagacgggcaaccgaagcgattgttttgcgaagaattggacggcgaaggaaacatagcttggctcaacagtttcaaggaggtgtgtgtttgtgtgtgtggtcacattcacatagaatttttttggaaatttttttctaaaaaacgacaattttcataaaatttcgaaaaaatcgctgaaagtttttaaaaaatttgaatcttactaatataagaatttttatgaaaaaatgggcgctactgtaaaagtggtcccttttgaaaatttttttcacttttttcatatattttttttataaatgatttttctcatgcaattttagcaaatggttaaagtttcaagatattccattaatgattccaacaatctgccgctcatcgcttttccaacattggatgatataaatttgagatggcatttttccaaaaactgaagagattttacaattttaggcacacaacggacttatccaaaacaaattgttgtgccaaaattgttgggactatatggctctgataaaacgaagtcaaaggaaggatggataattgtaataaa

SEQ ID NO: 73969 - DNA, 709 bp, Heterodera glycines
atggaagcacaacgagtgatcagtggaatcaaacgcagggcggaacaaaccatggaaccaccagcgacaattcgctctttggcactgcagaatgtggccacgccagtccttgcgcaactcccaaccaaacaggcgacaaaacaagtgataattttttatgtttcctcaaatatttgtattgaattttcgaaaattttagcgctatcaaaatgacccgacattcgcagaaatggcacgatgtgtcacatcgctagcgtttctcccaattggagatttgacccctggaataattgctctggacatggctcttcccgacgaacttactcccgtccttgactggtaaattgacaatctcagaaattgtttactatttattgttctttaattatttattaggttcatcatgaactacacgggtcgtcttaagcatgatggaagccgaacacgcccgcgatttgacccgaacatttggagtgtttacactcgaacactgcaaagcgatgaccggacgaataaccattcagaagccgcgaacagacgcctgcaatgcgcatttgcctgttcacatccatcgatttggcgtttcattgaccttctgcgaaaggatcaaaagttatccgatgatgacttcgcgaagtgttcaactggacaagaaccaccgcaaaaggcaaagaaatatcgcaacgcagaccgccgaattctcacgatg

SEQ ID NO: 73970 - DNA, 967 bp, Heterodera glycines
atgctctggcaacaatctttgatccgccctctgttgatgggcccgtgtgtggcacctcatttcgcgaccagcttaagaatgctgaccacccaagaagcgattgctgccgggatggcacaagcaatcggcacaacaaggcccaccgagacagaaggcactgatggggccggctgcaaaacgttgaggcccacctgtggggctggccaagtggtaagccagctaacaaatgagtggcattcaagagtcgcacaagtctttacatcagtctcggtaccgtctttaaatcaatctcggatcaagaggtctcgagataaaactcagtctcgagctgggacattttcccgcgttcattcaggttaccatacatgtgatcttggcaaacggtgacactgattttggcaactacgatttggtgccatcacgttggattgcaatgcccaagggctcgtgagcattcccttaatcttaggttttctcaattagactgcaaattttcaaaaagttacggccaaaaaatcatgaaattttgggttaggtgaactttataatgaatatccattcccaattttgacttttttaccaccgatgaatagtccacttgccgtcaatggcacttcaacaccgtggctattgctcgttgaattgcctaattaaggaaattaaaactgctcataggtaaacatttaaattctgcgtccttgaaaaaccaggttcaaatttcaactttggcattcgtaaccttttggcttgctatcaattatatttaattaatatgattctggattcttgaaaacttgtgagtgtccttgaaaaaccgtgttcaattttcaactttggcatttgtcaatgtgtacctcttcttcggtacggtacaaatggccgacgccgacgccaacgcctcgccaatagttgactcgcgatgaattatgcaagaaaaattgaggaaaatttaaatttttaatgtaaa

SEQ ID NO: 73971 - DNA, 107 bp, Heterodera glycines
atgtcaagttggcgaaatgtccgtacaccttcatttagtattgaattgcaaggtcgccctggaaacggagacattgaaattcaaaaaacagtgcaaatgtccccaag

SEQ ID NO: 73972 - DNA, 1625 bp, Heterodera glycines
tggtatgaattgggaccgtttctcgtcagaattggacgattcgctgctgaacgattcgactacgctgaaggtgaagaaggcattttggagtgcgaagcagttgctcagggaaaagctaggcaaacgcgaggacgaacacattgtggcggctgacgccgagttggacacgcatttgcagacatttcgccaaattcgcgactcgacccaaaaactgcttaatctgatggagacgcaccagcgtgaggtgatcgatcattcattgtttttttgatgaaaaaaaaaaatatatttttttaatttacttattccttgcattttttttcgaccgatagttgttttttagatcatattacccaacagggtaatcatcgtaaaaatacgatgattcatacagtagtacctaaatatcctattgtattgtatattgtcgattttttttaaacagcttaacgagctggcacaattggagttggacattgcggaattgttgaccgaggaacaaaaggacgaaaaggcgcacctgcgaaaagtgcttcaagtggccggcaacgcggaaacgaactcgtcgaaacagaggccagaagacaaaacaggggaaaataagttcaaaatcatactgtattatggttacagaagaaattaatggtcttaaaggattaaaaacgaattcattgccttttcaggcatattttgcttggctatgtgacacaatttggcaatgttctttatgtaataataatggtaaaaaacattgtgaccataaccaccaccactaaatttaggatttcattgagcgcgctgtatctgactgtgaacaaacggtggacgcggtaaaaacatttctcttttcattgtcattggccatcgtttgtctaattgtcattttgtgtttgaggtgggccgggcacggcttgcttaccgtggctcactgttgtggttgaaaaagtgcagcgaaacattggaccctggcgattcgtcacacatggaagtgagaaaagcaatagcaaaatacaaaacaattttaccgaattatttaaatttaaatttaaataggattttcgtaaagtgcaacatgttgtaaagtgtcaaaagcaccgattggatcagctgaaggaggacatggccatgaaagtgggccttaaatatgatcattttcacactcaacttctgatcaaatgcaaaatattctttcatgtgtctgtgttgcaaagtgcgcgaaaccgcatcttggccgacaatttggaggagtacaaaacggcactgctcacctttcacagcgaaaatgcggctgaattttgtgcttcttcagaacaatttgacggattagaaagctatgaaattgatgtgttgaaagtgatttttaaaatgcaaaaagaaacaaaaataataatatttgaattaaacaaaaaacaaaaatttcattagctgattaaaaattttggtttaattttaattaattaaaattattattatagattcttaacgtttcgatcggatcagcaatggaggatcaacgcagatcacacacaacagacggagtgtcaaagccagacaaattgaacacttcgcgcccgtccagtgccagaagaagacaactttccgctggcagtgacaataccgagtga

SEQ ID NO: 73973 - DNA, 2723 bp, Heterodera glycines
atgaaaagagtgcgcgaactgctccgtttcgaggacgatgccatgattggaatggcacaaccggcggaccaagtccgattgaaatgcccagcggctacatcttcggaaagcatcgggttgaacttgctcaagcattcctcatcttctacagcgaatctgcttgatgaccttcaacacggatgggactcaattggctgttcatctgcagcacttaacgatttagagcacaaaaagaaaaatgcagagactaaaagccaattaaattgtaaatggtcaattaattaggcattattgtttttgttcttcagcttgtgacttctttataaatgcgcaaagtgcgaaacactttaaacccgaaaaaagcggtggtgcacttttggaagaaatagaggtagcgagaaacattgctggaaaatgcatcactaatataaatattacggtagtataaagagctgccgaaatttaagcttaaatcgatattaaaagaatatactgtattcccattacggtatatttgtatttcgcgagttctaattggtttacaaatttttcaccagcttaagatacaaattaaccattttttatttcaaaatattatattctgaatatttgacaaatgaatttaggaccttttgttcgaaagctgtccttcaagtccaaatatgcacgaatttgggacgaataacaatgggaatgaacgaaaaagcttgctaaacattgtggacattggcgggggcgctgaaaatatgccgaaattggcaccagctgcaaatgacagcgcaacacacggcaaaaggagaaaaggtgatcggtgatagattattatggtttcggttattaaaatgggcgatgtgcgcgtataattacgaaaaaaacacaaaaaagcttccctcaaaaccaaaaatttaattaatttattgaaaaaaataattaggtaattaagattaatggggcaacgaacgcattgcatcaaatgaaaagaaaaagcgaattatttgatcgacagatgaaattaataaatggtccaattttatggtttattaatcaatgaataaatatatgcaaatatttatcaatcggtcctttctttcattcaaaaattcaggcgaaaatatgcaattgaacattgaagaaaagaatgtcctacaataaccgacgaaatttaattgtttattgttcaggataaacaacaaaaatttagcaaaagcctcatcatttggcgggcaaaaaaaattgtgaacaaatttgaaattactaaattctatccttagttttatttattctatatttagatatttgagagaatttaaagaaatttcttatgaaaaatcctttttatacccataaaaaattttttccaaaagagaccaaaaactaaattttaaaatatttaattcaaagcctaattaggacatttttatggcatttttattgtttttttagggtgggggtcggtttacaagggaacattccgagctgtgactaggaatttagatataaatgaaataccattggataggtgctgggtcgttacttaaaaaccatcataataagaaatcaatattcctttaattaattatatgattacaatttgaaattacatgagttaattacaatttgaaagcaaataattattatttaaattttctgggtaccttaagagctttccttgctttccttttatatgggcaaattcatattctcatagtcatttcgttttataaaaaaaggagtaaaaaatacagattagtattggagtatatttaaacaaattcattcttaatttcaattattatttaaattcaagaaagtatatattatatttttatttaatagggtttgttgaaaattttatagaataagaggaatgaaaattattaaatgaattgccaaatattaaatttacattgcttttatttttattataccatttattaattcatcttttaatgatgtatttccggcactaaatctaatgaattttttaatgacgtattttcggcaattaaatcatgtaattagttgcgcaaatattgattataatggtttttttaagtaacgcccattatgatggtttttaagtaatgaaatagcaccattgggtagaacagggtcgacttctagtgtgaatttttaattttagcggtgcattttgcctgcttcaaaagttatagggcctcaaaaatcgaaattttgtgcatgagggctcattttcaacttttttcacattatatccgtttttctccactttacaatgactgcttacatttattttaggcagagaaataattttaatgcatttttcatatttaaaaatgtattttctaaatttttaatttgctaaaaattaaattaaattaatttatttttacgttggattcgaacccggaccctcaaaattaggaatttaaccaactgagccaccaattttatgtgaaaacacagccaaaatttcaattttcgaggccctgtaacttttgaagcaggcggaatgcaccgctaaaattaaaaattcacaatacaagtcgaccccgctctatccaatggtatatagcttatatgcattttcccactcacagctcggaatgttccccttggttagcctttttcagactttgcattcgttggcctacgcgacgctgtgccgtcgactttgcaagctgttgctcagcgacctgaccagcgcggacaccatggagagagtgctgctggtcaagtgccag

SEQ ID NO: 73974 - DNA, 458 bp, Heterodera glycines
gggggggggggaatcccaaaattaaatacttttcgtccaagtctttcaccgccttttaaaatagaactcattcgtgatcatagactcaaaatccagatttatcactctatgcttaacaagtgtccaatcccaatatgttttgaggctgggcgatgtgaagggcatggccgaccgaatcatcacaatgcgctcccaactccgcgatttgttggccaaggctggctccaagcgcaattgggaccacattgtcaaccaaatcggcatgttctgtttcacgggaatcagtccggaacaagtccgacatttctttgtgctattcccaatttccaatgattcaggtcgaccgactcgccaaagaattcagtatttatttgacgagggacggacgaatttcagtggccgggatctcatccaaaaacattgactatttggcaaatgcgctgcacgaagtgacgaaa

SEQ ID NO: 73975 - DNA, 863 bp, Heterodera glycines
atggccgtcggcttggcccttctccttccgatcattttgctggccacaactttgaacccgctttaccagcacatccatccctacctcaaatagtcagtttcaacagtttaatattaaattcgaaagataaaccaaaatttaaaatcggaatttcggcttctttttgttgtcggcttatttcatccacgccaaacgctaattgttttcaaatggatttaaatttaaatgttcattcagtccgctgctgcacaccggcaactcgtcgcccagtcacgacgcgttcgccaccgacatttacgcgatggtcggctcgcagcagcagcaacagtaccatttgctgccaacgcagcagctcaaacacaacgggaacaagcagtacacgacacaacaacaacagcagcaacagttcacctcgccgtacgccacctccaactacggttaccacgagctgacccatccaccggcctacagtatgagcatggtcggcggcggaggcacggggcaacgacgatagacaatggagatgaaccaacaaagaatggaagccagaatgaacaaccatgatcacacagttattttcatgtagatatgaggagttggagcctatctcttgccggaaaattgcaaattcattgtctggagcaaacaattttccagagtgaggaactttgaaaaagcacgggttaggtccgggtttccgagatgaaccggaacagaattccggattgaagtactgttttaacatgatctcctctagtccaaagcgtcttttaaaacatacataactctgagccaggaccctaaaacactaaatctttcggttattttctgacagatattttccgattggagccgaaaaccca

SEQ ID NO: 73976 - DNA, 1785 bp, Heterodera glycines
atgcttcaccgagaacacttccgacaagctgttcacatcgggtaagctaaagaactttaaatttaaaaattaataagccttaatttcctataatttagttggatcggcgctctcgtggttggtttttagtttaatatttcttttaaaaattctaccattgttttgatttgccaggtgtccggactgttcgcctttttggcattggcactttttctcggcctttgctacggctgttgcggtcggcagcccaacgaatacgaagatgactgctgcgtccgatccaccggcgcttcctttttttcatggtccgttcactgatcagtaaattgatcaaaattctgagcgatcaattatttacatcgaaaagaacttaattagtccaacccaacaaagcgaatgatcaaaaaaaggaaggcactgatcgatgatcattgatcactctgtcaaaatgcattagaaacttgatgatcagataattatttgttctttctcagctccatttggctttcgttggctttcatcagtgtgtttggactgctcgctgcgcttgccatgcttttcggtgccaatgtctcccatttggtgtgccgtcctttggaggagccgctgcaacggccggactttctttcggtgtgcaatttgcgagttttaaattagttgtgttattaccatacaatcccagctgctcgatcggtttgtccatctgtacggtttggaccgtccttcgtccgtctctccccacaagtcctccccgtccgctgctgatcacttctcgcttgatcagcttttctcggctaaccgtcgccctgctgacctgatcagcgagtgtgcccagaagcacactttgtacacaatgctcgggttggacaagaagttcaagctgatcggacgtgaaggtcttcaggacgactaccaatacttggttaatcgggtgaacaaattgaaagcgtcgatcattcctttttcatgccattttttttgggggggggggaatgaatcgatggcatttccctaatttttgttttttccatcctctacaattgttgattctctgttcagcaacgttccatcatggacaacctttcctctcatcagctgatcgatgaggcactctctcgcggcattgtgccggacgacccgcggctgagcgctcgccaatggcactttttcagtggaccgatgcgcgacgcattgcaacgccttgggcaagtgcggatgccggaatggaacagcagcgacgtggagcaggtaactaattgatcagcagagatttgtttagtttgtatggtgatcattagcagggaattcttccattttgggaccgatcgattacttaaaggctggacgaaattaaattccgtaattatggagttttttcaattattgaaacccgtattaatttggaggatgccaaatcaccgctagtcgcaatttttgcagataaatcaaaaaatgtttcaattgttatttactttttggatttttcaaattttgctttatcgctttctgtgactgtcttttcagttttgtgcccaacccaaacgcttcgctttggagggcgtcgtcgccggccttcgccaattgtcccaacaggcgcaagccgaggccaataatagcggcgtcgacggcgaaaaacccgcgggaactgtcgcgtccaatttctccgagttggacgcggtcatccattttttggaggagttgcggcccgacacggcaagtgaacggaacagtgatttaatggcatttacccgtgacgagagtgatcagactgtgttacggtgctga

SEQ ID NO: 73977 - DNA, 3476 bp, Heterodera glycines
atggttgcagcgattgatccggtgaattttaattttgaattgacaaatagggttaaatttttaagcacgaaattcgcaaatactatcgaaattggaagaaaaatttcaaagaaataagcaacaaaaaccttcagcggaaataagactaaaaaatgaaaaaaaattaatttatgaaattaaataaacaattttagttttacgagcagtacgccaacaaaggcttgattgccagcgaaatattgataaacggaatcatttcggtgatttgtctgacgggcatttgcttaaacttttgtctcgtctacgtaacaattaaaacgaagtgaattgttttaaataatccgtaacagaggagcagaaatgcgcactcgaaaaatcatggccccgaattgcgcattaaaaaacaatttttaaaaataaaatgaattttagaaattttcttctttcaagaatatttcatttgaaactagggttaagccccgagccctcggggggcaaaatatcgggggccggggacctcgggggcgacatgtcgggggtcgggtcgggggggggggggggctcaattttcgggggtcggggaccccgatcgggtagtgatcaacaaaatttttttaacgaaaaactaaatttttatttttaaatgctcgtaaatcttcctttttttagctttaatcatctgatttcgttagcgccagcaagagtgcgttatttataagaatgttctgagtttggggtagcgacgagtcgggggtcgggtcggggaataggtcccaaaaaggtctcgggtgggggggggggctcggggttggggcttaaccctatttgaaacaatcgcgtcgataaattttcattttttaaaatctgctaaaaacccaaaggttgcgaactgcgcaaaaaaatgttgcagatcacgttcgtgctctacccctggactgaaataattcattttttatttaattattttaaaaccaatttcgcatagatcgctccattctccgtgtaaaactctgatcgctttgttcgccttttgctcttcctttctcctttttggaacttccatcaaattcttcgtttttctgtttggcatcaattacattttgcttaagcattgcttcttcattcaattactgcctctaattggctcatcaattgctgtcagtttgcaacttggcattggaattgatcgtctgtttggcgttatgttcccactatggtaataattaggggctaatatttataggtgctaaaaactagagtagagcgggaccgggaattttgggcaaaaccgggaccgggacttgccgggacctgagaagtcgggaccgggacctcgatttttgttcgggaccgggaaccgggaccaaccgggaatttttaaaaattaaaaaaaattcaaaaaatttaaaaaaaattcaaattttaatttatttcaagtgaaaatattaaataattaaatttttatttaggtttttattttataaaatccaaaagttaaagctatttaaattaataaaaattttcaaactaattttcttgtactttaaatgatcgaatattaatagaaattcagatttacatacttttcggatcacttttttcggcgcgctttttccagaaaacttttggggaagaagggggtccggcggtgccgataggcgccgctggggaaaattttgaaaatttgagtgtgatttgttaacaaatttcaacaaaaaaaggctggtttttgagattactaggctcaatttgtatggattttctttaaaaaatgataaaatacaatttaaaaaattaagaatcatattttgtcgataggaaagccatgagtataaaaaaagaaaattcaaaatactttaatttctgtagagggattgaaccaggggaaagaagcacggaaagtgaaggagactagccactaggtcatttgcacagttactttatcgaatatatttaataattatttctaaattttttccttttactccaattttctcactaatttttgcactcagacccccattcttaccagtgcttgtttttcaataggtaggttttaggtcctaaaaaaccccaaaataggtgctaaaaatgagaaaataggtgccaaaaagttccaaatttaggggtgtaaaattgaaaattttcatcaaaaagcaaaaatattttgccaagtcattaagaatatacataattttcaaaatcaaaaattatcgtcaagaaaataaaataaataaattttggaggtgaatttttgagaaattttcgggtcaattcataggggtgttgtatttttcttttttattgcatttttgttaacaaattttgggcaaaacgccaaaataggtgaaaataagtttttaaaaattttttttagttttttaggcgctaaaaataaaaacctagaaaataggcactaataactcgaaaagtagcttaacaacccctaaaaaacatgtttttcgtgcatttcagaccctagggagctcatgaaaaaaataggtaaaaacctaaaaatattatccctagtaataattggagaaatagaacggttgtgtatggatttccatttttttgtatgtttttgctaagtggcacggcatttttagtcgtatttaggcacttacaaaattcaaataaaacacactaaaatcgaaagatacatcttaaataatgatttttatgagtttttagaaggatttcaggcatttatccaaaagtaattggtttttgtcttccaaaatttactttaaaaatattttttcaattttcccacctttttaactaaaattaacgtaattagatatctattaataaatcattccatttttaattaatttattttttacttttaggtataaatcacgtggaaaatacacatccttcaaagggatcatcgcattttgttgtattaaattggcatttttctgttttgtcacttacagtggaagcgcagcccattgggaaaagtggacacaaaatgggcaattaaatttgaatttaaattttgttttcggatcatttagaccggtgatgtgccatctcggtgacccagcccatcagcccgaaactgcttattacactgacatcaatgccttaatttcatattgtgccgaatttgtgtgctatgcgctgatttggctgatcatttggagaagaacagcacaaagtcattccgtttaattaggattagagaaacgattatattaaatttggaattttttaaatttgatttccatttatagaaccctattttgaattagcgaattaattaatctatgaaaaataattaatgcatttttagttacggaacatgtaaaaaagttgacaatttctgtgagtgttctcatgtcaattgggctcttatgctacattttggtcaacacataatattttaaattaaaattaattaaaataatattaattaaaactcctagccctggctggacctaatttttttcctaaaatccaataaa

SEQ ID NO: 73978 - DNA, 546 bp, Heterodera glycines
  unsure (1)..(546): unsure at all n locations
atggcacacccaaagatgacacttccaaaaatggcaaatccaaaagtggcacctctaagaatgacacacccaaagatgacacttccaaaaagggcaaacccaaaagcggcacctccaagaatggcacacccaaagatgacacttccaaaaatggcaaatccaaaagcggcacctccaagaatggcacacccaaagatgacacttccaaaaagggcaaacccaaaagcggcacctccaagaatggcacacccaaagatgacacttccaaaaatggcaaatccaaaattatcagtgattcttcgtcagcagatttatcagatcaaccaaccgctggtcatattcacaaaagtccctcaaaatccatttcaattggagcatcgaaaagcttcaaccgctcanaaagtcccacggcggcaaacaaggccaaagtcaatggagcanatcgaaacaaacccggcaaaattaacagcagccaatccatttacaaaaacactcgctttttgcatttttgagcacttttattgttcaaaaaagcaattagtgaaa

SEQ ID NO: 73979 - DNA, 2397 bp, Heterodera glycines
atgaccacgcatgccgtcaattctatttcgctgctaaaaacagcggttctgttcaacaagaagccagttgaattccatctcgacacggggtcggacattgtcgtcattgatcaattgacgcacgaatatgttggacgaccaccgatcgaaaaatgtaacgaaatcggaaaggctttcgacggcacaaaaatttcctttattggaaaaggattcggtacattcaaatttggcaaaattgaagtcgagcaaacattttatgttgcaaaagcaggctcactaaatttgctgagctgcaaaatgatggatttatttgggctgttagatgaattaaagctgaaaatcagcaatcctgcagtaaatgcatgccacgcgaatggcaaaaaggctgaaaatttaatcccgaatgaagcaacgcagattgctgggacagaagtcaaaattcaaggcctggaaaaggcatttcacgaaattttcagtgaggaattgggccattgcctaaaggagaaggctcatcttgccctaaaagatgacgcaaggccagtctatcgcaaagcccgaccagtaccctacaattcgttagaggtggttgagagcgaactgagccggttggaaaagatgaacgtcatcaaaaaagtcgaacatttggagtgggccgcacctattttgattgttaaaaaggctgacggatccgcccgactttgcattgattactctacgggcctaaacgatgctcttctcgactgtcaatacccacttccaataccggaagacatttttgcgacgctaaatggaggcaaaattttctcacaaattgatttgcgagacgcctatttccaagtcgaattggacgaaaattctaaaaatttgtgtgggctggcaacccacaagggcaattaccggatggaaagattaccgttcggtgtaaaatcagcccccgccatatttcaatcaattatggataaaatgttggcaggattggaatttgccatcgcctatttggacgacattataatcgtcagcaaaagcattccggaacacaccaatcacttaaaagaagtttttggtagaattcaggcatacggattccgcgtcaaattggcaaaatgcaaatttttccgggatcaaatcaaatatctcggacagattatcgataaaaacggacgccgaccggatccagcaaaaatttatgcaattagtcaaatgcctgcaccaaacgacattccatctctgcgatcatttcttggtatggtaaaccattaccaacaatacgtcaaaaacatgcggttcattcgaaaaccgctcgacgatttgcttaaaaaggaaattgattggagttggagtgaaggatgcgaaaatgcattccgaaaaattaaggaaattttggcatccgatttgctgctaacgcattatgatccaaaaatggacatcattgttgcagcggacgcttccgaattgggcatcggagcagtcatttatcacaaatttccggacggaaacatcaaagcaattgcccatgcttcaaaatcactcgcccctgcggaaaaaaattattcgcagattgaaaaagagggcttggcgttggtttttgccgtacaaaaattccataaaatgatttatggacggcatttcacattgcagactgaccataagccccttgtcagcatttttggcagcaaaaagggaattaggcagtgcagtgccaatcgtcttcttcgctggtcattaatccttttggcctacgattttaccatcgaatacataaacaccaaggattttggccaggcagatgcgctctcgcgcctcatcgccaaaggaaatgagcccgaagacgagaaaatcatcgccatgatcaatgcggaaacagattttgagacgaatttcgacaacacaatttcaaaattgccattaaaattttcggacctaatcgctgcttctgagcgcgatgaaaacatttttcaagtccaaaaatttgtcaaaaatggctggccaaatgaaaaggccatggacaaagaaaatcaaattgtccgcgatttatgtcgaagaaaggaagaactttcaaccgaaaagggatgccttatgtatggagaaagagtggtaatcccgaaagtcttccactccaaaattctgaaattgctgcacaaaggacatcccggcatgaaaaggatgaagcagctggcacgtcaatatgtgttctggccaaaaatcgatcaggacattgaagattttgtccgtgaatgtgtgccatgtcaggctgctgcaaaagcgccaattaagacaaatttacagtcatggccaaaaacaacaggcccttggcaacgcgtacatatggattttgccggaccgtttttcggaaaatattttctgattgtggtcgactctttttcgaaataccccgag

SEQ ID NO: 73980 - DNA, 946 bp, Heterodera glycines
atgtccaaactttgcatgacaattcttttgcttaccatcggatacaattcattttcgctgtctgctgagcatttttcatacttttctgaatgcggcatttccgattttgaacccgaatttcccagtgctccaaaaatggaaatcgacacaatcctgtgaaaaatgtaaataaattaaataattaacaaaaagaattacggatgacaaatcattgcagtggatggcacaacttttattcagtggaggaggtttatttattttttactttaaataaacaatttttaaaaatatcttaaaaagtaggaggatcaaataatatcatgtaaaagagagcaaattaaggaaaaaaagaccattcaatcaataaccataatttttctcagaattcaagaaaaaaaattcctgaaaatatagaaattccaagaaaatttttatttaatattttgttggttcttgcactgcgacaatcattgggccccggcatgtgttgacagcgttgcattgtgttgatgaagaaaattttggtatgtatgggtgagaattaattataaatatataaaaattaacaaatataaaaaatttcatttttcttaataaaattttattaaaaatttaattcatagatcacaattgattattgttaaaatttgtgcaaatttttaatattagaaataacaaaaaagataaattttttgcccaaaaatttgtgctaaaatttgatgccgctctgttttaaaagttaataatttacagaaaaactctttgtgtcatatgggagcgctaatgcttcaaatcagcaacataaatccggcgttgaagcaattaaatatcatccaaaatcacaacattttcgaatttagatgcatttcaaaaggttgaagaagcacatctgcttttgaatgacattgtcgtaattaaagtaatttattattgataaaaaaataaa

SEQ ID NO: 73981 - DNA, 871 bp, Heterodera glycines
atgggtaaggattcgagactcaattcgagcacaactttaatggtcatcaaaactcaacaaatttatggtcaaattgaactagtaaatcaatataattttcttaaatattttaagtgaaattttgcaaaaattttcatttttgttttccaatgttttctttatcttgggatttttataatttaaattgccgaaaagaaaaactcgccatttttttcgcttgttgggcatatactcagcaattgtgcctgaaaaatccatctccaaaaccgcgtgattggtcaatggtcaaccctcattattctgcccaaaaaatttaaatttactcaaaaatttatgagtcctttttgaattcctgtgctcaaattaacttattttgtttagaattaattatatggttttattttttctgctttctttttttagattcaacaaattcaatcggccaaactgagcctccgaatcaaattttatgcccaataaaaaaaagaataattgaacagggcaaaaaaggatatttttgttggttgaccatagaatttccaatcaatttttttcgaatttgaatcgctaatgagtttttgctgatttgtttaattgctggcgaagttccatctaaaattggtcccaacataccaaatgattttttttttcattaaaaataacgtatactcattttcttttttgaacccttattggtgaacacttctcatcttttttaaaattatttcagacgtttcacgctcatatgccgcaaaaatttcatttaaaggtttcatttgattatttggtctttttaatttgttgtgtttgttatatcttttttgtttatgctttcatttccttaaattgtgtaaatcaattaatcttttaa

SEQ ID NO: 73982 - DNA, 1262 bp, Heterodera glycines
atgattgcatttttcttcctcaacttttctcaatttgcgaataatggtccaacagctgctgatgatgaggtgcacttcaacaattttttgtatgcctcgcgataattttggctaaaaaatcaaatttaattaaaaaaagaataaaactataaaataaatgtgagcataataaatcgtcaataaattgatcaatatattcaaaaatggaaatatattattttaatatttatttaaatcaattcatacattaaaaatttgcaaatttttttctttctttcttctgtttgctcttcacttgggcttattttacgattagaacacgtagaaattggaaaatattaaaaataaattatttttattttaagcaaaaactttttcggttcttttctttcagttacagaaatggcctgctccgttttgcgttacagtatattaattgtgcttttatgctttgtatacggtaataatgaagaaaacagtcaaaaaacaatacaaaaagaagctggcacagaacataaaaatgataagcacataattgatgatgattatcttgatgacgaattttgggacaaactttcgccgatcattaatttgcccaaaattgatggagtcgaatttgttggaaaccattttaaacataccgaacaaaagaaacacgattatactcatgaaggcaagattcaaatatatttatttataacataattaagaatttacaatttttaatttgtcgaaaaccgatgaattattaaaaattacttttaaaaataacatattttatttaaaagattaattgatttacacaatttaaggaaatgaaagcataaacaaaaaagatgataacaaacacaacaaattaaaaagaccaaataatcaaatgaaacctttaaatgaaattttagcggcatatgagcgtgaaacgtctgaaataattttaaaaaagatgagaagtgttcgttcaccaataagggttcaaaaaagaaaatgagtatacgttatttttaatgaaaaaaattaatcatttggtatgttgggaccaattttagatggaacttcgccagcaattaaacaaatcagcaaaaactcattagcgattcaaattcgaaaaaaattgattggaaattctatggtcaaccaacaaaaatatccttttttgccctgttcaattattcttttttttattgggcataaaatttgactcggaggctcagtttggccgattgaatttgttgaatctaaaaaaagaaagcagaaaaaataaa

SEQ ID NO: 73983 - DNA, 1041 bp, Heterodera glycines
atgtactacaacaacaacagcaacaacagtcagcatcacgacgacgatgcttttggaggtgatgcacaacagttcatggacggtcaacaaatgtcttcccagcagcagcaggtagttttttgtgctggttgcatttgatcctcggtttaaaaaaaatgttcaatttgaggtcgccaccgagccgcaccaattccgtcagcaacacaacaaccgtagcagtggtggcgagcagttcaattcgccggtgagcagccaggagcgtcttcatcaaatggtgttgttctcctccgccgcaaccgctgctgccggtggtgcagcagcatcatcatccgcaaccaacggcggcagcaacagcggcactatgaacggtggtggccgcggttgtgttgcttcgtctcaaaatggcagcagcactaccaacaacaacaacaacagcaccaccagccgcggtgccagacgaatgccgtcgtcggcattggtgtgtttgtttgttttgagtctgaagaatttgttgtgccccgtattttgaaggcgggctggccaaatttaacttttctttttaattttgcctatttcatcacttttcgaatctttaaccaatgaaaatacatgatttaatttcaaatttcacacaggcaactgcttccacttcgtcgctgcgcggaatctccgacgcggagttggtcgggcgactgcaaaccgcgcgtgaacgcctgcaggacgcgctggacatgatcgactcgttgcagcgtgaactgtccgttcggcaacagttacagttgcgcggtggtggaagaaatgtgtgttatgatgatgaatgattactgtataatgaaaattgatcaccattttcctcatgatattttattatcattatgcttatttggactgattcactttgcttttgtcgctgctttctctatttaaaatccaaatacccatttaattctttttccgctcattatttctttgtgtttgtcctctgcccctttacaatcaccattttttaccacctattttaatggtcttcgataaaataaa

SEQ ID NO: 73984 - DNA, 911 bp, Heterodera glycines
atgcgcaatttttgccaaaatttgaccggttataacttatatttttgaaaaaaatttttgaactttttgttcgaattcgggtccggggtcggatttgggcacatccgagttcagattcataatcatcaccctcgaaaacacccagaaactgcatttgcgtccaaaataaaaaagttaaattagggacctcaattcttaaccattgcccaaaaattcattcacaaaattcaaattatagttggtatcattcggtacgactcaattaaatggtcacaaaaagggaatcaacaaaaaaaatttaagtgcgactattccgctgatgaggaggaggagggcattgatgttaatgacgacgaacaccaccaccaccagcagcagcaacaagtgatgttcaacgacggtgatgaggagggggaggagcaagggcgaccggttgatcaccacccacaaaatgtgcatgatgaacatggcagacagcacgtggtggttagcagcggaggctgtgccaagaggagcggcggtgacgcgtccgcgctggcattggcaccaccgccaccactaccaatgtaccgcgaggagtgggaggagacggattccgcggaagcgactgcgctgcgccttcacaagcgtggccgagtgcgcaacatgacatccgcggatgaggcaagcaagacgcaaccaattgcgcacaatggggggagaaatgggtgtccccaccctattttttaagaaatgaatttttttaattctaaatttcttattgttagaagtttttttcttaagaaatataaaatatttttttctagattttctaaagagttataccaatattattgaaaaatttggttgccaaagagcttttaaaaattcggtatttgaaaaatttttaaaaatttttggacaaaaataaa

SEQ ID NO: 73985 - DNA, 777 bp, Heterodera glycines
atgcataaaaaacataatatcatccggtagttttaagtttaaaaaaatatttttatttatttttgcctttttcgcctcctccctcaaacggacggattctttcaaatcggcggccaaaaattgacttttgatcacttcaacagggacagagacgacatcgaaattgtcgttgtgtgatttttgttgttgtggagtgagtgtgattattgccattttgaagagccaacgacggcacaacagaaatggttggaatatttaaaaatttgaggattacttgatctgtcggttcttgacgggttttgtatttaatatgcaattataaatattaatagttgggcagctgagaatttactcgagagtagagaccgaggaattgatcacgagactcgaggtcgagaatttgttccaatgctcaaaacactgagaattggtctcgagacggaggaatgatccgatgaaaccgatattgattacaatgctcgaaactgagaatcggtcccgaggctcgagaccgagggatttgatctcgagattcgagatagacattggatcccaaagctcgaaacagatatttgatctcgagatttggtcccaatgctcaaaagactgatacccaaaagcctagcaattttcagactcgagagcctctcgagagtctaacgagatcacctattgtcctgaaatttctgttttaatgcgaaaaattttgcttttctgaaagtgtcagattcgtaatccgtgaccaaaaaaccccccggcaacaaattttcattatta

SEQ ID NO: 73986 - DNA, 236 bp, Heterodera glycines
aagaagggatggagcgaaaggaccttctcgcggccaatgtccgaattttcaaatcgcagggcgaagctttggccaaattttccaagccaacagtcagagtgtgtatttggtggctaccgatgatttttcatcctaaaaataaacgtttaggtgctcgtggtgggaaatccggccaacacaaacgcattaatttgcgccaaatacgcggccagcaaaattccggctaagaattttag

SEQ ID NO: 73987 - DNA, 377 bp, Heterodera glycines
gatagcatggaatcgttgatccaccacttcaaattcttcacggagggcttccaagtgcccccgggggcggtgtatgtgccaaccgaggcaccaaagggcgaattcggcgtttatttggtggccgatgggaccagcaaaccgtaccgatgttacatccgagcaccaggcgaggcatcacatgagtgtcaattaaattcaaaattgttcaggatttgcacacctttccaaaatccacgacatcagctacatgcatttgatcccgggtaatcgcaacttcccccccccccccattaattttacatgtttaatctttattttctgcagatattgtggccattatcggcactttggatttggtgttcggagaagtggaccga

SEQ ID NO: 73988 - DNA, 450 bp, Heterodera glycines
atgtggatgattttgcaacaggattcgcctgacgattttgtgattgccaccggaaggaattacacagtccgacattttgtcgaattggcctttaaagagatcggcgaaacgattatgtacagcattaaataattcactaaaacatcggacatttccccgagattgcctttttcagttgggagggcgaaggcgtcgacgaagtcggccgcgagaaagagaagggcactttgcgcgtccgcgtcaacccgaagttttaccgcccgacggaagtcgaacttttaattggggacccgagcaaagcgaagaaacaattgggctgggaaccgaaagtcgagattgaggtggaaaatacaacgactttacttttaaaaaatatttaaataacaggaattggtaaaggaaatggtggccagcgacatcgaactgatgaagaagaatccgatggcatag

SEQ ID NO: 73989 - DNA, 342 bp, Heterodera glycines
atgggcttggccatgggaacggtcgcagaacaaataccttttgttcagattttaacgcaagttttattcggttaatattttttaatttattttaaatttttcgaaagtaaaaaatcgataattttttttgcttatttataacctaaatttgccaaattttagcaaaatttttttaattgatattcttgaaatgccaccatagtcattagagatgaatttgtaaattcgttttttcacaaaaatatcacaaatttcagtaattttaccgttcaatgaaccaaaatttgacaaattcaatgcttaaagaatatgaataatatttaaatttgcttatttattgaa

SEQ ID NO: 73990 - DNA, 889 bp, Heterodera glycines
atgtgcccctggggctgggcctcttcaccgccgacaaacagatgcacatttccatgggtgacctgtgggaaaatgggaaaaattcaattcaatttattgtattctttttactttcaaagatttattaaaaaattaatttaaaattacaataaataaattgaaaattaaaatattttttgaggagaaaattaagcaagtgtttgttacctttatatgaatgtttttgtttcactttcttttattgaaaattttcattatcctcaatgttcaataggtttattttattattttagcaaaataattatttcattacattttgagctaaaatattgttgcctttaaatgaatgttttaatttgtttagtcaaaaaatgttattctctaattgtaagaaatatccgataattaaataaaatgtagtttaacttggtgctaggtcgatccaaaaaaaactcagtgattgattggtcattttccggaagcctatcgcaccactttcggggcaccaaaagtgcctgatccggaacccggaccggcccgattaagaacaatttttgttcagtttttcaagtgttatctcccaggccgggtccggttcttgacccgttcgcttggaggccgtcaggggtcggacacctctgccggagggccctcagccttgccccgacccctgtcgatggccaacccaagctaagcgtccggtaccagcggcttttttgtgcagctcgattagctctacaaaacggtatcaatggcgtccggctgtgtctactacaaatggagaaaattggcgagaagtatgtaaaaaattgaaaaattagaaaatgacttgcgtcgcgccgttcattaaggttaagcggacggcaccgtgattttgtgaatcgaataa

SEQ ID NO: 73991 - DNA, 3039 bp, Heterodera glycines
tgttaaatttaattcaaattaattaagcattattaaaactttattaaaagtaattaacactaatgaactaattgatagcgggcatactcgccgctgagcttgcgccaatcgccgcaacaccgtaccaatgcatggacttgggctgtctctgcaaatacttaaatggtacagtaattaaggggccaattagttaaattaatgggattaattgataattgacaggaaatggccaggaaggctcaaacagttgccaactggcggacaaccaaccattgaagaagtcggtgcggaaagagtaccgaatgctcagcgacgaagaacgaatcaaatttgtacattttactaattaaaattttatatgaaatttaattaaaaaattaataattaaacaatttttgtaaatcaattaaaattaatcatttttagcatgccgcaatgaatgccatcaaaaagagtggtgaatatgacaaaattgcgggactccatgccgcgtttggtcaatccggcgcggcccacgcggggcccgcctttttgccgtggcatcgcgaatttatgaaaaggcaatttttaaaaataaagacgaggcctcgttttacataaatagctcaattttatggattataatcaaaatttcagaaaatttttctgaaaatttccttttaaagtgcctgccctaatttggacacatttttattaatttttgcaaaaatttatggtcatttttgtttacattaatgtattccattcgacttattcttagacataaattgaagaagaagaaaaaaaactaaaaatttcgtttgttgcaaaaaaaattactgaaaattttaggatggaaattgctctccgtcaagtggacccatcggtgtcgctgccctattgggactcgagtttggaggcacagttgccaacaccgggcgattcgtacatgttcacgaaagatgtaaaataataattatatttaacaaaagcatattttaattttatttgattatttcaatgattttaaactaaataattatataaatatttttaaattgcttaaactttccaaaatgttatggacaaacgtaaattagtcctaaattttttgaattttttttaatttatagagaaattttccattggtatgataagaatcgttaaattttttacgaaactaatctaaaatcttttttattttattatatttttaacataaaattaagttcatgggcgacacggacgaagagggcaatttggtgactggcccatttgcggggtggcgaaccctcactgtaaaaatacaaataattgaatatttaattataaaccaattaaggggacaccaaatgtgatcagacacgtgggtcaaggaggcaaaggcttcaccgaaaacgagtcagtgctaatgaaattaaatgcgattaattatcgctaatttcagtgaaaattaattaaaggcaaattaattttcgctaatgagtcagtgcaatatgtaaattaatttttgctaacgagtcaggccaattaattaaatgcaaatcctaatgaataagtgccaatcaataaatgtaaattaattatcgctaattaaattgaatttggcttttaaggatccaatggtttctgaatcagcaacaaattgacaaagtgctcggatacagctcacctcaacctggggtttttatttatataatttttttaaacttttaatatttttagttgtgccaaatggaacttgactaccaattaatggaggcaagttaaatcgtgctgagtcgatccaaaaaaaaactcagtgagtgataaaattaaataaataaatttaattattcgattcacaaaatcacggtgccgtccgcttaaccttaatgaacggcgcgacgcaagtcattttctaatttttcaattttttacatacttctcgccaattttctccatttgtagtagacacagccggacgccattgataccgttttgtagagctaatcgagctgcacaaaaaagccgctggtaccggacgcttagcttgggttggccatcgacaggggtcggggcaaggctgagggccctccggcagaggtgtccgacccctgacggcctccaagcgaacgggtcaagaaccggacccggcctgggagataacacttgaaaaactgaacaaaaattgttcttaatcgggccggtccgggttccggatcaggcacttttggtgccccgaaagtggtgcgataggcttccggaaaatgaccaatcaatcactgagttttttttggatcgacctagcaccaagttaaactacattttatttaattatcggatatttcttacaattagagaataacattttttgactaaacaaattaaaacattcatttaaaggcaacaatattttagctcaaaatgtaatgaaataattattttgctaaaataataaaataaacctattgaacattgaggataatgaaaattttcaataaaagaaagtgaaacaaaaacattcatataaaggtaacaaacacttgcttaattttctcctcaaaaaatattttaattttcaatttatttattgtaattttaaattaattttttaataaatctttgaaagtaaaaagaatacaataaattgaattgaatttttcccattttcccacaggtcacccatggaaatgtgcatctgtttgtcggcggtgaagaggcccagccccaggggcacatgtcggacacttcgacctcggcaaatgacccgctgttcttcctgcaccacagcttcgtggactgcgtaaaaaacaattgaaaaaaataaaaacccctgaaattctcgtttttaaattaaaaattgctgaaattcatcggttttaaattaaaaatcgctgagattttccgttccccccccccccctcccctttaaaccgtaagaaattttcgtattttaggcatatttcattagattataattagtgagtggaagaattcattgaattttagatttgggaacagtggcgagtggccagacagaatcgaaatgaccgcgaaatgacttatccaatggataat

SEQ ID NO: 73992 - DNA, 90 bp, Heterodera glycines
atgtcagacgtggacccttgtgctaaagcaccgacaaaagcactgagaattgtctgtacacaattgcatcgatgggacaaaaatgcgcga

SEQ ID NO: 73993 - DNA, 669 bp, Heterodera glycines
atgaattgtaaactagcatttttattcgtttttttatgtttcacatatttaaatgtggcgaaatgtgaagaaaagcatgaaaaatcggcaattaacaacaaaaacaatggcatttcaaacagcaacaacaacaatggcaccacttcttccactaatgaccatgctgagaaaacagagaaaaaagtggcaaaaaatgaagagaaagttccaaccgaagatgaaagtgccgaagatggtaagtgcagaaaaaagtaaactaaaaatttctaataaatattaaattaatatgtcaaataaaaaaaaactttatgctaaaattttagacaaggccattaagacggataaatcttctgggccaacgccaccgcccaaaagtaataattacttatttataaataatatattttcatttaattaatattgaacgaatattaaatggagcaacttgacatttttgaaaaaaaagcctggaactgtattttgtagacatggacctgggtttcctggacaaaaatctagttccaggaaaacctaggaaaaatctggtccaggaaaaagccaggcaaatttaggcccaaaaaaaccccaggaaaatctaggtccaggaaaaattgatccagtgaaaatccagaaaaattcaggtccaggaaaatgcaggcccagaataaa

SEQ ID NO: 73994 - DNA, 1381 bp, Heterodera glycines
atggcaaaactgcttcattttgtgccaccatcatcagatcacaaaatgcccgtgtttttccaaattgaagaccccgaattttcgaaactgatcacgtcaaatcattggcttagtccaagcgaaaatgatccgagaatgtggagtatgtgaaaatgagttaccgtatttgtaaatattaagactagttcatttttgcaaaaattgggatgaataagggagacggaaatcgctaatgctaaacaggcaccgccaaggaaaactgatctaagaaatttatgtaaaaaaatattttttataaagtttagacatttttctttaaaaaaatgggtgggggtgggtggtagtgctgttctcgagagtctcgactcgggaactctcgggttttttggtctcggggtttcggtcttggtcagggggtcaagactcaatctcgagtctcaagtctctggaaattttcggtctcgaacagcactaatggttggggaaatacacccacaaattaggccccgttcccccctcccccttggctatgccctggcttctaaatcgtttgtttttaagggaagagtgaaaggtgtgatatgtatggcaaagattgctacagggtaaaaggacttttgaaaaaattggatgcactgatcggttgcaaacggatgaaaagggcctcctccaatgagacggtagggttttgaattttttttaaatttttaatggtcaaatttattacttaccgccagggttgtgccaagcctatggctaaatcataaggcagggactctttttttgttttattcaagatacctaaaaattttgactaccctaagttcataaaattcaaaaaattcgcatttttatttacaaaaaacattaaacctgcaaatttcgaaaatttttttacaaaaaagaaaattttaagcaatttttattactaattcgtgaatgatggggcctgtccattccaacaccgtaacctacagtaactattgcatttaaaggtgccgtctttggctaatgagggccttggttgttacgatttaaagccaagcgaaactttgctgtgtgattgtgatattgtgtgcgacaaacatgaacttcagcaacgattagatgcgagaaaagaaagttagtttcgaaaagaaaacaaaacttttactattaaaacaaagaccaaatttttcaaaattcgagatcagagcagaatttgggaatcggtccctgggataggtaggattaacagtgccgagattttgaaccgaagtcgtgaccagtattttggaaccgggccagggaaatattaccggcgccgggattttgaacactaaatcaggatttgagaataatgcagggacatgttgttttccgggattcaagtcccaataaa

SEQ ID NO: 73995 - DNA, 1045 bp, Heterodera glycines
acccaacatggagtttcactggttcaaccgaaattcgatccatttattcgggggaggcgaaagtctatgatttgaaaaaatttgtgttcaatgccgggacaaccgaattgaattatgccatccatcttaatgaggtttgtgagcagggctgggcgaagctcggcttagcactcgaagccgaagccgaaggcgaagcccaatttttattcgaagccgaagtccgaagctcgaagcccaaaaaacccgaagttttcgaagccgaagccgaagttttttcaaaaaatttttttaattccaaaatttttttcatcacaaaatttcggttaaatatcaaatttatcaattgacagaactgctagagaccaaccaacccctttcgataaataaatataatgaactttttgagcaatatattttgtaatttttataattcttagaatattcacggtttttgagtcaatttaaaaaataaagggaaattttttaaatttgagtgtaatttgttaacagaaaacaactgaacaacatgcatgagaaatattaatgaaaagagggatcaattttaaagaataaatcccgcaatgaaatttacgggattatcccgggcgggattgcgggattttgaaatttcaaaaaaattaggaataaattttaaaaaactccatgaaactaaataaaacttgttttctgctcggcgactatccgcggcgccgtctcacttcttagaattattaaagacttattttcttagtgttaaaaaaaatgaaaagcaagccatgacaaaaaacgtataaaagttaaaaagaaagaaataagtgaaaaaatttagaaacattttccaattcatgacaatggaatgacaacaatttcgtcagctccaatgccacatcctaaacaaattgaaaatgaataaataaataatttataattcgagaccggacaggatcaggtgcttatgtcgcgattttccagggatactgacccagatttattgggacttgaatcccggaaaacaacatgtccctgcattattctcaaatcctga

SEQ ID NO: 73996 - DNA, 1046 bp, Heterodera glycines
atggcacacacttatgtgactgaattggccggcggcattccgtccgctcgcggcacaaaatattcctacacttatgagtcccgagttgaggaggaggggaacaacgaattgttggaacagagccaacgaaggcgggaggagacggacgaggaggagatgaaacagcaacagccgatcaccgagttgaggagggaagaggaggagcacgagttgggcagggaattgaggagaggggaggacggcacggaaagacactgtacatctacgcaaaaggtaggcagagaagcagagcgatcgacaatcgatttgatcggacaatgccaaatcaaataagccaaccgatccttttttgcttactgaagatcacccgagtgaccaaaatcaccacgacaaggcaagtgaaacaaatcccggtgaatccggccgacgttttcttcgacgcggacggaaatccaattctgaacggatttgatggtgatcagcaacagataaatgctttattgatcagtgttgtggttcagcacagaacatttcggccagcccggacgacgacttcggcgcggcgatggacggctccgtcggcatcgacctgtcccggacgtacatctcggagagcgagcagtacttcagctccccacagaccagcagctccaccgccccgcatggttcccaaagcgtttcaccgcccagcggtgccaatgacaaacatttcttcacgggtttgccttttgattcactgtgccgctcaatcgcatcactttgtgttctttctcagcaacgcctggggcgcccggtttgcccgaagtgaccgaattgaccgactcgacaatcgcattggcatggcttaggcccgattttgacggcacttcaggaccactgatcggataccgagtggaatcaggcggtctgagttagatgaatgggacccggcacacgacgatctgttgggggagacggagtgcaaaagtgaggggggggggcacaggcagcaggagaaaataatcggccattagtaatctcggtaatactgccgaaggatgattgaa

SEQ ID NO: 73997 - DNA, 583 bp, Heterodera glycines
atgggctgcgcttccactgtaagtgacaaaacagaaaaatgccaatttaatacaacaaaatgcgatgatccctttgaaggatgtgtattttccacgtgattttataaagtatctaacatatgctattagtaaaaaaattacggctaaatttataaaaaaattttggggtttgttaaacatatgaccatgactgtatattctttgaaaaaaagctagtataaaatattcctaaaaatgatccaaaaaaagttaagaagtttttatatttttcaaaaataaacataaattttttgggttttcaacccatttgtaagtttgaatttaaataatattcattaatatgtacaagctcgagtggttccaataacaaaaataattctggaacccggaaacgaaattataaaattctctattaaatgctttaatttaagaaaattcaggtttttccaagatgttaaatgggtgctaggtctaaccgaaaatggtctcagtaggggcgaaccgaaaaataatctcagtgtcaataaaaatatttaaatttaattattttaaagcaatgtttttttaattgaatattaataaa

SEQ ID NO: 73998 - DNA, 1192 bp, Heterodera glycines
atggaacctgttacggtatccaaatccaatgctgaacctgtcactgtatcgaaatccaaagctgaacctgttacggtaccgaaatccaaagctgaacctgttacggtatcgaaatccaaagctgaacaagaaacggtatcgaaatccaaagctgaacctgttacggtatcgaaatccaaagctgaacctgttacggtatcgaaatccaaagctgagcaagaaactgtatcgaaatccaaagcgaaacgatccgttgggcctccaaattctgtagcgagaccaaatgtgctaacaagaaagatcaaaagtgcagcagcagtaccgcaattcaacgtggaatcagacagcgcatggattacgatatccccgaaaaaatcggggagaaaaagtacggtagtggaggcggtcgaacaattgaatccaccttctccaatgaaaaatgaggagccaaagcagaaagtcatagaaaagcagcagaagaagagcagaaaaagcgcaaaaattcgcactgatagtatctatgttggcactgttatagaaaataccatgggcactgataaacaaaacgaaaagaaagccatcgatgtgcaaaatgacaaagctagtactgataaacagattcacaaagttggcacatatagacaaaatgacaaaatttctgatggaaaagatgccaaggttgacactgatacacaaagtgccaaatcgggaattaatggactaaatgccaaggtgggaactgatggacgaagtgacaaagctgtcattgttgcaaaaaatgccaaatttggcactaatggagaaagtgacaaattgggaattggtggactaaatgccaaagtgggagctgatggacaaaactacaaaattggcactgatgcaaaaagtgccaaagttggcactaatggagaaagggacaaattgggaattggtgcactaaatgccaaagtgggagctgatagacaaagtgacaaagttggcactgataaacaaaatgcaaaaaatgccttcgatgaaacttgggaagagagtattgcaatgaaggacaaaggaaaagcagaaaaagtacaagaaattgactttgactactttatttggatgtagcaagaagtttgtaaggtcgatgagcatcagatttatattctatgaaaccttttctacaaatttctattccaaagtttaaccaaaacta

SEQ ID NO: 73999 - DNA, 749 bp, Heterodera glycines
atgtccaaaatttgcatgacaggcacaaatttcattcgcaataatttggtgcttcatcgtcgcgtaaattcatgccaaagttcaactgctggtgatgaacagaagaagacaattgagcagaagaacaacggaacaagtgatggagaaggtaaaattaaattttaaaaatataaaaattagttttttaatatatttatttagggaataaaaaattttatagaatttatgtgggtcccaattctgaccaaaacccaccaaaaattggctgaatttttatttttcgttttatcacattagaaaaaggccaaaatagggcaaattgaaataggaaaattattcataaattcgcccaaaattaaccaaattttaaaatgttgatatcattcgattgacctaagtgtttttattatccttcaaaatttcaaaagtttcgttacatgaaaaattaactttttaaattttagggccatcccaaagagaaagcacaagacgtcccagtttgggagatctgttgaatgctcgtcgtaaatctgaagcggaccgagaatctatggacacactttgggagccaatgaatgaaggaattttccgattttaaaaattaaaaaaaatcaattaagaaatttttaaattagcaattaacttctaatacttggcagtcattaattaatgctcattaaataattagttttagaaattgatgagagcataaatatgtgttaaattgcacaaaaagaccaaaactatga

SEQ ID NO: 74000 - DNA, 976 bp, Heterodera glycines
atgataattttatgtaagttcagttaataaaagatttttttatggaaaaatttaggtttaggggacaaacacaaaacttacaaaaatacattttgtgaaatcgacgaacatttgagaagatttagatgggagcggggtttagtaaaaccaatttttaaatcaaaagccttaactttgaatggtacatcgttcactcaagccaaaacactggggctgcaaatttagttaaataattgtaagcttttacataaaatttcttaaataattgataacattgtattaaattattttttgagttttttatttattattattttcaaatttttattaaaaatgaaaaaatataattattagttattacaatttttgaaagtttatttttttatcaaaagatggtttccaaattaaaatatttaaggaaatataatgcaaaggtttgttattttttaaaattttctcttcttttcattctttatttaatattgctcatatatatcattaatattttttctattttcaatatttaattgggtgtttaagcatgtgccgtttcattgagtgaatcgaaatttctgttaatatttaaaaactgctttgttacctgtttgatattttgttctagaaataatttaatttaattttgtattacttttattgtatttatatgaacttttataacaaaatattacattggttttttttattcatgaacctatcaaattttatttaaaaaaattattaaaatttcattcaattttaacatttttattcaatttaattttaaatttatttgaatttctaccttactttaaaaatataaatgctttttgttagcttgctatttgttgtttatatatatataatgcgaaagaatttgtggaataggggcaatttttttgattttatattttggctgattgaaacatattaaaatttatcgtcaaaccatgacatttaaaaatttaattttttacta

SEQ ID NO: 74001 - DNA, 2119 bp, Heterodera glycines
atgtgtgaaggacggacagaacacggtcagttggacggacggaggacaaaggcgaaaaaggcaccgcactttttggtcacatttctgtgggtccaacgctccaaattcataaacggatttggaccagtacaaactcaaaaagaaagctatcagcaaattcaagtccaaggaccaaattttgcactttcactttccccattttttctcattttggcatttgccaatctctcctccttttaggtgtgctgctgttccacttctgatctatgcaattacggcttttcttctgcttctgtccctgtttctgctgcgtcttcgtcccgccatttgccttcatccgaattcggcgccccttttgcctcaggcggaagcgaattcagccgaattttcctcccattgcccgccaaatctgtggacggcatggaattgtgcacaatttgacgagcacaattggccgacgggtcggccgaattttcacggcaaaaactgaagaaaaagcacgggtttattcttccattggcacgtcggccgacttttctttttcttctttggttgtgttcgatatttgtccattgttttttgttctttttgcaataaatatttttaccgtatccctttgtgtttctctccaacagaaaacattttgagattactgtaattttggttgcttttcatattttgagaatttttggagtcttttttatgtatttattatatgatatgccttagtgtttgcttctttttttgcattttcccccttttggcttcatttcaccttttaccgattgtcccaattccgtcagtcattgtgtttttttttaattttaagttttttttttctgattacagtaataacagcactttcatacggcggaaggataatccgtcggtgattgtctgcttattatcacccattctcattcatccattctctcattcggtggttcgttttgtcctatgatccgtccgtccttaaatccttttaattccccctttttaatcgccattattcgccccggcgcatttcgtccgccgtttcttttgtcgttgcgtcggtcgttcgttgcttctttcttttcccgcttttttctgattcgtccatttgtttctctgtccgccgttggccgactcttcgaataaatttatgaattcgctgaatattttcttgcattgtgccaactttgtgatcttcagtgccgttattgctctgattgtccaccaccaaactgtccttttaaatgccggtcggtgcgcctaacaaaggcaattaaagtgccgttttcagagtccaattcgacttcgaaagggcaaaatgaagcgaatgagacggcactttttaagaagataaacgcaactgataagaaggacgagggacagaaagtgttgttattgttgaagcaaaagcaacgacaacattttggagaagaaaaaagtgaatgggaacaaatataatttatatttataatttgcacaattaaaattggaattggaattcctttaattaatttgtgcattttttatcatttaaacagccgttaattggtcatcaaatatcaccagcatcaacagcagcagtgcgtcgtccattccttttagcgaaacaaaaaaagtgaataggaacagagcttgtggccattcattagcttgctaattggccaattagtagtttaattaattcgaaggcaaatcgcgggaacaattgcacaacgacaacggcacattttggagagaaaaattcgacaaaaaaagacaaacagaaaagagaaaaacgaaggaagagagaaggtgaagggggaaaaaggggaaagaaatggcaataatattcgagaataaatttctcgaaattcgacaacaaataaaaaaagaaatttagccgattcgacggtatccgtcgaacatttttcaactgaaaatggggaagaaaaggacgaaagcggacggctctcttcagagacatcgtccggcgcagaagaaaaagaagaagcgaaaaagaactcatcggaagcgaacggcgaagggaagggaaaagaaagggaagaaacggagggaggaggacaaagagaaggaggggacgaggaggaggaagaaaaaggggaaaacagcaccaactgcggaaacg

SEQ ID NO: 74002 - DNA, 61 bp, Heterodera glycines
atgaacgaccaatcaaaacccatcaaaaagggaaagtgcgaatggtcggaggaaagaaaag

SEQ ID NO: 74003 - DNA, 184 bp, Heterodera glycines
agctctctctctctatttctccttttctcccactctttcccattctccgcttttccaatgctattttcgtcctctgcttcttcttcttcaactgccgcttctcttatcgtcccctttcttccgcttctcttctgctgttgtctctgtgttcccccctccggcgccattctgtgccgcaccggcg

SEQ ID NO: 74004 - DNA, 911 bp, Heterodera glycines
atgacggcaattattctttgtattttaattgcgccaatctgtcatacaatagcattggaaacaattaataatcctcttcctgctgctgaacaaatgataggaaacgattaccgtactcaaacaacaatttcaattggagcggcttactacggtatgttttttgctttttgggaatcaatgaattttgaatggcaaaatttaatttttgccacaactaagtgatgggccaacagcgttgccaaaattgaacgcgccatcaccaccgttgttaggccaaacaattggtacaaaaataatgccaaactttgtgccacaatgccaacggcaccgaccttttcaccaaaatggaaggcatttgcgccacaaatgctggcggcaccacaaccaatgcctcataatatggcagggcgcgtatcgaaaatttttcaagataagaacatcaaggccaaaaaataagattttagggtcaaaaataagaacatttcgcaaaattgcttcaaatcagttttttttacaatttattcgatcgaaatgcattaaatattatatttttcacctcccatgatcatttttaacaattttggtgaggaaatgagcaaatcatacatttcgggacaagtgagatcgtaattcaatttgatttgtgccagacttttcacggtttcaattgaatattggcagaataacactgagaaatgtgaccacagttttggctgaatcagaagcaaaaaagttgcgcaaaagtagaggcccatcgcttgtgaaatagtcggcaaaaatgtcccaacgcgaattcatctcctgttttgctttttgtgataccctgaaattcagtggcatattcacttttaaaaacatttttgcgcttaggcggtgccatttgttagtattagtgcagctgctaaattaaa

SEQ ID NO: 74005 - DNA, 1005 bp, Heterodera glycines
atgaaatcaattttcttaattttatttgcatttttccacgttttaccgaatttggtcgatgctggcaactgtctttctggcaccggtttaaaatatttaaaaacatcttaacatttattttttatttcaaatattaagcgatgtcatgggatgcatattgccaaagtcttggtgaaaatgagtgccatgccaaagtcatcaccccgtgtaaattaagcgataatggccaatgtgtgataaaacgatcgattgggactgtgacaattaatgacaatagtgtaagtgattagggagaggtgaccattgctacacaattaaaagccaatttaacgggatttttggaggaaaaagctgggaccgcgacttgctgggacttaaaaagccggggatttggattttccaccgggaacgggaagcagatcaacctaaatcaaaatatcaagttaaaaaaaatagaaataaaattaaaaacatttgtctctaataaaataaataaaaaatttaaattaatcaaaaattttcaaacaaattaaaaaataaaattaaaatatttttacagaatttaataaaataattgtttttttgtcataaatttaatagcaaaggtatacaaaaaagtgccattttattaggcaaatgttttttaaattttttcagaaaatttggaaagattcttgtcaccgtcgacaaaatgagaggtgcaccaatagtcgctttgaaccatgtgtttggcaagtgaatgattgcgtattttttggtacaatgtttacctttaccactcaacgatgatcataaattaatttttatatccaaaatcggaagagcaaagaaagtgagtggaaaaaaatgatgatttttttgttgattaattattaggcgggaaaattggaccattttttgttgcaacatattcattgttttgttgataaaaaatttatttttcattttgaatacaatttaacaaccaattttttttatgattgtgtgatttatgcagaactatta

SEQ ID NO: 74006 - DNA, 332 bp, Heterodera glycines
cacagaaatttacggaaacgcttggaaaaataaaaattggtagtttgagttggtccgtgtacgggcgaccgcctcacacactgagtgatattgcccctcattagatttcgacaacttaagcctcacacccgagcttaatcggtctttggttggtgttatttcatgccaccaccaaactttctcaatcttctcaatccccctccagtgcggcaaccactcggcctatctgtccgcgtgtgggaatcaacgtaagcctcccaatccctcctcagcccctgcccggtgttggcaggtaaagccatgcacccggcctatcaatccacagtggtggc

SEQ ID NO: 74007 - DNA, 501 bp, Heterodera glycines
atgaaaaagacgggacagcggaagagaaaagtctcgggaatggctacggccgcgggagaaaaggagcaaaaggaggaaaagaaagaggacgaaaagaagggagcggaggaagaattgcagcaacagctcccggtaaatgccgggactgagggcacaaatgaaggaaaagcagaggtcggggaagaaactgatggggcggaaacaacagaggaagcgaaaaaagagatgggcgctgccccgggggagatggtggaggacgagactgaaggtcgggaggatgtgtgcaaaaaagggaattcggaatcggcagatgcgggactggaggttgaacagttgaagaaaatgttacgcgacagtggccaaatgccgacggacaatgccccacttcccctacctcgctgggtgaagggttgtggggcattcaaaaggaaatataagaaaatttatgataacatgattaaaataaacaattagtgagctgtattgtattattgttgcgta

SEQ ID NO: 74008 - DNA, 932 bp, Heterodera glycines
aaagcgttcaacgaccgggtgcagtgccatgttgaccgccaatttcacgaggcatttgccgccaccgaattcggcccgttgccggtccgtgtgccgacgccggacggcgcccaactggccacggttgcccaactgcttgccaaggccgaacgaccgttgctgctcatgggcagccaggccatgttgccaccggttgagccgaacacactcgtggacacagtgaatgtgtgttgttttattggaacattttaacgaaaatttcatgaaaattatttaatgctttattttaattaaatttcgtaaagttacattttttctagattttttaatttatttttgtttttgaatttctaaaattttaaaaatcccaatttttataattgttttctgggttggggaagcgaattgcaaaaatgtaaagcatttattcgtatattttgccccttttgacaatgccatatttaaaaaaaataaatttcccagttttgcaacaattttcgaccaaataaataatgaattttggctcaatcggacactcccccgacattgaaatttgtgccattctccgtttttgaaatttgtgccattctccgtttttgaaatttgtgccattctccgtttttgaaatttgtgccattctccgttttccctccaattttcagagtcttggcatccccgtctatttgggtgggatgagccgcggtttgctgggcgccgactcgccaattcaaatgcggcagaatcgcaagttggcactgaaggaggcggacttggtcatattggcgggtttaatttttaaaaaaatgcctaatttcgctttaaaatgccgcttttcaggctccgtttgcgattttcgtctctcttatggcaaaaatttttcgcccaacacaaaaattgtcacaataaatcgcagcgaagaacaaatgcttaag

SEQ ID NO: 74009 - DNA, 1811 bp, Heterodera glycines
aaattctgatgcttttgctttcccacagaaccatgacgtgttttggcaaagtgccgtcgctgtgcaggcggacgtggcgctcactttggtcggccttcgcactgaaatggtcgcgcgcggatggaaatcgccgtgcgggtgggccgaattgttgcgggagcgtgaggccgagactgaggccaaaaatgcgaaacgaatggcccaacggccggcggatggccacatgaacccgctggtgttgttggacgccatgaacaaagtgtgatggtgttccaacaaattcaatctcttttttgatttcactcattcggtgccattctcgaatttgaaaataccctcgtttccgctctactctcggcggcattattgtttttccgccaggcacggtccgggggagggcgcagatcgtttccccacccacgtccattttttttaattgcaaccttttcaaaaacaatttttttataagaaaatctcaagaaaaaaaattcaaaaaatttaacgacgggtgaaatgaagtgcattcattgtcaggggaaaaaatttttaaggatgatgaaaattcccgtttttcttattggtgcccccccccttccaaggcgtaaccctggtaccacccctgttttcctgtctcacaaattctttttctcttgaacagtcggtctaactatgcccctaatggtattgttgtacgccaaatgcctgctttcggggagagggggcgatttgtttccatgtcgttttttggcattagtcaggcgatgccgacaggcgccgtcgggacaaaatgtttttttaatgaatttgttttttaaaaatggtatattttttggcactttgcttccaggtacttccaaaggatgccattttggtggcggatggtggcgattttgtgggcagtgcggcttacattgtgcgccccggtggccccctccaatggcttgacccgggcgcgtttgggacgcttggcgtcggtgccggtttcgcgctcggtgccaaagcggtgtacccgcagcggccggtggtgatcatctacggggacggctccagcgcgtggggccttattcaattacacataataataatatttcgtaaaattaggtctcaatataaacgatgtacaaatcattaaatcgtctcataataattatttgcacttcaaaaatataattagctcaatttttctattctcacatttttcttgacctaattggtgtcattctaaagcctaatgggtcaacaatattttgatcattcatttttatgaacatttattttaaattttttttattaattttaaactaagggtgttgactcgaaaaagcccgtaaaacacaataaaaatttaaagcaacagatatttcaattaattcaactggcttttctgcgccgaatgataaatgccgtgttcagttattcgctgatggactttgacacttttgtgcgccataaactgccggtgattggcataatcggcaacgacgcgtgttggacacaaattgcgcgcgagcaagtgcccgttttcaagacagcagtcgcctgtgacttggacgtaaaataatcgtttttttattcccaaaattgccatataatatatatataatttaaaaattaaaattttggtctgcttacaattagcgcctaatggtccattttggatcaaaatgataatgcaaatttggtccgatgtttttgaaatgaaatcctctaagaaatttccttctattttccgtctcgggatattccaacccattttttatggtaggaataataatttaaattttacaggacacccattatgagcaatgaac

SEQ ID NO: 74010 - DNA, 3481 bp, Heterodera glycines
atggcactcaaatcaatcaacagtgcttctcttataaagataaaagtcctgctgaacggaaggatcgtgaagtttattctcgactccggggcagagatcaatgtcatcgatgaggaaacttatcgactgatcggacagccaaaaatttgggaatgtgccgaaagaggcagaatgttcgacgggacagaaaaatcttttatcggaaagggagaaggacacttcgaattccaaggcgtaaaatttaaagaaaatttttatgtcgccgagaagggattgatgaatctgttgagtgtccaaacaatggatgcatttggactgttggatggcattaaagccaaaatcaactctccgataaatctttgcagcgcaggggaagaattgagaggcaaaacacatgccccaatcaaatccaacaaagttgccggcaaacgaaacaaggacgccgagaaagaaatcaatcagctaaagcaggagtacaccaatgtttttaaaactgaattgggactctgcaaaaaggtcaaagcgcacttagaattgaacgccaacgcacggccaatatacagaaaggcccgtccggtcccgtacaacgccaaagaagcagttgacggagaattggatcgttgggagaaaatgggagtcatcggcaaagttgagcacacagaatgggcagcaccgattttggtcgtcaaaaaggccgatggtagcgctcgactgtgcatcgactattcaaccggactcaacaatgcgctaaaagaccaccagcacccgttaccattaccggaagacatttttgccaccttaaatggaggccagtacttttcgcaaattgatctccgggatgcgtatcttcaagtggagctggacgaagcatcgaaaaagctgtgtgccattgccacccatagaggaaattatgaagtcaaaagacttccctttggcatcaaaacagctcctggcattttccagtcgataatggacaaaatgttggcagattttgacttcgcgacagcctacctagacgacatcatcatcgtcagcaaggaccaaaaaaaacattctgaacatttgaaaaagatgttctcgcgatttcaagaatggggatttcgcgtcaaacgagaaaaatgttcgtttttccaagatgaaattaaatatctcggacaaataatcgacaaaaacggacgcagacctgaccccagcaaaatcaccgcgatcaatgagatgccagaaccgatggatgtctcttcacttcggtcatatttgggaatggtaaaccattaccaacaattcatcaaaaacatgcgcttcgtcagaaagccgcttgatgatttgctgaaaaaggacgccgaatggaattggagcgataaatgcaaaaatgcatttgacaaaatcaaaaaaattttgtcatcaaaattactgctcacgcactatgaccctcaaaaagagatcgtagtagcagcagacgcatctgatcagggaattggagcagtgatctcgcacaaattcccggacggaacgatgaaagccattgcgcatgcatcatccgccttaactcctgccgagaagaactactcgcaaattgaaaaggaagcactagcaataatttttgcagtgcagaaatttcacaaaatgatctatggacgtaaatttacgctcctaactgatcacaagcctcttctcgccatctttggcaacaaaaaaggagtgcggcaatgcagtgcaaatagactgctccggtggtcactcattcttttggcatacgacttcaacatcgaatatgtcaataccaacgacttcggccaagctgatgctctttcacggctcattgccaaaggaaaagatgctgaggaccgcgtcattgcaaacacttgcgtcgattcggaagtcgagtcaatactcattggaaccatcgagaagcttccaatcaaatttcaaaacatcgtcgagtcgtccaaaagtgatccgaacatcaaaaaggtcatgaaattcatcagaaatggctggccgcaaaatgttggaaacgaaaatgtggaaatcagaattttccaccaaaggaaggaacaactcagcatcaccaaagattgtctgatgtatgctgaaagagttgtgattccaacgcaacaccgagccaaaatactgcaactgctccacaaaggacatcctgggatgaaaaggatgaagcagttggctcgcgaatatgcgtactggccgaaaatggaccaggaaatcgaacaattcgtcgagaattgtcagccatgccaaaatgagtcaaaggcgccaaccaaaacgcacctgcaatcttggccaaagacaacaggaccgtggcagcgagtgcacattgactacgccggaccgtttttcggaaaagagtacctgattattgtcgacgcgtattcaaaataccctgaggttttcgaaatgccaacaaaatcgacaatttccacaatcgaaaaacttcgatacctcttcagtcggcacggactccccgaaactctggtctcggacaacggaacgcagttcactagccatgaatttgcaaaattcacaaacatcaatggcatcaaacacctgttctcggcaccatacaacccgatgtccaatggccaagcagaacgatttgtggacaccttcaaaagaacattccgaaaattaaaaggggaaggggctccgagtaaaagcatcgtcgaaacttttctcgtcagctaccggactacccccaatgattcgctcgaagaaagcaaatccccagcggaaatgtttctcggaaggaaaccacggacaacgttggatttattgaaaccgactcccactcagccaatagagcgaaatgaggagatggagcaaaggttcaaccgacgttatggcactaaaattcgagagtttgccgtcggcgacaaagtcttcgccaaacaccgaatttcacaaaattggaaattcggtgaagtgtccaaaaagagaggagtcatttatgacgtggacttccgtgacgagccgtcaggaagattccatgccaaccaactccgtcctcgacacactcacgacgaaaccgaccatttgcaaatttttctcgacgcatttgacatcggaaaacaaaccgatcgccaaattgccaatgagttggaagctcaggatgagcccaaccaatccgcccaagagcagggactcgagaatgatctgagtcagtcagacaacgacgaatcagtggccgaagaagcagatcagcaagttcagccacgccgatatccgcaacggaatagacgtgccccacaaaggtactcgccgtgagccgctcaaaaggggaggtgttcggatgagcctatttgaattatattggcgatctgtctattcaaatccccgccattttgttgttgtcactcgcccataaatagacggtcattccctccctcctggtcttttcccctcattcattttattttgttattttcctccgaccaaattatcttcgctttttatttattgttcgtca

SEQ ID NO: 74011 - DNA, 61 bp, Heterodera glycines
gttcggtccgagggtttaaggaagacaatcaataaataaatgtttattgacgaacaataaa

SEQ ID NO: 74012 - DNA, 2740 bp, Heterodera glycines
atcggacgtcaaattcctcggacaaaccagcactcttctggtcactgctggtctcggcatgaatgaccaaagtgacacttaggatagagactaattctattgcacaatcatcagacatcactctttgggacattttgatgcctcagtccaaatgtgcggtgcattcatttgtgggccatccggacggagcgttttgtgtggcttatcagcccaacactcaggtgggcccaacacgctgttgatttattttgtgagaccaattgatctgttgtattgtcttttgtttcagtcgcttatttctggcggaaaacacggcgaaatttgcatttgggacgtgcgacagcgtcagttgcgtgcgacactgcgtgcgtttgacaatgcgagtgcttccgttcgatgcatttgtttggatccaaacggcgacatttttgccgcagggtccagcgagggcgacataaaagtgagcgcgggcggaagaaacaaaaggcggacttttattttctttttttgtccttgtcgcttaggtttggtcgtccgcttccgtcgtccctcagttgctgtattcccttccgacagaacatgccgctcgaagcgggtttagcctaaggcaggtggcctcggtcagcattcagggcgtccagcagatcagcatcgactcgcgcatgaacatgtgctcatgcggagccgacaacagtttaaaagtaaataacaaattgtggaatttactttgcattcactgttcatccttttcagctaagaataatccccagcttctcagcatcgtgtttgtgaatgacaatgtaaataataaaatgtgttgtgattttccattctattcaaatatttccaacctttgcctccactcattataaaagaatgctttgctttcattttgaaatcgtctcacaaatttaaaactttagatttttgctttccttgctcaattctagccattttggcgcggttggatttgaaacagaggaatttatctaaacgaaagggacccccccccccctcccccacttttgctccgtcttcacaaatcctttgaatgtctgcgcccactaattttttgttggttttgacaaatgcgctttttgctaaaaagcttaataacaagagaaggaagagtaagcaaacagaaaggacgaggggcaaaagcagttctgcgcttccgttctgccgtccctccgccgctcgcccacccacacaaacagtgcccccccccctccgcttttcgcgataaagcatttttgccgcctgtgcctttattacaaatgtcccaaaaatcggccgctccctcttctccgcggccgttcacttcgtcggtgccagtgccgttgcaccgttccgcgagttattcgtgtgttttatggaattttcaaattttaagtaattttgaaagtgttgcaacttaagcccttcggtgctcgccaatgcgaacaaatttttaagtgataggccccaactgatcgattgccctcgctgtaaggtgaagaattacgatgggacatttttggggtgccaagcattggatgtggcgctatttttgcttgttagtgatattgatttggcaatttatctataactcaacaaattcccaaggaaaaaatgctcaaaactttctttttgaatttatgccttgtaaaaaaattaagaaaattcattataatgaactgagatacatacaaacagaatgccgatttccgactcggccttcaaacacttgggcatttgtgagttacagataaaatgccgactcagttccaagaaacggcaaaattccgccacatcgctggtgccaagtacttattgaccaaagttgcctcgtttagcactgattgatatttccccaccccactcattctttcgcacacttaaaactcattgttttcttaaccgttttagcagcatggcttcacagaattaaaacatgtcattggcctctttacttgggtacgttcaccaaatccgataatatgtattgccgatgggtcggggtcacttcggcgcggaccatttcggcgccgtaaattttgaaatgctataacttttttatttgtcagttagctttagccaatctggcatcatttgaaagctctatgtgtgctctatatttacatgtaaaaatagaaatgaatgattcaaaaataaaaaagttatgccacgcggcaccgaaaaagccaagaaaaagttaattgaggttttttggccataacttttttgtaaactgacgaaattttttgaaattttacaggctaatagagaatctgaagagctatcgaatgataacaaaaattttaatttggttgatcaggaaaaaagttgttagcaacggcgccgaaaaggccggcgccgaagtgggcggttcccttgccgatggtgaaaatttgttggtaaaatgctgaaagcaaattcgaactccttttcgattttctaaattaaatttatagacacaaatttcgaagtattccattgccccgttttgtgttttttgatcacttgccacaaagctgcgagtaaaacattcccaccatcggcagttttatttcccctcccattgtccactttcccttcttttcaggtctctttcctcgtccttctcatcacgggactctttgtcctcccacttttctttctatgggtcccatttttcatcgacactttcaaagacgtggaacaccgatgccccaattgcaagacacacattggcacatttcgaagattgggaaaatgatcg

SEQ ID NO: 74013 - DNA, 1711 bp, Heterodera glycines
atgttgcacagcgaatggaccctctctatggtagtgaataggcccgaaattttgaaatggccgggactggatccggcacttggaaaatggacggagggaactccgtttttccggcactaccggttccggtggtttgtccaaaaaaaggggaccggggccgggaatcccggcgggcccccggttccgtccgggcgggctctaatagtgaaattatttggcgaattctttttgaatttgaattcattaactaaacagagagaggaaaccattttgaattttatttgactttatggcaatttttcattttaaatacatcttactaataaattattaaaattcacacagcacttgacaaccatacgcttgtgaaattggaccaaaaatggcacgacacggccaaagtgtgtgcctttgacaaacagtcgaaattgagatgttttgccgacaaaaagtaattgcataagccaaatgattaatcgctaaattaattttaaactgctaatttaagctgtgccgtcaaagcaagtgaaaaggaagtggaaaaagcagtcgatgagtgctatatggagcacaatgtggtcaatgttcaacacaaacgttgtgaatgcatgggaaacaatgtgccatggtgaagatgacactgaaattatttaatataataataattaaatattaattactctgtattttcaattaagctatggttatggtattgagaattactgtgagaaactgaaatgccaaatgttgcccgaccaatgttctgtttgtgaaaatttacgaagtaaattcggtggaaattattagtcagatcagtcagagccaattgaccttcttatcaaaattgttttgcataaatctgaatgaatttaaaaaaatttggttcacgaaaatgcgtcagtggaaaatgggtttagtaaaacaatacctcgaaagtaaatatcggcagcattttgaatgttaaaaatttttcgatttttgcctcggaaatttaggcgatgtttcgagaatttcagaagtcaacggcagagttttttagtttcaaatcacatttatccgctcccggaaaggcgtcagtgacaattttaatgtcataaaaacaagttccctgggttttcgagatcactgatcaacgaatccgatatcaatttcggccaattccaaaccccggacgcgaataattagaacatttagattttcgactttttgtttgaattcgggtccaaggttcagaattcagaacgaacttcctatataaatttacttttatactccgatatgtagttttgatacagaattaattttaaaatatttatatcactgacgcatttaaaaaaaatttaacttttcaatatggtattttcacttgaaaaaataattaattcattttttgaatttttcttgcaaaaaattccggtttgatcgaaaatccacgtcccgggcttatttaaacttttgaattttaaattattagggcccggatttatatggacaaaaaaatccaaaatatggacgaaatggtgcagtgacaaaggacccacagacgaaggacccacagacaaaggacccacagacaagggacccacaaatacagaggacccacggacaaaggacccacaaagacagaggacccacggacaaaggacccacagacaagggacccacaaagacagaggacccacggacaaaggacccacaaaataataattaa

SEQ ID NO: 74014 - DNA, 354 bp, Heterodera glycines
atgaactgcaccgcgacagcaaaaactatcgggatgagagctggagttgaagtccaactaggaaagccgcacaatcatgacccttctccaacacgatgtgaagccgctaagatcaacagaagcgtccgcaacacagcattgtcatcacgtggaaatatgccacgcacagttgtgaatgaatgcctcgctggtgcgtcaaatgaagttattgcaagccttcccctaattccgtcaatggaaaaagctgttagtagagtccgtcatgcagccggggtcaatttcaaataccaaaacactcgcagatatcgagataccagcggtacaatctatttccgaccaaacttatttttataa

SEQ ID NO: 74015 - DNA, 544 bp, Heterodera glycines
atggctaaaagaactttattacggaagcgacagaccaaaaatgcacgccatacgcatgagaacaagcgggaggagagacgaaccaaaatggcaaaggcgacgaaagcccgcctggccaaaaaaagtgagtttttcaccaattttaactcaaaaaattattttttttttttgaatttcagccgcttcacaatcgaatcccaatgccgaaatgccacagcaggacgaagcagggccgtcaacatctgctgcatccgccgaagaagcgatggaaccgccgccaccaactccaggaccagtgccgacgcccgaaatggacgaggaaattttggaattcgacgacccgccgccgtcgacacctgccacaccaattggcgatttggtgccgtttccgtcaacaccaactgcgccaatggaacggggaacagcatccggaaaatcctcgtccacgccgatcaaatggaggcccttttcgagacggaatggggcaaaaaaatttgccaaacgatggcacatttggggaaaatccaaattttcaccaaagtga

SEQ ID NO: 74016 - DNA, 645 bp, Heterodera glycines
atggcatgccatcccgatttccaagacaaattgcgtgccgaaattgctgaccattttggagtagcaactcagggggaaactgagctggaattgaccgcctctgatgtgaacaaattgccatacttggaccggtgccttcgcgagactatgcgcatgtttccggtgattaatttatgccaataattagtgccatggttttcgtgtaaaattttgtttccaatttctctcccgactggcacataaattataatgaatctgatgttgctgatgactttttaaggtgttccccgtgttggagcgtgagcttcaggccgacttgcgcatcggtgacaaaactttgccccgcggggcgaccgtcgccattccgccactgatcattcaccacaacgaaaaacaattttaaaaattattttggcgaaatgctatcgaaaaaatttgaattttttaattattaattttttttaggtgtggccaaggcattgggaatttgacccggacaattttctgcccgaacggatggccaaacgtagcccatatgactatttgccgttctctgctggcccccgcaattgcttaggtgtggagcagggaaggaagaggaaaattctagcacatgtaaaagttcttaatttactgttacagtaa

SEQ ID NO: 74017 - DNA, 2163 bp, Heterodera glycines
atgaaaaagggaccagattataaattctttcaccacttgttgggcaacggcgttttggtcagcgacggggaccattggcttcgccaagtgagtcccataaatccataaatcagccgaggattactaagatttaggattttcggggcttgggtggggggggcacgcttgaaaaactgtctttcggccaatttttcgggctttttgtcttttgcacccgaaaaaattttgatttcatgaattttcacatatactttttcgaattatcagtctatctctttttaaacaagtttttttcaatatttagataaaaaattgtttattaaatgaaatttaccgtatcgtatcccttctaattaccgtatcaaaatacattcatttgaatttagcgccgaatgttgttgcccatctttcacttctccatgttggaacagtacacgcccaccttcaacaaatatggacgaatgttgacaaaaaatttggccgaattgcagggacggcgcgaacttgtggacctgtcaccattgtgtaaaataaaatttaaattgggttttttaatatttttaattatattatttagtgatcaaatgtgcattgtacaacgtgacaggtcggtgactcatttgagattacatttcgttaccaataaatagagattcattttgcagtaatcgaatgtgattagataattatcattaagagtatttaatttatctaatcagatacaataatcagtaaatttcttttttaatcagtgatcgttcattctaatcactgattaattatccctctaacctgataataatctgactgtctgtccctattttatagttatcagttcagatgattatctgattaggcaatgatcaatcacaagaattttttgtaaaaatttgtgatgccttttgaagagtcggtgatgggcgtccaaatggaccttgagcagaaagttggccgcaattacatggaagcgatcaaaaaattcggcatttaccatgccatttatgcacttggcccactgtacattttgttcccgatcacttggtatttgtttggccatggctttgcgacacgaaaagcggtcaaagcgctgaaggcattcagcacaaaggcaaatttaattaattggaaaaaaattcaaaatttaatgagatttttgaatgatgaatatttttaataatttaaattttattttactattttagaattttattttaataaaatatgtttaaatttattcttagaatgagctttaatgatttacattaacaaagctaaaaatgaaataatttaaaaaatagaaatattatttaaaaatgaatataattattcaactttttattttaaatgggaaattaataaaattaaaaatgcattaaaattgatcaactttgttatttgaaatgggaatttattacttgataattttaaatattttattaattaaaaatttttccggtgtttttaaatttaatgcaattaattcaaatatttcactccgatatttaattttgaaaatctaattttttcaattttttaggttgttgaggaccgaattcgcattaatgaggcaaatggtggcatccgaaaggacggactaatgcacagcgaaggatcactgtacaaaggcaaaattatggcatttttggactttttgctgacactgcgcgaggagcgaaagttgaacacggagcaagtgagggagcaggtggacgcgttcatgttcggaggtgagaagaattagcagcaaaaatgccgtaaaagattgggtcggaaatgccagaacttaataatgcatcatagtgaggaattggaaatttcccgaaaaagaatattgggcaaatcgccaaaaaatgtgatcatgtcaacaaaaaatcttttttattgaatttttttgttgttaaagaatttattttacatgaaaaattcaaaaaatgccaaaataaatataattcagatcacaaattatattaaatgcaaggtcattaaaaaattcaaattccgaatttgggcttcaattttaagaagaaaaacttatgaaattgccgttctcaaattcgatactttggacaatttcagggcacgacacaatcgctcatggcatgatgtggtcagtttatacatagcaattaatctaaaatatataacaatttttaatgaattaaa

SEQ ID NO: 74018 - DNA, 1176 bp, Heterodera glycines
aaattccattcacaggccgttgatagaaaatcagcaattttttcttatttgcataatgtatcggccatcttcttcacatcgttcagctcaacaggtgtggcgtttcttgtcgcctttttcatttaaaaaaaaaatttttctttgttcccaggaagccatgcgccctcctccaaaattgcctgacaggtaagacctggaaattgtcaatgtattacttattaattaaagtgtaatgtacaaatatatgcttaagcatttacaagcttgggtctcaattaaaaaaaaaaacactactagactaaatgcatttttattctgacaatgagcctagtccattgtaacattttttggaaaaaataaataaaaatttttcggcgttttgttgcaaaatgtaatttgctttgtccaattccgattcccaacctaaattgaaaaaaaccgaaattcaaaaaatttcaagttagggataggaatggtcaaaattgatctcagattcgtgatcagcgaccaacaaaaaaaagaaaaatactcaaaattacacacatttaaattgaaaatttttcaggcccctggtcccgtacatgcgcttcagcaagaaaacgtggcccaaagtcagggcggacaagcctgacgtgccgttgtgggaactgggcaaaatcattggcaatttgtggaataacatttcgccggccgaaaaagcgatgtacaaccacgagtatgagcaggacaaagtctccatttttaattttattattcagtgatttgtacaaaaaacgtgaccggacggtccggtaaaaacctaccaggcttacatacattcggcataactcaaactaacgaaaaattccccgagttttcatttacaagaaaattttgtttatttttttaattcgggaccattttcacaaaaaaaaattcccgggttcgcctgttgaaatttttctaaaaattctttacaacgagcgaattagtctatgaattgagttagaaaaaccatttttcaaaaataaatacttaacttattaaatttttctttttaagattgaatatgagaaggctatgaagcagtacaatgcagcctattcacaatatatggccagcaaaagtcgagtgaaaagtgcacatcagcagcatcaacaggtcgaattttggtggaaagggaaaactgggcgatag

SEQ ID NO: 74019 - DNA, 394 bp, Heterodera glycines
atgtttaaaaaacttattgttagtaattaaccataaaattttgagaaaatttcaacgattttttggaaaatttttgaaacaacaaggcaagttcatcataaaattgaaaaaatcgctgaaaatttaaaaaaaaaatttcttgaagttttcttatgaaaatctcctaagaattttttctttgaaaaatttttaagtttgaaatttcttttttacaaatcttcgcggggggggggcggaaatgaatacccattttttaaaaatctgtttacaaaatttatgggcaacacaattgagcgtttgatttatgtttcattttttttttactatttatcattttgtttcaggaaatgctgaaaaaagtgtgcgcagaacggccccgggtggaccagcagcg

SEQ ID NO: 74020 - DNA, 609 bp, Heterodera glycines
atgtggtaccacaagcgcattggggcctccaaccccaatgcggaaccagcagtccagctgcctgtagcgggtccgcgcaacacagttgaagaaccaatatgtggtgccgacggacagggaagccagcacacccgcatgttgctgccacccggaggcttcaacgcggtgcccttcgccggtgcgcaggacacagttggagaccgcgagcggacccgctggcgtttgctgagctgctcggtgatcaaccgaaacgacgatcaggcacagcgggctaaaaactcaacacattacgaaatggcatttgtaaattaaacatacggcaatggctgcccaaacgcagaaacgcaaccattcaaaaattgaaggttgtgcgtgccgtccacacagaaaggctcctgaaatggaagttcgacaacaatttaatatgtaaaatagaagaaagcaccgccaattgctgatgtgccgcgttgacgagtatcggttgtactaactgggcaaccttaaaagaattgaaattattatttttatttatttttcaattttgacttggccaaagggtggcatttcccccaagacattttgttgttgttgttgagccataggaataaa

SEQ ID NO: 74021 - DNA, 4269 bp, Heterodera glycines
atgcgtgactgtgagacgcgagtggccggcggcggcggcaaagcggcatttaacctgttcgccagtcgtcaagaccaacacgggccggcagcagctcagttgttgactcgtgccggcattgatgtcaatagggatctgtacacgctcgacgatgttcaacatctacagcaatggatcaacatcgaacacggtgtgggccaaattcggctggtcgttttcgaaaaagagcaggaataccgcatagtgttcaaaggggaggggtgagtttttccttttgttttcattttcgggctaattgatttgattgaagattggcggcgaaatttaacctttgccttgtgttggagcgcagccacttcaactacattggccgtgttgagcagcttttcgatgtgcccaactactgcattgactgtgagcgcagggcggacgcgcgctaccacgcctccggatgcaaagttgtgtgccgcctttgtctgcggtacgggcctggttatccatgccaaactgaacaggtagattaggattagaaaatattcaaacaaaaaataataattaagctaccgaatggtggaagtactgctcgaaagtgcggtgattgtctgttcatcttcccaaacgatggatgctacaactaccatttggccaattatgctccagctccaatggacggccgtgggcagcgacaacgtcaacccatctgtcaatggcgccgagtgtgccgtgcgtgttggtgcatcgcctacgagggcaaacaccaatgcccgcgagaccaagcagccgacgacgatggaaactgccgacgctgcaatgggccacactccgtcgatgagccttgctacatacagccggttgatgcggattcagttcggcagcgtgcatcgattgctgttgacaacgacgactctaacgacgacgatgacgacgaagatgagctgccgcttcgtttgtgcttcttcgacgcagaaacatcacaggacaggccattgcagctgaacaaccgcactgccaagaagcacgtgccgctgctcatcgtcgctgaagtcatctgtgagcgttgtcttcaggctggtatcggcgtcaacgatggtcttggaagaagggctcctggctgcgtttgcatgacaggattggtgagaggtcagcttttgcgccaatggtcgtcgccgccatttgtcaacgcagcgggagacaacagtcctgcgccatttggagcaccagcattcaaccagcgccgcttcttcttccactcctttgacaacgaaggcgccgacccagtggatcaatttttggattttttgctccatcatgggccaaagaaagcacacacggtgtgcatcgcgcacaacggtggcaagtacgatttccatctcgtacttgaagcgctacaccgccgtaatcatccgcccaaacacctgtgcaccaccgggttgaagatctactcaatgcgtctgtgtggtcgtcaccaacggcgagtcacatttaaggactcaatcaactactttttttgtgccttggacgcgttggtgaagagcttcgaagtgccggaccatttggcgacggtgaagccattcttcccgtatctctacatacgacgacaacatctgctgcagcgtctaattggtctaccggctcaagagttctactcccccggcacgatgaagtccgacaaacgagcgcagtttctccaatggcatgccaacaacaacaacaaccccggcagcagatttcagctacgcgagcagctggtcatgtactgtgtcaacgacgtggccatcttgagggagtccgtcatccgattccgccaactcatcgccgacaacacgcaaggcctcgacccattcctccacgcgtcgacagctgctggccttgcgcttgccacttttcgccgctgtttcctgcccgccaatcgtctggtccactcacccgagggcggctacttgcgcgggcgccgtgcttcggcagaatcgcagcgctacatccgattcttcgaactggagcacccggaggcccaagtgcagtgcgctagctggtccgtcggagaggcgcacatagaagacagtggctaccgcgtggacggactttggcgacgagaagcgcctctgcgtcccctggccattgaatggcttggatgctacttccatggtaactttgctgtttgtttgttttttctttttaaatcaacaaaattaggctgtcctgtgtgctttcccgaccgacagcaacagctggcggccgggcgaacagcagaggacctctacgaacggacggagcggcgcctctttgagctagagcacgaccatggctgtgaaatccacaaggtgtgggcctgtcagtggatggagcggctccgtcacgacccggacctgaaacgccgttacgatgccgtgttcgtcccgttcccacttgacccgcgcaacgacgcactgcggggagggcgcactgaaccgttcaagctccaccacgtgtgcagtgacgacgaggagattgtgtgcatcgacattgtcagcctgtacccatacgtcatggtgggttttctgcgaaggtgttcatttcttacggataaaaaaaaaaaatcagaaggccaaccgcttccccgtgggcaacccacgggtcctgacgcgcgaggtgctgctccatccgccaacggcacccctcccgtggactgcacctgaaaccaacatcttccgcggtttgctgctcgtgcgggtgcttgccccacgcaacatccgggtgccgctgctcggctaccgcacaaaggatgggcgcttcaccttccctttgtgtgcgtggtgcgccgaccgtcggcagcagcggccgtgccgtcacggtgacgacaagcgctcgtgggtgaccgcctacacccacgtggagctcaacaaggcactgcagctcggctacgtggtcaccgatctttttgaggttggccactgcttaaaaactttgtcatagaaaatacaaattaggtctgggactacgacgagtgggacggcacgctgttcagcagctacgtcaacacgttcgtcgggctcaaggtgcaggcgactggatggccggaggcgtgcgagacagatgagcagcgtcaggcatttatggacgagttcgaacggacggaaggcatccgcctggactcgaccaaaatggagttcaaccccggcctgcgcctcatcgccaaaacattggccaactcgttgtggtaaatattttagggggtgaaaattaaaaaaaaaaatgacatccacagggggaagcttgcgcagcgcgtgggccagacggagattcgctacacacggactccggctgaattctttgcgctcctcgatgacccaacggtggacaagttggactttgtccacgtgtccgagcacatggaccgatgcgttgtgcggaagcgacccgagttcgccagggcgccaccgaccaactgccttccggtagcagccttcgtcacctcgtacggccgcctccatctttacgactacatggagcaggtgttggccattgatggcgcggagctgctctactgcggtacgtttgtttgtcacatttttcgtggacaagcccatcttttagacaccgactccatctactacgtcaacaagatgggtggtccgtgcgttgctgagggcgaggcgctggggcagatgaagcgcgagcacatcgatcgccgaattgtcgagttcgttgcgggtggccccaagaactacggcatccggcacaccgctcgggacgggacggacgagcgtgccaacctgaagatccgcagcttccgcctgtcctacgcggcccagcagctcctcaactttgacgcgatgaaggagctcacgctctccacatacaacattgacggccaaatgtgagttttcataaatgattaagttatttaataatatgaaattcatttttttttttagcgacgatgcgttggacaacgaagacctctacgtgtatggcggcggcgaacatcgtgcaattagggtgaacttcccgcaaattgaccgcaacgtgtacgccgacctctacacgcacgaagcgcacaaagactacaggcccttctacgccaagggacgcgttcgcccggggatgcagacacgcccctttggctatgtggaggatgaaggaccgccgaacgatggacaacggacgcagcgacgaaagaggaattttgttgaccaggatcccacccagccggggcactctgggtggttttgattgtgattttttaaaattgttttgtttatttaaatttgtacaaatcatgttatcaaa

SEQ ID NO: 74022 - DNA, 1230 bp, Heterodera glycines
atggatttaattcttgccactgattggataaataacgcttatcccgaaatggatttagaggacgccaacaaagtgaacaaagagccaacgaaaaagcaagaggaggaggcggaggatcccagctggatcagcctcattgacgaggagatgaagcgtgagccgttagctccaattggtgcggagttgacccgatcaagttgcttttggtttttatttggcatttaaattttaaattaggcactccgaaaaagtgtggttgcgccgaacgccgtcgccctgttccgctcgtggactacctctgcaagcggttcaaatgcagtgcccatgagctgcttgtgcttttcaaaagcctagagaaacgccgggacattgtggagcatttgcgctccgttcagttacgcactgcacatctccgcccgtccgtgcgcaattttccggtccgttgcaacgacctatccatcctggacacccactctgccccagcttaccgaggctacctcggcattacggttttttattattattatttttttgttaccacgcaaattaaaggtccggatgcactattacataaagcatggcatccgcttgcgccaccctaatttgccgtgtgtcgttgaatttggaggcggggaccacaaaacttttttcccgcttgaaattttgtccattgttttgtagatgtactcaatttccaattgtactgttgtttttaaaataaatgttcaacccttaactcgagagcaatttttgacaattgcgcaacgtggcgcaaacaccgagtacaaccccaggcgcttccacgctatcataatgcgcattcgtacaatagcgggtaaaactgtggctgcgctggtcttccaatcggcgcgtgtggtcctcaccggagtgccccacccaagcagtgcgagtaaaatggcggcacgcgttttgcggcgcatccaacacacacagagcatcacactggacatccaccagctgcgtgtggtcaacattgttggtgttcaaacctacccccagcgaatcagtgtagagcgactccaaaacacgctgggtggcatctattaccctaccattttcccagcccttcgttgtaaattgttgaatggagtcacgtgcctagtctatatttcggggaaggtcattgtcactggggcaaagtctcttgatattgtacaccagtcatttaccaatttatctaatattgtacccgaatatttccgtaaatga

SEQ ID NO: 74023 - DNA, 308 bp, Heterodera glycines
atggatttagaggacgccaacaaagagaaaaaggagctaacgaaaaagcaagaggaggaggcggatgatcccagttggatcagcctgattgacgaggagatgaagcgcgagccgctcgctccaattggtgaggaggcgccagcaacaagttttgcttttggttttcatttggcattttaaattttaaattaggcactccaaaaagtgtggttgcgctgaacgccgtcgccccgtcccgctcgtggaccatctctgcaagcggttcaaatgcagtgcccatgaactgcatgtgcttttcaaaagcctag

SEQ ID NO: 74024 - DNA, 1091 bp, Heterodera glycines
atgaaagggtcacaaataataacaataaataaatgctttttggagacactgtgtaatgccaaaaaggcgaaagcccttattcgaggcgcatccgatgagcaacttttgtgccttgtcgaaatctgcctaaacattctaaagggacgggtccctttgcgtcctcggcatttgaataagctgaaagctcatgcacaggtgcttcgccgtctcgcccgcacacgctgctctcgctcagccaaaaaggttttgctacagcacggagatggcctcccagctattgtggggctcattgcgtcaattgctctcccgcttattgctgatgtcattgaaaaatataaatagttttccaaaaaattaaaaaacaagaaaaaatgcagcatacaaagcgctatttgctagtccccgaagagatttatcatagtttggcatcaccgccaccgtctgacggaacaccaattgggctggtccgtacccgaattaaacaaataaaaaatgatgacgccataaatgaggcggaaagggcagtcaaatatgagcaggaagttaagcgtctcaacaagctcacaaaggacgaagatgaacgtcccgtgggtgttaaattagaaaatttgagtgacgtggttgacgccatgccaaaaccagtcaacgttacaaggccaattgttgtttctacgcgtcgccatcttaaagtggggcgtgcgcgaaaagaaaatgttgaacaattagaagatactgatgatgatgattatcaaaacccacggtcgtcaagttcaaataaacgacaacccacacaaacggaaatcttaaaattaatttataaaaacgcccaatctctaggggtgtcggaggaagggcaagttttgagagctggtgggcgtccatttataaccagcagtgttgatgacattgttagtcacctgttgaacaaggacaagcgtggccaaaataaagagccaacggcattcaaagaatttgttgaaagggcaaggcagaatccgctcttgagtaggcatttatttcccgaaggtcaatccggcaaaggaatttataaaaacaccccacttaagtttaagccatcattatggatttga

SEQ ID NO: 74025 - DNA, 838 bp, Heterodera glycines
atggctgccaaaaaagccaaaggggaaacagttgcggtgacagcaaatgccattgttaacagcggcggcacaaccactactgctttaacttctgctgaaactgctgttgaggaacaatccatcactgccagcacatcttcggcgggacgacagcaacaaaggtaccctcggttttcacattacacaaatctcgagaaaaattttgtaagactctattggacacttattgtagggaaacatttttattttccataagagtaaaagctttttaatgccggtttttatataatttctgtgccaattttgcaaagattccgcgacgatttggtggcgtatctccgcgccgcttaccctccgagtgcgggcgaagtccatcggacggtccaattttgggtggaacgcattgaacgggccgacttcagccatattaaggaccgaattgtcgcttcggtgccgggacggtggggttttcatttgggaagaatggagaagaaaatacaattcaaaatttgtttttgcatgtcgaaatttgattcttcactttcatttttttactattaaattagctgctaatcgtttcaattagcaatcgtttaactaattgcctttttcccagcttccaaaggagtggcaccgatggtgatgcctcgtgccgttttggccatttgcgcctgcgtcggctgctcagcgaagcattcagtgtggaggaaagacagcggcacaaagccttcgtgggccaattcagctccatcggttcgctcggcgcacggcccgaggcgtggctttgcgacgagtttttgacgagtctgtccggcggacggtccatgatcagcggtcg

SEQ ID NO: 74026 - DNA, 855 bp, Heterodera glycines
atgaatgtcgatcatttgcagcgcacatcacgtcgcaaattggctgatgaaatcgcggctgtaataaaacgggacagatcacgctcagccagccgggcgtccctcgaacggatcagtcgggaagttcggcacaaatttgctcattacacgccacagaagaaacaacaactgccaagacaaaacaagtcagttgatccagaggatgctcttctgatcctcgggcttgtcggtacacagaaggcttacagacgactaaaaaacactattcgcctgatcaatgccaaatttgatgtgttcccgccactcgaaaaagtaaaaaaaagttttagcatttatatttatttaaaaattcaattgaatattgttaggtgcttgacatcaaacgccgcatctgtgggcctttctatcccattaatctaaattttaaggtgatgaggcgctccattccgtttggcgccgacttgagcaactgtggaagtgtatgccggacgcagaccaaattttgcagcaactggagcaccattttgtcaacaactggctcctcgactctggcaaaattgatgaactgaagcaggtatgtatgtttggagggggtaattgcgttaaacttgttttatttaaaaattgatatataataattcagagacaaagtgatcagcgggaagagcatgatgagttcgatcaaccggaagaagaaactgacgaactttcgcttatcaatgtcattgattgatggtgatttagcaagaagaaattggtggtcgacgggagacggacgaagaaaacaatgtagaagaacaattcgattttgaatagacacagttcgataaaaggtttttcttcgtttttacagga

SEQ ID NO: 74027 - DNA, 440 bp, Heterodera glycines
atgggggtcttggtgagaaaagagaagtgaatcggtgagggatcagaaatttttgataaaaataaattaaattatttattttcatttatagcatgtgttcatatgcataagtggtcaagtggctaaacctttttactttcattatttgtctcgttggttcaattccctgatggaacagaaaattttttatattttctttaccattattttaattgaatttaattaataaaaaatattttaatttaaaattattatttttttcatttttaatagcctaaaaacccataaacacagcggcccaattttgggctccaagtacaagtatgctggatttttcgtcttagtggtctgtgagttagtcaccaaaaggggggggggggtctcaggttcgagtcccatgcatgctgtaactgtattttgaggtttttaaagcaaataaa

SEQ ID NO: 74028 - DNA, 135 bp, Heterodera glycines
tatgacacggaaagacttccgatttccgacatttttggggtcggaattccgacttccgaaatttttgatgaaaagtcggaaattttttaaattttttttttcaaaaaactagtatgtaagttttgtacaatttct

SEQ ID NO: 74029 - DNA, 597 bp, Heterodera glycines
atgcatcaaattctaccgactgaacccatttttttgcctacggatggtttcgctggtcaaccaccaacagtccgtctggaatgccttctttccttcactctgatggcacctgtgcgcagtttggctgttgtgcaattaaaatgtgtgtgctctaaaagtttcaaaaaatcaatactttacgtttattaatttcattaaaataattaaatagtgatcccttccgaaatgtgcttatacttttcaaaacaagtggtgtctgcgggcactgtcaatgggaaaactgaaattttcaagaaatttatacaaagtgaaaaataatgccgatgaattttggcacacgcccttcactttttccgtttttttttcatttaaaaaattagcaaccactacttcagctgaaatagcgctaaaaatgaaaatggttattgatgatgagacgtttaaaagtcaatgtcatattcgtgatcagcgcactggcgctaattcttttttccattttctaaatgtgtcataagaaatgcccaattccttcacaaatacttattcatttatttgtgatacatatttaattttaactaaaaattgtaaaagaataaa

SEQ ID NO: 74030 - DNA, 417 bp, Heterodera glycines
atgaagcaatatttcaaaaccaaaggaaaaaatcctgaaattagcgacaaaagaatcgccattgaattgaaaattggagcttatacattgattggttagatggaaaaaagaatttgcttcaatttcaaaaatgtgatggaaattatggtggccgagtcgtttcgcgaaaaccgcaaatatttaacaaaagagagcgggccacatcagtacggtgtctgtatttgttaatttaagaaaaaaaacaactttaatgtctgtttcaagccactcaagcaaacaaagcaaagcaaatgaatatttttttacgtagaataaatagaaaaaaaattattttctaattcatttatttaatagtgtttttgggatgaggttctttaatttgttaactgataaatatatatttttatagacaattag

SEQ ID NO: 74031 - DNA, 824 bp, Heterodera glycines
atggcaaagggtattcgttctctgttggacactgtcggtgaagcattgccccaagtgggcaatctcggctcgctcttcttccttctgtttttcatcttcgccgccctcggcgtcgaattgttcggtcgtctcggtaccgatgcttttcccccttttcccccttcgttttgaattcctttggcgcttttccctccccgtccattttttggcatttcatttttcaatttttaagaatgcagcgaagagcacccgtgcgatgggttgggggagcacgcccattttaagaattttggaatggcttttctaacactctttcgcatcgcaacgggggataattggaacggcattatgaaggtgagaagaacgggcggcactgaaaccgaccaaaacatcggcttgttttgaggatgcccttcgggatgactgtgacccttccgataattgtgaggtcagtgaatggatgcgatccatccgaccgatcatcgcttttcgttcggcggtcctttcaattttttccgccgttcctttttcagcgcaattgttgcgtggaccccattttggccccgtgcttcttcgtcgtgttcgtgctcatctcccaatttgttttggtcaatgttgtcgttgcggtactcatgaaacacttggaggagagcaacaaaagggacgaagcgaccgacgccaaagcggcagaggaggaaaaagccgcgcgagtggcacgagaaacagacgcggagacggaggagttgctggaagaagaagcggagatcgaagcggaagaagctttggaagaagcggacgagcaacagttgggagaggaactgctg

SEQ ID NO: 74032 - DNA, 1788 bp, Heterodera glycines
atgaccttcggcaattacgtgctgttcaatttgctggtggccattctcgttgagggctttcaggagagcaaagaggaggaaaagcgccaattggaggaagaagcgcaacggagggcggaggaggaagaaagggagcgcaagacggagttggaagtgctaatcgcagagacaacttcgccagagtttcttgacaagcgcaaggagtgcagctgcggacagaacaatttgcacgcggtcagagaacagctaatggtgaggggagagcagacaaaacgaacggcggaggaagaagaagaaaaaggaagaaggaagaaaccatcggaagagagaagagacagggaaaggacggaggatgaagatgaaaggaggatgaaaccatcggaagagagaaggtacagaggaaaggtgacggaagaggaagatgaaggggaagagagaaggaactggggaaaggggacggaagaggaagatgaaggggaagagagaaggaactggggaaaggggacggaagaggaagatgaaaggaggatggaaccaccagaagagaggagggaccggggaaagtggacggaagaggaagaagagaagcggaagacgacgaagggggagaaaaggaagaggatggaagaagaagaagaagggggaaggaggatgaaaccaacggaagagagatggaagagggagaggacggaggaggaagaggagaggaaggacatgggaataaaatacacgaagaattcggagcgaatcagaaccattttgaagaaacgtgaagaaagttcaaaggagccatgttcttccatatcgtttcatccacattcagcggatgagaagaacaaaaacaatcgacgaagtgctcctccgcagtgttcagcagccgaagcatttctgtcctcccaagtaagtcacttcttcaagtcatgtccttatcctcttcatcttcccccactcctttcatcgcttcatcttccgcccgccctcctttcctttcttcatcttccgtccttcttcccccttttcataggttcgtcccttccatctcagccgttgcacctctctccatgccaatcgtcgggtgccgtactgctcatcctcttctgccgccgtccgtccctttcctcgcggtcatttccgtccctccactcttccatcaatgtccgtcttccaatcgcccctctcacttctccccactgcttccatggagtgttccctggtccgtcctcgtctgatgagttggtctcactttggctgcgtccactcgtccctctttgacccgcagtgccccgtccatggccaccacgcactgctcgaagcgtacgcgcgagaaaagttgatgaaggccaacgaggaattgcagcagacactcgaggaagagaagagaagggcggaaaagcgaaagaacatttggtgggtgacgacagatcggaaaatgcatttcggaagataaacatgaacggatacggatgagtgagcgaattcagcattagagttggctaagccattgaatgggattacaatcggttaaaattagccgggtaatgattggaccatcgaatgggcctcgccctcctcccccggcatccttctcctctccgttgtgcctttttcgtacatttcggcaatgtttttcaggtggcgtcggttagtccgcaaatcattcctttattcccgcgcggagttttcgctgtttcttttgcccccgggcaattccctcagggagcggtgcctccgactgactgggcgcaagtggttcgactacgccattctcttctgcatgtttgccactaa

SEQ ID NO: 74033 - DNA, 891 bp, Heterodera glycines
tcccactcactggctgaccaatcactcactccctcttttcaaaatgccaatccattcttttccttacaaaatgccaatctcttccttacccccccccccccctcctccgactaatcaaaaccaaaaacccactctcactgttcagtattctcggcatgaatttgttcggctgtaaattctgcaaaattgaggagaattggcggggagagtctgtgaaacgatgcgagcgcaaaaacttcgactcgcttttgtgggcactgaccaccgtttttcaggtgcccttcccccccccccccttctttttttgtattttttctttcttttgctgtgaatgtttttatcgtgtctttgtcgtgtgttgtttttttcaatgttttgtgtttttcgtattttttcttttctttgtctcacccacccccccccccccctcctgttaactcttcattttcctttttctctcctttctctctctcttaccttttctcccttttcgctcccctttctctcctctcctctttctctctcttgtctcttttctcccctttctctcctttctctcctccctctctctttttatctttttccctctttctttccttttttccttttctcttcgcttttcttttctctttacccccccccccctttttctcatgcttttgggcatgattcttttcgtctgcactttttgtacaaaaataatttccggcgaacggtgcactcaaaatgaagtgaatgcggaattacttctccaagcaaaaaatgtgccatcgtatggtcattgcgaaagggccaactttgactcatttctcaccgcatttctcaccgtctttcaggtgattaatcaattaaatgatagttgacatgcatttaatacctttgctttcattt

SEQ ID NO: 74034 - DNA, 668 bp, Heterodera glycines
atggaaaactccaatcaggaaataaagacaaagcgaaacaagcagaagctggaacatgagggtgcactttatgttcttcaccaactcagtgacggaccgcaaaggtgaaaaaatccattaaatttcactaatttccatattaagaattttgatatttgctcgttcttcgatttcggaatggactggtgttatgaaaaatgtgtacgcagatggcactttgtttggcgccgcctttttcagtcaaatttatattcttctagcaaagtaaaaccctatttttttcacgttttttccatagaaagcttctacaggcttttgcttgttcatattcaactgtcttccgcttcattaacacaattcgatgtgagcaaaagtcaattgatgcggacatctcacgatgcatcgcttgaactccctcctgcaaatgcgccaaaatatcgtgccgctgatgcgagaattcttcgacttttgcagggctacaatgccatcaacaataaccctgctcaccaaaatgaccataattatcatgccaatgtcaatgttaatcccgataacatcaaccatttgctcgttggtgtttctcgaaattatgaaatgcgcccgtaatttttcaatgttttgttatttttttgttgttaacacattgataaatattttttgataataaa

SEQ ID NO: 74035 - DNA, 285 bp, Heterodera glycines
atgactttgtcggaaaaacgaccacagcaagcgccgcgacaattcccgcctcagatggcattgtttcggtcggactcactccgcaattataccgtcctctgccagttatgccatggtaaaactaagccaagacaagaagagtcaaaagaaagaacatcggataggtactaccaaccaatgcaaacggcactgagcgcagaagcaggaattgcgaatggatttgaacggttttttaacggacaaccgccactaaggaagaaaaggggggaggacgaagacaaataa

SEQ ID NO: 74036 - DNA, 929 bp, Heterodera glycines
atggatgagactcattgtcagcagcagctcactgatcagaccagcaggtcgcggtgtgcatcgtcggaagagggcgccgaccttctcattttggagacaatggtaaccatttgattcatgaaaccaattccactttgctaaaattataaatttctgctcgtttaggccgaggaaatgtgccgaaaaggcgatgagattgaggtggaattggcaccgagcaaatcgctcctttcctccggctccgtccccgctcacatgcattgttcccacttcgtccgcgcaccatccgaaattacaatggaacaccttggcgaatttctactccaacgctcgcatcaaagttcgactgattcgaacaaagggagggcaaggaatgaccaacaactccagtcacaaccgccacagccattgaaagccgcaccaaaaaactttcacattttggtaaaacttttttcaaaaataaatatgacttgttgaaaaccagccgaatgttttcatttttaaggaccgccactaccaattgcggaagctgagccctcgggacacactttgcatggcttttctgttgtccatcaattgggaccggcacttgacaattttcttcgatttaaatggagagacgcagcaaagaggaggcacagacatggcggagaccattggagaagaattggccaaaatggttgagggacagagaaaggtggacaaagaagaagaggagagagaatcgcataaagagagggcaaagaggccggaggatacaaacggaggaaatagtgttaattgtaagatggaagtgactgacgaataagcgaaagaacggggggcgaagcgccgattggaccaactgtaacccacaggcattttctaattcttaggtcccgaccttttttacaaattctctcccctttcttccgttattttaaaataaa

SEQ ID NO: 74037 - DNA, 1213 bp, Heterodera glycines
atgcgcacatactgtaaaggatttgcacccgacataacatgggctgtggagaacattacggtaagtgctgtagttgatcagctgtgtgcagaaagaacgctgcacgggacgaaaatttttagaaataaaaaaaatttagtaaaaaaatgacacttttatataagccgcttaaaaagaataccgtattttctctaattaaggccctgtctccattaaaggccctgtctccaattatgtccccctttctgaggatgttgaaaaataatcgccccgtctctatttatccccccgggggataaatggaattattattattttttaaatcttatttttaataaaaattaattttaattaattctaaattgaaattcatttaaatgtttaataaacatgaaaaaataatacagaaaaatcacttactttactcaagtccgaatctaacccaccccggtgctatgtgttttcaattttttgaaatttaattattaatccctaggggtcttatgagacgggggtctggggttcgagtccgcttggctgcggtttatttttttaggtacttgtacagtttacaccagagttgccgcgggttacccgaaacccgacatttttctcgacccgaaacccgacccgatattttttctcgacccgcggcaagcctggtttacaccccataaaaattttctgaaagggcgctaaaaatatgcatacatttaaaaattcataacaagaaaactttttttgcttttattttgaagaaaggagctcaaaaaagcatttctgtattgaaattttcgattctgaagttactatgcgtcattaaaaattagactttgtcagcaaaatattaaaaaattttggcgttatgtcattattttagagtagagcgggaccgggaccgggccgggaattcccggtcatccgaggtccctgttcccggtcccggattttgaaaagctcaggtcccggtcccggttttgctcaaaattcccagtcccgctctactctacattattttattaactatttcgagatttttcatcactaaaagtcgcggccctagtcattaaaaatctgttgaaaaataatccccccgtctccattaaaggccctgtctccaattatgtccccctttctgaagaggttgaaaaataatccccccggggccttaattagagaaaatacggtatatttcgcaaaatttcaaccaaaa

SEQ ID NO: 74038 - DNA, 471 bp, Heterodera glycines
atgaaagtgaatcgtcttaataaagaaaaaattattaaaatttcagaaaaaacctgaagacgcacattttcttcttcttccaccttctgattttggcgtcggcaaacatgacaatgaaagtgcaaagaaaaataagatggacaaagaaaggatggataacagggccaagacatttgccaaagaacagaagccgaaaaatacaaaaaaacgtgctaatgaatggaacgcggaaaaagcaaacaaagctaccaacaagctaatgaggaaaatggcagaggaaaaaaccaaaatggcaaatgcaatgctttaccctacgaaaggcaagaaggatgccatgtacaggtgaagagcggggggggggggaagcaaattgcaacatttggccatgaatttgtccggaatttcggattgcaaataatttgattcaaaatggcttactctatggtcaaatgaaaatttttcgaaaataaa

SEQ ID NO: 74039 - DNA, 1142 bp, Heterodera glycines
atgaaaaatgagatgagcaaattctttggagaaaatattgtgaattttgccaatgcaattaaaataaatttcgcggcgccatatggtaattcctatcctaaaaattttctcaaatcctcattggtgctaagtttttcttaaattccgccattattggcgtaggaaaacaaaaacaaaaaatgtaaaacatttaaattcataacttggctcagtttcaacaatagctctaggtattctctataaaaatgaattactgtatgggttatatttcaaaatctttagtcagtttattttttggcgaaacatttttgaagcagaattttttggaatcttaaagacaaaaaaataataattcttagggctatcgtatataaataattttggctcaattgcattttaataatttatatgtgagcatggcaataaacattatatgttaatgtgaattcctctgaataatattttaaaattaaaattaaaaaaaatttcactgggtttaaaaaaagttaggacaaaaaaaatgttgactcaaaattttctttagctcaattttcaagacaaatatccttggaaaattttataaaatgcatggggccggccactaaaatatttttaaattcataaacatttccattttttatttcagaaaattttgatcttttgcattcattgtccgaatattcgcccacagtttacgaagtgataaaaatggccaaaattcttggcaacattgaaaatgatggacaaattttggtcctccgttcggactcgcaaattttccattttattttgaagtatttggcaaattcaacggcagaagagagtgccaaccaaacaaaatttgccattaaatacagcttttgttttttggcacaatttgttgaagaattattgaaaaaagcaatgaaagtgaatgaactgaaagaattgctaaacattgaattaattggggaggcaattgaaagttttgtcgagaaaaaggagcaaaaatgtgccaacaaaaagtgagaggaatttgacaaattggaacattaattaaccaatgattttccattaataattttcttaagcacgcaaaatgggattaacaaatatcttaatgaaagtatgatggattttgcccatttagcgcatgcaataaa

SEQ ID NO: 74040 - DNA, 1506 bp, Heterodera glycines
atgggctcatacgaaacgtatttggagccacgggaaatgctgacgaaggctgttgctgctgcagggattgaacccgaagcatttgtgacactcaaacacggagagagttggcgaatcgaaaagcaaaacgaagggacagagaacgcccagtgattagacaaacagaagatagacaaaactaacagagaaacgaagtcatgatttgaacggttttattcagcttgagcttgtgaattagacatttttgtgtgtatacataaaattaaaatatttctaaaccagggctcggatcgtaccaagtcactttccaagtacaggcataccaatttccaagtacataacgtgggaaatttattaaatccaagtacacataaaaatttgaacaaaaaaaaaattaaaaaaggttaattaacttcaaatctatttttcacctgaatgttttatccaaatatttatatttccgctgagcaatttacgcatttttcaaaaacacctcaacaactgctggttttcaatttgcaaaatcaatagaattaagattttgctttttaaacccaaaataagaaaatttttgcgattttgggtcaatttcttaaaaaaagtgagttcttttttgggggggaggatggacggagccattggcgctgccgggagaaaaattagaccttttgacctttttacagattttcaccgaaaattttctatttctaggttaatttagtaaaaaattaatgtcgttttgacaaaatgccaaaaattttagattttttcataaaatgtacattttttagtcatactcaaaaatcccgatttccaagtacaatcttggaaaaaagtacagttaaaattttccaagcacaaaagcagaaatccaagtatgtacttggcatccaagtacgaatccgagccctgttctattgctttttttcatttttttagtgcctatttttgggttttttaggacctaaaacctacctaggtattttggctgtttttagagcctaaaaatcgtatccctatttatgagtgttttttaagtccttttgttttttatttttataaattttagttttattattaaatctcctgaatatcacacataaatgtgaattttcttttacagtgaattttatatttctggttttattgtccgaatattcgccaacatttgatgaattgattaaaatggcgaatttctttgccaatattgacgatgatggacacattttgggcatcgcttcggattttaaaacacttgaaattgttatgaaatttctgaagaagccctactattttaattctaacccaaaagtgcctgaccaacatttgccgtgcattatggcatattttgttgaagaatttttaaaaaaagcaatggctgaaaatcattatttagtgttttttggcattgaatccaatgggatggtaattgaaaattttgccgagaaaaaggagagaatgtgcggggacaaaaggtgcaatttattctcctatcattttcattaa

SEQ ID NO: 74041 - DNA, 1126 bp, Heterodera glycines
atggaaacaagtacgttgtattaattgggattatgaaattcaagcggaagcagagttagtaatgggaaacatgacaaaaaagaaaaaacttaaactatatccagggataacggaagaatggcaagaaattgcatttaccccgcaaggagtgactccaccaattgcgccattgctagatgattattttattatatcggataaagatataatctatgcgggaaaagaagtgcgaactcaattaaaatgcaatgaccaaaatagtgcgcaaaatttcgagtgtattttgggtaccgatgcatgtaaagagtgttggcttaatagaacaaaaagtgaagaagagttggtacaatgtgaatgtgaagactcaacttttggtagggtcgagccaaagttaccttttacaaccgataaaatgaatttaagaaaggatagaaatacaattttgagtgaaacaatttatactcctatccagttattagtaagagttgaaaaattaaaaattgtaacagaaattgagtgtaatttgtgtaaagccaaacaagtggcaccattgaaaggttgttatgaatgtaccacgggtggacgacttaattatacatgttcaacaaattggggtgaaaatatagctgaaataaaatgcccaggaaacttgattttcttggcaaaatgcaataaaaatggcgaaacccaaattgatgtgttaccatttacaaagtcgaaaattaatatggattgtgaagttatatgcccaggaggaaaaacgagtttaaaaattaaaggcgagttaatgtatatacctgtgaatgaacggaaatatcaggtaagaaattcagaaatattagaaaatactaatgggttcggacttaattgggaagatcttttccaatttaattggaaattatttttaaatccatttcaaaattttaaattatacatattaatcataattttggcaatttttgcaatcggagtcatttatattttttggcttatgattccaattttcaatggttatagattcataatcggcattttaattttagtcatttcaattcccgctgtcagcggagggatgcatggcatcgagagcataaatgattcagggataaagggtcaaagagtgcaa

SEQ ID NO: 74042 - DNA, 1353 bp, Heterodera glycines
atgaatggtcattattacccattgggaggacttgtatttcaagggtaccaagatgagttgaattattttgaagattttttcaaattggaaatggataaatcggatatggaaataatgccacaaatgggtcttggcaatgaggaagttactgaaggtgagaaccgaattacaatacacttggacaacaattcgagtcgggaatgggtcttagaattcaaaaatatgggtgaaaatggattgaaaataattggaaagggtaaattcaaggctgttctcaactttgtgtgcttggcaatttgtaccttggcattgttaaatggggttcatggaatggacagacaaccaaacgggcaaaaggtaccaagtgaaagtgccgatgatttcgaagacttcgaaatgcaacaatggcaaagtgagctaagagatttgcaacagattgagacggccgagtccacttcgggtctaaacacggttgccacaaacaccggtacaaacaaccaagaagtgagtttagcaacggatactgtaatggttgtgccaatttctgaaccaagtcatcaagtacgggatatcattgaaaacccagttgtggatacaaatgtacaatgtgttgtagaaaaaatgggtacgacgaggcaattgtcaattccgacgaatttggatttgttgaattgggctcaaattcatcgttttttaccaccccctaatataatgttgaaggcccaacaagtgtccccaaatgtgcctcttgatcaacgaccgtccacttcggcaaacaacattggcaatccaaatgtcagtgcttcttgtgccccttcctgttcctcgatccaatgtggcaaatacgggaaagcaattcgaaattgggatggacgagttgcgcggccagtacagactgacctgtgccgtcgagaacgttcagctccttacttccgtccacggccaattctagcagcacctcaccagcaaccacgaatggtcgccaacccgccttttcctgttgagtccatccctcccattcacgtgccgtctggaattcgtcgagagttcttgcgcagaatgagccaagagacggaccactttttcggcctcgctcagttggttggagaatggaaccctacactcgcaactctgttcctggctttggaaacattctgccgtgccatccttcagctctgcgtgactgaagggggcgaccaccctgtcttctcccgccccgagtgtcgccgccgataagcgcgacgaaagatcaaaggaaagagatgatgattaatcaaaatggggacggaaaatcatatttaagaaagcaaaaagagagcacttcatcattcatttgatcattcaattgtgcaa

SEQ ID NO: 74043 - DNA, 393 bp, Heterodera glycines
atggtcgaccaaagcaacaaagcgaaggaaaggccatcactccttgaagaaccatttataattgacatcacggcaatcgagagcaagtgcgccaaaccgaaaatggctggaaaagggcgtaacgacttcaacatcgactaccgtattgccgatggtgcaacgtatgagcttctgaacaacgacaatctctgtctcttccggtcatttgaaatgcttcggatgaaattcatacttgcgcaacaacgtttttcggaatacaaaagggatgagagaaaacagcttgaaggcgttcatgctttgtgccgggggtgcaacattgacatcaacctacccttctattcaattgaggaatacggagaatcaattcaggcaaataatttgtttattaattga

SEQ ID NO: 74044 - DNA, 368 bp, Heterodera glycines
atgagccaatattccgacaattccctcccccctaccctcgacggaccgtattcccctgttggggatgacggcaccgaattgatggacgaagcaccgccattggatgaggttatgaaacgccttccgatctcggttagtttttacgaaatgtttttctaaaattcttttctaattttgggagacattttcaggttgtgccatcggacaacaatgagcgcaaggcccagaaggagccgtcaattacccgcgaattggaggcggaattgttcaacggcgatggctttacatgtctctctgccgcacaggcggaagcgggacgttttaaaggtgtggttgtaaataatacatcatataaaattattatttaa

SEQ ID NO: 74045 - DNA, 460 bp, Heterodera glycines
atggtgattagacgaggtacaaaagtgattagaagaggtacaaatttgatgaagaggtacaaatgtgatttaaagaggtacaacagtgattagaagagttacaaaagtgataaaagaggtacaaaagtgattagaagaggtacaatggtgattagacgaggtacaaaagtgattagaagaggtgcaacagtgattagaaaattcaaaaaataaataattaaattctttactgtaaaaaattttttttaaataatctacaacaaatcttcagattagttaaaaacattgaaaataacgtaaaaagtcatagaaaaataatttacaccggccggattcgaacctaccgcccccaccccacagaagatgactcagaatccccaatcacacagggattctgaggtcttaacgatgtataaactaaaatctgatgtcagattagtgatcagcaccctcaaataaa

SEQ ID NO: 74046 - DNA, 435 bp, Heterodera glycines
atgaaactgggcttgcattggcatgcgacctcaatgccaagtgcatcgatgggtgggccgatttgcctcccgctcctaacggatggggtggggaaggaacatttgtcgccgaattcaaaattttttcatcctctttatcaccagaaaaactgtaatgaagcctattctttccatgatttcgctcaaggcttttccttaatcaccaagtttttgaatttggaaaaaattttctgaaaaaattaaataattttcagaattccattatttttgaaattgtcccggtcccgacgtatccctggtccaaaaattgatccggatcggatgagagtgccgggaaaacaacataatttgggatcatcaatgacacttttactactttactgtggcgagctctggggggggggggaatttggaattctctcccgaaatgtaaaa

SEQ ID NO: 74047 - DNA, 4853 bp, Heterodera glycines
  unsure (1)..(4853): unsure at all n locations
aataaaccaaaaaaaagaaataaaagcaattcagacagactactgaataaaataattataaaaatgaagaaaaacacagatttttttttttttttttttttggtcgttttcgagagtgagaaatagggcgtcggaaatttttttgttttcgtttttgtgtttgttttcgtatttggttttttttctctcttcactatcggcagtaattatatggctgtaagtttttcgtaagtttggcattcgacaaaaaaaaaacgaagggtcaaaatcgattcatttctaattgattcccattcccatctcagtgccgttgaccaacaaaaatagaggaaatgaggcgaaatgtggacaatgacagtggtgcaaacaatggcgcgaacatcagcagcaacccgaaaattgcccgggatgcggaaattgctcatgttgtggacactggaaatggcgcaaatgacgcgcttggcgacggaatggacattgggcactgcccaaactgctcgtggcattgtaatgtgtgcagtaagcgaatttttctgttctgcattcgatttcgttcaaacatttctttgattcagtctgtcattaccgcctaatttgtttaatttactatcaaaaaccacaaaacggtcaaatttttatttttttttccctgttatcaatttaatcaatgtttttgggctgattttccactaactaattcaatttgctaccaaacaacaaaataatggtcaatttttttttcttctctacttttttcgtcaaaaaaaaaaacattgccgccaaaagttcaattccctattaaactaatacagtacaacaatgcgcggtgcggagaacattgcactttgaacgctaatatcatacttatcttttactgtaatcgccgatgagcctggacaattccatttttcgatttccacgatagggatgggctcttaaatgttacaacagctaatgggaaaagcgtcgctattaacaatctccacttttcactaaaaagcatttcccactcattcatcaattcattcttcatccaaagcacatagtgctctcatctcaatcgtcaaacgctccgcaattcacagccttaagcttaagcaagcaaccgcgcgaaccctaccgcctattccctcatttgtttccaaatttaattgttacatctaattattctaattttgttttcccgtttcattttgcttattatttgcgctcatatttgaattgttttaactcgcgctctcatttcaatcaatagaatagtcgtaagactaagagcagaccaaattttttttttttctcttttcaaattgtccaccccaattttcaattgaactatcctttggatagaaagaaacgaaacaatggaagaccaacaagttacaataacgagtgtagacaggacattatttcaaaatctcagtcaccctcctaattccggtgctcccttttcattggtagaaaaagtataccaaggcactgtacgtctagaggatgccgctaaccgaagtctaagagtaattaatcgcagagctgtacaaaatacagatgccattaaccaagtatctgtaacggttaatgctaacatggacactctctccacaagacttgaccaagttgtagagaaagttgaatctctggaaagccaagtggagaattgggatgaccctaatgctgataaattatcacaaaacgggaatgccactgtggtactaaggggccgcgtggggttacttgaagaagaggacgatgaagacgaatttctaaacgttttgacaactgtggacccatttgctagtcaacttccggcatgcagagatgaaaatcttacctctttcgataactgggcccaaaaatttagagaccttttggattatgcgggcacaacatggtcagaaaaagaaaaattaggccgactcaaattttctcttgaagggcaaatcagaaagctctttgataagcttccggacaataaaaaggacactgtagataaggcattaaatgccattagggacaaattagattcccctgaacgctgggaaatgtcaaaaagggcactgtgacatgcaaacagcgagaaaccgaaacagtccgggaatttttgtcaagactttcgccattggttactactgtgtgtgccggtcaaagtgaggcacaaatacagtcacgactaagggatgaatttttggaaagggtcaagcccaatttaacctttcttatccgactgactggtgtcactaagaaccaagattttgaggctgtgttttcccaggcacaagaattagaacttcttttgactaataccaatgaaaataacgttttggacccgctcaaattcactgtccaagctataacccaatctccggtaaaccaatcgggttatcgtactaaccaattttcttcctccaatgtgaattcatgggcacccgctggacaaagatatacgaataaccgtcaggttaatcagcaaacacaaaataatcaaccaaatggttcaggaagaggctattttcggggtaaccacggtgaatccaacaggcctcaatttcaaagaaatagggctaatcaataccggtcgaaccgaggccgaggggaccgcaattggactggccgtccaaaatgccatcactaaggaagtaaagagaataatagggatggcatcattttatagaagacatatacctaatttttccacaatcgttgagccgttaacccgtttaactcgtaaaaatatgaccttcctttgggaagatgagcaaaaggcagcgttttccaaaattaaggaaattctttctcaagaaccctcactttcctttccaaattattccaaaccatttcatatctttaccgatgcttctattgttggccaagctggtattttaatgcagaaaaatgaatttggcactttttctgctatttcttattgcagtaggactcttagcgcttccgaaaggaagtggccacccgttcaaattgaactgggagctataatttattcactaagagaattcaaaccatatatttttatgtcagatgtggaattacatactgatcataaaccattagcctatctcttaaaaaaggcagaagctcatccaaatttagcacggtggctaattgaactacaaagttaccaaattaaaatagtgcacataagtgggaaacaaaatagtttagcagacgctctgtcaagagcacaggaaaatattacggtcaaagaagtacaggacttagatgaacttgaggacattgctgagtttccaatttgtttaaacctatcaattgaccagcggttagtttttgatccattcgttaatacattaattcttagaggcaaagatggtaattcgtacaatattgatttaaagaaagagcaaagggccgaccctcaaatctctcaatttattaactttttacaaactggcaaattttcgaatgaaatataccaacagaccatggaatctcttactgatcaagccaaaaacctcgttattgactctggaattttgtattttaggtaccaggatcagtcaccacgaatttatataccaatctcattaagatcccttatttttgactcatttcactcttctcctcttggtggagggcacatggatttaaaaaagacattgaagaaatgtcgaaaatattattggcctttcctatattctgatattttaacatggtacaaacaatgtattacttgtcagctaagacattcaccgacgcctgcattcagggcagaaatgcaaatggtccccgccaatactttatttgccagagttggtttagatctagccggtccttttcctattactgaacgtggcaataaatacattttaaatatcatttgttggttctgtaaatatgtaatatccgttcccttacccgatgccaaatcgcatacaattgccaaagcttttcttagtaattgttatcttaagtttggtggttgcaccgaattagtgagtgacgatgcgacagcatttacttctgagttctttcgtgaattttgctcgttattatatattaataagaaatatgcagttccacattggtcgcaaggaaatgcggccacagagcgcacttttagaacatttaacaatattttgtcaaaatatgtcactaaagagcaaccagattttgatgaatttttagactatgccaatttttgttataatacatctgttcattccacgactcacgaaaccccatattttttaatgtttgggcgtgatccgattttctgtattgatcaaataatagatcctaggattagagaaccaattgcatttactgatgagacagaatttaaacagaaattagtgacctctcttcggagagcatggaagataaccgcagaattacatgctgaggcacaggagaaaatgaaaattcaatacgataagactatgagaactcctaatttaaagattggggacagggttttattaagaaattatgatggtaaacgtaacacatccaaaaaatttcattttccatnggaagggtgcctttagaattatagaaattgagggaatatatgccacaatcactagctgtaattcgcctcaagcaaatccacgccgtgtccatataaatcagcttaagaagtgttatgaaaatttaggggggcctgcctgcacttcacctaggcttagttcagaagagagaaattctctcgcagagttagaagcggatgaaattcacaatttgccgggtcactcacatcctactgatataccaaaacattctttttctcttatcgtgattctgatgatgaaatacccgctaatgagcccaatattgataataatgaggttaaaacatcactaacaccgcaaaatatggtctaa

SEQ ID NO: 74048 - DNA, 520 bp, Heterodera glycines
atgttaattaacaagctttcacgcatcgacttggttcgtttttcattaggtcattaatatttaataaggtccgtcaaaataagtagaataaataattattatgaaaatttatttttttattttatagaaacaattaaattttttattatgtcttatgaatatcattttcaattaaaaaatatatattttaatgtattttttaaaatccttattgaatgcgcttttgtgttgttttcttttttttagattattttaattaaaaaacaaattaatgaatgtgttttatggaaaatactcaaaagttaatgttttatataaaaatatcaaaaatggctgtttttatgaaatgctaaaacaaaaatttaagtaattaagtaagtaagcgtattaaatttttggtaatgttttatggaaaaaatataaaaatatttctatgaaattgtttaaaattatcatcaaaaaaattgtgttactaattttaatagaattaagacaagttagagcggtagaaaaaaataaa

SEQ ID NO: 74049 - DNA, 435 bp, Heterodera glycines
gaagacagggaagccaccaccaaaatcttggaccatcttgaagttaaggccgaaccaaccgccgtctttctactcggccggtacgacccgcagcgaacaacaccacgcccactcaaggtagtcatgccaacacccacacaccaacacatggcactcggaggatggaagcgcgagcgtgctcgactccgttctcaacaaaatttggcccgtctgttcgtccgaccggcgcttatcaaagaacagctcatgaagaaattcgaagaacgtctccgaaaacgtcaaaagactccagcttcattggcttttgcgacggagatctcaaaaacggcaaatgaccaggttcccgttgttgcaaaaggaccaaaccagaaggaggccagtgaagacatttccaaacccccgggagtttttgaccaaacaatccgtatgttatga

SEQ ID NO: 74050 - DNA, 442 bp, Heterodera glycines
atgacccacaccacaattggagggccgagagggttaaaggttattctcatcaccgaaccgatttccatggcaaagtaattgctttgaatgtaaacaaattgttagaaagactgatattttaataatatttatgtgtttaaaatactatgttaaattgacacaaaactaacaatttttagaatttttcaaatacataactttatttaaaaaaaaatagttttcactaataaataattctttattttatttcagtgacgaaaggttcagtgacgaaaagtttagtgacgaaaggttcagttaattttgaatacatagttttattgaatttttatccatctactaaactacaaaaaatgcatgtttattacaaaagtattgatatatttgtttttgttataatttttaattattaatttagataacaagaaaaatttttaataaa

SEQ ID NO: 74051 - DNA, 210 bp, Heterodera glycines
atgcaagaaaataactcatcatccgacgaagagggtcaattgctttcatcttcatctgggaatgaagaagcggctaaccaagaattaattcaattcatcgaatttaagtcaaagcgtggtgcctcacttcttgcacgtaatgggtttgagtaccaatttgaacgcaattcggccttagttgataatgttgaatattggaagtgtgttaaa

SEQ ID NO: 74052 - DNA, 565 bp, Heterodera glycines
gccaattgtgctctgtttcattggcattgatggggccggtaaaacgaccattgtcaaggcattgcaaggaggtaggccaaaccaaataaatgccatggccgagcctttagcaaaaattgtcacgccccttcagaggattttggcaccgttcattccacggttggcttttcccgggcggaattgcgagtcaaaaagtaccgtatcactgtgtatgatttgggaggatcggctcgaattcgcgaaatttggcccatttatttcgccgaggtatttacttaaaagttatttcatcagcaggttaattcgcaaaatatttatttacattttgtaaaatgaaataaaaatccaattattttttgcctttccaattttaattcttggcactattttgctctttttttgtttttgtttttactttaggtgtttggcgttgtgttcgttttggatgcgagtgccgccagtcgaatcagtgagaacaaaaagatggtcgactctttggtcggactgcccgaccttctcggcaaacccattctgtttctgctcaacaaaaaggacctttccggaa

SEQ ID NO: 74053 - DNA, 523 bp, Heterodera glycines
atggaaaacggagagaaacaagagagagaagaaggagcgagagaaagcagaggaagaggaggaacaacggaagagagcggaaaagaaaacagagaaataggaacagcggaagggagtggaagaaaaagcagaggaggaggaacagcaccggaagagagcacaagaaaaacaaaaggaggagaaagaagaggaggaagagaaagaacagcggaagagagtggaagagaagcgcaagcagttcaacaaggcacagttgaaattgaaatgagaccaactccccgagcagaaagcagccgaggcggaagcactcacggacgaaatgcgatagacgtaatgacaacggtgggaagttgaaaaacatgctaatcactcaattaacacttcaagtgatcataggttgttgctaatatccttttgctgccctcaatttgtcactgattattaaattttgaccgattttttaagaaatattcgcccttttcccaagtattttctcttgttgtttatccattcaattatccta

SEQ ID NO: 74054 - DNA, 642 bp, Heterodera glycines
cacaaaatttgccacaaaaatcacagttttcacaaaatttgctacaaaaattacattttcaattgccttttaattggaaagaatcggagggcactcgtcaattaacacttttaaatttccatgtactttttcccccatttacaagttcggattcgctcatttgttaatttaatcaatgttttcctctattgttcatttcaatgtcactttttgatttgccattgaccgaccggcggataataataatgcctttctttttgcagtcatttattaatgggggcaatgccattcaatgccccccccccacttaaagccgtccctttacaaatggcggctgtccttggcgattgaccgccgttttgtgcttcattcattaagggaacaaaacgtagctgctgaagagcacaaatatccgtttattaggataattgaatggataaacaacaagagaaaatacttgggaaaagggcgaatatttcttaaaaaatcggtcaaaatttaataatcagtgacaaattgagggcagcaaaaggatattagcaacaacctatgatcacttgaagtgttaattgagtgattagcatgtttttcaacttcccaccgttgtcattacgtctatcgcatttcgtccgtgagtgcttc

SEQ ID NO: 74055 - DNA, 1046 bp, Heterodera glycines
atggatgccaggaaaatgggtgccaaggaatcgggtgtcaaggaggcggagtccagggaagcggatgccaaggaagcggatgtcaaggaagcggagtccagggaagcggatgccaaggaagcggatgtcagggaagcggatgccaaggaagccaaaatggatgccagggaaatgggtgccaaggaatcgggtgtcaaggaggcggatgtcagggaagcggatgccatggaagcggattacaaggaagcgaattccatggaagcgaatatcaaggaagcggcggagtccagggaagcggatgccagggaagcggattccaaggaagcgggtgccaaggaagcggatgccaaggaagcgggtgccagggaagcgcgagtggatgtcaaggaagcgggtgccagggaagcgcgagtggatggcaaggaagcgcaagtgggtgccaaggaagtgggtgccagggaagcgcaagtgggtgccaaggaagcgcaagtgggtgccaaggaagcgcaagtgggtgccaaggaagtgggtgccagggaagcgcaagtgggtgccaaggaagtgggtgccaaggaagcgcaagtgggtgccaaggaagtgggtgccagggaagcgcaagtgggtgccaaggaagcggatgccaaggaagtgggtgccagggaagcgcaagtgggtgccaaggaagtgggtgccagggaagcgcaagtgggtgccaaggaagcgcaagtgggtgccaaggaagcgcaagtgggtgccaaggaagtgggtgccagggaagcgcaagtgggtgctctggcggcggctgtcaagggggaggcggatgggtacaaaaaggagtatgttcgaagggtgaaagccgccctcattaaattttttaattttcagggcgtttttcctccccttccatcgcctccaaatggaaacagaggcggtcaaccggtcattttccttgcaaatcgcaaaaaactcacttttattcagccgtgccaaggcgacctttgcggttccgctttgcaaacgccgccgcctccgctgcccagcgagcc

SEQ ID NO: 74056 - DNA, 450 bp, Heterodera glycines
atgaagaaaaaagcaggttcatatgaagtgttcacaaaagccgtaaagtaagtgttaaaaaaaattaagttgttttttggtagaaattggtttcctccccttcaattctccgtatcacttctctgataaaaattagaattttttgaatgaattcttaagaatttaaagttttgttttcgaattaatcgggctgggtggtggtgggcggggggagtcgatatgggaaatgatttacgagtggggaacggaagggaatgggccctcatattttgaccaccacaaagcctcgtaatgtctggcttaattttcatccattttccccaattccttttcagcgatccgtccgttttcgacgagtgcgaaatcgaggctaaagtgcgcgccaaattggtggaagaaattcaaaagaaacttacgcccaaagcactcaaaattcgagcggacatcgaa

SEQ ID NO: 74057 - DNA, 1492 bp, Heterodera glycines
atggccgaatttgcccaccgagccggtgctccattggagtgcctttgcatggctctgaaggtaaaaaaaattaaattaaataatgaattaaaactcaatttaaatacccaattaaaactctaattaaaatacacaacaattatatctgtaattcaaatgtttgaaaggtccaaaagcgtcaggaaggaacggacgccgaaggcaatccgcgatggaagtaatttaatattattaaaatggaaaaaaattcccccgtgtccttttaaattattttggtgggttttcgaagttgctggttacacgaatttgacatcaattttgacaaacccgaattgctaattgaactcgaaaacaaaaattaaaaataggaaataaatgaaatttttccaaccctttgaattaagttaggtattcggatttggtcgaaatgggcgtcataaaatgatcttgactccgaaaaaaacttaggtaatttccgattttatataaaaaaggttctccctttaataactctcaaagaaccgtaaaaatgattgtttttaattttattaaagaattggcataagtattggcggtggcattgaccaaaaccatcgacagtccgtctacagtgattccgtctgttatcaattttatgaaaaaaacgatgaataattttcttaattgatatgctaacaatatgatttgattgtttatatatatatataacgaacgccctttttatggtggcttttatataacgactatagcaccctaaaaaacaaattttatcaaaaataaatttaatttgtaaataatttttttgaattattattaggcaatcctaaagaatgggggtccctaatttttaacttcccattctttaggatggtcgataattacataaaatgattaaaattttcccgacttaagggaatttatgtgacaagcgtggaagcaaagtgacgtgccaattccttcttgaccatttcatatttcgattttaagttcacccgcggaagaagctggactgaaagtgcatgacaaaattctgcaagtgaacggcgtcgattacgtaaaaaacagaattaaattacaaaaaaaaccattgtttttatgcatatgtcggtaaatgaatcatctttggggtgtcttttttatttttattacattttttaaggatttttccaaaaatcccgaaagtaggcgcaaaaatggcgaaaaaggcacaaaagcgttttgttttttgcttatctgagcgtatcaaacgcacagaaattttaggctttttttaaaaatggcagccctaaaaataataatttattaagcattcatatttatcggttccacttttttttgcagacgatgatcactcacgatcgagcagtcaaatatttgaagaaggagccggtgttggatttgctggtcaccagggccacagcgaaacccagcacggaagtgcaaatgtgaactgcttgccggaggaacgaactaattgcacattaagtccgaa

SEQ ID NO: 74058 - DNA, 325 bp, Heterodera glycines
atgtgtaagcaaaacgaagatttgtatttttcgtgtcataagtttaacatttttcccccaaaagtttgtgagaaaatttttaaaatatatttgggcatattagcaaagattaaggatatccggaaaacaaaatcaatggcagtaatacatacataaataaaagttcattttaattcacaggaatttaattcttttttttcagaaatgggtaaaataattgggtgcacaattttccgcattacttttgctgcaaatgtaattggttttaagccgcaatttttatttacatcatttatggcattttcgatctttccttgataataaa

SEQ ID NO: 74059 - DNA, 1272 bp, Heterodera glycines
atggggaaaataattgtgtgcacaattttctgcggtgtcttggctgcaactgtaattggtctcaagccgcgcggaccgccctatcataagggacaagaacgttttggcccaccaccaaatggccaacatagcccaggaaagttcggacccccaccgcccaacagctccgaccttccatcgccggaaagcagctctgacgcttcggcccgtaaaaagcgcattccgttcggcttccgtccccatggcctaccaccaaatggccaacatagcccaggaaagttcggacccccaccgcccaacagctccgaccttccaccgccggaaagcagctctgacgcttcggcccgtaagaagcgcagtccgttcggcttccgtccccatggcctaccaccaaatggccaacatagcccaggaaagttcggacccccaccgcccaacagctccgaccttccatcgccggaaagcagctctgacgcttcggcccgtaaaaagcgcattccgttcggcttccgtccccatggcctaccaccaaatggccaacatagcccaggaaagttcggacccccaccgcccaacagctccgaccttccatcgccggaaagcagctctgacgcttcggcccgtaaaaagcgcattccgttcggcttccgtccccatggcctaccaccaaatggccaacatagcccaggaaagttcggacccccaccgcccaacagctccgaccttccaccgccggaaagcagctctgacgcttcggcccgtaagaagcgcagtccgttcggcttccgtccccatggcctaccaccaaatggccaacatggccttggaaagttcggtcccgcgccctgcaacagttctgaccttccgccgctctcatcgacggacagtgaatgagcaatgaatgtttggatgatcaaatgcacattatcattggaaaaaaaatgcttgaattatggcatagtttatatgagaatacattatgaagtgttgattatttgacgcattttgtggaaaagttcccgagagtcctctttttcagatttttctaatttgcgtgttggaaatgatttttaaaagaagaattaccaattttctcagcaaatctataaaactgcttattttaaataattataattcagtgaaaagctttcccgttcattatgccaatataattacccaattaattagcattacgcatggattgactttttatataattcataattgggactcggaaaattctttaaattggcataggaaattttttaccaa

SEQ ID NO: 74060 - DNA, 80 bp, Heterodera glycines; identical to SEQ ID NO: 62154

SEQ ID NO: 74061 - DNA, 1262 bp, Heterodera glycines
atgtacgaattggcgatgcgtttgcgccgtgaaattcagtcgcgcgccatgctgcaacggcggagtgccgcgctgtcggtcgcctaccaaacaatgcaaattgacatggacgagccgaacatctgttacgagccgacggaatacgaagtaatatttttatacacggcacaatgcattgcaataatgccaaatttcaaatgtatcgccaaaatgccatgcattttatgggccctttgttataaaaacttattttaaattattttggaattttaattacaggacgaccaactgctgttggctgcggatggtattgaacgttttgctggcgatggagccggtgaagacggagcagacagaatggcagtcacagattttgagatggtcgacatgcaagcggaggaacaacaaagtattgttgttgttaaatattggccattaaaatatttacggaggataaatgcaattttctaattgatttcgtttccaaaattcctaacatttcgactcgacttggcctttacatccggaaaatatgttgttgaacagtaccattttccattgttcagttgctgctgctgctgctgctgctgctgctgcacgaccacttcgaacccgtgtcgtgatcaccaaagaggacgtggcacagcaactgctccaagcggaggcgcgcttggcactgctggacgcggacgcgcacatggtgccaccgctggtggacgaggacattttgcgcgagtcgctcaaccacaaacgcttcgacatggcctggctgttgatcaagttggacttgagaatcacgaataattttgacaattttaaatcggtcaaaaaaacgattttttcctcgtcaggcaattcgagttgaaaccgtacgagctgttggaacgcgtcacggagcaggcaatccgcacggatttcgacgctgaagacgacgatggtggcggtgagggtggcgactcctcgtcttcgtcattcgttggtgtaatggtctctgacgaggggtgcaaagatgtcgagacggccgacacgagttttggtgccagacagaagaagaagcgggtggtggacgacgagttggaggagttggactgggtgatgtacaaccggcagtatttgggcgacggagggtctgtttttggatccttattttgcaattcatataaggaacacgatccacttaagttctatgatagttgcgcccttgcgacggattgaaaaatttgtttaaaattattaaaatttaactggaattcatttgttca

SEQ ID NO: 74062 - DNA, 1425 bp, Heterodera glycines
  unsure (1)..(1425): unsure at all n locations
atgaaagagaacaatgaatggcaaaacgggcacgcccactttgataagccaacggaaagtgagtgccatttcgcaccagggcaccgtgttcagcatacggcacgcgatacggtaggtgtaggcgaacggagactcgcgccgctgcttggccaattcagtgtcgacaaagcgctgaaatggaagcaaaattgccagcaaaattcagagggacgagcactaatgatcgctaatgactagtaaaatttatattgatcaattcgatctaaaaattcatccaaaagatagtgatctgaaattatagatataatttggcatccaaaacgcataagcacacctttaaacgcctggagcgttttggattttgccacgcccactcgaagcgaagtgccgaaattgcgttcggaaagccatgcacgatgcagaccatatccctggacagagaagagcagcatgacatcatttttgttacaaagcctgttgatcagtgtttgccctggtggttttctgatcagtcccaatcaacagcctttgcctatcgcttcaactcccctgatcagcagatgttcttgggcttaactcaaggaatgtacgttatgatcaccaatcatcattatttgtttatccaccgttggatatcgaaatgtcaagcccattagaacaaattcacgagggtcggtcccgaacattacacacactactttggcattttattatcccattcccggcacggcaccatggtccccggttgtccgtcttcttcgcgccgcccgcttgtctgcccgcgttgtgctgccgaatgcgtctgttcgggtccaccgtgaagccgatgtaacagcggttctgttttttaattaaataaaataggcaaataatttgtctggattttgaatttgccttatagcacttctccacacttttgctgacaaggcaataaacgccgaagaattcgtcgggcaccaacttttgtttgggcggcaacagctgagaaaagcggacgaatgaatcacaaagaatggagtgccgaaatcagaattggcattttgaactcggtttatctatcctgactaatcaggcaaaacaaaaaatgcgtccagaatttctgcggaacagaaaccgggcccgtgcccaactctcaagtttttaggaaacgattttgttatcgaaatgccggattaagtctcgaaccaatgtgccgaaaaccgaccgctaattgaaatttgagaaaaaggaagcagcagattcattaattgttgaaaaagctacccaccggatcacacaaatcctccaagttgatccgtttgccggctgtgatcattattcgctcactcaactgacaacaaaacattttanggggggcgggatcactttttccaaaaacattttgattgactaattaaacaaattgcactaatttatgcgaataaa

SEQ ID NO: 74063 - DNA, 1276 bp, Heterodera glycines
atgatcacagccggcaaacggatcaacttggaggatttgtgtgatccggtgggtagctttttcaacaattaatgaatctgctgcttcctttttctcaaatttcaattagcggtcggttttcggcacattggttcgagacttaatccggcatttcgataacaaaatcgtttcctaaaaacttgagagttgggcacgggcccggtttctgttccgcagaaattctggacgcattttttgttttgcctgattagtcaggatagataaaccgagttcaaaatgccaattctgatttcggcactccattctttgtgattcattcgtccgcttttctcagctgttgccgcccaaacaaaagttggtgcccgacgaattcttcggcgtttattgccttgtcagcaaaagtgtggagaagtgctataaggcaaattcaaaatccagacaaattatttgcctattttatttaattaaaaaacagaaccgctgttacatcggcttcacggtggacccgaacagacgcattcggcagcacaacgcgggcagacaagcgggcggcgcgaagaagacggacaaccggggaccatggtgccgtgccgggaatgggataataaaatgccaaagtagtgtgtgtaatgttcgggaccgaccctcgtgaatttgttctaatgggcttgacatttcgatatccaacggtggataaacaaataatgatgattggtgatcataacgtacattccttgagttaagcccaagaacatctgctgatcaggggagttgaagcgataggcaaaggctgttgattgggactgatcagaaaaccaccagggcaaacactgatcaacaggctttgtaacaaaaatgatgtcatgctgctcttctctgtccagggatatggtctgcatcgtgcatggctttccgaacgcaatttcggcacttcgcttcgagtgggcgtggcaaaatccaaaacgctccaggcgtttaaaggtgtgcttatgcgttttggatgccaaattatatctataatttcagatcactatcttttggatgaatttttagatcgaattgatcaatataaattttactagtcattagcgatcattagtgctcgtccctctgaattttgctggcaattttgcttccatttcagcgctttgtcgacactgaattggccaagcagcggcgcgagtctccgttcgcctacacctaccgtatcgcgtgccgtatgctgaacacggtgccctggtgcgaaatggcactcactttccgttggcttatcaaa

SEQ ID NO: 74064 - DNA, 412 bp, Heterodera glycines
atgtccaaaaatggcgagcggaagttaattttgttggtgagttgagtaaaatttctaatttttaaatgattttgctgggcaatttattagttattttacaattttagggaattcatgaaaaaaaattatataagttttatatacatttttgaattaattaattcaataatttgaggagggcatggaagattacgaagaaaaaaagaaaattgaagaaaaaatgaaatttattttcatttgaatttatttatgatcgtaaaaattattattcttcgttatttttgtttattcattaacattgaaacctgataaatggaaaagatgtttctgtttaaaggtcattaattttttaaattagaatttatatttttgtttgactttttatttcgttaaaattaaaaaaaaaaataaa

SEQ ID NO: 74065 - DNA, 1379 bp, Heterodera glycines
atggccactttactccatggaatgcaaaggctgaacatcccatttcacaatccacgaattgaagtaagatataaatgatcatcaataattgtgatccggcattgcagcgtggccactgctaatcttttaatccattttttccataaaatttttgttttaatcagaatgaagcaatgatcataatggaggtggtaaatcatgggaaagaatcagagccattaagcgatgaattagcacatgccattaaaacattatgggcaggtaaaggaaataaaattgtaaaaaaatggatattttgtaacgatgaaatttaaaaaatggaatatttagataggaacattagagaaaaggtttatcctcgagggcaggaatttcagtaagtgttaaactaaattgtatttgatataataaaaattattagttaaaatccttaattaaacaaacattaattataaaactttttgatttgtatgcacaatttccttcatttaggcttgtggaaaacagtattttgtaagaattttatttaaaatataataatagttaaacatttattatattatatagttttttggaatcggttgatcggatcgcaaaaccggattatcgtccaactgagcaggacatactgttatcaaggatcaaaacgacgggtatcattgaggtgatggtacatatttattatttttaaataaatctaaattgccattttattaattatcggatgttacgattcagtttagcttacatttatttaccacatactagtataccgtattttctctaattatatgcccgtctcattaatatgcccgtcaccaattatctccccctttctgatgaggttgaaaaataatctctccgtcttaatcccccgtctccgattatctcactttataattaataaaaaattaattcaattttaaggttaaattcaaaatgaaaacggttgatttccgcgtatttgacgtcggtggacaacgttctgaacggaagaaatggattcattgttttgaagttggtgttttcttttagtttcataagatcaattttccaacctaaactggtgccagttttattaccaaaacaacaccaattcgaaaatttaatctcgaactaattctgaagaaattaaaaatctgttaataatttatttatatttaagtaaaaaaatctttaaatagtattaggaattctttaaaaaaaaagtttgttaaagctaatctttcttgattaaggatgtcaacgcaatcattttcatcacagccatcagcgaatttgatcaagtgctttttgaggatgaaacaacggtaattgatgaattttataaaattaaatattattttatatattcagaacagaatggtcgagagtatgag

SEQ ID NO: 74066 - DNA, 472 bp, Heterodera glycines
atgactgattccaagaatgacgagttcaacgcaaaagggcaaatggtctgtcccccaatgctcaatttctgcttaaagatgagctgcgcttcagcagttggtaaccaaagaatgttgggctcttatttgttagtgacaaatgtgtatttaagtttagccttttttgttccaaatctttgcattgaaaaatgaaattaaaattagcagtaaagccttcaaaatgacgcttcgcctaatgaaaagttttttaaaaatttatctttatttcaagatagcggccatgtcaagggctgtgctaatatggatatgtgcgcaggaagaggtgatcctcattttgaagtggccagacgtgaccccagatgcaaattcgattgttgcaccgggaatttgtgcaacggtgcgctcggcacgcacccatcgcttggcagtggaggcgccgttttggtcccattggtgattgccattttggccg

SEQ ID NO: 74067 - DNA, 375 bp, Heterodera glycines
cggaacgggccaactccgtctgagccaactttgagtcaatataactcttgaagttattgaccaaatcaaacaatcttgatatcattcgaaagctcttcacaggctctattagcctactaaaaattacagaaaatttcgaactataaaaaaaggtagaaataaaaaactttgaaaattctgccttttttgcggttttcaactgacaacttttttgagagctgattaatcactgagaaataccttataaatatcttctaaacatctagggctttcgaatgataccatgattgtgaagtttggccaacaaagaaaaaagttatagctttttgaacattgctgagacggagttggccagacggagttgacccctaccgt

SEQ ID NO: 74068 - DNA, 98 bp, Heterodera glycines
  unsure (1)..(98): unsure at all n locations
atgancgcactgaataagatggccgcggngtataananaagtgtactgccccccccccccctcaacaccatgtgcatgaatatgcgtgtgtgtgacag

SEQ ID NO: 74069 - DNA, 476 bp, Heterodera glycines
atggtctttttaattgaaaaaattttcgtaaagatttgcttcattttccaaggtaagaacggtatcctctacagtacccacaagacctgcatgtccgataaagactgtagacaagggagtaatgaaacagacagttgcactaattactgttgccagggggatttgtgcaacggcgtgatgcgaaccgtgcacacttttggcactggaaacagcatgattttggccgcactgattggcattttgactggtaacggatggaatttaaaaataaataaataataatagctttaatattcttattttgtacaggaattgccattttgcattgaactaaaatgggagaagaaacattgccaggcgaaaaaaggcatacaaattgtgattttacttttatgcgaatgtattggaaagtaaatttttgtactttaatattttaaatgtgtgattaaaacatacccagggcatttgttaataaa

SEQ ID NO: 74070 - DNA, 573 bp, Heterodera glycines
atggcgccttcatccctttttccgatggtttctttggcatttattgtgtcaatggcaaatggtaagttaaaaaatattacataaaaataaattcattaattattttcgccggcgcctaaaattgacaaaatctttttttttattccgatacaaagaatcgacaaaaaagtcaaaaaatagaaataaataaatgcaaattaagcgaaaatgtgtcatacaaagattttaacctatataaatatctaagaatgcaaattgttggtactaataattggaacaaaatcttgctccatgaaatctattaaaattcaaagctacaaattttaaatcgggtcgtaaatttccggtttcataacatttgctcattttcagcacttgaatgttggcacggtgttcacaatgttaccgcaaaaacgagcaacattccgataaagagtgaagcagagcagggaaaatgccccgatcagttgaacaattgcgcaaaaattgactgcaaatacaaaggtcagagatcgtttttatatgagaaggatcattaaacactgtgctaatttgtgagtttaaatgaataaa

SEQ ID NO: 74071 - DNA, 506 bp, Heterodera glycines
atgttgccaattcatggccttgtctcctcactgtacagcgtgtttggcgttgtgttctgctcaaatgcgtctcttaattattttattggttcatgtggggccggtgagaaaaaaagcaataatttttttataaaagtaaatagaaaagtcagtaaatttttatgaccaaataaatggagagcttagcttcgtttaatattttttgataatctaaaaaatagtttttttatgaaatttaaatgttattttagcgctttttgcggccgagtcgagtgctaatttattcttggcattggaccgattggttgaaacattttcgcccaaatacaatcaaattttattttcaggtgaattaaaattatatgtaaaaattaaatattatttaattgttcaatttataaaaataggaatttattaattcagtgcttaatttttacggaaagaaaaacatgaattctgattatttaaagacagaccgggatgcttggtgcttgctcgatcgttaa

SEQ ID NO: 74072 - DNA, 1264 bp, Heterodera glycines
  unsure (1)..(1264): unsure at all n locations
gactacggcggggaatgtgacggaggacgcggacaattcggctacgcgggaggatgtgacggaggacgcggacaattcgactacggcggaggatgtgacacagancgcgtacaattcgactacggcgggggatgtgacagaggacacggacaattcgactacggcgggggatgtgacggaggacgcagacaattcgactacggcggaggatgtgacagagaacgcagacaattcgactatgatggagcatgtgacagagggcacggacaattcgactacggcggaggatgtgacagaggacgcggacaattcggctacggcggaggatgtgacggaggacacggacaattcgactacggcgggggatgtgacggagaacgcggacaatttgactacggtggagaccgaaaacaactctcctacggtagatgccgagaagattgaatcggacaaattggctacagtttaaactgaagagttaagatgaagagtgcatattgtcttaaagtttcttaatttgtctatttaattttcatttttgtaatatttttgggtttctcaattttcacctttttctttaattaatttgcattattttttgaatgaaccgtgagaattatttatgacagctgaattcaatttacagcattaaatgtaatttgtgctgacttgacaaaactgaggaatgttttactttttcataaattttatcattatattttgaatacctttttttcaataagaaattttaatatttgaaattctgattctttagatttttataggttttaaatttttttatgattaaaatttataattaaaaaaaaattcaacgaagaaaaattattaatcttacaaaacccataaaattgttatttttatatgttcataagtaggacttatatttttaggctctaaaaatccataaaataggcagtaaaaaacctaaaatttagggggtattaaatgacaaaatgtattcaaaaagtaataaaattaagtcatatgggtgtatttttgaaactttaaggtgcttcttagtgatgtatatttcgttttattgcatctttgttataagggcaaaatgccaaaataggcaaaaatatgggtttttcaaatttttttatgcatttgactctaaaaataaagatttaagaaataagtgctaatgactcgaaaagtagcttacaattaacaactaccaaaaaaataacaacatatttttcgtgcattttcagaacatagggagctcaggaaaaaatag

SEQ ID NO: 74073 - DNA, 483 bp, Heterodera glycines
atgccaaaattggcaattttttgttattcaaaaagcgattgtgcagtattagcggaactattcaacagccacatgaaagtgaatgtaattttttaaataaaatattaatattatatctcaatttattttttagaccattggcccattatttagcaattcattgagaggaaaaaaagaacatttaatgacaaatttggataaaaaaatgatggaagttgataacggtaattataattattttatagaaaataatttgtttacttttgtgtatttaataaataaaatgaccactttttagcaagttggacggtgttcaccgtacaaattggtcaactaaataaaatgaaattgacacccgaacaattaatgcgcaaatattccattgacaaagctcttataatatggcatcaaaacaagaaaatgcaacgaaaatttcaaaataaaaaataaaaaaatgctttttcagcttaccaagaaatgtga

SEQ ID NO: 74074 - DNA, 794 bp, Heterodera glycines
atgaaaaatttccttacatttttggcttttttcttaatagtgccatgtttcaaggctgacaatgagaaaaacaaagcggcaccacgagtgtttgctgaacatccgggtagaagaaattatcaaatattaaaattaaaaaattgatttttaaattttagggccaaaattggtggacgaaaccacgcgatggagcaaatgccaagcggaccaaaacctgaccatttatgacttcgaagtggaaacacttgacggcaaattcaccaacttggagaagtacaaaggacaaattgtactgctaattaatgtggcaacattttgcggtaaaaaactcaaaaattcaaaaaaaacataaatattttttcagcgtttacccaacaatatttggacttcaatccaatgctggagcgtaaccgtgccaacggcgtcccattgacaattttggcatttccatgcaaccaattccatttgcaagagccggccgagaaccatgaaattctcaacggggttatgcatgttcggcccggagacgggtggaaaccgcactccaacctgcacatccatggcaaattggaggtgaacggcgccaacgcacatccgttgttcgactttttgcgcgactcggtactgtttttcgacgctgctaacaaaggaaggtccccaggtgtccgtgggatttccaaatgaaatttggtgggtggatagagcacccatgggttcttaagaaaagtgtttttattttctgcgaaatgagtacgagtgccgagatatgacgtgccaaacttttttctatccca

SEQ ID NO: 74075 - DNA, 143 bp, Heterodera glycines
aaaaaagtttggcacgtcatatctcggcactcgtactcatttcgcagaaaataaaaacacttttcttaagaacccatgggtgctctatccacccaccaaatttcatttggaaatcccacggacacctggggaccttcctttgt

SEQ ID NO: 74076 - DNA, 855 bp, Heterodera glycines
atgtgggattcgaacctgcgagggcaaaaagggaaggcaggagcacaacctccgcaccaccgaacaacacaaacggtgcaaatgtttattcgatttattgggatagaaaaaagtttggcacgtcatatctcggcactcgtactcatttcgcagaaaataaaaacacttttcttaagaacccatgggtgctctatccacccaccaaatttcatttggaaatcccacggacacctggggaccttccttttttatacgtacttattttaagaaaaaagtctttaaatttaaaggattctaagaaaatgttccttgtgtttgtgtctaaaagcaattattaacaatttttggcaaaatttgatttttgatgctaaatcataaatttgttgtttcattaattcaaaaaattgtcatcctaattaaaataaaaataaaaaaactaacgaatatatactcaaatttttccattcagtgccctcaaacggtccctgtgcttgggatcaaggaatcaatgttctataatccgatcacggtgactattattgctttttattcattttttcaacagaaaaaatctgaaagtatattaaaataaatttgtaataatttttgtaggtcagtgacatcacttggaattttgaaaagtttttgatcgacgctaacggagttcctcgtttccgttttcacccaacaaattgggtaaaatatattttaataatttcacttttgagttaacattttttattttagtcccatggtaaagaggtccagaaattcattgaccagctgtcagccgaacagaagaaagagcccgtgaaaaaggcatgaaaaggaagtgatttagaaatttggaaaaaa

SEQ ID NO: 74077 - DNA, 386 bp, Heterodera glycines
atgaaaatgcaagtgaatgcttcagctgatgaactcagaattgcacagttagttaacccgtccttaacaattttcagactcacttaacccatttcgattaaaagcgctctttttggtcaaaatatgtaaatttttgcctccaaaaaggtagggttttttcggaaattaatgaaaatgaaaacataaaattttgtcccttctatctctgatttctaaagcttatggacgggtaaactgcaattttccgcttaataagaaggcattttctatcatcagacactctccgccacgtcaaatcatccgaattctgtggcatcatttgccagggggcaattgttgcggttgcccttgtgcgttggcttaagttcaaaattcaccaaaataaa

SEQ ID NO: 74078 - DNA, 957 bp, Heterodera glycines
atggaaacggaagaaaagaagcaaatgacatggaccgacaacgtaccaggtgttttcgacagtgattggttttgacagtactttttaattaatttctacataaattattgtatacatgaattagtattaatatataatttgcatatacaaaatttataattgaagtaagcaataaaaaaaagatttgtataggattttttgtcaaaatttatcgttttcactttttctatataaatatctcctgattgactgtagtcaaaaatacaaaaatttacttacaaatcatgtgcgaacatctgctaactaatgtcaggtttgagtgccaaaatctaataatacttataccattagaacattaaaaaaaataaactttactgtcgaaaccaacactgtcgaaaactaacagcaccactgacaaagtttgtgtgttcggtagggctgtgcgagagtctcgattcccgactcgggaaatttctcaggtttttcgcttctcggtctcgggtttttagtctcggaaacccagaaatttttacactgttaaggatggtcattgcggggaaggggtcgccagcgaagggagaaaagaggaaaaattattgaaattttggacaagttttcttaataaagttcattaaaatcgcaaaaaaatttcccgttggcgcctatcggcgccgccaggccacaaaattcccctaagttcaaaatgtaaagttatattgactcaattttgttcagacggtgttggtccgttccggtttatcggtaccgctgactcaaaaaacttatactttttcataaaattggcctttttggtgcaaaattattactaaatcgcacaaaaaacccaattttttaccggcgccgccggtgaattttcttaaaaactggactggcttaaaaacaaaaatttggtcattttagacaaaatctgttaattttagcttttaggtgctaaaa

SEQ ID NO: 74079 - DNA, 304 bp, Heterodera glycines
atgtccttctgctgctgtggcaatcatcagtcacacaagcaatcagtttcaattttgaaccatttaaaacatttgagaaaaatctttgattgtaagaaaaatttatgcttttatgaccaatatgagcagatttaaatttattaaaatgtcgaaatatttaatttttaggcactgtattttttgaatttgaaaatttttttggaattttacaaataaatattacaaatattattttgcaatgaatttatgcatattgacgtttaaattcattcaaatgatggtttactttttcgtgtatttgcca

SEQ ID NO: 74080 - DNA, 3086 bp, Heterodera glycines
gcaaaatttccaccgctttgaagtgctcgtgttccaatcgccgattgtacgaattatgctcgaaattttgaacatcaccgtgtttatggtgaacatcaactatttcacaattacattttttaaatgtttcctaatttggcattctgtcactcaggagctgagcagtcgcaaacacatgtacttccaaatatccaattttgctgggatgatttccatgttcattggctcctacagctcttatgtaattgtgccgcttggtgcttcgatgttgcacgaatatcggcacgtcacatttttcaacaattttatttcaaaaaacgaaatttttcagttttttgctgctcttccgtatcgtcgacttctgccaactcttttggtccgtgcaaaagttcgtcgccgacatcttcggcattctcgacatggtgccgagcatatcgcacaattccgccccattgccaccttcggcggtggcacaatgtgagcagaacaccagcgaaaaagtggcacaattatcttttggcactttgtgaaaaagtggcacaattatcttctggcacttttactagaattttcgagagaattttttaattaaaaaataattcaaataattcccattcattgtcctttcagtttacatttgctttgtgctctgtgtcgagatgcttttcgtctctttgttggcaaccttttgcttccaaccctcgcgctgtgccttttttgacaattattggaaacggaatgccaaggacaatgccaacggggaatgtgccgaggacggatatgaacccttgaatgacgacggcattgatcaaaagcagcagcagcaaacattgacgagcaccatttgagaagtgaagaatagagtgataagcaaaatgtgatcgggaaaaagtgatcgaaatttcgttttgtttattttttcgccaaattcactcataattacataacaaggccatcattaggtaaactaaagttggtcactgattgagtaatactgcagaattgcggtcaacaggcaaattttttgaaaaattagaacattttcttaccatacatcattaaaatttaaattattttttcttttttgaaaatgtgactccaaaatcggtctacgaaagttgggcccccacgtttgggccccagcaaatttttccactataactttctataacttttttcttggtcatccaaagccaaaaacttggtatcattcgaaagcttaacatgtttagaagctttttctaagctatttcttcgcgattagacaattaccaaaaaagtcatacatgaaaattacaaaaaaagtcaaaatttttgaaattttttcttaataaattttttccaggcttgaaaatcatttcggtttttgtaaggctaatagagcatgtgaagggctttcgaatgataccaagattattagatttggatgccaaagaaaaaagctatagtggaaaaacatgctggggccgaaccgtggggccgaactggcgggttccgacatttagggaaagggaaaattttataaaaatagaaacatttcgccaatgctacacaaattttttgtataaaaatgcttattttttcttcccctctcctcattccattctctcattattcttcctatatcccccggtcactttgttgctgcaaatgtcttcagaaattctgtacgtttattatatttcttttaatgacatttcgcatttaattttgtcaaattttggccaaaaattgtgagatgaaaaatttcaaaaccaattttgaaagattagctttttggaggctaaaacttcacattttacttcctattcattgcttttcctttccctttgattcattaatttcgccaattcatttttcagttggtctactgtttttcttctattggtcgattgtgccaccattcttttttggttcttttttggccatgtcaaaaaacgacaacgcccacataaaaacgaaatgtaaaataaattaaacgagatatcgaaaaattcgtcaattttcagctttatctgcggcgactgttggcttttggtgttcgattttcttgcgccttctcaactcggcctcgaaattgcactgatcaaccgccgctttaactgcatcgtcgacgaacacttcaagacacgcaaatggaaattgggctgcatgcgaatttgccacaaaattggagaaaatggcactaagcaattgcaaattgtcaattccaatgcaaagccattgccaattccgcaaaatccgttgcccaacaaagtcatcggattcagacacattcagatccagtatgattgattaaatttgatttgctttgtgaccattatacatatttttcggcttttcagttacatcgatcaaaatgtcatcgcatttctccgccgttttcaccgtcgtattttcgatgtttgttcaatggttttgtacattcacacagacaatgaccgcattttggactactttttgctcaacatttggccaatgtttcgtcattcaatgcgtctgatgaatttgaattccatctctttacgccgtctgcgccaattggccggcccgtcactgctcagcgattgtccatcacttcgctttgtctcttttaatgaagccattctgcccgcttttccgcctgatgaaagtgtcaatgcttcggatggccaagcgctggccaaatggctgttcacgccccgtccggatggtcagttcaagtggttcagaggctttgtcaattcaccggatcaatggtctccaacgatggaacagctgaaaacggtggagcattccccatatttaattggttttttttgtcacatttttaggcattttccaatgcttcttctccaattacttaccgcatttccttggcgttttcgtccacttcaattgattccgttgtgccatttgatgatctgatcaacgaagtgactggggagaaattgacactggaacaaaatgacacaaatgattgttggctcagccgttgtccaattgcatgggattaccgaaagtggaaaaatctgtcagatggaatttttgatcaaatgaacccaattgacattctgatcagtgatggcggattcgacgacgggtga

SEQ ID NO: 74081 - DNA, 494 bp, Heterodera glycines
atggtgccgagcatatcgcatgatcccgccaaattgccctcttcggcggtggcacaatgtgagtagaacaccagcgaaaaagtggcacaattatcttttggcactttgggaaaaagtggcacaattatcttttggcacttttacagaattttcgagagaatttttttaattaaaaaaataattcaaataattcccattcatttgtggtcctttcagtttacatttgctttgtgctctgtgtcgagatgcttttcgtctctttgttggccaccttttgcttccaaccctcgcgctgtgccttttttgacaagcagcggaaacggaatgccaaggacaatgccaacggggaatgtgccgaggacggatatgaacccttgaatgacgaccatacatgatcaaggggtggtaccggccgagggccatacgatgtatgattgtaccagggggggtggtacgaggccaaatttttttacgatggggtccaaaaattcaaa

SEQ ID NO: 74082 - DNA, 2370 bp, Heterodera glycines
  unsure (1)..(2370): unsure at all n locations
acaataagattcctggatactgtaaaatttaaaatttattatttggcattatttgaaaaaattaatggaattttaaaggccggaaattgcccacccaattctttaacaaacaaattgttgaaggaatgacagcgacagaaaagagcagcttttgcatatgcacacattgttcactcacatcaatgactccaaaattgatcggaactggggaaatgaaaaattaacccataaaaaatcggggaacagcctgacacagaaaacactggaacaaaaattgtgttcattcacttcaaatatttcgcaagatttccgaccaaagttggatttggcatttacaaatcctttaatccctctgaaatacaaaatatgaaaaattggaaaccttacacatttccaaagacttcgtttatcattttttcctaattacatttttgtgtgacatttttaatccatttaaggcatttttactggatgtgactatgcaaaatgtgattttcttccagggatcgggtgggagaatgcgttgtggagcacgattttcgtcaattcttttatcattgagtctcctgctcgtctgcttcgatttgggtataaatagatcaatcaggtttattgttagccatttaactcgaacagacaattcatgattcgaattagtcaaaatgggatttttaagccataaaagatgattttaggggtttgcctgagcaaatatgtggaccactacgagacgctcagctatcaaccggtggttgaccgtcaaaaacggtcattggagacggaccacgaggacacccatgggactgacgtcgatttgcacttccgatcgcacaataggtttcatttgtcaatttaaattggtggcaattacgtgccaaaaattctactcttcgcccgcatttgtgttgttgttaatgtgtttgaagctaacgctaagctggccttagtgtccccgtaactttattccaaaaaccgtttaaatgtcaaaatttttttgtgttagaatttatttgaatttcggcattggagaagcttaaacaagctagtccctttttgaacgcaaaaattgattaagtacggcactattgcggtttagcgggcccaatgaaagaccataagggggaccctgaattaagacagtaatgaaaataaatcaaaggggaccctgatatggtctttcataaggcccactaaattgcaaaaatgctgatttgtgcaaaccgatatttataaatttgcacagaaaatccctttgaatataaaaatccaaaataagagcaaaaacacaacattttagtattagacgcttataccaagttatgtttaacaaaaatgtaatatttgtgtaaaacaaagtgataattcatttatatacatcaatatttctaggactttccatctcaaacttcgaccgttggactttacaaattcgctgtttaccgacgaccacattatcgacgtggacggcgttcatcacacgcatttgatcagaccaaatcgctttttgtacgagggacaaattgtcggtatgccattgcatttaattacaaaacacccatctaaattagtaagttacggtttcttttttctggtccactcggttttaaagggttattaccagtaaaatggttacacagataactcgagaaatccaaatccactggtttaaaatccacagttttcgtggtacaagaagaccatttcttatgagtagtttcgaaaagtacgtcgaaaattgctgtgttgtcaaagaaagggttcactttcccactgtttttcatttattttccaaaaaaaacaactttggtctttaggtgactcaacttcgtttgtccatggcactttgttggacggcatttttgacggatttattttcacgggcgacggccgcacattcaccgtggagaaggcggctcgctatttcgacattggccaacgtccggcccatttccattcattcatttacgcggacgaagagatcaatcacaagcgattccgacggacgaaaagggaagcggacgaggacggacgagacaatgatcagcagcaccacgaacgtattcaattttttggcgagaattttggaaatttgaatttaaaattgggaatttatgtcacatgacggtttttcattccatcatgcatcacaaattgaaagtaatcctggtaacggttntgattttaagaccatgtactcatttagtaattcagcaaaattgctagtaatatgacgaagtatgcatttgtttagtagtagatcataactagggctggcaaaatatgcacatgcatatttttttctggactatgggaggccttaacgcacaaaaacatgttttttagcttggttttaagcttctaggatgactt

SEQ ID NO: 74083 - DNA, 103 bp, Heterodera glycines
atgaaactcctttttaccccaatgtttttttctgtcattcttcaaacaattcttctcctgctgctggtccaacatgtaaatggaggaagagatcgagtgcaag

SEQ ID NO: 74084 - DNA, 453 bp, Heterodera glycines
ggattatttttcaaaacacctcgtagactggaggataattggagactgcgggattaatagagactgggctataattagagcatatacggtaatttcggtttccgaaatttcttgatcctaagaatttacgagcattttggacctcgtaattccgatttttattattttataagcctagtattccgttttctgaaagttttggaattacgatttcaaaaatttgagcctcggaattttttaggcctcggtagtcgatttccgaaaatttatttgaatgttggattgcattgcctactttactgccttaaaaataaatctttaataaaataattattgttaattttgtacatttagaaaaataattttaaaacgtttttttttaaattggtttggagaataaacgacgaaaaatgatcgttttcccaatgatgattatcatattatagtggcaga

SEQ ID NO: 74085 - DNA, 474 bp, Heterodera glycines
atgtgggacacctcgatcatggcttgggcgacgcacaacgcccttcgtctcacatggttttgccaagaatgcaatctgcgtaatcctgagacgtttgagttttcgtcggccggccaatcgagaaggtgtgtttagcttaaacaattaaatatattagttaaaagcgagtgataatagactgattttttggtataataaatactttcagtatatcaaaatgtgaatgatgacgaaatttatgagcaaattgcggtcgaatattatgtgtgcgttttggagatttggtgccggaattgccaacgaaatcaaatgatgagctttgtatatatggcacaaactctgctgtgtcaacacccacccggacgacgtgacgcgcgagtttctgcggataagtggcgaagccgcagaatactgcctctttacctacaactgtaaaaactgggtaaaattttttgcaaaattagtgataataaa

SEQ ID NO: 74086 - DNA, 2465 bp, Heterodera glycines
atggagccgagttcgaaggccgcgttcgacgcgatggtccaatgtgtgattcgacagtacggccgattttgtcctttgcctgcgcaggatggaactgcaaattgtgtcgatggcattctcagccaaagggaaaatgtggcagacaatggaggtgcttaatggcaccgaattaaaagtgagagtttggcatccaagggattcgtgccgcttatcgagcctatcaaaatgcgatggaactgcggggggccgagttgacactgcccggcccactgctcagccagtacgaccacgaccagctgttctttttggcattcgcccaaatttggtgccaatcggccgaggaccccgccaaaacgtcccggcgccttcttctcgacccgcaccccccgcccaaattccgcgtcctcggctctctccaaaatttccccgctttccaaaacgcatttaactgccccaaggacagtttatacgcacctaaagaacactgtgacgtgtggatcagcgaagtgaagcagggcaagtgaatgggaaaagccaatggaatttgagggaaggaaattaattgaagtgattcattcgcatggctttttgttaataggggactaatttcaattaatgcgcaacggacggacactttcggacagtttctgaaataaaaaaatttcttgaaattaatcatctccaattaatttttagaatataaaatgagcttttgttagtattcagaaagcctaaaaaataaaattatttcaatttatgttaatgttttacgacttatttgttcagtgaacggcgataactttcttccgccgccgccttcgcttaacattccccaaaaagaaagtgaattgacaccgaaattccgcgaagcttccgaatattttgaaaaatccgtggacatagcgcaggacccgtgcaacaatttctacgaatacgcgtgcaatgctttcgatgagatcactcatttcgacagaatcagcattcagaatctgatcactttggcaactgaattgagagcgaacaatgtacaccaacaggtaaaacgggggacagacacgagaaagtcgaacggggacagacacgagaaagtcgaacggggacagacacgagaaagtcgaacggggaacagacacgagaaagcaaatccctttggactttgtgccaatgattacgatgttgtaaaagttggagtgaaaagattttaatttggatatgatgccacaaaatggaaaacaaagcttccccaactttcagattgagcccatccaaaaggccaaattggcctttgaaaagtgcacttttctgatgcatcatcaaaaccaagtgatcgtccaagccgacttgcccagggagaagttcttcttgttccagaaaaagagcagattggtccgttttactctcacaaccaatgctaaaagtgttgacaatgttttaggatttccccgtttttgctggccaaacgatggattggccaagccgagaggaattgtccaaggctttgggcgcattaagcggctccgttatggtcgacactttgatcagctttttcgtcgacaccaattgggccgacccaaactctgaagagatggtcaaatggcaccccccccccccaaatcaatttgtggcatttcaaattcagccttatgcgttgttcgtcgaccagccaactttggcatttgacccttattattattccccggaagtgtttccgatcgttagtcaccagatggagtggggatttggagaaattgaaaatgaaaaaagagcaaacattttagacgaattgtggacgaagttctgaccgaaatggccaattatttgggcgtggaatacgcaagaaaagatttaaacgccgccgttcaggtgaatgctggcaaaagtggaaaggagacaatgcgtaacaaagaaaaacgaacaccacgccaaaacaaatgccaaagcatttacaaattatttcaaattcattataatgagaggatttggtaaatcccccccctttttgtcagaagtgatcaatcgcttttggcaccctttccctctcccaactgatcactcttctatttccctttgatcaggaagtgatcgcttttgagcgacttttggccaataatttcctcgtcagcgatgccatccgtgaaaatgacttgggctcgcgtttcaatttgttcaccgtttccgatgctcagcttcgcttcccctttctcaactggtcgcttttcctccgcgaattggcccaaaatgccccgcaaattgtccaagagaaattgcggcagccgaatttccgttttgcaattgccgagccgacacttttggccaaattgggagacgacttgggcccagggaataagcacaatttgacggccaatcagctgcttaattatttgtacttccggatgatactgttttattcaccatatatcccacaggcattcacaggaaaaaatggtaaaagaaactcaaattaa

SEQ ID NO: 74087 - DNA, 790 bp, Heterodera glycines
atgggctcgtcccaacgggggccttccaattggcggacgaatgaatcgttcggaggaaacacttcggaacaattgggagccgagaggggagtcactctcgaagaacggggacagagtgaggagcagacgaaagttcagataattgaacaaatgggcggggacgaagccgaagggatttccaggctaaacaaaaagcattcggaagggcatttaatttgagcttaattttctaaatgccctcatttttggccaattccgcttctccccaatccctcatcattaattactctgaatgcgttgcttctcttctccattatctccggctccatcaccacaatcgtattccgttgttgcaacattcggtcaaaaacttcccaactggcagaagtgaaaagcatctccaaaatgtaactttgcaggtcaacccaagccaaagattcgtcatccattttcataaactgaaagggcaaaagcatagcaaaacattcattatgaactaattgctccctttttctttttctttgatactttctccaccagcagatccaagtggattcccttttcaatttaaaatcaaagtaaatatttgcttatcaatgctttctgtttcaattcctttgagctcaaatcaattctttgacatggttttgaccgttggctaatgtcactttttaaaaatttaagtgagattggcctagcaaaatcacgaaatcttaacttaaaattaattttaatgtttaaaaagttatttcgaaacataaaacatttaagcatccgccgaaagtgttca

SEQ ID NO: 74088 - DNA, 1125 bp, Heterodera glycines
agcaaaatccaattaaactctttttttccataaaagggcatttaagggagggggaaattctcaatttggacttcggccattttttaccccggcggttcagcacttaacacaaattagcggtgttccaatgggttttgaacggaatcaatgggcaaaaaaaagtttaatgatgcgattaatcacttaattagctcatagtttcataaggctgatcgtgcaatatttttcggttcggttggcgatgattccgaagcggaaatgctactcgagaagaccgttgagacgggtgtcgaagcgaaattccaacggattgagggggttcggaccgggaaatgcgtctcactgattaatgccacaaatcggtcaattaattaattttattaattttaattgtatttttcccaattttagttcgctttgcgcttgccttggcgctgcttcttttttctctttggattttttgcatttgcccgaaaatgcgaaattaatcgatacagcaaaatttttttattcatctgtgattcaaaaaataaaataaaactaatataattaaaattattaaggcccatttttttacggtttgccccgaggcaattaaacatttggccacaaaagcaaatgaattggagaggccttttttattcaatttgagtgccgattatattcctggaaaattcaaaaaggaattgaacgaaattatgccatttgtggacattctttttggcaagttttcatttatcaaaaactcaaaattaactgataaacttttttgttttatgtttaaatttaatagtttcccccaatttagctaatgaaatggaagcatttgcttatgcaaaggcaaatgaactcaacccaactgatcatttgcatcaaattgcattgtttttgacagaaattaaaaggaataaataattaataattatttggataagcaattgtttttcttttttgttttaggccaacggaggaaaacggggggccgaattgtgctgattacacgaggggaaaagccgctaattgtggcacaaaatgggacaataaaggaattccccgtcatctctgtggataaattgtggacacaatggggcgggcgacgcattttgcggaggttctttttgcgct

SEQ ID NO: 74089 - DNA, 637 bp, Heterodera glycines
gcgcgcaaatgcaatgggcgaaaagtgtgcacgcttatctgttcgaccagacgattgtgctgtgccgaagggacgtgctgaggaggcaccaattggtgtttaaggagagaatggcactgaacggagtcactgtgcaggagctgcacgacggaaaaggtcggcagaagcagagactgctaatgaccctcaaatttgaattctgttcggctaattcccccccccccccccctttagagccgatcaccggcgcttcccttaggaacgcgttcaaagtgtccagccaggcccgcgactacgtgttcagctgtcccgacgcggccacaaaaggcctttggttggaggcgcttcgcgaaaggccgcggccacaaccgccgacgccggcagaacgacgtttggcaatgctaatgtgaagaagcaaaggaagaaaagcagcaaataaatgaagaccgaaccgaacgaaccaaaaacaacgaaaaccgacggagggatttgaattaatcggagagattaatcgaattcattcgcatttcattttttattttatgcgctttcattcgcctcgcctttcattctttttgagtccattcctgtgaacaaaaacagacatttttatttttgccaataaaatttctttttc

SEQ ID NO: 74090 - DNA, 2035 bp, Heterodera glycines
aaaacgaattctccgccggagggtgcaaattgcgtcccttcgttagatccgtccctttgtaatgatgatttgaaaccattgcaaagtcaacattggaatacttataacattttcgctgtttggatgaccggtaattaacaaaaattaaaatgaaaaaagagaatgaacattaattttgtcagatgttcacagtgtggccggttatctgacagccggaagtcttttcgccctccgtttgtccggatggcaagtaaatgattattatttaagctcacaatcagaattcagaatagtgagtgctgtagtcattttcaaattatttatttttcattttccttttaattacttttttcctttttatgtgctaattgccctcatcctcggaatactaattgtccatttttgctgcaattgggtggccaagcccagccaagttgcctttctccgtctttttcacttccacttttcttcaacaggtcactggcgtgccttacccggtcatcaatcgtgccattttcggcattcgcggtgccaacgtgcccgctttgctccgtggttccattgccatcgcttggtacggtgtacaaactttcttggcttcccgtgcccttatcgttgttttgctcaagttcttcccatcactggtcttcttgcacaatgtcttctttttgctcctccccgtccatttctccccgtcattttcagtcccatggctttgtcggtctctctccgctcggctggtgctgcttcggcttcatgtcacttgcccaagccgttcttttttggatgggaatggaggccatcagaaagttcatcgactgggccggcccggcggtgtacgtggcgatgcttctgctcgccgtttatttggttgctaacgccggcgttcacaatttgagtttgaacctcagcggtcggttggtgtggcattggcacttcaaaaaccgaacataattttaaaccgaaggcgaccctttgccctttgtcgactctctcccgtcaatgttttctgccgttgcgttggttgtttcttatttttcgggcccaatgcttaattttggcgatttttcgcgttatgccaaatcttggaaagctgtaaaattgggaaattttttaggtaaaaattgggtgaaaaataaatttattgagtcaattattggtgattaacccgcttcccttaggtttgcccataaatttccttttcttctctctgctcaccgttctgatcacttctgccacttttcccgtcttcggccgattgatcactgatccgatcgaagttgttgagcaaattgggaacagatcatcctctgattgggtcggactgaccgttgtctctgtcggaggggcgacttttgtggtctgtcaatgttcaacaaaatggcaaaaatgaaaaattaattaaaaatattttctgttataaaaacacaaattcctacgcattcagatcgccacagttggcattaacattgtggccaattttatttctcctgcttttgatttttcaaatttggctcctaattatatctcatggagaggcggcggaatgatcacagcgatcgcttcagttttattaaccccgtggaattggtaattgtctaaatgatttttaaaatctttctgccccttaaggtataacaatcccgcagccattcattttgctctcgggattctcggcgctttaattgggcctttgcatggcattttggtgtctggctatttcatcgtaagagtttatttaccccgcgggcattgtaaaatgccacaaatgaaggcgagcaaacagaaggtttgggtgcccgatttgtacagcagggacgtggacgggcgctattggttcagcaacggattcaacccaaatgcgttgggggcgactgccattggcggcgcattggcaattgccacggcattccatcccaattttgacccttttgtaattgtctgcttcttcaggtcattctgccaaaaataagcaccgctttcggctctctccacctcttcagttggttcgtcggctgttttttcggctttggca

SEQ ID NO: 74091 - DNA, 126 bp, Heterodera glycines
gggagtgccctgcttcttctccctcctcctccgcacctccgtccgaccttctgcttctgttggacatgcctcggccgtcgcgactccctccgccgccggcccatctccgccccgggaaattcccgg

SEQ ID NO: 74092 - DNA, 962 bp, Heterodera glycines
atggaattgtcctatttggaggcaattcaaaacggagtctgtcgtgccgatttaatcgccgaagcgcagaacatttggtcgcaaatgctttctgctgatgaacttttggtcgtttgtcacttttccggtgcgattaactgacggaaaacttttcagaaggtcgacccgggtgccttccttcgactttcttcgtcgcttttccattcggcacttggcttggattatccactgacaaattcattagaagcaaatatcgttgtttgccttaagaaatgctcaaatgaaatgggaagtcaaaatggctgcgattcgctttactgtgcatcggtcggtgttcttttgcggatgtccggacaatccgtcataaaacttaattttaggaattcgccaagaattgtaccaaatatccttggaatggcattcctagtaatttggcggattgtccgggcgccgaaaatgcgatggctcaaacattccgccttaaacctcgtcgttcagctctttgatctcctttcggcacatttggcgaccttttgccaaattcttcctggcgatgtctgtcgtgcgatgtttgaatttttaatcgcccattctgaaaggcatttttgaagagacttcatttgttagcaataattaatttttgcagagataatttggagattttgctgaagcaattgactaaaaattcagccattcgttgcggcgaatgttgcgagaaagtcttccgatcactttatgatttgccgatgccttcgccttcttttaatttggaggaaatttggagcattgaaacgaaaatcagcggaaagaaagaaactcaggcgcaaaagattggttggcatttgggttggtcattgcttttatcttttggcacagatgagtcgcagctgagttgggcttcgctgctttccctttccgacgaatgtttggccaattcgctcgtcggcgtttcgaatgccaaa

SEQ ID NO: 74093 - DNA, 939 bp, Heterodera glycines
ggcgagttcagcatttacttggaactgcgcagctcggccaacaaaaagcaggtgccagaaccgtgccacaatcgcaaagacgacggatgcggcggcttcggctcgtggtcaccagccaatttcgatgattcttcaagacggaattttcagtttgtattgcgacgcatgccaaacattggaagagaacagaggactgaaggcacaactgctggtggacggaaagtcgatcagttgcgggcaggaactgagcccagggacatacgaaaacatggaattggtcttttgcctgccgaacgcggaggaaatgctcaagagccaagggctgaccaaagaaacgttcaaaagcctaattcagacagaggtaggaaaagccgaacggaaacaaaagaccgaacggaataattacttgcttaggacggcataaatctccgctccctcggcgtcttcgccaccatttacgtcttcgacaggtgaatttcccaccgctgcaacaattcaaaattaatttttagagatgtgcgaaaattggtccaaacacagcaaaaggtggagacagtgtacagaaagacgaaacgcacacttttcaaagacgaacctttgccaccggacgtgtgagtaacgaaggcgaaatgggcacaaaaaagggataaaataaagtgtgactgttcagttactggtcgttgcccttcaacagtatgatcaaagagcagaaaatgtttgttgcttgtcataaaatatttggaaatatgcaaatccgaagtaacaaataaacggtaaaataacaagcgaagaaatgagtggacaaggcgaagtggtgtcagccgatgattttgttgctcgcatagaattgcacttttagtcggctgaatttgagtttttcagcggcactcaaattgctgctgagcaatgccaagtcattctcgtcaagtgcagaaaaaa

SEQ ID NO: 74094 - DNA, 237 bp, Heterodera glycines
ttggccaacgaaattgctcgacgcgttcgcattttctgttggattttgaccggcaaacagaaccaccaaaagcgggccattcacgtgaaggcgacttgggcaaaacggtgcaataaatttgtgttcatgtcatcggaggacgatccaacattgcccgctgtgaatttgaacatttccgagggcaggtggcgtatttaaaaaaatatttcaaaaaatttgtttatgcgtaccagaatt

SEQ ID NO: 74095 - DNA, 2563 bp, Heterodera glycines
  unsure (1)..(2563): unsure at all n locations
acancgagtcanngagctgtcttgagancaccggaggagggatgactttcattcttctgatgtcaccgagcncaatgagcggattgacacctggagaaccgtcctcaacttgcggttcggcgacatccaatgaaccagcagatagtgaaaagaatcatatggaggaagacaacagaagtgatgttgcggaaagcgactcaaatttcttaaaatctaatttgtatttatttttgtcgataatgtttctctcgttcatctcataatcactattcttttttcatccattttctctgagtcatcaattttttgtttcgtttgtgcttatcttttccacgttatttgctcatccccttatcgattataaaatataaaaacctggcccacattcattgtttgcacttgttgatttacattcaagtcagctcggagttttcaattcaattaaatcgtgtaaatttaaggtaaattgtatttgtgttcatttgaatagagttagagaaaagttcttctctcaatctgtaaaagggacatcaggagccctttcatatagactataatttgccctccgttaggtcataactagagaccgcaaaaaaaggcgcgaaaaggcactataataagcaccaaataattgaaaaaagccatgaaaagtaacgaaaatcccgaaaaaggcatgaaaaaggcaattaaaatttttcattacaaagaccttcaattccagtttccacactttgacattgaaaggattaattgacgcctaaatgagttttttgtaatattttgtttaaaaatacgccacttgccctcggaaattgaacacaatcgtttcaaaaaatttaatataaattcttttttgtcccgaatcccgcccaaaatcatcgggttgggattcgggacgagaaaaatattgggtttcgagtgacccgaaacaattctggtacgcataaacaaattttttgaaatatttttttaaatacgccacctgccctcggaaatgttcaaattcacagcgggcaatgttggatcgtcctccgatgacatgaacacaaatttattgcaccgttttgcccaagtcgccttcacgtgaatggcccgcttttggtggttctgtttgccggtcaaaatccaacagaaaatgcgaacgcgtcgagcaatttcgttggccaaagtgacaacactcattcctggggaaagcaaaaaataataattaaaatggaaaattcaattgaaagttgtggattaaaaaaacacatgagaagaaagcccaaaataaggtaaccacaaccaaaatgtcgaaatatttttaaattttcatcatccggagcaggggtgtgcgaaattccgtgtcgttttcatgtcgtcccttttttgatcactttttgagtttcgttttcgtgtttcgttttcgtccaagaaaaaaattcgtttcgttttcgagttttttaattttcgtttcatgtttcgttttcgtgaaaaataaatattctgggctccattccaacggattacaattgctgaagcatttaaaggcttgtccatttgcccacctttctgctgcactgtgtggaaaaatatggttggcgtaacaaattctttcgccgagccctgaacattttttaaaagtgcaaatccgattcgctagaaaatgaacaaaagtcaactgggaaggaaataggggcaaaaaaaaaaaaaaacggaccagaattttcaaaaaccgcggaccccctgttcctcaaatttttttcttgaaaaatgcgtcgcataaaagtaagtgaaaagcaacaaaaaacgcccctgcctcgttccatggatggtaaaaaagaaaaaaaaattggcaaaaaatattttttatgaataattatagaaaaaaattggccttctgtcatatttactttttatctttatttctctcaattttatgtactatctcttcgtttttaataatgtaatgaacaacatttaggtacttcatcttgtttaactttttttctgcttgttaaatccacaccaaattttacatatcgatagagaaaaggaaaatgtgcaaactttcagtgttttgagtaaaaattttggcctagaaagttatttaattcgcatttatctgaaattttttaaattttttattatggctaaaaaaattattgcttaagcttcaaggcagaagaggtgctgaacaactgaaaaaaaggcgagaggaaagaaaagctcagacggagaaggcgagacaagcctatctggctaagaaaagtatgtttttcaacggatttttaggtcctaaaatatttcaaactaatttcagcagtccaataccaacaaattgacgacgaggaaggagaagccgagatggagcagcaagaaatgggccaagcggagcaggtggaagagacttacgaccatgcaagtgagtttcaatcattttatttataaaaaaatatcaaatattcaatttttagtggacttcgactttcagttggacaattatgtccaaatgtcgcagaatttgaccattgatgaccaacttccgccggcatgggacgcaacagcagaagtgggagtttaa

SEQ ID NO: 74096 - DNA, 99 bp, Heterodera glycines
atggacatttatggtgctggccaaccggcaactcatgattttggggaaattgtaaattacgacgattggcaacaatgggacaacggctggggaggacag

SEQ ID NO: 74097 - DNA, 575 bp, Heterodera glycines
atgtacagcaacataagcagcagtggatgggttagcagtgaccacccgcaacagcaaattggcaacttttattcgtatgatgcggacccgactttaagccccaacggtggtggatacaatgcttattttgactatccaaatcagcaacccgccgcttcttcatccaattctaattttgtcccacttggctctggtcgccctttcccgcacacaatcagtcagcacgcacaactcagtttctctgacaattcgaatgcaaattttgttccgcttggctcgggtcattttctaccagaacgaggtaattccaaattaattttgaaagataatcattcatttttatatataacttttttgtcagatcttttcagttaaacgaggggggaacactagtgcagatggtacgccacaataatttttttttaaagtcgtataaaacatgtttctagggttttccaggttgcatgattatgaatccgtgcctccatttcgaccaattctgagccccgtactcaaattctaaaattttgtcgaaaagtctaaaattcccaaaaaaatgttttttatcaaataaa

SEQ ID NO: 74098 - DNA, 1202 bp, Heterodera glycines
atttttgcctttattcgtttttctccaacacttcgattcatcggcgggaggagaacaacggagttggaaggacgaggacggagtggaagtggaaatcatcaaaaagatcccgggttggtgaatgaaatgggaaggggggatggagggagggaagggccgaaaatgacaacgaaacgaacagattcaaagtgcaaagtgaagagcgaggcgggcgacgagttggagcagtacttcaagctgacggacaaagagggcaaactgatcggatccaatttcggacagaaaccgtaagacaggaaaaaagggaggagggggggggggggggttacgaggacaattggtggtaattgacccatttagctataaatttgtgcttggccatgggcaggccatccgtccgatggacaacgcaatgcgcggaatgtgcgtgggcgaacagcgccgggtgaccattccggcggaagcgttggcggaaaacgaacggccccagggggtgggcgaggaacaagcgatgcattactttgtggagctgaagtccatctttcgcgcagtgcccggcgagaaatggatggaggacgacggacttagcattgaggcaggaaatattggaagaaatgggggggggggacaattcgacacaattttaagtcccaaggaccaaccaatgctttttctttgttaggtcactcacaaaatagaggaagacaaatgtcgacgagcggagcccggcgacttcataaagcagcactacaccgtccacctgcaggacggctcctacgtggactcgagccacgaccgcggggcgaccttcgatttcaccctggggatggggcaggtgataaaaggcacgaaaagcaatcaatcacattttgaaatcaccatctttttttgttccgtcccccacttcgatcgctcttttttattgcagcaaaaggaaaagaaaatgggatcgaattcgccatggacaaataagagactcatttaggcatggaccgggcaatgaccggaatgtgtgagggcgaacgccgaaaactgatcattccgcccacgctcggtatttcccattttttggcatgacacagaattggaaatcattttcagcctatggcgaaaatggacggcccccggccattccgcccaactctcaattgcacttccaaatcgaactgcaaaagctggtcaagaaggacgaagagaaggaa

SEQ ID NO: 74099 - DNA, 1216 bp, Heterodera glycines
atggggaggaaaaatgtgaaaaccgccaaaaaggagccgactacttcaagcgcagacgacaacgtattacttaaaacggaggagacagaattggaccggaatgaccgggccgaatcttcgccctcaaccgcaacacaaccggcaatgatgccaaaagaaatgtacaacttttgtaaggtctggcagaaacaaattcaaaataaacaaaagcagatcatgaaatatgttttgtttctgtttcagtcgattttggaaatcgaagagaaaggcaatgtcaacttaactcgtctaaagggcaacaccaaatttagccaacttttgcgggacaatccgatgtttgacgacagcgttgacattaggtaatttgaactaaattcgacaaacaaatgcctgaaatggaatttattatttacaatcggatccaagcaattttaagcatttgggttcacaatcatcagtagatgtttttttcttgtttgttaacagattaaccttcattttagtgcgtttcaaaattcatttacgcacttttatcgctgggctaccattttgtcagacgtttcgttgtcgaaagcactgcacacggtgatggaatatgcccaaagtgaacacatggtgttcaggtggttctcgctggataaaaattcattgaaaaacttctatcaggcacccaaactacccaaagcgaccgcaaaatgcattcactcgttttgcgcaactgaccggctccaaccccttcaagtcgaacgggcaaacgagtgctgattataagaacgaccaagtgattggggtggaatggagcagagggaacttcaattgaatgataatgaagttaccaaaacaagcaattttaaggatccgcgggtggtgaaagcgaagcaggaatatgcaaaggatcgcgaacgctatctgtttgattttcttccatttgcaagaattgttttttattattatttcatattttagagccaaacttcgagaatttctcaatagccacacggatgagcttttcgaggggcaaattcaatatttgcacaaggaaatcaaaaacacgcaaaagtccatagaacagaaggtgaaatcgcattaaaaaatatttttgttaattgttaaggcatctttttttaggcagaaaaaatcgcaaaataggattatataggcacaaaaataggtaaaaaaaaaatttaatttattaacactagtagcagaactcgta

SEQ ID NO: 74100 - DNA, 1512 bp, Heterodera glycines
gaaattcatttcgaccttttagaaatgacaatcgaaaagtgttccatggttatcacactttgcattctgacactgttccaattctgtttttataccaccaaaataatggaattgtctgccacaagtcgccaattggaggcggaaatattttccatgaggcggaaaagggaagcgctgcagggcgaaattgacaatttggtcagcagcaaaagtgcggagagagggcaaagcggcagaagaaggtggaggaggggagggggcagctaatgaccataattagcaaaattaagtaggtaaatgggtaattaggggtgggagatggagtgcaacatgtattggcccaatccataattaattattttaattgaccattctgctgatgctaatcgctttgtccccctcccctccactcatttaaaattaaatgccttttcagaatgcattttacgctgtcctcccctcccattccgtcgcctttgtccctccctcccattttcttcatcactccgacctctcgccgagtcgcgcaaaaggcggatttgacccgtcttggccaaactttggtgcccgttgcgaatctgttttggatcattgtcgaggtcattcaaatttggcgatttgatttttcttggcaacgcgtcattaggattctgagcatccgtcgccattcattggccaaatgatgggccgacttggcattgtcggcattcatttggcggcgacaacgcccagcgaatggaaaaacaaatttccgaagggagtcgcacaacgaaacgcggcactcaattggctaaggtgaaaaggaagagcaaaagccgagaaaaagcgaaaagaattgacaaattaagggagaataaagcagcagagaaaaggggcgtcgtttacttcggagacgacgacaagtgaagctcattttaaaaccaattcttattaaatcttatttgtttcagtgcgtacgattggcgccttttcgctgagatgcgatcgatcagccaaattggcatttggccggtgggaattgtggaccaaatgatcaccgaataccctctaattggcagtaattgtactgtaattggcattcctcagaggccaattaaattaataatattttttgtagcaaaagttttcggcttcaattcaaaatggaaacgccaacggccatttccaattgacatggccagcttcgccgtgaacatttcacgaattctgactaacgcaggcggtggcttcagttaccaaaccccgaggggttatttggtgggttttttgattttatttttttaaactcagaataattcgttgtcattcgcttttcaggagtcacattttctgatttcgctgaatgtaacgatagacgaatttgaagcgaaagccaacaattgcacaaaagtttttgtctggcacacgaggacagaaccaacgccactccttgcggaggaaacggcaaaattcgcctccggcggggaggggcgactcgacgagacagaaaaggacgccgtcggttgacaaatg

SEQ ID NO: 74101 - DNA, 1219 bp, Heterodera glycines
  unsure (1)..(1219): unsure at all n locations
atggacacacaaggcatnttcgacagtgtcagcacttttaaaaattgcgccaccgttttcgcgttgtccacgatggtttcctctgttcaggttttaaactgaaagaatttttgaataaaatttaaggaattgcatccatttttccattcatttgcttcccagattttcaacatcaacaagaccatccaggaggaccatctgcagcacttgcaactgttcacagagtacgcccgactggcgctggacgagtacaacaacagcaaaccgttccaggtaattcttttttttattggttgaccatttctctcatcaatttcagtcgcttttgttccttgtccgtgactggagtttcccttatgacgcggagtacggcccaatcggtggtcaacgcattcttgacaaacgattgaaggtactcaatcagatgaatgtatcatgaatctcatgcataaattgaagattttcttatattcttccattccatctcaaaatttaaaatattttccattagctaggattcttcgtaaaatcaattcctgtgcccccatttattctcggcttatccattgatttgttaaatgtatttgtttttgccaggttacgccccgtcaacacccggaacttcagcagttgcgccgtcacattcgctcgtccttcgacaacattcgctgctttttgctacctcaccccggcctcgaagtgtccacaaatcagcatttccgaggcgaacttgacagtgtgttttttttattgtttgtttgctctttttgtttgttcattgtattcaattttcattctgctttagaaattgactccaagttcaaggcacagctccgttcgctggtgccgcatctgttcgaccccaacaatttggtcgtcaaacaaattggcggtcagcccatcacttgccgagagcttgccatctacataaatgtaccctttttcgcgtcgaattgaaatatttaagttcaaatttttaggcttatttcgaggtgttcagcaaggctgaactgcccgagccaaaaaccattctcaatgtaagtggaaaagaacattcatttctgtattgttattgacccgagtgattagtgaaaaggctaattaatgctttccctccttatgactgccaattgcttttgttttttaggccaccgctgaagcaaatcatcttgcggccgtggtgagcgcaaaggcggtgtatatgagggagatggaagaa

SEQ ID NO: 74102 - DNA, 663 bp, Heterodera glycines
atgagagagaaaaaagaacataacattattcagtacaagaatcgcaaaagtattaacaataattgaatatttaaaaatatttttcttaattgttaaatccaaacgatatacagaatgtaaaaataaaattatcgtaaaaaatattaaaaaatgtttattcaataatttataactttaataaagaacaaaaaaaatagaattgttattatgctaataaaaaaatcaatttattaattaatcaatttgaatttgtaaaaatttaaacacagcgatatattttgaaaccaatataatcggagaagggtacacttgataaataaaattgaatataattataagtatacaaaataatttttaagaggcaaataaaagggaccttttaaaataattgaaaatattagttaaaaattattaaaaattgttacattaaaatatattatgaatgcttattaaatggatatcgggttgttactattattttagtaatttttaatttaaaaatttggcaattagagatggtggcttccgctggtttaccaaaaagatataactaaatttaaaaaaatcaataaataataatatatatagtttcagaattcagtcaaatttggaaacagtaaaatttcttggacgcgaatctgtaaattaaaatgtctcaaacaa

SEQ ID NO: 74103 - DNA, 167 bp, Heterodera glycines
ccgagccctcccttcacccctttctttctttcatcatttcccgtttgccctaattttctcatcatttcatccatcaatcactcctcgttcgctacttctttcattcctccccgtcctccccatttgtccgctcgacggacattcgcggctgacgttcagtcgtgaca

SEQ ID NO: 74104 - DNA, 974 bp, Heterodera glycines
atgtcctttacgcttcgactgcccttcctattccacccaaaagttgcgtaagaatcgattcgttcataaggaaaactccccaattcagcaacaatttgatttaaaaataaacccttaaaattggcattgattaattatatttttttgtagtttgaaatcaattttcaattacaaataatattaaattttttcattaaatattagacttttcactaatttttttcgtttatttttaatttaataatttctttgtttagcggcggttttttctattctttccaatttcgcttccggcactcttttctcgtaaattaaaaaaaatttttaaaatataaattaagaaaaatttcagaaattttccaaaaataaattttgtttttttagcatcatttgctgcttactttcgctcaagtgcgccgatcaattcccggatttccgtcgccggtaattcaaattttcaggggtatttttggcaatttttgataagatatctaattaataatgttccaaaaatttttaagcataatcttttggttttttgagcatatattttacaccccgtttcagttttggcctctcagttccaaaaagatttgcattgtttatagaatattcgatgcagaatatttttctgtgtcggtgtgcaaaatttagtgggaaaaaagttctatagagtgaagtaaattcggttttttgtcgaaaaacagagatagtacgccaaagtgagagctgttttttctctgcactctctttattggtagacatttcgttttttgaaacggttttggtaaatttttacaagaaaaacgtaaatattttataacgatcaatttttagtatttagccgttgttttcatttttcgttttttacataattcttgcaatttttaggaaaaactattattgccgctttcttgcatagtgtatatattttttggattttaccgggttttttcactttcagcacactaaaa

SEQ ID NO: 74105 - DNA, 1215 bp, Heterodera glycines
atgaaaggctgggtgttattggatatttgtgagctggtattaaagcctagaaagcagggatggtaccaggattttggaagggggtggggtgattagccttccgggatgaaggccttttttcataccatttttgaaggtgttctcgaaattgttgttttggtattttttaatttaccctattttattttaagttttaaaaaataaaatccaaaatccagaccgtattttttcaaaaattttcattaaattatgtcttggggctgaatatctttgttactgtgaccatccctgaacaaagtgaaaaaccagacaaatcatgttttcctcattgcacagtccaagtccgccatctatagctatgatcgagcttggtgcgaaagtctaggcaagaaaaaagaaaaagatcgacaagaagaagaagcagaagaacaaggggaagaagaagaagaagaagaagaagaacaccgaccagaagaagagcgacaagaacaagagcgacaagaacaagagcgaccagaagaagagcgacaagaacaagagcggccagaagaagagcgaccagaacaagagcgacaagaacaagagcggccagaaaaagagcgaccagaacaagagcgacaagaacaagagcggccagaagaagagcgacaagaacaagagcggccagaagaagagcgaccagaagaagagcgacaagaacaagagcggccagaagaagagcgaccagaacaagagcgaccagaagaacaagagcgaccagaagaagagcgaccagaaggagagcgaccagaagaagaagatcgaccagaaggagagctaccagaaggagagcgacccgaaggagagcgacaagaaaaacagagacaagaggatggggaagaagaagacggggacgatgatgatgatgatgatgatgatgataatgaggatggcgccgtccggtgcaaagtgattttgcgaagaggaggcgaaggagacgatgatgacagtgctggagggaattcgggagggaatggtgcaaaggatggcggagggggagatggagaaaaaaagggaaatgatgggaaaaagcaggaagaaagaggagggggaggagagaaagcaaacgagcaatacaaaaatggttcaaccgaaacagccggaaaagcgagcgaaccgtacgaggaagcgaaggtacaaaccattctgagcggcaaaaaataagtgcatgaaaaa

SEQ ID NO: 74106 - DNA, 1399 bp, Heterodera glycines
atgccgtttttcgagacaccgctgaacacaaatggaaatcttcttcaaatggtcggccactctctcttcgcacaattcgttttggtgatgattttgttgtcaaatgaagccgttggattgtggttcacaaggcgggcgtctgtgccgaattctgtgagttttggacgtgtagcacaaaattgcaacttgctaatgtcttatgaatccaaattttttgtgttttcagttgaatctcagagaataaaaactgttttgttttgtctgttgcaattttgttaacgctttgctgggcttatgtttagcattaattattgtcaactttttttcaggtcaaagccattttccgtcgtcgtactgcatctgccatcattttcatttcggcgctcgtctcgtattcggtgtggagctgtacggctgtgcttcatgggctctgtatcaacctgcattttgaaccatcgaatgcgccgttgttcactttggtgagtttttacaactttcatcattcagcatttctgatcatttctttgccaaatttagctgctcaacatcgtcctgttttgttcttcaatcattgagctcaacattttgaacagtcgttttcgcagagggcgtctgtgcaacttcgaagcgtcgccatacactttgaacaatctgtggctgtggattgaacgtgagcgcgctcatctccgttttgtgatccgcgcattcttcggcctgaacgatgatcagcagcaacgccagaacgatcatcagatgtttggccagaacgatgatcagtgatcagatgatattttattatgggtgaattgtgtttgctggataatcattccccctgtaaatatgccgtacccttccccttctcccatcgttttccataggaaaattagtcccattgtcatacatacataatcatgttgtttgttttcgttgtatgttcaatgaaattttactgtcgaatttttgatatttttctattatctgaccgtagattttcaaaaaaactaaaaccaaattttgtttgagataaacttgtttttagggtcgtaaaactgattctgacattatccatttcgacaaactccgaattctgtctgagcaattttgatccattggttatttcaaaaattgatagcaaaataatgacgaaatgtttcattcgttttgaaaatgcagattcatttcagttttcccaaattttcaaaataatttcaactcggattcccgtttctatcagcagtgtaaatttttacggtttactaacggtaccgcccggtactagaaaaaccggtaattctaattttgaaaaaacgggtaccaaaaaaccgctaattaccgaatggtaccgttctagcccatatttcatggctcaacctctgaaaatgcagaaaaacaaaataaa

SEQ ID NO: 74107 - DNA, 361 bp, Heterodera glycines
cgtccgatttttcttttgcccattatttgcgcctcgggcgtcgtctgcgtctttcacactctctccgtggccaattggctctccgactggtggatcagtgctgatcagtcactcgacttggattggctgatcattttcacctcggcgattaccttccaagcaatttccatgctggtcttttctttaaaagcatttaatgattttcaaattgttaaggccttttaccttcaaattcgctgctatcgccttttttgacagtcaaattcaaaatattccattaattgttgcgttaataatcgcttcgactgctgctgaaagtgagctatttctaaaaggtggcagtaaatcatttttatttcca

SEQ ID NO: 74108 - DNA, 2716 bp, Heterodera glycines
atgcccgccgctcgggtcgccgaccgttcgccaatggcacatttgccgttgcgagaaagtgcccgaggggcccaacaacaacagcagcaaggaaaggaacaacaacaacagcagcagcagcagaaccaacaacagcagaaccaccacaaggagtgcgatggcgaggaggccgagcaggagcagaaccaacttcggaagaacaacaacaacggcaaattgatcgtcgtcggtgagttggccaaaattggcaaaaaaaagggggaaatgagtgcaaattgaagcggacaaatcggcagagcagtgccaaagggagagggaaatgtgcgcaaaattaatgcaaaggagggaccagctggaagagcagctgatcgcacgagtggacgagctgaaggacatttgtatcgcggaaggggtacgattgggcagaaggggggggggggggattgggcgatgcctgatcagtggtgatcagagtaggaatgatagtattggtctgactagggcctcctcattaggtgagatcaggctgggcctgatagtgctgatctgactgggcctcattagaggagatcagattgggcctgatcaaccaagaagagagaggaaagagaaagagtcttactgatcagcaccagctgatacttttgatcaggttgaaaaacttaccaggtctgatcaaaataaaaacagtttgaagaatttttcgaatcaattccgtaatgggagcttagaaaccatagaatgaatgagtgcattatgatcagcagaagttttaaattgaattaagaaattgttaaaattcgaggcaccattaaggattgattagacaaaatatgttccgatcaaaaaatgtgattgaaactgatcatttcaggacttggtcggacaattgcccaccgaaatttataagtgccttttgccgggggagattgagccgacggtgaagcgccgggttggcaccacgttcaaattccctcaagaagtgctgagaattcgacgacggaacagcaaagacagcgccagcggcggcggtgaaccaaatgtaattaattaattaggggttaattaaatataattagaataataattgaaatacaggaggaacgccaaatgacccaattggaggccgaaatcgagctgaaccggcgcattgtggcagcagcggaacggttggccaaggacaaaagcgtgaacaaaagtgtgcggaagaagcgccgcaaggatttgcatttggccgcgcaacggttacgaggcctcgagaagggtgaggggatttgaaaaatgaattccttggcattttggcctcgagaagggtgaggaaaagcggattttttttgatattttagcatcaagaaaagggtagaaaattggaaaagcggatttttaaaagattttggcctcgaaaaggttgaggaaaagcagattttggtgaaatttttacttcgagagggtagggcgatttgaaaaacggatttaatgaatcttttcaacaaacatttttaatttacgccccttttaggcctccatcggctacgcttgtccagctcgaagccggacgtcagcacaatggcggacggatgcggcggcgctgtgcccgccgcttccattggccatcagtcgggcagcggcttctccctgaacagtctcagtcagttgggcggcacacgctatttgagtaccactaatctgggccgaacgaaaatcatgaattgattagtaattatcaaaatgataaataccaaactgaacagcgactgatcggtccttcatgagatttaagcgacacttttgccaattttgcacttttaaatggcatctctgcattttcccattctccaaacaaaatccccacccctgtttagaagcttggcccaacttctaccacacttttcgcatgtcctccaacaccaagtcgtgccctgccaccccccgtggctctgtgcctgatttgacaatgccattggctgattctgccgcgacggctgttcccggggcgaacaatgccaacggcgcggaggcgggcaaaaatcggaggacgacgccgagcacggcaaaaaagttgcacaaaatgttgagtcggtaaggcagcaaattaattagcattaaaataatactttctgatcaatgtgatcagattaattccttcccccccccaatcactgatcactttctttggctctatccgatcactttcacatttcgcccaatcactgataaccttttttggctttatccgatcaccttcccctttcccccaatcagtgatcaccttttgtcgtcctcaaactcggcccatccgtcttccgtccctcccgcgtcttcccccgtcggccacccttcggaattgcctccctccccctcttcctcctcgtctctcagtggccatctccccgcttcttcctcctccccctcctccagtggcatttcttctgcgacgccttccctttcatcttcgtccaatttgatcagcttggcatctgcggcaccgccaggtcttttttttaattttccaaatttttctgaaattttctacccgaaaaaaaaattctaataaaacttcagtgccaagtcgtcgcgcgtcgtcggggggcggtgcatccgccggcggtagcgtccaatcaacgaattcagccacaacagcagctgatgatggagcggcaacaacagcggacagtaggacagcagaaatgccaagacaagactcaagcagccactt

SEQ ID NO: 74109 - DNA, 1810 bp, Heterodera glycines
atgggggtctgggtgagaaattgagaggattgagttgagatttgaggaaaataaaattttaataacataaacattttgccaatttggtccatttgaataattatttttttgtatgcatacaaatgacatccttttaaaattatacgagcggttggggtccacttcgtttcggcgccgctcgtttcggcgccagcccagtttttggactataacttttttctttttccaccaaatctaatattgttgatatcattcgagaacccttctgatgctctattattttgcataattccaaaaaatttgatcaattttgaacaaagttatggccaaaagtacacatgtggcctggttttttgaattcttctagtcataatgtttttgagcattaacgaaattttttgaaacttagcaggctaatagagaacacttagggctttcgaatgataccaataatgttagatttggttgacaaagaaaaaagttatagtccaaaaactgggctggcgccgaaacgagcggcgccgaaacgagggtgtcgaaaattgatgtcttgaatgaaattgactatctattagcggggtatattggagaagaattgtttcttgaaaataaggaacgagtaacaaccggttgcagcaatgacctccagagggcgaataaagtaaaacaaatggaaaaataggaaactctctaaatcaatttaagttggcagaaaattatgtcactaagtggggattctcgcgattgggaccaatttgggtaatttatgtaactcttttcaacaaataaatcctttcattatttaacaggtcggaacgggatcatttgttagcccggcaagaatggaggaaattagcaatgaaattacagaactgatggatcagcgaactgtgaaagttaaaaaatttctgaaagaacatgaggtaaaagaaattatgcgaattaatccaacttgtcggcaatttcgttgccgacgagagggccagaggaggacgaagcggaatattggtgttcaacgccgacggcacggcgagggaactgtcagaggaggaggaaaatgagtgggccggggggatcttcagccacccccccgcccaaccgcgggacccaaacaaaggagggaagaagcgccgaggaggacgacgctgaccaggaaatccggaggggacattcccggataagggccattgccatgttaagcgatccatttttttaaattcgacgacattttcacccctctttatttctctctttatttaaacttttcatttcccttcatttttgctcatttacataatgtttttcgtcaacttcaccatttgccttttcttcaccaatttttctgccattcacatctgcctccgatctttgtccctttgttcacactttctccgatcgccatttccattgggccgttttgcattcatctcattttttccctttgtttggcattttttctccccgccgatttttgtacccttcggcgtcgctcttttgcatcttaatctttgcccccccccccagggggaaattgtttttggtacttaagtattgtttatcgtctatttggggtcattccatttcattcctttccatttttttacacacacacacattcacctcttgctcttcactcgttttcactcctcaccatctttttctttttgctgaatctttcccaatttttgaccccctcaataatccttatcgcccttcccttcctccaattttcaccatataatccatcaacatctcgcatataatcatccacctatttttgaccatttttatcatcatcatcaccaataaa

SEQ ID NO: 74110 - DNA, 1592 bp, Heterodera glycines
atgcgcagaaaaaatatgttaatccatataatttacaaccctaatgatgaccttttgtatcggcatttgttcgaattggtcgacatagacaaagcgttgtgcgcactgatcagttctgatcggatgatcaacaatttgaaggagtacgtcatgtggacccaaaaagagttgctaaaggacaaaatgtttgacgatgtgaccacatccggcttgatgagaagcatgaaggtgggtaacggtgctaaaaatgctaaaaaaaccatcaataatttacaaaaaaaaaaatcataaaaatggagagaaaatgcaataaaaagacaccgcaaaaatttcagaaaatacacccactaagaattgaaaaaaatttcccaaacatttaaccctaaaatatgtatatactttttttttcttggttatttgcctatttttgtgactatttaattgcctatttcggcggtctacgtcagttggcggagcagaacaaaacgtcgtcggccgaaacgtcgttggatggatttttggaccataacttttttctttctcaaccaaattaaacattcttggtattattcgaaagtatttgaaaaacgctattaaagtgcaaattttcaaaaatttttattcatgcacaaaaaaataagggcaaaaaaaagttcgaaatactaggttttcgagttccttctggccataactttttttttttttgaaacttaacgaaaatttttgaaattttgcaaattaataataaacacccagagctaccgaacaacaccaaccaatgcttaatttgattgacaatgaacaaagttatggttcaaaaagtttttcgtcgaacgtttcggcgccgacgccgttttgggggtgcactggtcagttgtgccctacacgtttgggcccctgcatgtttttgactataactttgttttctttgtcatcaaaaggcaacaatcttggtatcactcgaaagctccttcacgtgatcgcgattagccttacaaaaaacaaaaagattttatggcttttgcaaaagttattaagaaaaatttcaaaatttcgacctttccgcaattttcatgctataactttcttatcaattgtctaatcacgaagcgatagcttagaaatagcttctaaacatgttaagctttcgagtaatacacaagattgttggatttggatgataaagaaaaaagttatagctaaaaacagggcccaatcgtgagggcccaactgacgggttccgaatttcagtatctcatcgcaagatcattcgaatcgcgaaaacaatgttatgaaaatgagaataaaattttgttgaatttgcgcgtgtatttccgtctgtttggcgccattgagcgccaaatttcgtcacgaaaaactgaggatacggtaaaagagattggcaacaacactacggtagaaatggaatgggccatcctatacaattttgtgcatgatttttttgaaaaaatgaagcaatttgtgaaaattgtagcagaggttggcattgagcaagcaaagcagagacagtgcaaaaatttatgagaaatttaataattttaaatttttctattattattttattgaataaa

SEQ ID NO: 74111 - DNA, 801 bp, Heterodera glycines
atgtgttgcaaaaaattgaaaaaacccaattctgacaggttagttttaattttaattataatttttatatagttatgtgtatttaagtttaatagctagtgcaatattacgcgatggcttattagacagaacttatcaaataattcatgataaacaatgtaaaggagtaccgcttgagcaactagctgctgaacaaatagataggagccaaagacgagatcttgtgcaatgttctataaaccctaaatctttgtggcgagaagtatttctctttattaaaaccagaattttttttgttaaggggtcttatcgggctagagaacacgatgttgctgaggatattgaaattgaagatatttctggaatttcatttaactaccctaattggcaatctgtaagaagctcttactaccgtagaagaagaaatcacctaggggattgttctgatccctttaatgtcccagaaaggcttcaactaaataaacggggttcaataaaattgcttcttaaaaagaaaatttccgaagaagacatgtaagcattagttgggtaaatttattaaataaaaactttaaggtggttgcgatttagagataaagaattaggtgtaatgctttttatttcacattctcaaataaaagctgccagtcactgtaaagttttaggtaatagtacctaatgatcataaagaaagattacaaaagtttgccagtgttttatatttttttaatatttattatgtttaggatttgttatgcttgtcagttcatatttttggagaaagttttaaagagcaataaa

SEQ ID NO: 74112 - DNA, 544 bp, Heterodera glycines
atgaaaaaaaccgaaaattttcaattaccgtacgacttcgcttcaatcatgcattatacaacacaaatggacgggttggtagttttttatttttacactaagatcttatttttggccttaatgtttcttttcttgtaaaattttcgacccgaacccttgtttaaatggaaataagtttaaccaaaaatctgtcctgtttaatagaattaaaaactaaaattgctctttttcgtttcagcgagaacaggatcatcccatttaatcggttttatgaaagaacagcggggcaaccgagactgtctttcaaggacactttactcctcaataaaatatactgccccggttagctgaatatacagaataattagaaaattagcacattgtttacttttgtacatcacagacacctgcaaacaactaccgaacaagtgccaaaataatggatatcaaaatcccaaaaattgttggcgatgcctttgtccggaaccttacaggggaagtcactgtcaattcttcataagaggttcggtaattttttaataaa

SEQ ID NO: 74113 - DNA, 697 bp, Heterodera glycines
atgggaaccaaatccactttcttggtatcattcgatagccctatatgttatctattaacctgcaaaattgcgaaaaatttggttgaggttcaaagaagttatgggattttttgaaccttaaacaaatttttcgcaatttttcaggttaaaagaagaacatatagggctaccaaatgataccaagttttggtttacaatgaaaaaagttaagttcaaaatttttttgctaaaatatatgcttttatgtttttataagtcgctctaagtcaaaagttcggataaaaaatatttttgggtttcttttgcaataactaatccgcgaaaaaattataaagacataaatccaatttaaaattcatttatattatattcgtcttatatgtatatcaactttttataggagcatgtgcagatcccctctggtgatccattaaaggcaggcgacactttgttctcaaaaatggatgcccaagaaatgtatgaccaacgcaaagaaggtaatgcgtggatagttgtgaattaaactaaattctgaggaaatattttaagcatgtgaaaagtgctttgggacgattcggcaaaaacggcaggccagcccaagtattcaaggagcacggaaatggacaaaatttcccatttcgatcaaattcagtaaaaaatgttggcgtttttcatgatgtatgttcttataattaaa

SEQ ID NO: 74114 - DNA, 1290 bp, Heterodera glycines
atgccaccaccagcgaacacttcggcatcaattggatggagattaacattccgacttgcacttccaaattttcgctcaatgtctccgcatcactttaccaaatcggttgtggcgaaatggaaacgcaaattgactttttcaatttgccaacaaattattcgcaaaagagaaatgagttcgatgcatgccaaaaggtgccaacatcggagacatgtcggaagtaaaaaattttaattaaaacattaaaaatattttggctttaaaattattttgcgattttattagtttttgcttggggatacaatttaggttttacctatttttctgagctcttctcagctgcctaatgcctgttttatgagtttatattagggtagcattttttttccaataaattgtctcaaatttatttattttcgttgaagaacttttgatactggtttggcctaatgttgttacaattttttaaaaaatttgtcattttacgccccgagcctacctatttcatgtattataaaaaaaattccaattttggttgaacatattttaaattttcataaaaaatttttcccattaatgttaatgtgttttaattgcattttttcacatcagttcgtatgaattggttgcctgtttcaaaagcaaacgacccccattggtactcaacaaagcgatttcacaaatctgcaaaagacacttcagcaatgagccaaattcggctggatttcgaattcgccattgcgtgcgtcgggatgccagggcccaattgatcatcatacaatccattttggatttttcatttacctttctcaagtcgttttgagaatgaatatataattgaataatgggtttccataaattccaggtacaaagtttgccgaaagttttcattcaaaatggaagaccttttgcaagcgcatctttttgtcccaatttttttcatcgatttttcatctgatcgcgcgagcacaattcgaggagcgggaaaagagctcacgatcaatttggccaaaaaagtaaaaacaacaaaaaagataataataataaatatatttagaaaaattcactttcttccgttttgaattcaattatggaagaatcatggaatggcacattggcaaaatcgcttcattttatcccacctgaaaatggatacatcgaaatttttttccaagtttccgagctacattattcaaaattaattacgcgcgaagaggatctggagccatacagaaacaatccaaacattgtaaaaactttactgaaaacttaataggacagacaattaaa

SEQ ID NO: 74115 - DNA, 1006 bp, Heterodera glycines
atgccaatgccatcctttgcccgtctccgtttgtttcccctcttttttcttcttttgctgagcacaaacagcgaatgtgattggtgggacaattttgtgaacggtgcgcatgaaaagattgttggtgtaagtaaagatcaaacaaatggttaattatccaatttaaaactagagttgcacggtaccggtactggccggtaattaccggtttttttgccaccggtaccggttttttcaaaaatcaaagtaccggtaccggtttgtctagtaccggtaccgccggtaaaaatttgcactggtaagaatgggggtctggtcgagaaaagaataggaaattggtgaagaaaaacgtgccgagaaaaaagcggtgtgagagcaaaaaaggtcattgatttacattactttacatggccggagaccccttcgcaaaattggaaaattggccgctgatcccttgttttgcaataatctgaattttgaggtctacatctggattttagtgttctttatcctgaatttgaaaaaaaaacttggtcaccctcaatatacatatacttctgaacaattctaatgctaaaaaagcactcgcgcgaaaactgaataaaaattttgtatttgaaaaattttgtccaaaaatttttacgttggaaaattaccggtttttaccggtaccggtttttgcattaccggtcagtaccggtaccggtttttttacaattaccgattaccgtgcaactctatttaaaacataaaatttataaatatatatcacaatgcagtgaaaatattaattgataaaataattataaaaaaaaatatttattaataaaaattaatttaccaataataaaatattcataaagttgatatatatttattctaatttcaggctgccgattggctgcgcgacaaagcgggaccaacggttcgcgaaaagttcaacggcgccaagcaaacactgcaggacccggagacgcatgagaaagtgcaggaatgggttgaggag

SEQ ID NO: 74116 - DNA, 1416 bp, Heterodera glycines
gttgctcaacaattacattggacaaccccggccaaatggaacttggtctcaaccactcttcccaccagagcagtggaacgtctacactcgcacactgaatggggaagaaaggacgaacaaccacgcagaggcagaacatcaccgtcttcaaggcgccttcaactgccgtcatccatcgatctggcacttcattgacgttctccgccgtgagcagaagggcaccgatgggaagtatgcgtcatttcttgctggacttgagccaccgcggaaagctaagaaataccaagcggctgatgagcgcctcattattttagaatttctccgtggaatttcgcgcaattatcatatgaacccataaattgtttccattttttttttttttgttaagtttattatatttaacgaaaaatttcattttttgtttccatttcttcattttgttaaatttattatatttaacgaaaaatttcattttttttataatttttacaatttcttcctgccttttttttcatttttggcttggcgccaaaacgtcggcgccaaaacgtcggcgccaaatcgtcggcgccaaaacgtcggcgccaaaacgacctggtcccttttgtctaacactgggcttgacccatagtgtcaagaaaaacttgaagacataacgccaaaattttcaattttttgttaaccctacagtatgtatgtaccagggatggcacggaattccggtttccgaaaaaattatggatgtcggaattccgaattttttgatagaaagtcggaaattttttagtaaatttttttccaaaaaattgataattttctacaattctgttaaaaaattgcactggaattttcaaaactttcccgccggcggcgcctatcggcacctcaggacacccccccccccagtaccaaattttctttgaaaaaagcgcaccgcaaaaaagatatggagtccctttcccaaaaatgttctaaaacaatagaaaatgacatatgtaaaagattttgatgaaaatcattgagtaattttttcaagcaaatatagaaaaataccaaaaacttttttgaaatcaccttttacttggttaagaatttaaaatttagcctattaaaatattttgaaaattaggtaaattaatctttatttttcaaaaatttcccatttcctacttccggggcgttagatgaccatgaacccgtggttgctcatttgctacgggtaaaccatgatggcagtggttattttacataaccaccttctttgactacggcccccgattgtcgacgtttttggggtcggaattccgatttccgaaaatttttgagacctcggaatgccatccctagttggtatagtgcaatgacaaaggcccatcggacaacccggcggaagatgccagcaggtttccaaataaa

SEQ ID NO: 74117 - DNA, 106 bp, Heterodera glycines
atgcctcggcgggtaaccaccgacgcgcacgaatggagcaacgatattcccactgtccctatctactatctagcgaaaccacagccaagggaacgggcttggaaaa

SEQ ID NO: 74118 - DNA, 1986 bp, Heterodera glycines
tgcgatggatggacgtgcttataccgacgaggaatcttggtcaaatgtattggtggaatgtggcgtgaacaacgatcaattgcgtgaaagataccaccaagtgagacattttcgctcattatttacaaataatatccatttctaacaataagatttatcatctcgtcaccgctgcggatggtgcacaatcattttatcaacttgcgaataaccaagcccgaaccgaagcaatggaggaagcaattgagcttgacaaaaacaccagagaagtatttttattattttattagcatccaatgccgaaattaaggcatggattgggcatcaatgtctatcaataatcgataattcaaactgttgttcgtttgaagaaaagatctccaaacttattgctgatgtttgtgagcgtcttgacattccgattttggatcgtttggcttcaaatagcaagtgaattttataataaatttggtttccataaatctaaaattccaaggaaccgcaaatggttggtcagcaaaatcgttgacatgccttcttgcaaatgaagaaggaggaatttttaatcgaggatgattatctcagtacggagggttcaagtcaggtaaattttacttattacagcgtgaaatttatgtcaccattttctttgacaattttcatttctggaatcgttttgcgtttctcattatcgtttaaatttttcgcgcatttttaccagaaaacatggaaactgtaggtccccatccctttgtgctacacctgggctacaagtttatctttgcaggttcgacttcgctcgcgtagccaaaatggaaagtacacgtacacacttacgacccgaacctttgaagacgctgatggcaagaagtaatcttcgcctttaaaaaaaattctcttttgcaaatatagacttccccaaccggttgaaacacggaagcagttggacaggcgcgagtatcagagctacttgaaacttcttgacagaagccgtcaatcaattcacaagaaacgtgtgtgttttgtcttcggaaatgtggtaaatcggataccttcaaaagtcactagattgctaaaagaatatgcttttcctttcccagtattttaacctggacatttacattgcacctcttcctccagcgttgatgtacaatgaaaaccagctgatgatcctcgaggcaattaaatatttgccatattttatagacaaaaaacattgttaaaaatgtttttatagctcgattaactttccagacatataccacgcgccctattggtgatcctgagccgcgtttgcccgattttctcgaaattgagcgtgagataactatggagtcagcctactcaatgtaacagcagcaattctttccttcaataccattgttgtgcatgtcactgtttaaggtttaacttggctcgcaacaacccggggaacgtgactggcataaatggagcagtgcactgaaccaacctatcatagtgagatcagtgactatgcaaatttttgatctacaatgagctttttctatccggtcttattttgttccaataattttcatcatttggtctaattttcaattgtaaccgtttaatcgattttgtatcatattgaaaataaaacattaaatcaatttgctttatttttgcacaagtctttaatttaatctattgtgttatttttgaaaatcaaacaaaatttggatagatttttggcttacaattaggcgaaagtgtctgtacagttgcctagcttcataagttttgctttattgtattccaacaatgtgaggaaacaaaaaaaaattacaacaaagctgaaatgatgcattgaatgctttccttgaattttggaccagagcccgcaatcaattgagagcaaatttggcaaattttttcgttccatgtatgagttgttttccaatcgtcatcagaatattcatctaaaagcaataaattttaattgggactgttaaagtgagagaccaa

SEQ ID NO: 74119 - DNA, 782 bp, Heterodera glycines
atggagttccattgttctacagttttgttgccagacactgccgatgagttagctaatgacgtacttaatgccctctgttttggtagaggtgcctatttttcttattactaatagcacaaggacatcattttaacacatttccagttgcttccttgtcacatatggcttcaatgttggatgatcgcttcaaacctatccaaatcgttcgtccctttcgcgacatttcctctcgcgagttagaagcaatgcataacattgagcgggatgaatgcagtgaacccgtcttggcgtcttgcagaaaagagagtggtgatgtgtagttaaatgcatccggtaacaattaatatatgacaatgtttagttgatgagtctaattgtaagaataaatgtgacggcagtcttcaagcgcttactgaggattttatatcggaacttcgcaccggtggattcccagcgacggtattagtataactatatcagtaagacacttccattttctttttaaatattgcaggtatcgactattttaagcgtctcgataaaaattgacaatagaacagtgggtcggaattgtggactttgttacgaacaattcgaaattggtctctcactttaacagtcccaattaaaatttattgcttttagatgaatattctgatgacgattggaaaacaactcatacatggaacgaaaaaatttgccaaatttgctctcaattgattgcgggctctggtccaaaattcaaggaaagcattcaatgcatcatttcagctttgttgtaa

SEQ ID NO: 74120 - DNA, 663 bp, Heterodera glycines
atgacaattgatggggacaaagggtcgacaagcgaatggccgactgatttttggagcaaaattttagcagatgatcaacggcacatgaatttagcatttgaaaggacccaatccatgggctcggcatccgctggcctaatcggaatggatcagcaacacgtggatttgggatttggaaggtcaaaccaatttggaacggatcaacggcacatgaatttagcatttgaaaggaccaaatccatgggctcggcatccgctggcctaatcggaatggatcagcaacacgtggatttgggatttggaaggtcaaaccaattcggaacggatcaacggcacatgaatttagcatttgaaaggatcaaatccatgggctcggcatccgctggcctaatcggaatggatcagcaacacgtggatttgggatttggaaggtcaaaccaattcgacacggataaacaactcatggatttgggatttggaaggacccaaaccatgggctcagcatccgccggacaaattggcatggataaacaacacgtgaatttgggatttggaaggacccaatccatgggctcggcatccgctggcctaatcggaatggatcagcaacacgtggatttgggatttgggatgtcaaaccaattggacacggataaacaacac

SEQ ID NO: 74121 - DNA, 81 bp, Heterodera glycines
aatgtttttgcggtcggtggttgttctggcccgggacaacatttggccaacgccgaatctgtccaatttgacggtcattaa

SEQ ID NO: 74122 - DNA, 3009 bp, Heterodera glycines
atggtcgcccaaatcaaaaattcacgggcaaatcaaaggccaaagccccgccaagcaactgatcagacaattcagccgttttatgttgccaaatcgggatcattgaatcttttgggcacaccggcaatggaagcgtttggatttctggaagaaatacggcgaatgatcaatcccgcccaaatcaatcaaatttcgtcaaatgatgcggacaaaatccaacaattcgtcgaaatattgccgcaaaaatatgagcaaatattctcagatggccttggctactgctccaaaatgaaagccaatctggtgctcaaggaaggcgcaaatccaacgttcaagcgcgcccgtccagtgccatattccacgctgccaataatcaatgcagaattggatcggttggagaaaatgaacgtcatcacaccagtcgaacacactgactggccagccccaattttggtggtcaagaaagcgaacggaactgctcgtctgtgcgctgatttctccaccgggctcaacgactctctccaattaaaccagcatcctctgccattgccagccgacattttcgccacactgaatggtggaaaattcttcacaaaattggatttgtcggatgcatatctgcaaatcgaactggacggcacttcaaagaaattgtgtacaattgctacacaccggggacactaccaatatgagcgactaccatttggagtgaaatccgcccccgggatttttcaatcggtgatggacaatatgctctccgatttcccattcgcattggcttatttggacgacgtcatcatcgtcagtgcgacatttgatcaacactgccaacatttgaaccaaattttcacccgaatttcagaatgggggttcaaagtccgaatggacaaatgttcatttttcaaaaatgaaatcaaatatttgggcgtgatcattgatcaaaatggacgtcggccggacccaagcaaaatcacagcaattgcggaaatgcgaattccttcaaacgtcagcgaattgcgttcatatttgggcatggtcaattactaccaggagtttgtccgaaatttccggtttatccgacagcccctggacgaactgctgaagaaggacgccaaatgggattggtcacccaaatgtcaaaatgcattcaccaaaattatttcaatgctacaatctgagctggcattgacgcattttgatccaaatctgccgatcatcgtcgcagccgacgcttcacaacatggcatcggcggcgtcatatcacacaaatttgccaatggctcaataaaagcagtgtcgcatttctcacgatcactcacaccggctgagcaaaattacgggcaaatagaaaaagaagccctggcattggtggaagccgtcaaacgctttcataaaatgatcttcggcaggaaattcacattgctgacggatcaccagccactcaagaaaatttttggcaataaagatggtgtcccaaagcactcccacaaccgtctcgtccgttggccactcattttgacggcttacgacttcgaaatacaatacgtcaaaacagacaaatttggacaggcagatgcattatctcgcctaatttccgtccaaaagtcaaaatccgacgacgacgaagtcattattgcctcattcgaagtggaatcggcattggacagaaatttgatcaacaatgtcaaccatttgccgatcaccttcaaaaatttggcccaagaaacggcaaatgatcaggcactccaacaaattcgtcaatttgtcaaaaatatttggccagaacctaaaaattttcagccaattgaagggctggacgaagccaaattcattcaattttatcggcgccgcgacgaaatttcaatcgtcaaggactgcctgatgttcggcgaccggacggtcatccccaaatctctgcagaagcaaattctcaaaatgcttcatcagggacatccgggagtcaaacggatgaaatcgttggcaagaatgtatgtctactggccactgatggacgccgaaatcgaggcgttcgtccaaaaatgcacttcatgcgcagctgtcgccaaaaatccaatcaagacgacactgcagtcatggccaaaatctgatggcccatggaaacgcattcacatcgattacgccggaccatttcatggaaaaatgtatttgattgtcgtcgactcattttcaaaatatccggagatatttgaaatgaattctacaaatgcatcggccacaatctccaaaatgcgctcattgatcgcgcactacggcatcccggaaacaattgtttccgacaacggcactcaattccaaagtcaccaattcgaaggtttcgtcaaatcgaatggaattgatcacatttttacggcgccgtacatgccacaatcaaacggacaagccgagcggatggttgacacctttaagagggcatttgcgaaaataaaaggggagggagtcgacggcaatgtgctcgacacttttcttctcacatatcgcacaacgccatcagacacactggatggaaaatgcccggccgaattatttcttggccgaaagcctcgaataggcctcgaactcctccggcctccgctgtcaattccaattgtcaaggacgataaaatggaggaccaattcaatcgcaaacacggcgcaaaattccgatcatttgaaattggacaattggttttcacacgtcggcacaattcagcggaatggcgacacggcaaaatcatcgacaaaaagggtgtaatttacaccgtcgaattgccaaacaattctcgcggccgatttcatgccaaccaaatccgcgcacgtcaaattccggatgaggacatcgaagacccgctcgatgtgatcaatggcacttttggcctcccaattccattaagggaccaaaatttggcagaagtcccgccatccaatcaatcaccgccagtccgccgttatccgattcgaaatcgccggcctgttgaccgccttcaaatcgaccccagccgatcgtcctat

SEQ ID NO: 74123 - DNA, 913 bp, Heterodera glycines
atgttcagaggaagcacgctttttcgacggaaagcggtgcaaattcatcggacgcgggaccgccaccttccaattcaacgaattcagacaattcagccgttttatgttgccaaatcgggatcattgaatcttttgggcacaccggcaatggaagcgtttggatatctggaagaaatacggcgaatgatcaatcccgccaaaatcaatcaaatttcgtcaaatgacgcggccaaaatccaacaatttgtcgaaatattgccgcaaaaatatgagcaaatattctcaggtggcctgggcttctgttccaaaatgaaagccaatctgatgctcaaagaaggcgcaaatccaacgttcaagcgcgcccgtccagtgccatattcaacgctgccaataatcaatgcagaattggatcgattggagaaattgaaggtcatcacaccagtcgaacacactgactggtctgccccaattttggtcgtcaagaaagcgaacggaactgctcgtctgtgcgctgatttctcgaccgggctcaacgactctctccaattaaatcaacatcctctgccattgccagccgacattttcgccacactgaatggtggaaaatttttcacaaaattggatttgtcggatgcatatctgcaaatcgaactggacgtcgaatcaaagaaattgtgtacaatcgctacacatcggggtcacttccaatatgagcggctgccatttggagtgaaatcagcccccggaatttttcaatcggtgatggacaatatgctctccgatttcccattcgcattggcttatttggacgacgtcatcatcgtcagcgcgacattcgatcaacactgccaacatttgaaccaaattttcacccgaatttcagaatgggggttcaaagtccgaatggacaaat

SEQ ID NO: 74124 - DNA, 466 bp, Heterodera glycines
atgaacagaaacgtcaaaaaagcacaaaaaattgcaaaaaggtagcaaaaatcaacatttttctagcaaaaaattttccaaaagaccttttttcaactttttttttctcctatgttatattaactatttcagaaccggagaaaagggaataaatttttggttttcaaatttcaaaaaccaaggtataactgtgagtccggcggtgccgatatgcgccgctgggaaaattttttggaaattgtaagaaaaatgatgagaaaaattgctaaaaattaaaaaattttccattttttttcaaaaaatactgaaaaaggcaaaaaaaaggcaccaaaaagttcaagctataagcttcaaaccaagttaaaaactcgttttacgtgcatattaggcctctaattataaccatttgtgcgctttaattccattcttattaatgtttgtaatttttaatttaatttctattgaa

SEQ ID NO: 74125 - DNA, 57 bp, Heterodera glycines
atggagaatggcaatggaattgaaaagcgaggattggtcgttgaggacggtgacgga

SEQ ID NO: 74126 - DNA, 1799 bp, Heterodera glycines
cccgttttgtcctccccttcctccgccgccatttcaaaattgacttcctccgcattttcatccgtgctcgacaacggtgtcattggtgtgggaaaagaaacacgagcattatttatttctttccaaaacaaaaaattcatcgctttatttgatgacattaaataccaaaaaaagaggcaaaatgagacgattaatttgggaatttaaaggtgacccgcaggtggactgtttggaagaccgcgtccgattgaccttccgaacgcagcgaccgttcacaggacgtaaaagcgatgagaaaagggagagaattggcagaatttattaaaaatgattaaggaatatttgtgaagggaatggtggagaacgacaaatgcgtgaacaattaccaacagaagggccaaacgaaggtgaaaaggcaaaagcaatactcaattaatgggggtggtaattggctaattcactcctaattaatctaattaatgagttcctaattaattaccccccccctctttttgcttgcttccattccccgcttttccttctcctcaggtggacttcgaattgaccaatggccagtgcaatatgcgccgctccagaaaggttgtttgattacgccgtgactagagaatgtttggcacttatcttttctgaaaaagatggcttaattctattaagccattcattaattgctttttcttttttttcttttccaattttggcattttctgaaactttcggatgttttttggaaagcatttgaacttttttttactacaataatatttacaaattgtttctcctccttaaaaataatcaggtcaccgccccaaccaaaaatagagagaattttgaatcggacgggcaacccaaagaaagaaatgaccacccaaaactcaccaaacatttatttctcttctcactttcaagtgccgaattctctctcgccttttgagaagaataaagcgaacagaaaaaaagaccttatgggaaaataaaaaaaaaagtttgaaaattcgggggggggggatttgggatttggtaagtccaatttgccattaattattgctttgaaccgtcacattttctgctgcttgacaaggtcacacaacaacagctgcaaattcatggcaaactgctgattatatatgtttttgtcttttttgtaatgagttgttttgagaaaggaaaggcgccccggggggagggaatggcgccggggggcttttgccaattctaatggatcggttcatcaaacccagcagaagtgccacttcgtatttcggcccttcaatttccgattgtccttttcagctcggccctgaacagcggggcgtggaacagtccgtcaccataatcatttcctttcacgacattttcatcacaaaggtcgatcgggcgtaccgttgcacctgcttttacatggtttagccaaacgaacattcaaatggcaaaggcttttcttttctcgcaggaagccgacaaagtggtgacgaaccgtttcgatgtgaggtaaaacgagtaaaagatcaatgcacataaaaagtgaattgaatgccgtcctttacgcagtatgatgccaacaacggaattggtggacaccgcgcgaatgccaatgtgcacttacaccgtacgcattcccactctctttggagttgctgttttaaatggggacggtcttcagaaacggaatttcccatgccaatttttggatttgtcctcatgccatttatgattagcttcggctttatcctccatgcttttctgctgtcttttgttttgaactgtgcatttgaccccaa

SEQ ID NO: 74127 - DNA, 1964 bp, Heterodera glycines
atgttcattttctgttttactctctgctgtttggtcagtttggcatttggcacactgctaaatgtgggcattgaaaatgtgccggaccaaattgtgatcaacgccaatcaattaacgccattaacataccatttgcttaaaattttggaaaatttgatgggcattgtgccaaaacgccatagttctatcaatttccgaattattccagcagttgacataccccttgtcgaaatggtgtacagcggtcgactgaatgtgcaaaaaattttgggagaaattgcggaaaattttgaaaaaaatgctgatttggcacaaattttcgagcattttttgatgtttgctgatggatattaccaacccgtacaaacaggtgatgtgaaccatcataaacaggaggagaatgcatcgcgaccaagggagttggaattccattacattttgttagaagcctagtttcaaccctataaagtcccttcaacactttatttattactttttggctcatttaaaatatttcctggaatagagccacccctcctgaaataaagcccccgttttgatcgggagggggggggggtctattttaggaaaaatgttacattaattttttttttaataaaataataaaagtaatcaataaatgttttttgaaacggtgaaaattgtcgtttttaaatacgcggtacgcaaatgctcgattcgtggcagtggaatttctgtccacgctccacccttaacataaaataaatttaattttttaatttttttaggaaatgctgaaaaaaagaaagcagaatttttattatattgtatttattcatttgtgaataaaattacacaaaaatgtttgcaattttttgacaatgatcctttggaggcaacaaagctttgggctgacattagtaaaaggcaaaaactttaataaaaaattaattaattaattaagtttaagctttatttctcaagtaacgcccgttccccactcaaaacttcgtgcagttttttcccaattttgcattggccaatcagatggatttaagccagttttgggtgaatggacaactaattgggctacaaataatttcaatcaaaatttggatcaaaaaattcatatcaaattttcgacaggtaatttattttatttattaattattacgttggtaaatattttttaagaagtgatgactctcaattatatcaaatctgacgaaaacaaggcggtgaaaataattttgatcactcgtcatcgcgtaaaattaaattttaaaaatttccaaattaaattttcttaaaatttagagaggctttacgtttcggaagaaaaagaaatttttcaatttagtcattgatgggacgggtaaccaccacatttgatacacaaaaataaattgtgtgctgctttcttcattttcatatttttaagaaattgtcaacacagatggtgggatatttttgacaaaaattgataaactttggcctcaaagaacattcaaaaagtaaatttttaattatttttttttgaaaaaataaattttaatttagaaaacgaattttttgtggcgctttaaatgttagtgccgcgaaaattcaagaaattttggaccaacttgcagcatcaacagaatatgcatataattcaattaaatcgccggatggaaacaatgcttttactaaaatgttgatgcataagttagcgtctgttgccggtgatcatcagttgaacataagccaaattcaatggttttctgggaaaaagttggtaccgaattttgccagatgcaaaatttaaatgtatttattgtaacgattacttttatgtaccgtatttcataaaatagaacccaatccttgctaaattaaaacaaagccccccttccgcgagcggggttgaaaattgagcctcaacccttaaattagacccccctgaaattaaaccgccgctccccttccgaggggggttgaaa

SEQ ID NO: 74128 - DNA, 314 bp, Heterodera glycines
atgaaccgacggtaatgaattttaaaagtcacacaaattcgtcatttatttaactaaactgtttttccataatttcagttggatttgcaacgatgtttggatggacattttcccctcttttgaccgtcctcaacttggcctcaaaatggcacttctttcgccacgtttcaatgcgttggtggacaaacatttcgatggaaaaagcgaattgactatttggagaactatcgaaattagcaaggacaaaggaccagaaccgaaactatctgtacagatggatgacaaatctttgccatttccattgcccgacgacc

SEQ ID NO: 74129 - DNA, 596 bp, Heterodera glycines
atgaccaggtatgtaggtatcagcagatgtcaaaacaaacgccatattgatgatgatcagtgaccttgaaaagcccaaaaatattaatttttaaaatttttcgaggggggggggggggtagcaaaacaaggagtaccacactgggttaggttcaaggatatattttgtcatccctaaaatttcttgttaccacagtttaacacacttccagaactcaacattagccaagtgtcagaaataacccacaaataaccaccaaaacacgggggaggttaaaggttattctcatgatcgaaccaatttctaaaacaaattaatcggcctacgaatcagaaagttaaatatgtattagactagtgtttttcaaatagattatgtatctatgtatataatttttaatattttttccctttaaaattctttattttatttcagtgacgaaacgttcggccaccaactcgtaaagctcttttttcaaaaaatcaacaaatttggatgacaaatttgtgccatttccattgccggaccgtccgttgcccagcaaaatccgttttaattaccttcggattgagtacttaaaaaacagttttatggca

SEQ ID NO: 74130 - DNA, 455 bp, Heterodera glycines
atggaagagcagccaatttgggatgtttttgttcgtgaaattaaagatggccaacccaagcgattgcgttgcgataattactacgaacaaacggacttagattggatcaacaatttcaaggaggtgtggccataatctcgaaaaatcactgatttttgtttcaaattgtttagcattttcttcgtgccaatgccatttcttccatcagttacgaaattcatttttatgtgcaagtgtcgtcaatgctaatgatgccatttgaatgtgtggtgaacgaatcgacaaaggaaaagctgacattgaccaaagcaaatgaaaataaattggacaaccgatggataatgaaacgatgcaaaattgggaataagaccgcggcggttcagcagcacaaagagggcgattgtaacaatgtgtttttttggctttttgctgacattaattacatttggtgagca

SEQ ID NO: 74131 - DNA, 141 bp, Heterodera glycines
gtgctcggtctctacggaatgattgtctcactgctgctaagttcctcctgaacaatggaaggaagaaagaaggaaagaatggcacgtctgctgaacattgtgccgaccgtcgtgttttgatgatcaaaatgaccagccacc

SEQ ID NO: 74132 - DNA, 131 bp, Heterodera glycines
ttaggccgcttcgcggcctcgaacgggcgctttgcgcccgttttttaaattttgttgggcttatacgggtgcttcgcgcccgtttctaaatttgttgggctattaaggcagcttcgaggcctcagacgggc

SEQ ID NO: 74133 - DNA, 569 bp, Heterodera glycines
atgcctccaagcgaaaatttttcaaatatctcgctagatattaatgatttggaagctcgaccgctgcctgagccccaacaacccgaacaacaacaagctgaattattgattcagattgttgatgttgaggaggctttgcttttcaacgttcatgagggagaagaaagaagagaagaagaagaagaagatgaagaagatgaagaagaagaagaagaagaggattttgtgcaatttgaagaattgatgcgtttacatgccgagtatgtagcgcaaattttcaatgaaattgatgatgatgaaataaacaatgaatgatttttttgaataatcgaagatgaccgaaaaaatggattctgttataagctccgccccttttgctgtaaatttatttgttattccgcttcttcgttcgaatgaggtcattaacatttaaaatattttagcttatgggcggagcctaatttatttatctaagtccaccactaaattttctgtataaaagcacaccgctttgctcactttgttcattcgaacagaagaagaagccgaagaagcaacaacaacaaaaa

SEQ ID NO: 74134 - DNA, 4181 bp, Heterodera glycines
atggctaaccgaaatccattttctatcgagtctgtgcatgagatgcgcaataggccaaggaacactcggggagaagtggcccaagtgcgttttgtcccgcttgaacaagtccaacgaccggaccgcgtgttggaaatgcttgttgaacaattgtttgcgcgagtgcttggagatcggccaccgccctccttgattggcttacaattgcacccgcccacgtttgagaatccattcacaattgctcttcggcctcctgaacaaaacaatccggccgcaattgctgactatattcaacgtttgaacgatcaatcagcggcaggaatagacttaacagccgggacaacgcttaccaaagttttggctgtttggccaatgcatgatgatcgaacggaaaatggacgtgaaggtaaaagagaccacaatggatgttcattggatcatttctataggggcgtgttcatgggatcatgaacactccgttgttcacaccgtcaactcactagtccggattcggaatccgaacgacagattgtgcctagcaagagccgttttaattgggttgaaagaccatcgttcgcgccagtaccaaaacacccgagctggacaacaaatgtttaagaattatgttggccaacaacgatttcatgggcctgaagctcgccatctgttacggagagcgggaattaagacgaataaaaatatgtacacgctggatgacgtcagacagcttcagcaatgggttgatgaacgttacgaagaggcacagattcgtctaactgtttttgagaaagagcgacagtatcgaattgtttacaaaggggcgtctggccgtgctgctcgcttcaacctgtgcctattgttggagaacgcccattttcactatgttgggcgtattgaacaactgttccgttgcacgtcctattgcgttgattgtgaaaggcgggtgactcgttggtatcatccgcaagaatgcaaagttgtttgccgcctttgtctacgctacggtgcagactacccttgccaacaacaacaatttgccaacggaaggaacagcaaacatttctgtacacagtgccaattcgttttcccaaatttggactgctacaactatcatttgtccaatcgcgcaccggccaacttggatgggcgaagcgggcgcgcgttccgttcaatctgcgaatggaggcgtgtttgtcgaacatgtggggggatcgtctatatcaatttccaacatgtttgtccaccctcggtccgacaacaacaacaacagcagcagcaacagcaatttgcatcattgtgccaccagtgtgggggacctcatgcggaagatggtccatgttttattcagccaatggatggacgtcgtgtttttgggcaaacacgacgtcaacaaaaacaacaacaacaacagcaacaatcttcagttgaaaactgtttgaatggcaacgatgatgctgccgataaagaagatgataccgatgatgacaatgatgcagaaggcgagtcccagcatggggctggtggtggtggccaccgtcgccaagcttctcaaaaaacaattagatattgtttcttcgatgctgaaacatctcaggacaggccattacaacttcgaacacaaattgcacaaaaacatgttccgcttttgattattgctgaagtgatttgcgagcgctgcattgccgatggaattaccatttacggcggtattggaaagaaggcgaatggttgtgtttgtggcatgccatcagggccacggggccgtctttggtgtagcccgccctttcgtaacgcaccaaatgacgacactgagatgccaacaaacatcacatataatcctagacgtcttttcttccactgctttgaagacgcaaccaaaaacccagtggaccagtttcttgacttcctcatctcaacaggccctcgaaaatcgcacactatttgtttgtctcacaatggtggaaaatacgacatgcatctggttttggaggcactacatcatcgaaatttacccccaaaacgaatctgcacaacggggctaaaaatttactcaatgtcgcttaaaggaaatcttcagcgccaaataacctttaaagacacactcaattttttcttctgtgaacttgacgccctgccaagaacgttcaatttgccaaatgaaattgcaactgccaagccgtttttttccatatttatttattcgccaccaaaatttgaatgttcgcctccaagggctgccaaatgctgtattctatcaaccagaccacatgaaaacggccaaacgcgaacaatttttgagttggtatgcttatgaaggagcagtcgccaaatttcagctcagagaacaacttataatttattgtgcgaatgatgtagctatcctgcgtgaaagtgtgctgaaatttcgccaattgatcatggagaataccatgggcttggatctatttgttattgcatctacgggtgcagcacttgcgttggcaacctttcgacgttgttttctgtctcgcaataaactgatcaacacacctgagggcggttatttacgaggaagacgcgcatcggcagaatccgcacgatacattcgcatgtatgaactgatgaacccgggtgagcacgttcaatcggcgcaatggactgtgggggaagcgcatgttgaggattctggttatcgattggatggattacatgttcgtctacctcctctgcgaaatatagcgattgaatacatgggctgtttttatcatggtagtattaattgcgttaaatgcgtatgaaaaagaataataattctcagggtgtcccaaatgttttccaaacgatcgtcaacaaactttggctggcggtagatctgctgaagagttgtatgaacgtacacaacgccgcctttgggagctagaacacacgcacgggttcgagcttcacgttgtttggggatgtgagttgaagaaaagtttgcgggccaatccagtgcttcggcaaatgtacaatgacgccttcgttcctcgcccgttggatccacgtgaggatgccctgcgtggagggcgcacagagccatttactctccaacacatttgcactaacgatgaggaaattgttctcatcgatattgtttgtcaaacacaacagtgaagcaaacataatagcattttaattcaaggtgagtctctacccttacgtgatgaaggcatttgattttcctgttggaaatcctcgtgtgcttacacgtgaagtgcttttacaacctccggcatctccattaccatggcgaaacgcaaactgcaatacatttcgagggctgctgtttgtttctgttttgccgccagatccggttctaagccctcttcgtatcccgctgctaccatatcggacaaatgatgggcgcctgacttttcctctctgtgctcgttgtgctgataatcgccaacagcgcgcatgtgcacatacagatcatttacgttcttggaacgctgcgtatgaccccccccccccgctcatcgattggtttatacacttaggtacacacatgttgaactaaacaaagcacttgaactcggatataccgtaaccgatctgtttgaggtaactcgataaatttgaaaaaaagttgtaaaaaaaaatataggtttggcattatgatgaatgggatgctgaaatgtttcgtggttatatgaacacatttgtgggcatgaaagttcaagcaagtggatggcctactggttgtgaaagcgaagaacgtcgcgatgactatattgacgagtttgagcgtgccgaaggaatacgactcgaccgtggaaaaattgcaaataatcctggtcttcgaatggttgcggtaacatgccttgagcaatgatcctctatgctaattctactttagaaattgctggcaaattccctttggggcaagtttgcccaacgcgtgggaagaaccgaagttcgttacgcttcatcgccatctgagttccactgtttgctcgacgacccttcgatagaagtactcgactttcatcatgtttcacctcatcttgaccgtgttgttgtgaagacaaaagctgatttttcaaaagcaccagcgaccaactgtttgccgattgcaatttatgttacttcatacgcaagacttcacctttattcctacattgagaaagttgtacaacttggtcataaacttctctattgtg

SEQ ID NO: 74135 - DNA, 387 bp, Heterodera glycines
ctacatcgaacaagtgctgtctggcgccagtcctcgttttgatatggttgaattttctcaggacggctcttggtctttttgtcaatcacccgacacaatgttagacacggattcggaagacgaagaagctgatacaactgcgtcaccatccactgatgaaggattacaaaagcaaatgccgattgagaagataataattaaatgagggtgactatgcccgtggcaatgaagaagaatatgaggtctttatcgatatttcgaaacccctagttaattaagaagtaaaatccatgaaagaaaattgggatctcaaaaatagtcattttgtggataaaaagcttgaaaaatttcacgggcgaggcaattctgtcctcaaatattttggaa

SEQ ID NO: 74136 - DNA, 783 bp, Heterodera glycines
atgactcgtagaaaaactgttgctgtaacggaacagaattgttcctatgttgctccagcagatgtgcaaaatgtcccgccgggagacccacaatatggtgatggatttatgtactacaaaaccaacgataatgacaccctttacagctgcgaaggaaagaataaaactcgggtaaaaatgggccgggaatatttttcacaatttcggggtggaacagccttccattccatcctgtgtgatcagagctggtgaaactcaaaaacaccccccaaattggaatttaatgaagggaagaaaaacaaaatttaatattcgaaacggaaaaaaataataattatgtaaaaacgaaaaattttgatatccaaaactttgaaaaataaaaatgctaaaaaattttgaaagtaaaatgaaaaataaaattcgttatactctggattggcattgaacaaaaaaagatatttaattataaatttctattttgtttcagaaatgttggccttgttaaattggcaatacaaacggagacaaatggaacagaggatgattgggaaggattttgattctaaacaaaaattattatgtattatggaagagtattttgtgttattttttggataaaatctgctgacaaattgagtgaatatttccaaatccttctccggcgcgaccggtcagcaatcattaataagaactacgctttacaaattatgcttacttttgaatccaaaatcttaccagagatgtgcttatttatgaaactttcgataaaaactctgaaataaa

SEQ ID NO: 74137 - DNA, 965 bp, Heterodera glycines
atgacccataacttttttcaatttcatttttatccgaaatttctttcggattcatgggttacataccgagaggaatggattggtatgtattttgttgcaattccatgcgcttaaggctttggacggttcagtcccaaagccatttggccatttcagtcccgggtttgtaactcttaagggattagtttccgcaaaaaaaattctttcatcatacattacagaccgatagctatcgcttggtgtatacttcgaccattttcggctctgtgacatatgataaatatttaccaaaaattaaattaatactttacataatcttcctcactttgccatttatttaagggatcactttcgtggcgtaattcaatgtcaaattgtgtaataccgcaacatttattggaaatttgaccaattataataaaaaaaaaacatcagtttttaaaagaaaaacaatattaaaaataaaaaattaaatgttccgttttattttataaagtaagaagtcagataatatttaattcaattaataatgcttctgatctctttaaattctttgaaattaaaagccaaaaataatatggcatctagttttaatgaactctttattggtattattgaataaagcatgcgttaaacataaagttaccataacaaaaaataattttaccatagttaagtattgttggaaacataacataatttgtctttaaaatttaacttaaaaaataacctataatttaaattttgtaaaatcttgacttaattaaactcttaggggaaaaatagaaaaaataaaaggaactgcaagaaaagattaatttttatttgaattaacttatattgttataataccatcaatatttttaacaaaattttttaatttcagacgctaaaataaaaaaagaccaagaataaaactaaataggaatttatatgcaaaacaaaaataattttaaaaaattaaa

SEQ ID NO: 74138 - DNA, 2762 bp, Heterodera glycines
atgctttcacggcttatcgcgaattatccgcgaccccccttagatattttgattgcaaaaatttgcaccgaaactgaacgtttcacggcacaattttgcagtcacgaattgatcaacttcccgtcactgcaaccgaaatagcagaaatgactcaaaaagatgaaattctacaaaaagtggcaaaattctccaaggaagaatggtcacaaaagtgtaatgaccccgacctcgcaccattctttccaaaacggaacgaaattttgcaaatcgagaattgtctgctttatcaaaaccgagtcatcattccaacagtgttacgagacagaacgttgaaagcgcttcatatggcacacccaggaatagtgcgcatgaaagctctcgcacgccaacacgtatactggcctggaatggactcagctatcgagaaattggtaaaaagctgcgaagaatgccaaatcgcccacaaagcagcaccaaaaacattgctttctccttggaatgccactaaacggccattccaacgtgtgcacattgattttgccggcccatgccaagatggccatgcttatctactttactggattctttttcaaaatggcccgaagtttatcagatgaatacaatgacatcaaaagcaacgatcagtgttctccgattaatcatccatcgacttggcatcccagaagaaattgtctcggacaatggacgacaatttcgttcgtcagagttttccgaattttgtaaagaatttgggattcgacatacgttcacaccgccatttcatccacagtcaaatggccaagtcgaacggtttgtcgacacttttaaaagggcaatgcagaaatgttcgaaaaaggacaaaaattgggctgagaaaatgctcctgtcctatagaacaacaccgaattctgcaattaatggacattcaccggaccaattattctttggtagaaaactccgcactcaattgtttcttacacatccgacaggaaaagtcaatgagacgattgacaagaccatttttcatcagaaacaggaaaaataccgcacgaaaattgcacaaaattttaatgaaaagcatggagtcaagtcaaatgaatttttaccgactgatccagtgcttgttttgaattaccagcatggtaaggcatattggctccaaggtacagtcatcgaacgactcaacaattcgccaacttatcgggtaaatgtgccaagactcggacgaaacattcatcgaccggcacgccaaaatacgacaccgaaatgccaaaagcggaagcagcccgacgaaatccacccaactactgccaattcaccacccatggcattgagacgctctagtcgcaacaccaaaccgccgatccgcttctagccaggctgacgccgttcaagaattgaggagggagatgttgggtagtgaataatttgaatttatggcgatctgacttattgactttatttgttatttctatgtccatccgccccctccctcgtccataaaagtggatacctcctcccattatttgttctttcctttcatcattcatttatattttatttcccattttgccctacgaccgaatcaataaaattatttatttatttctttttctttgtgtgttctaagtggaagaacacaacactgatcaaagatagaatatggcatagtttcaaatttgagggaaaatcaacctaaattattcaatttctaaaagaagaaaaattaaatatctaaataaaattgtattcaaaataataaaataattgataaaaaacacctaattaaattagaaaatatttaaatataaatttaaaaattatatttttgtcattattttgttggccaataatttataaataaataacagaaaaaaatttttggggcaatttttgactgaaaattatttcactatatcttagttaactatttcagattttccgtcactaaatgtagcgaccctaaatattttgtacttaagacttgatcaatcttacccgaagtgttgcggtaacaaaaaatacccacaagtgaattaaaggaataaaaaattgtacgttaaaaaataaaatctaatttatttttttaatttcttatttacaacaataactaaacactggttattaatttttataattttaaaaattaaatgcaattcaaagacattcaatttaaattaaatcgtgccttgaattttttcaattttcaaaaactttaaaatcttgtgctccaaacggtaaataattttttaataaaaatcatgttgaaaatttaagaaacatttattccagaggaaatccgacagttttcggagacgagttctacaagtaaaaataggtattatagataaaatataattgaatcgttccaaaaaaagatcacttcaataacataaagctaatgaataaaaaatatttaaacttttcaaactataattttatgtgataataattttccgaaaagtttacaaaaaatcgctgaaaaatcgttgaaaagttaataaaattgtaaattaccacctgaactaaatgcgaattacaatagtacactaatatttcaaattattgggtttaaaaaattactgaaaaataggttaatttataataaatatcatttaactttaaactaagcaaattttttagggcatttaataggaaaaaatattttagatttttaatatatttagttgtaatacaaattatttatagagaattctattcttactatgtatatctatgttgtaaataatgcataaagaatt

SEQ ID NO: 74139 - DNA, 1600 bp, Heterodera glycines
atggacaaaattcgcctaagacaactgttactttacgaattccgaaaaaattctacaccaacccaagctcttcgaaatatttgtaaaagtgagggcaatgatgcactctctctttctacagttaagcgatggttcacaaaatttcgtgaaggcaatgagcagctcgaagatgaaccccgctccggacgaccaccttctctcgattcggacgacttggagcagcacgttcagcagcatccgtgttctagttcgcgccaacttgcagcagagttcggggtccatcagacaacagtgctcaattacctccatcagctcggcttcatcaacaaaaagggtgccgaagttccccatacactgacccaacaacaaaagcatcagcgagtggtcacctgcactgaacttctcgcccgtttgagtgctggaatgcagctttgccagctgatcacgtgtgatgaggtgggtttatctcaacaacaaaacggcacaaaaacaatggctgaagccaaacgaattgagcgagccgacccccaggcgtcttcaacatgcaccgaaggtattgctgtgcgtctggtggtgttcatcagggttggtccgctatgaacttgttccggctgggcaaaccatcaacgccgacatctaccagcaacaactgcagcgggttcatgaccaaattcgtcgtcctccattttctgcaaaattccgcggcggcgtactcctacatgacaacgcacgcccacatgttgcgttatcaacgcaacaaaaaattgagcaacttcgatgggcggttcttcctcatccaccatacagcccagacatcagcccgtgtgactactatctgtttcgatctatggagcacttcttgagagggaaagaatttgctgatcaaaacgaggtcgaaaatgcattggatgactttttggatcgaaaaatgatcagttttataaaaaggggattgaaatgttgcccgaacgatggaggaggatcattgatcaaaatggtgagtacatcattgattgaacatttgttttttgtgaaataaaaaattgtttaatgttgaagtgcttaaagggtcagaactttttcatcaacccaatatttcagtttttcaaattttattgttaattctttatgcattatttacaacatagatatacatagtaagaatagaattctctataaataatttgtattacaactaaatatattaaaaatctaaaatattttttcctattaaatgccctaaaaaatttgcttagtttaaagttaaatgatatttattataaattaacctatttttcagtaattttttaaacccaataatttgaaatattagtgtactattgtaattcgcatttagttcaggtggtaatttacaattttattaacttttcaacgatttttcagcgattttttgtaaacttttcggaaaattattatcacataaaattatagtttgaaaagtttaaatattttttattcattagctttatgttattgaagtgatctttttttggaacgattcaattatattttatctataatacctatttttacttgtagaactcgtctccgaaaactgtcggatttcctctggaataaa

SEQ ID NO: 74140 - DNA, 325 bp, Heterodera glycines
tggtgaattgattattacggtgaatattgttcatgaaaaacactatgaaaggttaaaaaaggttattgctcatggaggcgaattcattgaacgaatcgtttaccacacaaacaaggatttgacaaaaatgaacaacaacaacaacaacgtttttgagcaactttttgtagcgataatgaacgtaataatttattaataataattaggtatcggcattttgaaaaaagtaaatccaggtccaggaaaaatcaagattgccgaaaaatggcctggacctggacccaggaaaaacccaggcctggatccaggtccaggccgattttta

SEQ ID NO: 74141 - DNA, 1826 bp, Heterodera glycines
atggcaatgggtgggaatatggccaactatggcatgatgccaacacaatatccgaacaatggcccaacattcggccacacaatggccaattatggcatggtgcttggcgccacgctagggaatatagcggaaaatgtgttcgagcgtggcaaggaattggtcgccaaaatgaacaacaatggcaaccaacacccatttagcggaatgccaggtaggaagaatcagtctaaagtcatttcataatttaccgcaactttgttggcatttcgtaaaagcgcgccaacattttaaaatttgaattttgactgctacttcttaaaaatagttcttatattaaaagagagacttgaaatttttcacaaaagtactttagcataaggactaactatctgtataaaaaatttcaaaaaaatcattttttaacttggaaagtaaaattgcattatttcctataaaacctaaaaaataagtgaggcatatgccatggaatttatttgaaatgatcaggaaagattattttcacttttgaatattataaaaattttaaattgatttgaatttgacttagttcataattttattaaaatttccaaaaattacatactctaaaatattccgaaatacttaatctcgaccggtccatgctctggatttagatgaaggcagtaggtcattcaaatgggggccggaatctttatttaaaaaatcttcaaaatgaaaatttttggtgaaaaattatttataaatttgctatcttttgatagcccttggtgttttctattagtcttttaaaaattttgttaagtttcaaaaaacggacacctaattattgaaatagagcacaaggtgctgctgccctattttcaactcattgtaggggacggggctctaattgataagtggggcatactgtaatgtctctcagtaaatatggtaattattaaaaaaataaaaaattgcaatttttcatttgctaattacacaggcataatggtggagaacaacaccaacaacaacagcaattatggcaacatgccatcattggtggtcggcgttgactccacagtagagtactctgtgaatgtgagaagtcgcatggtcgaagacattggcatcgaagtccaaggcgtggcacaatggccaaaaaaattgttggcaaaactgtttgaggaggaattgtttgagggcttactgtacaaaaagggcactggtgccaaccgtggcattgggccgagcatggccagaattccgcactgggaagccatgctgggcttgtcaccacaaacaaaagtaaatttaattgggtggttggcatttaaaaaaaaaattattacggaaattaaattagccactaaatgccaagcaaattcgtggaaaatttatgatgtacttaattcccgaaatgtggcaaaaatttttacgaatttctggggttcttatttcatcatcttaggaatgaaaagtcacaaaaatccaaaaaaggcatgaaaaaaggcatttaaattttttttattaaagcttttaaggagcaaaacacgtaaaacttaatcaaaaaacttaattttggtcatttaaatgattactaaattttgtataatgtttttcaaataagtaaattttaaacctaaaattttttatcaggaaaaaaaaatgaaattttggcgataaattattgagaaaaattttcaattattaggggtatattttctcgattttattgcattgtagaaaaaaaaaatgccaaaaagacaccaaaacggcaaaatgccaaaaaaggcattaaaagcaggaaactgccgaaaaaggcaaaaaaaaaaaaaggcata

SEQ ID NO: 74142 - DNA, 231 bp, Heterodera glycines
atgtgcggccgtaactcactgtatctatcagggatgggccgaggtttcgcttttcgcatttcgcctttcgcattattcgcattttttggcgtttcgcatttcgcttttcgcatttcgctttttggcgcgtaaagcgacttttacacccctaagaattggattaaattcccataaaatttttcaaaattttacctataaattggctaattttcagtgaaaaactgtttataa

SEQ ID NO: 74143 - DNA, 94 bp, Heterodera glycines
atgcgaaaagcgaaatgcgaaacgccaaaaaatgcgaataatgcgaaaggcgaaatgcgaaaagcgaaacctcggcccatccctgatagataca

SEQ ID NO: 74144 - DNA, 573 bp, Heterodera glycines
atgccttcatcgacctcagggtcagtattgtcttcgggggcgacagcccaacctatcatttctgatgatgagtcgactcttaaaatcgtaaataagacactgtttcaaggcaaacagccaaacagtacagtccgttttgaggatgttgaaaaagttttcggtgaactcatacgactcgaagagggagtcagccgcaccatccgacaagttaaccgcaaggctaacaatgtgcaaaatcatcttggcacccttgccaatgaagtcaacgtaggctttcagaccttcaccgctgagatttcaaaagttgctggtaaggtaaagtccctcgaaaacctcaattcagcaaacaaaaacattcaacaagctacggctgtcactcaaccacttgtccctcatcatgctcatcctcctgtacagcaattgggacaccaaacaggccagagacctaatcaaaaccaacaaagctccagcagcgatgatgaggatgatcagcaacgcaatgcattatccttccaaagtgtcaacatgatcattgatgcgtatcccatggcacttgaaaggctacaaggatga

SEQ ID NO: 74145 - DNA, 187 bp, Heterodera glycines
atgaaaggcaaggctctggctttgaatgctctacatggcgcgcggatcaggcaaagcatgaccaaggagcaattggccgaacgccggaaattaattgagcagtgcgcaaagaaaagaaaagaggacgcggaagattggattatctacgcgaatcaggtcatcctgcgcagtgacattgacacatttc

SEQ ID NO: 74146 - DNA, 721 bp, Heterodera glycines
atgtcgttgcgcaatgtgcgcgacaatgaggagaaggagtcggcattccgtggcatttgtctgatggtcaattgcaacccgcagggcgtcgccgccgcgttcattttcctctgcgacgcgatcgcctcgtggcagacgcccagcgaagagctgcgcttcatgttcggcagggtgagccccactttctcccacccccacccaattagtgttcttaattgggtaattatagcataggttacctcaaatttttcttagttttcaaccaatttttaataatttgtctcaatgtgtagcctaactacatggagacgggcattttattgtagtttttgtaaaaaatttgaattttttttatttgaaaatttaaacaaatttagtttttggaatgaaaagattggaatgcgaaaatcaaagaattctaatgcatttcctaacaatcttttctgcaaaattattgtctcccgtccaaaatgtaaacatttttcgacggaaagggagaaaaacgtatcaattcgcattttttacgaattttgatgaaaattcactaaattaaatgatagcaacaatacatcatattaaataattatttgccacatttttattttattttcagattatttacgccttcaagtcacaagtgggagaggagaattggaacaattttgtcgctcaaattccggaaccgttgaagcaaaggctgggcacacagtaccaattgtga

SEQ ID NO: 74147 - DNA, 1409 bp, Heterodera glycines
atggacaaaattcttctgctcttcccaattttggtcatcgtcatcggattgatcgctgctgacaaatgcaacaacttgtatgatgaatgaaatatttgtaaacaattttaatcacttgttttagtccaaggctgaatttccgatcgcttcagcaacagcggaaagttcgggaatctcgtcgatgcgcaatgccaacgagtcgcgtcatgtttggtttggaaactggcccttatgacaacgcgacgtactttgttcattttctcatcaaaaaccaagtgagtcaataaaaaaaaattcagtataaatttaaaaaaaacagaagaaaacattaaacccgtttaaaactttatcaaacaatttgcaatttttgtttttttttgacattttatgcctttttctaaaaacttaaactttcatggatttattggaaaaaactcccagaatatggattaactattaatttatgtatccattaagaatggcctaatgagcagatgcagcggagtgctgttcaacccttctcttgtcctcacgtgtgcccattgctgggatgaagcagcgaaagacggtgacggatcaatcgcttatgcaggaatcgaggacgggcaaagtgtggaggagagcgtttccaagaaggtgcagttttacaataacacatttattacccaattataattatggcaaaatccccaaaaatttgtcttatttactgctgaatgattcattgtacccctaacctttctgctaagccagctatttaatttgaaaaatcatttattcacattcaaatctatgatttttcggttttttgttttaaatttaattagccattactctgtctaaatccgataataggggcgaaaaacttaattataaaattttgaaagcgttaatcttaatctagttattttcaaaggtgctaggctttgtgctccaccccgccttccgtttactaaatggcgcagcatttgacttggcagtcgtcgcagtgctcccctttgaattggtgcccggaaaattgggaacaattggtttcccacgcttcgagccggtttacacatcgagccaatgggtcgactgccaaattgctggtaaggaagtaattaataatgaactatctttgcctatattttaaaagtcaaatagaaaagaaaggtccaaatcaatcgattttgtttaaaaaactggattttttataaattttaatattggcacctttcaacaaaaattatctttaagaattaaattaattaaaaatggaaaaggaattttgaatcggagactaaatttatttatttttctaaggaagcggtcaatcgttcacaaaaagcggggacagatgcgaaaacacgaagcgccggctttacatgacgggcattttgacgtctttgtcatgctgcaacgatgcc

SEQ ID NO: 74148 - DNA, 444 bp, Heterodera glycines
atgaaaagattggaatgcgaaaatcaaagaattctaatgcatttcctaacaatcttttctgcaaaattattgtctcccgtccaaaatgtaaacatttttcgacggaaagggagaaaaacgtatcaattcgcattttttacgaattttgatgaaaattcactaaattaaatgatagcaacaatacatcatattaaataattatttgccacatttttattttattttcagattatttacgccttcaagtcacaagtgggagaggagaattggaacaattttgtcgctcaaattccggaaccgttgaagcaaaggctgggcacacagtaccaattgtgatcgtcgacgagccccgctgcccacgactcacagacacagaaccattctcaaaattcattccaaatttccaggggacggacggaattcaatcccccgccataccggaaa

SEQ ID NO: 74149 - DNA, 1423 bp, Heterodera glycines
atgagcagatgcagcggagtgctgttcaacccttctcttgtcctcacgtgtgctcattgctgggatgaagcagcgaaagacggtgacggatcaatcgcttatgcaggaatcgaggacgggcaaagtgtggaggagggcgtttccaagaaggtgcagttttacaataacacatttttacccaattataattatggcaaaatccccaaaaatttgtcttatttactgctgaatgattcattgtacccctaacctttctgcttagccagctatttaatttgaaaaatcatttattcacattcaaatctatgatttttcggttttttgttttaaatttaattagccattactctgtctaaatccgataataggggcgaaaaacttaattataaaattttgaaagcgttaatcttaatctagttattttcaaaggtgctaggctttgcgctccatcccgctttccgtttactaaatggcgcagcatttgacttggcagtcgtcgcagtgctcccctttgaattggtgcccggaaaattgggaacgattggtttcccacgcttcgagccggtttacacatcgagccaatgggtcgactgccaaattgctggtaaggaagtaattaataatgaactatctttgcctacattttaaaagtcaaatagaaaagaaaggtccaaatcaatcgattttgtttaaaaaattggcttttgttataagtattaatattggcacctttcaacaaaagtgtctaaaaattacactaattaaaaatgggaaggaattttgaatcggagactaaatttatttatttttctaaggaagcggtcaatcgttcacaaaaagcggggacagatgcgaaaacacgaagcgccggctttacatgacgggcattttgacgtctttgtcatgctgcaacgatgccgtaagccgattggtaatttacccataatttacacaagattttctaatgacaaaaagataaatttataggggaagcccctgggccacaaatttccgatgggcacaatttgctttcgaggacactccgatgcagcatgcgccggcgacagtggctcaggcgttgtgtgcaaatagtgggtttttttcaaaaattggttacattaaccgtaaataccataaattaattatttagtgagccaacaggggacagagtcctcgttggggttctacgcgcaggctcgcattgctgcgccaaaaacggactccgtttgaatgagccgggcgagagcaacatcgtcccgttggacgtcgctcgcagaagttggatcagccgtgtcgccctccaccacttccgatgcggttctttaacacctccttgcgcaccggcaatggctttcgcagcgagggcgtcaatacaatacgacgacccagaacatgcgtacttgtgatgtaataagacaataaa

SEQ ID NO: 74150 - DNA, 533 bp, Heterodera glycines
atgaccacggcttggctccgctgcgaaatgaccttgacccatcgatcaatgggtgatgagtgagcgttgtttgtgcggcatagcccacccctcccgccgtacacggtgctaggccattttgcgaaaagtacaaaaatggacccatgactgccatttttccattatttaatttccatttttttaaatttttaaaacttttgcaagattctgactttggcgcattttgccacatttaaaaattgcaagatggacaaaattcttctgctcttcccaattttggtcatcttcaccggattgatcgctgctgacaaatgcaacaacttgtatgattaatgaaatatttgtaaacaattttaatcacttgttttagtccaaggctgaatttccggtcgcttcagcagcagcggaaagttcgggaatctcgtcgatgcgcaatgccaacgagtcgcgtcatgttcgttcggaaactggcccttatgacaacgcgacgtactttgttcattttctcatcaaaaaccaagtgagtcaataaa

SEQ ID NO: 74151 - DNA, 627 bp, Heterodera glycines
atggagactggtagattatttttcaaccttctcagaagggggtatataactggagaccggcagattaatggagactggcatataaaaagagtatatacggtattaatatattttttaaattttttccttttaactccaattttcttcactaatttttcactcagacctccattcttaccagtgcttgtttttcccggttcccggttgccctaccgggaccgggacctgagcttttcaaaatccgggaaccgggaccgggaccttggatgaccgggaattcccggcccggtcctggtcccgctgcactctagtttaaatgagattgttataaatttttaccaaaatcaccaattttgtgatttttacgccaattttttaagaaaaaatgggtccggcggcgctgataggcgccgtgattgtttcaaacgaaaatatgacagttaactgatttgttcgcaattttatgatgtttaaaaaaatgaggatttttcattccaaatgaggattttttgaggtattttagttgcaaatgaggattttttatggctgaaatgaagattttcaaaattttgagatcgcagctctgggctaacataatttaaaaaaaattattttatttctaataaa

SEQ ID NO: 74152 - DNA, 817 bp, Heterodera glycines
atgacaaaaatctatcattttcttgcttccggtatgcataaaaattggaatttttaatggtgaaagatggacgaagaaacgatcacgaagaagcctttttttaatttttttatattaattttaatttaaaatttttagtttttttttggcttgtctgatgattagggtcgctacatttagtgatttactaatttttttactcaattgttttgaagaaaggagctcaaaaaacgtatttctgcgttgacatttttcaattctgatgtcactatcggtcactagaaatcactattttggcgcttcgtcactaaaatagtgaaaattcattattttggcgttttgtcagtatttcgacatttttaggaaaattccttaacaaaaatgcaataaaaccaaaaaatacacccctaagaaacgggttaaaattttttaaaaaataccagtaagaattggaaaattttcttaaaaattctttccacaattttttttctttacaaattttgattaaaaatgttcagtatttgataagggaatagttcaaaggaaaagtaccttatttgcaactccaactagtgaataaaaattattttggcttaatttttggctgaaaattacgtcactattcgtcactatttcggactttttgccactattttagttaactatttcgagattttccggcactaaaagtagcgaccctactctgatgatgaagcagggctggatggagtcggagatgacaacgaattgttcatttattagcccctcttactgttgaattgagtttaatttttttttggaaaatgtgccaaataaa

SEQ ID NO: 74153 - DNA, 510 bp, Heterodera glycines
accgactcggtcaccgcagtcccatcattctcctgatgcttgttttgtccgttccgttgttgttcatctactctggccttggttcctcgcgggttgagcacgttattggcatgtctttgctcggagtgaccatctcgggcccatacaatctcatcgttggcacaattgccattgatttgggttctcagcaagccttggccaacaatgctgaggccctgtctaccgtaactgggctcattgatggcattggctcggctggctccgcattgggccaactttttgtgccgttgattcaaaatgaacttggatggatttgggtcttccatttttttattttaatggtaacaaatcatgggaagagtcaatgcgagcttcttttgcccttcagaactttctttcatccatgtgccttatccgtcgtttcttccacgacgctcggctcatttccctttcgtttgctccgaggcaaaatggtcgtcggcaagagaacgagccgctgatttcgaataa

SEQ ID NO: 74154 - DNA, 1042 bp, Heterodera glycines
atgggagaaaagaatgccatcatcagtcccggcttattattacgtaacttctgtcagatggcattggcttcgcttggctttccgtttcgtcttctcccaacccttcgagcaaagtccagtcgaaaaaatctgcacaaattaaggcattgtccgtggtcagctaatgaaaagaatggcaccaaaaaacgaagcgaaaggcgacagatcgaagccaccgaaagcgtcgacgaaagaaaacgacgattcaattggcgaattcatttgaggaaaagcccaatcgaaatgccaaaagtcactttggggctgaagttcgaaaatgcttcttccatcgttggcagtgaaatggacggaaggaaaaggaaaaaaaggcatttggcaatcaaaaaaagaagggacagccgaaaatgacagaggcaaaagcggagaaggaaaggccattagctgagaaatgagcaggaggagaaacactgaaagtggggcatttgccaaacgaaaatgtgagaaaaacggcggaagaaatcattcgaatcgcttagttcgagtttcactccgactcgattcggcgagatgaaattattgaaatggtcaaaaaatgcgcagtcaatcattggggcggggcagccaaataatgaggaaagtgcaagaaaaaatacggtagggaggggacgaattggagcatgctaattctccgcccctcccccgaccaacaacagtaacccgaccgtacagaaatgctattttttcatttaaaattcatgtacatcaaaaaataatattggtcaaaaagctattcaaatttttaatgtgtggcaattttatggaatgtgttgcaaaataacaagtcaacaaaaacaaaatttacatcatttggcgacttaagagtatatttggcattatatgaattaaatacaatagcaatttcagttcagttattcgaaatcagcggctcgttctcttgccgacgaccattttgcctcggagcaaacgaaagggaaatgagccgagcgtcgtggaagaaacgacggataaggcacatggatga

SEQ ID NO: 74155 - DNA, 261 bp, Heterodera glycines
atgaatgcgacagtaaaaagcaacagagaaaagggaataaagcgaactgcacgcattcacacaaaagaattggcatgtgaagcattagacaaacacattttattcgtaagattttttatttatttattttttaattttaaaaaatttatttaaaatttcaggcattttttaaatgaaacaaatctacatccaaataacaaaaataattagagaacagactttaaacgtaagaaaaaggtgaaaaaggcatatctaaataaa

SEQ ID NO: 74156 - DNA, 3021 bp, Heterodera glycines
  unsure (1)..(3021): unsure at all n locations
agcacngcgacaggacnccgcncgaagggangggagaagacgaaacggaaagccaagcgaagccaaggccancggacagaagagacgnaagaagaagccgggacggaagacggcaaacagngcgcccagacaaggcaaacaagagggggaaccacgccggcccccggggccgcnacgaccaacaacacagcaacngcccccggggccgncgcagggcccagggcgccncaaacgaccaccgaacgcccaannncgngacgcggcggaagnccgacgccaccgccaccgcagacccgngagagcgagccggcgacgacgaccgcacgaaacgcgaacaagaggacccnacggcncccancngagancagggccaaagggnngggaccgccgagggcaacggacccgaaattatgccggagggctgcacgtcgaagtcggcacgaactcagccacaaaaggacccatcgctgcaccgttggaggtgaacgaaggagcggtgggaattctttaattgggtggacgaagtaaacatattataatgatcactgatcactgctgatcaggaatttgagtcggtggtaatttttactgcctttgtgtttttggcattgcgttcatcattaccgtccgggttcgattttggacattttcccgtctctatcttttacatattccctttaccattttcgcccgtctcaccaagaattcattttggtactttcatataactttttatttatttattattcttcctttgtccattgtttggtttacgcaacttaatcaccaaatatttttcatgaatttttaaatatttgtttttgggggattaattcggggaggagagacgaacaaatggttggtcacccattcgttcattcattttttgtttacttttgcaaaggattaaaatggtgggagatgcgattgtatggcttaaacgcttatagtactaataaatgctgataaatgaaaattgaattggtcaaatattttaaggctgtgacaaagtgtacaccaaaagttcgcatttgaaggcccaccaacgactgcacaccggtgagacttgtgcttttggcacttttgtcggtgtcaaatcggtgcttttctgtccattccttcgattggcctttaaagtcaacaattgtcggtttatgtttggcggcgctcaaaggccattcattcgcgctgactttgttctttctctgttcccctcattaagtgccttcttcaccagcgaaggacggcctattggggtcactcatcagttcaaccaataacctcaaacagttccgtcccatcggtttttttttgtttttgtttgcgcacattctttgaaggaaatcggaaatgcgatcccaccgcaaaatcaaaactattgtaattaggaccaattacaagcgaaacgaaggctaatgagagcactgaagaaagggggagagaatgggaagaggagagggagggaagagagagagaggaagagagggaaggatggagggaggagtgaggaatgaggggattagacagactggatcagtatctgagttaataatgacaaggggaggaagagtgagagagtaaaagataggggagggaaggggcgttgattagcaatgcgatcaaaggttgatcagcagtcagtcagccaattattcaggcgaaaagccatacccatgcccattcccgaaatgccattggaagttttcacgcagtgatgagctcacccggcacattcgcaagcacatgggcgccaaaccattcaaatgtgcccaatgcatgcgcagtttttcccgctctgaccatttacaggttcagaggaagagggaatcccgaaatatcgcaacagttaaagacaacaaacactttcagttgcacatgaaaaggcacggaggaaagcgctgttgaaagaaagaatactcgttgaagatcattgccgttcattttttgacgagtttttatttagatatgcctttttcacctttttcttacgtttaaagtctgttctctaattatttttgttatttggatgtagatttgtttcatttaaaaaatgcctgaaattttaaataaattttttaaaattaaaaaataaataaataaaaaatcttacgaataaaatgtgtttgtctaatgcttcacatgccaattcttttgtgtgaatgcgtgcagttcgctttattcccttttctctgttgctttttactgtcgcattcattttgctgcttttggacaggaaattaagcacagtaatgccatggaattcgattcaattcagtgtgcacttttttaggaatttagggattttcttggtgaaaattggcaatatgaagacggcacgaccgaccgattggccaaatccgcacaaaatcggattcaaagcacagcttgcaaagttcagctaaggaatttcctccatgacatagcatttaaaaggcattggccggtcaaagaaatcgcgaagaattgcgacgatttgttcggtgcgtttccttttgcttttgcgttcgcaatgcattttttccattttcacaaatattttctttgcagaagttccctctgctgccaatgctttgaaattccgtccgttttcccccggcacttcccatgtcaaaattcttttcctcctccaattgaatgggagggattctcgccaactccgccgtctcttccgttcccttttcctcccccgtcacttttattttgtccacgtcgacagtcgccgcgaatttatgctgaaaggtgaaacattcagcagaatggttctgaataaaatatttttgaagaaatgttgaaggtcgaagagtctttgagggcggagggattcgcaaattttcgcgtggcaaagcgtcggatggccaccatttggggagggtcgaatttgctcgaccttttcctttggacggtggcggaaacactcggcgaaacgaattcgaattgggcgcaatgggattatattgtgaatctgagcgagacggacatgccaattctatcagtggaagagttggaacagaacttggccga

SEQ ID NO: 74157 - DNA, 1437 bp, Heterodera glycines
gcgcaatttgcccgtcaacctccgtttggacggtggctccgattgggtggtggtccaccgcgacttggctctgttcgccatttccgactctctcctgccctctcaattgcgtcttctcttttcttccgtccttttgccccttgaaactttcttccacactgtttgctctccctcttctcttccgatgcttttccgttccttcgtttagcttgccctgaacagtgccaatttctgtcgtcggattgtccgtcgcaatttgcgctttaccaattggcgtcgtcgccagggctgtcgctgtgccccgttaaagtccgtcgtcgattggtgcggctgttctccgctcgcagtgagtgccaacgaattgggcaaattgtcgttgaatcagtgagcaccaatggcataattgcctttttatggcattttccttcctccccctttagttcccagtccaaatttcacttttttggtcgcaaattcgattctgccgttgatattgctcccattgcttttgtcgaacggcaaagccttcgcttccgtgtcgatcttttgccctcccaaagtgccgtcttttccgcccattggctcaatttgttctccgccctttcgccttccgacgttccgttcggttggcattgactttttccttttttaatgcaattttaggattaaatgccgagcttttgacgctgttcacttcatccattgcccgttttatgttgccgaacaatttcatttttcaacgtttgcacgactttcacatttacagagaattttctgcgtcccctctccaaacaatcgcaacattttccgttgcttttggtcacactaattacttaattgaggtaatttgctttttgagtttcgaatcctttcactttttccttctcaggcactgattggccagaaaagggactctttcgcaacttcttctcccaccgattttgaggtcatcgacgaggacatccgttttctgttcaatgccgaggaaggcatcgaaattgggctcgacttcgaccacaaagaagagattttccgaacttttccaccgcttctctctccggtgatttctccttttcaaacccattaaatatttgtttttagagttccaagttcactttgaaatggcgttgggttcgccttggcatcgctgccgatggccgtgccaaaaggacgagtccccccgctgagctgctcttccgtgggcccaatggcaccgttttccacaggatggccctgccttcttacaattctttctccggcactcaattcgcacagttcgaatttggccgtttttctggcgtttcccccggtatttcattttccggtcgctttccctttgcgcttaattaattattcggtggtttctcaggtgtttggtccgttgctttgcatgccaacaattcccttccgattgccctcctgtctttccccgtcttt

SEQ ID NO: 74158 - DNA, 493 bp, Heterodera glycines
atgtttttgagtggaaaggatgatgagtcctcgatttcggctattgataggaaactttggcaaggaaagaccacgataaaaatctctgatttagaaaaagctcaaaatgatatggggaaattagaagatggagtgaacagagcttttcgctgcctgaatcgttccttgaaccaaaaagtcaattgggtgaaagatgtcgtggccaatacaaatgccaattttgagactctgaaagtccaattcgagaccctaaccgaaagagttgatatgttggaacaagacagtgatgggacggattcaggtgggactgttagtattactaatctgaatagagcgtcgcgtgcaccgtttgtgacgccaatgggcaatgcacagcccaaccaagttgtaccgaaccaagtgccaattcatcaattatcaagcgaagacgaagatgacgggccgactctttttgacctgaacatgctctcgagcggacccacagtggggtcag

SEQ ID NO: 74159 - DNA, 309 bp, Heterodera glycines
atggtacgtgggtttagacctttttctggatccatgcgacgagacaacaacaaagaggaagaggaggacgaggccgctctcgcaattggggaggaggccgccaggagcaatttagccaaagaaactggtcaagcaaccctcgatgccattattgtgaccgtgctggacattttgcgtacaattgccatcaacgccgtgccaatttcagaggaaattccaaccaatcgttccgtcaaggaagatggtcaaatcagcaacctcgccaatctcagggacaatggcaaaatcggcagaatcctgttaacatga

SEQ ID NO: 74160 - DNA, 655 bp, Heterodera glycines
agcatttctcttacttgttcatccaaatagcccaatttggagttcatttccgattcggtgacccaactttcaagtgatctcgtctttctgcttctctttgaggattcgttgctatcgtcggaaggcaagtcttgtacagcaaatccttcctccgattttatcagattcagaccacatgagttgactttctttgtgttgttcaaaaatgtcaaacgaaaactgacttcatccgaaatccaaatattgtcaagttgtagtcctttccatgtgccaatttttgaaaattcacaggcacgggtagtgtgggtatcccacatgagcaatgtcttgtcttccatttcacattggcctgccttgaattggcaattgttcactgacccaaggggacttagcataattgtgctaccatgttgtgacatgattttagtcttaaaaagataacaattttcagttgagacagtcgaccaactaaatgaaccaattaaccacattcggggtgacaaatccaatttcttgtcagtatgcgagagtcccgagtcattaattagcaagcctaagctgcactttccattttcggccatttgcttacattcactcggagtcatttgcaacataagtggttcaagagtctcttggatcgtaacattagtgattg

SEQ ID NO: 74161 - DNA, 1702 bp, Heterodera glycines
atggattgtcaggtcgaaaatgaattagcaaaagaatcctctagtgaatccccagcctgtgggccggaaacaaagacaaacattcccaaaacgtcaaattgggaacggccaagcgtacgatcgaaagtcgcttctttaatgttcattacatttatgcttgttggaatgattttaccctttactactgctaatatgccccatctgccaatgcatccccttgtctgtcaaacccaaaacggaggaaaaatttggcaattgccggcagttactggctgttcaaagctgtcaattgatcattcaaaagcacctgttgttcgaactttcgatgtcttttcgccaaatttatttgagcactcggcagatgcttgggcttgccgaaaagtgagaaaatccgtgcgtaagtacacttcaatcactaatgttacgatccaagagactcttgaaccacttatgttgcaaatgactccgagtgaatgtaagcaaatggccgaaaatggaaagtgcagcttaggcttgctaattaatgactcgggactctcgcatactgacaagaaattggatttgtcaccccgaatgtggttaattggttcatttagttggtcgactgtctcaactgaaaattgttatctttttaagactaaaatcatgtcacaacatggtagcacaattatgctaagtccccttgggtcagtgaacaattgccaattcaaggcaggccaatgtgaaatggaagacaagacattgctcatgtgggatacccacactacccgtgcctgtgaattttcaaaaattggcacatggaaaggactacaacttgacaatatttggatttcggatgaagtcagttttcgtttgacatttttgaacaacacaaagaaagtcaactcatgtggtctgaatctgataaaatcggaggaaggatttgctgtacaagacttgccttccgacgatagcaacgaatcctcaaagagaagcagaaagacgagatcacttgaaagttgggtcaccgaatcggaaatgaactccaaattgggctatttggatgaacaagtaagagaaatgctgactatttccttttctcagacaattaaatcgatttgtgattatatgttggagacgagaagatgggcagcgacggcacttctctcagatccaacaacttttgccagaaaattattccaatctggtaaactggtggcaaaagtggccgggcctgaattgattaaagtgtggccatgcatcgaattgcaaggacatgactacgaatttgccaaaattggaaactcagcggattccgaattcgaatgctttgacaaaattccaattaaattccgagtgaaggacaacaaaagaatggcatttattgacccaaggacaatgattttgagctccgatgcgagactggcaccatgctcagaataccgcaaacagctcatttttgtgcgtggttctctttatgaagttgatcaaatcgatgctcaggtcaaacaggtgaatgccaatcgcattgacggtttcagccttaatctgtcattggcaccgacttatgctcgccattcctttcttcacattgccctagtgaatgtgtctgactttattggccaattttacgacgccaatttggcaagagaaaacgaactcacattccaaatcaaaagtgaggacgctatagtcacaaagaaaagtcgaacaatgggagcag

SEQ ID NO: 74162 - DNA, 311 bp, Heterodera glycines
atggacacatgtgtaaaggaaaacggtaagtgttggccatcatttaaaggctttttggtggggcatttttggcacaatagctttgaaaaatgctctccaaaaatttaaatattattttttaatttttggcagattttctccgatttgatcagtcgaaacgcatggaaaaccagtcaaagtttgcatattttgagtcggcacaggccaccattttgcgcccacctaaaaactacttaaaatccgccgaaatttggctgagtgaaaagcaatgtgctggatttcgctacgaaattgcggcaatgctttgttaa

SEQ ID NO: 74163 - DNA, 996 bp, Heterodera glycines
atgcatttcggcaccgttttgtcccttccgctgccgcttttcctcgtcgtgtgcttttccactgccgcacacatcgctcatttcaatgcaaatgcggagcaacaaaatgcaatcgaatggaacgcaaaacgggacagaatttgtgaggtgagtgaacaaacggcacaatgtcggacgggggcacaataaaaattttttaattaattgttcagatgccgctcaatcttggcaattgcacggaaaaattaacgcgtttttactacaactcgtccaaacagcggtgcttcagattcttttacacgtatgtgccattttgagatgccaaaagttcacatcgggaatctcgaccattgaaaagccattaactaatcacttagagcgtaccaaaagattaatttatctttgattttttgttgtcatttcggcacaaatgccattttccgcaattccaattcattttccattttttcgctttcagcggctgcaatggcaattcaaatcgctttcgtaccagaagtcattgcaagagaaagtgccatcccgactttcgattgtctgctgttttccaatcggagcgaaagagtgggcaaaaattgaaaaattaattaaattatataaaatatattaaatttaaagaagcagaaaatgaccgacaaaggaacaattgcgtggaaaattgcagaagggcgggcggcgtttgtgtgaacggaatttgccaatgcaaaagcggatatgaaaagagagaaggcaaatgcatcggtaaaagagactaatcagcgcaattactgactatctttttcaatataatttattttattaaattaattttttttaaagtttttttcatttttattgccatagattcgaatgaatgcgattggatcagttgcgaacggaatgccaaatgcatgaatttgcccggctcatttcgctgtgaatgccgcaagggtttcgcgggcagcggattcaattgcacaaaaaatcgaagtaaataaa

SEQ ID NO: 74164 - DNA, 1073 bp, Heterodera glycines
atggaaagtcagcagcaattgatgttcaacacgtcaatgggttccagcactaataataacaacaacaacatctttgggcacagcatgcaaagactggtgattaacttatgcccaagggttttaatacgttttttcctgagttcccagatacatgaaaagcgtgaaaatttgttttagcgactgatgttaagctattactttttattattttaacattataaagaattctttaaaaataatttttaaaaatattacatataaggagaaagataaaataaaattttattctaaaccccaacccattgatcagcagacttcgccggatgagagtccgttggatcatgtaaatgtgcatcaacagtatgcagtttcaacatatgcaaataatgagcaacaacagcaacaattgcttttatctccgtcaccaccaaaacgcagcgcatccttcacagatatgtgcgcttcctatcagcagatgaacattcagggtgggataaatttaaaaatatatttttttatgtaatatatagcatttattgggttctgattccagaatttttggataattttttgatgtttttaaaaagatttttaccaaaaagataaaaaatcaatttatcataataatttatttatgttaaagtaattaaaaagaaatctcgcttttatggatattaaaaatttaaaagggttcattatttaaatataatctaattattttaattcaattaagaaaatatgcaaacaaatgtgcaagtgactgaaatgcaacagcaatatcagcagcaacaacaatttcaaattcaacagcagcagcaacaacaccttgaagggttttttgcgcctccttttgcatatggtaatttttttaaaatttattttagattttattaaatcaatttatataaataattggttaattttatgcattgaacttgatccggatggaccacagccaaaaatatctttggcaaatcagcagcagtcggcagcacattttgccgcatttaaaggcataaattaatttagaattttttaattttttaaaattttaaggaaatgaacttactcca

SEQ ID NO: 74165 - DNA, 150 bp, Heterodera glycines
taatttagtttataaaatttacttaaatatatattgaattaagcaccagaagtaaaacgggagtcaaaaaattttccaaactataaaaaagtaaaaaattcgcttatgtgcaaccacgcgaaaatggccacgcgaaaatgaccccgaccg

SEQ ID NO: 74166 - DNA, 951 bp, Heterodera glycines
atgtttattgctgttttcctgccacagatgccccactccgcgttgcccccgttgccagacaatcggctgagccgttcgtttaacaccgcctccgtgctgttgacctgcctgaacgcgcactgtcaacgcgttgttcagccgttcaacaactttttgtgcgacgcgtgctttgaggcgcagaagcgcgagctgacgcggacactgatcggcggtggcgggcaccacaacgccgcgctggccgccgcttcatccgccgctaacatttcggccaccgcaatcagcaacggaggaggaggagaaggaggcaacaacaaaggcaccgccatcatcatcattagggctaatgatgatgatgatgatcaaaatcgaagtggtggcagaaagaacaacgccactaaacatgatagtaatatcagcaccaccaccaattcccatcgtttgcattgtgatatttccaccacttgttaattaattgcctaattagaagaagacaaatgcagcagggatgggggagagagagcaagagaatatcattttcgacattcccgtttcttgtcggcggtatgccgtttctcgaaatcctttatccgacaatctgcgggtcggcatggcgacttttgccacatatacattgattgtcctagtgccaacccgtgttaaagcaggcgtgcgatctgtcccgatttgtcctataatttggaggatccaaatccgacaaaatgaaaaactcctgctgatttgtcatccaatttatcttggttttgaaaacttcagatcgcacacctgtgttaaagcatcacaccaaatgattttgcttaattgtcccaaacatactgactgactgattaatgatggtcatcctttgacaattttgtctttatgttcagttattgacaattttattaaattttatttgtagaatttcttgtagaactttgacaaatgaataaa

SEQ ID NO: 74167 - DNA, 384 bp, Heterodera glycines
atggtggagcacgaatttgtggagccggattctgcagtggacaaccggaggaaaagggcgttggatgccgccagaaagattgtgtgtgttgagaagggcggtgtggcgtggaaaatggtagaggaaggcaaggaagagagtgaggagaaggaagaggaaaagcagcagcaggaaaaggatgagaatggatggccaactgaaaacaggacatgggagcagcagcaggccgtgttgggtaaagtgtcaatctggcgcgactacttccgcaacggcacgaacagcacgtccgccttcgtctatgctgccggacagcaaatcaaccaacaagatgggtcccttcgcagcataatggccaaatttttgatgcgagacaaccaaagttaa

SEQ ID NO: 74168 - DNA, 136 bp, Heterodera glycines
gtgtacgagtcgttggagtgtgtgcatgtgttttgcgctcgcgcacattttgtatcggcccatcattgtgtgttggtggacaccattctgcgcaatgcgaaggccgaagaattggcaacgattccgttcggcggca

SEQ ID NO: 74169 - DNA, 505 bp, Heterodera glycines
atgtctcgcaattcgttgaataattttgcatccctttggcctccgactgtcgcggggtgtccaatggcaataataacaccaaaattccctgaacaaaatgcgtcttacaatgtcaacactttcacattccaaacaattgttaatgaattaaaaactggtaaaacgaaaacaaaaaaataaaataaattattttaaaataattaagcaaatcaaaaattgtcagaaaatcccaacaatcggcaaatggttttcgaagaaattgaatatttgcacaaatttgaacattacgcggtcattttgtgtttgtccacgacaattgaattttaccggacaaattgtggctatcagaagagcaaaattcgacagaaacttttcaattgggcaaaatcagaagaaaattcggaaaaattggacaattatcagctgataacgcaatcggagaggaaaacgaagtgcaaaatgacaaagtaaaataaaaacaaaagcattaaaaagaaattaaaca

SEQ ID NO: 74170 - DNA, 1275 bp, Heterodera glycines
atgtatgaagctgatttgaacattaaacgctttaaattggacaaaattcggaccaaaaattgggaatgtaaaaaggtgaagaaaacccacgcggcgatttgcaacgaatggaaaaagcggtggacaagtcttacggtgtatttggcctattacagagaatttggacgccataaaatgggcacaaagattgaaaaggcactgagaagggaaaggggggccatggcacaattggcaaacaaaatggccaagcaaattggtgggtcccaagttgaattagcatagatatatttattagtaaaatttattaagaaaacataaattataagaaagtgagttttagtgaaaatttgccatttacttggggttatttttaaaaaaagttccaggacgttcttagaggtattttctctactttttattgtattttatgaagaaaattttcaaaaaatactgaaaaaggcaggaaaaaggtgccaatcttaaaaaagacaaaaaaggcaccaaaaagttaaagctagaagcctcaaattaagtaaaaattcagttttcgcgttattgggccgtagaaaaaggcataagcctcaaaatccggtctctaattatagtggacttttcagccaaatgtttaaatttgcatacaaaatacaaatgaaaaaccaatagagaataatagaaaaacatattgtaatattatttcattcaacgtttattgtaattaatcgttttaactgttaaacagaagaaaccggcatgcttgaccatttggcagttaagccgcacttcaaagcaagcgccgatgggtcaatgctaacattcactgagtcgattagtcaatgcttttccgcttacaatgcgctatttttagcggaaaaatttaaattttgtcaattttactcatgcctttttggcatcggtgggccaaagaaggcccaaattcagcccatttccgaatttatcaacgaaaaggagtgcgttttcgtcaacggatgggtccgcgcttatcaaagatttaaaagaattggcgacaacgaaccgaaaatgggcgcccgaaatcttctgagttcgattgtgctacagatcgaaaatgacgagccaattccggaggaaaagctcagcttaatcccttttcacttcccggcatcagcgcaatgaaaaacattgaaattttgaaaaaaaacaaaacgagaatttgtttttcttttctgataatcgcttttcaaaattttgtacaattttacaattccaaaaaccaaacaattttgtgaaatcaataaa

SEQ ID NO: 74171 - DNA, 248 bp, Heterodera glycines
atggtcataagaattgcagcaattctgccgattatttttgtttatggcatggagcgtaagagaacaaatttatattcaaaaaattgattaataggttattaaaattttcaaaaaataattaaggtaatttagggtacccggacacaacaaataaaagagacaatttagcaatgaagaaaaagcagcaggggaatttgagctatttatattcaattggagaagacgaaaaagtgttaattgattattaa

SEQ ID NO: 74172 - DNA, 286 bp, Heterodera glycines
  unsure (1)..(286): unsure at all n locations
atgccaattcgctgcctgaccagacaacggcacaaacattgcctttgcaatgtntgaggtggcattttgggggaaaacaatttttaaatcaaaaatattttcagtttatgcgcgccgaatttccacttgacatttgctcatttggcatgcgttgaacacatcgaacacattttggactgttaccgacaacttttggaggacaattcgctgaataattctgcctttttgcagcaacaaaaattgatcactttgccctcttcgccattttcatgacaaaaaaaataaa

SEQ ID NO: 74173 - DNA, 1631 bp, Heterodera glycines
atgccaactgataaatttgatgccatcaatttttcagagtggaaaattctctatgaaagcattcgtcaattttttgattattgcgattttctaaagtctaatgccgatgccgttttgttttatgaaggttaatgaattaaatcattttccaaaaaagcatgaaattaattattattaatattattattatgtatagttttttgcttaatgaaacacataaaaatattttaatatatgtaaaataagcccagaattcagaaaataattagataattatctatgcttatgtattaatgcctgctaatcctcctgtcccgacctaattgccaaacacgaaacccgaatttatggattttaaaagtctggtctctaactctattaatcatagccatattaacttataattataaaatattttattgatatgggctaatagcattagcatttattaatttttagatgattatagaagagaagaatttgaacattttgcatttaaaccgcagtttttttacccgaacggtgacacaatgccaatcagtgatgccatgcgcaaaattgttgaaggatttaatataattttaaagaaaggattggccaaaatcaattttttctccaaaaaagaattaccgcaaataaatttcatcaacagacaaatttgcacaaaggttaattatgtaattattattaatcaaattattggtgttaattattggtctaaataaaaaaaaaattatttttatttttaaaaatatttataggttaaaaaatatattttaataaaaattttcaaaatttacaataataaaaataaatttatttaaatttttattaaaaattataaatttttttgaggtccttgcttggacttactcaataaaaaaggctgaaaatatacaactcgcaaaatcaactttacacatcgttaaattgcatatattaattagcggatttcacaattttacatttgatctgccgtatccgccaatcgatgaaaatgaaatgggcgaatttggtgctgaattaaatttagagtttttaataacattttaattcaattagcttcgtaaaaatgtcagatctaaatatataatccttaaattttaatttttggtaattttcgacattattttattcaaaaaaaaaaaataagcagactattaggtgagtacttagcaaacctaatagttcaaataaattaaaaaacattatgagccttcgaaaatgaataaattttaatcacattatgaatctaatattattaaaatacttaattatatccaatcaaattaatcactttcagaaaatgatctcatttcaaatggttttattggaaatagacaaaataacactgaagacaacattgaagaaaatgatgaagatttatattggatttgggcctacaaaatgatgcttgatacaatagaggaaggaaatgataataaaggtaatgtaattaaaatattttaaataaatattgcgcttttttaaggaaatttcaaaaaaagaatgttaaattttttaaagagccaatggctttaatcgacaatggaattaggtattcgttggtgatggatgttctgaaaaaagaatggtttgatgaattaaatgattatgacaattagaaatga

SEQ ID NO: 74174 - DNA, 328 bp, Heterodera glycines
aaaatgatctcatttcaaatggttttattggaaatagacaaaataacactgaagacaacattgaagaaaatgatgaagatttatattggatttgggcctacaaaatgatgcttgatacaatagaggaaggaaatgataataaaggtaatgtaattaaaatattttaaataaatattgcgcttttttaaggaaatttcaaaaaaagaatgttaaattttttaaagagccaatggctttaatcgacaatgaaattaggtattcgttggtgatggatgttctgaaaaaagaatggtttgatgaattaaatgattatgacaattagaaatga

SEQ ID NO: 74175 - DNA, 2120 bp, Heterodera glycines
ttacagttaaccggcgattgggtccaagtgcaaattgtgcatttgcccaacgaagcggagggactcggctttggcatcgtcggagggcacagcaccggcgttgtggtcaaatcgatcatccgcggcagtgtggcggacaaagtcaaaaaaataaataaacgcattaacattaaaataaattcatagcggatgggggagtaaaacaatttaaaaatgcgaaaaactaatttaaaaaattcggggaaagccggggaattttctgttcgccgatcaatcaaaactttagggattttcaaaaatttaaaaaatcgaaaaatcacagagaaggaagggaagggaaacggaaaaatgccaaaaacattgctaattggcaaatgatttgaaccgccacaatttgctgattctgaaactaaaatggtgtgacaaattttgtccggcctaaaattcgagctgctgatcataagccaaactccgtttaggacatgcgccttcgtccgggcgatcgcattctgcaaattgggcacatttccacgcagggactgaacaggtgggcattttgttggaattcgccgatttaaaattaattttaaaattgcatttttaaattaataattaatgattcattattttccatcagtcaacaagttgccgctctgttgcgccagcaagaagccgttgttcagttggttgttgtacggcccattcagctgcaggacagtgaacaggacacaccgcgtatgttataattagttcaattttatggttaattgttttaaattcaatttaaaatcgtttggtatgtggaaacaataaaataacttttttggttggaatttaaattatataaaattaattaattctttaccctattttggctaattcttttgtcagccccaaaatctgattttaaggttaaatgttcttttttaaaaatttataaaattcgaatgcccgcattttctttttctttctatattattttgtttattttaatttaaatttaattaatttaatttaatcattctttattattgaaatttaataatttccaaaagaatttcaaaattattattttcctttcgaatactacacaacattatgtctatattttaaatgctttgattttgaactttccttggcattagcaaattcttggtattctttccaaaaataattttcaaacattttaaaataatttttccattttaaacaatttttgccctcgaaacattcgcccggtgttttcttttgtgacttttgattgactgctgcttctgctgcacattttgtgacagatgaggcggcagcaatttgtctgctgccagccgctgacgggtgtcagctgtgccaaaaatcatttattatttcgattattatgaattattacatatttatatattaagcccctcttttaaattttattggccgaattttttaggggggcggggcggcagcgccgaaatttgtgtgccccgggggaatttttgaaatgtgatagcgcccgaggggcgacggagcaccgccgccaccgctgatgagcaaaagcgccaaacaatttttggcttttccaataataaatagcaccaaattatgatgcaccactgggaaaccaaggaccaaatttcatcattattagtcgagaaaattcaatttttaaagactttttcggttgtaaagtctcgagaccaattcttgacttttgaaccgacaaattcttactttctaatgagtgtattagataattagcagtgattattaagcattttctcattattcaatgctattaagctatggatctgttttcgatggacgaaagtttctcgagagtcgcgaccgaacccactcccaaaaaagccagagaaatttttagacctcgagactgcgaatctcgagcagtttttattggtgccattctgttttaaaatttcacttttttaaataaaataaattttaattgttagaatttatgtattaaattttttagtatttcattttcgaatttttcaaaacgaaaatgattttgaaaaaagtgttcagtctgctggacaatggccactcgtgcggcactttcggcggacactttggacgagcaagtgcagacacggcttgaagcattttcg

SEQ ID NO: 74176 - DNA, 2682 bp, Heterodera glycines
atgcgcctgatcgattggcttaacaacaaattcgtgacaaatccgtggcacaaccggaccaaacataaaaacggcaattcaattagcaacaacggttatcatcaccatcaatacaatggcacggcattgcacagcaacggcggtaacaacaagtgctttgccggggtgatgccattctcgaccatacgaccggatggcactttgtgtcaccccttcggcatttcgtcgtccataccatggatgccgcacacgcggtcacaaatgccgccactgtttggcaccgtttcgccgtccaacaacaccagccgccgtccatgggaagcggccaaacggttgctgcgtgccgtgccgcttcgcctgtcgcgcaaggcatccgaaaccgcgtcccattcgtcatcgttcagcgaggacccgttcggcggtggcggagaccgtggcggcacgccaatctggcttttgcgcgaccccgcaccggtcgcgcctcgtacgggccaacgcgttggtgtcgacttcgccgcaacgcaacgtcgccgtaccgagtcgcctcgcgcactaagacgcagcgtacgcgacttgcgactctcgcgtcgtcgtcgtcgcagcggcttcgcacagttttccgcgtttggctggcagcaacagcaggacggcggagaacggcataatgcggaaagaacaacagtcggcatggacgacgtattacggcacaaaactgaccggttgaatcagccggcaaaatggcgtgaggacaacacggcgccaagaaagttggcaataattcaaatggcaaatgagcgccaaattggcacgaatccaacagaaaggcaagacgaatgccaaaaaacggggctattacaacatgatgggacagaggaaaaggccgagaatgggaatcaaagtcgtataaaatcggcatttgatgcggtgccgccgaagaatgcagtgatgctgaactttgcgacggagttgcagcaacggatggccgagcacatgaaggcacaatatgccaaaaaaggcgctgtactgtttgcggaccatgttctgctaagcggcaccaaaagcaggcatgcacacgtgggcacccacactgagctcgagaccgagaaaaggccaaaattttttggtctcgagactgggatttactgccgagactttatttcaagatttgggtcttccgggactaggataatattaattgttgcgagactaattcttgaagcttaatctcgaacttaggaatcgactggataggcgagaattgatctcgaacttgaagttctggcattggcctagggatttatttgagcctgatcacccatcctgttccacgggattctagggcccgagaattttggtgattggtccaataggccatggcccatccccaagatattgtctcgagaccgatgacaacaacaacaacaatcacacaggcatacgccgttgtcgtccgcgcatagttcggggcgtctatcggtgcggtgggccaattccgtcgacacgccaaacaatttgaacagcagcagcaaaaacattggccaacatcaacagcagcagtcaaaattggcacttccaactgatacgcattctgtcactaccagcagaaaggggtgccaaaaatccgcgagtgtccgctccgcggtggaaccgcgagtcgacgaggagcggtgtcgacgactttgcaacaccacgccgtcctcgcggcgctcgtccgcccgcgcgctgctttgcaccggcagcgcgctgattggatggcgccgcatgaccatccccgatcggctggagttgccgcctccggcaccgaccgcctccaaatgcttacggctggaaccgccgcaaatggaacggtttggcagctgcgagcggtgggcaccgccaccgctggtggagcgcaagcgcttcaatctgctgaacaagcggcatggcaccgccggtggcggctgctgtgacagctgcggcagcagtacttggtgttgtcccagccgccgtttctgtcgcggttgcgctagtgacagccgccgctggtggccgctgatcaaccagtggcagcaacagctgcacagcgtggtggcgaggccgttcatcagcagcaacagcgcggtgcgcaagccggcacagcagcaaaagcagcaactgatcgtcggattgtcatccgaagaaaaagccgcagcggatggatatgctggcggtgtgatcgctatgccagcagagggacctaaagcagtacccgaccgggttttggtcatacaacacgatgactatgcagttgatgatggccagcaagggcatcatgatcgcgacgaagcggttcatcacgactcatatgaaagcgatgaatccgtgacgtcagccgacggcacggacgaaaaagcaacagaaactgaacaacatgatgctgatcatcattatcatcaagttcaagcagaacaaccactgctgatgccatcgagtgaattccatcaacgcaatttgctgcttttgtcggtcattcgcttgttgctaagacgaaaactgaccaagacggcggagacatcgactaatgatcggagtgaatacaatcggctggcagctgaacggctggcacgggcggttgtcaacacggcacaggacgagcggtggattgaacggagacggaaacgcaaggaacgggaacggcaacgcattgtggaggcgagaaaatag

SEQ ID NO: 74177 - DNA, 1209 bp, Heterodera glycines
ctacacgccgttttgcgacagtcgcaagtccatggacggctttcggttctggcggagcggctactgggcccagcatttggcgggccgcaaataccacatcagtgctctttacgttgtggatttggtcaaatttcggtgtgttgattttcaaaaatgttttttaatcatcaaattattaaatgctttttaaatattttcagccaaattgccgccggcgatcgtctccgtggccaataccaagggctcagctccgacccgaactcgttgtcaaacctggaccaggatttgcccaacaacatggtgagttggcaagcaatttgttgacaaactttacaccaaaattcgtcaattctatgcatttttgagtttagtgtgtctgacggcgacatcagtcaccgccatcgttctcttccccgaaattaaaaaaaaattgcaaaccaaaatttttcaaatgaaattagagaattttttataagaaaattacaagtaagaacatttagaaaaaatcttaaagcgatttttcaaaattttatattgtattactaattttttcaaagattcgaaaaaaccctagaaaaatttttcaactaaatctttttcttgcaattttcttgtaaaaatattttctagaaaattttttttaatttctaagtttgaatttttttttcattttcgtgagtgggaaagttatgctctccaacttcggcctttctgatcccaagaactagattttttaagcgtttattttctgcgaaaaaaaatcaaattctcatattttttacagaaaattcattccatttttatccccattcctcaatgtttcagattcaccaagtgcgcatccactcgctgccccaggaatggctgtggtgcgagacgtggtgtgacgacgtgtccaaggacagtgcgaagaccattgatcttgtaaacactattatttcgaaaatcacacaaattctcgaatattccattatttaaaaaatgcttttttgtagtgcaacaatccgctgaccaaggagccaaagttggactcggctgttcgcattgtgtccgaatggaccgagttggacaacgagataaagcggcttttgacaagcagcagcaacaatagaagtgctgttggaaagccgcaagacgacgaaacagcatttgatgacgatgaaaagcacgaggaattatgattaaaagaattaggcgttccaaaataaa

SEQ ID NO: 74178 - DNA, 890 bp, Heterodera glycines
gcaccggtcaatcgtacgatcggattaacatcttctcgctggcctccggccatctctacgagcgcttcctgcgcatcatgatgctgtccgtgctgaagaacaccaaacacccggtcaaattctggctgctcaacaattacctgtcgccccaattcagggtgatccagctgaaacattaattattattttttcctaatgagtcacgctccgcaaatttgacaaactttcattccatttaagcgttaaagactttccatgacttttcttcatactaaattgtggttctaattccccagcgaaattgccggaataatttttggagaataacattttcaagaaaaacattgtttccatgaatcgatcggagcctatattgttcatttttttaaatttttgttgatattttctaccctcatttttttgattgtttaggaatcccttcccgtgatggcttctcattacggctttgactatcagctgatcgaatacaaatggccgagttggctccaccaacagacggagaagcagcgcgtcatgtgggggtcagtgttacgctcgcgacatgggaggcttttactatgcggaccgctaatttgctattttccaagaatttaggacatttatcccccaattttctaaatttggcgttctctgcattttttaacgtttttgaaaacagtcataaatgataatttctttacttcaaaatggattttttttaattcagaaatttctttctagctacaaaatcctctttctcgacgtgctgttcccgctggacgtgaagaaaatcattttcgttgacgccgaccaaattgttcgcaccgatctgatgcagttgatggagtacgacctcgagggcgccccgtactggtgagtgattgcggagc

SEQ ID NO: 74179 - DNA, 1668 bp, Heterodera glycines
atggacgttgtttttggcggctcttcgacaacaaatggtagtggcgccggtggcggcgcaactaaaattgggcgcaccggcgccggcgccgccgattgctcatcgggcgacgagtcaaatgaaagcgaacggagcgacgcgccgacaaacaccggcgccggcaccggcgcaggcgcagcgctaaccgaacgacggacaaagcgaaaacagcagaaaaagggagaggaaaatgagcatgaagaggggaagaacacgctcaaagcaatgttcccgacaattttgaggaggaaaagcggtgggaaaaaaagtgagcgaaagtcaaaatatttaattggcattttaaatgaataaattacaaaaaaaaaaacatttaatagtttaaaaaacacttttaatagactttaatttaataaaatttatttttatatcttaaaaaattctaaaatgcatttaaaaagccaaaaaggcatattgattcattcgaaaatgcaaaaatctgcaaatttcaagttaaatgccatttggtagagaattttttttttgccaatccttactattctaatcactagaccgaataacacaaggattttcccgcgaagccaggtctcgtccaaataatttttaaaagtgcgcccgggtcaggatcacctcaagcagggtttttaatctaaaatctgtttcggataaagatgacgaaacttgatccggaatttctcaaaaatttcaaggctctactaataattctcattaatttgtcagtattgcattctaaaataacctattttcagatgcttgttggtgtccttccgcttcatccctctcactgcctttcatccaccagcatccgcttaatcctcatccaatcacttttgccaaccacgaaagtgaggcagccgccatggtcatcagcaaaaacaacagtagacggcacaacacaatggcatcggcgcacccgggcgttaaaacggagccaaaaacacgcgctacggcggcggcttcatcaccttgttgcataaaacgggagagctgttgcggtggcgccgatatgccggaaaagagaagcaacaattctcggatggcaaggacggaaaatgccggcgctgacggcgcaggcgcagagcgaaagtgccgagtcagcgctggcttttcagtacaggaattacaactccaacggcacgagcaatgcatgttgcaacagcagaaacgcattgatcaactgttgctggagttgggccgatcccagtcggcactgaaccagcaccaaaaaatgttggaggatgccgagcgacggatggtcgaggagggcggccaaaccggcggcggaatggaggtgggaaaagaggcggatttactaatccagctaattaaaagcaattaccgtccttaaattgtccttaatcactcagggcctttcctttatcagtcaatcgttgatctttctgagcccttatgtcacaagatcgctccttgtttaacagtttttgttgattgaattcacgcattgatttgatcaatgcttcttcccatcactttcccaattttcatgtttttcagtattggcttagccaattggaaaatggtcgtcgcgaatttgcccaacagcagcagcaattggacaagcaaatggacgtccagaaagtgctgtgcaagcgggaccagcagatgaag

SEQ ID NO: 74180 - DNA, 567 bp, Heterodera glycines
atggccaacccaaacaatttcattgctatgattacaacgcacaagcgaacttcgattgggtcaacagtttcaaggaggtgtggcagtaatctcaacaaatcactgattttgttacctctatttttgttttcaaattgcttagcatttttccgtgccaatgccatttcttcggtcagctaccaaattcgttttactattcgtgtgccgtcaatgcaaattgtgccatttgaattggtgaacgaatggacaaaggaaaagctgacattggccaaagcaaatgaaaatgattggcgcatcgattggataatgaaacgatgcaaaattattggagagacggcggcgtttcattggaaagacggaaattgggacaacaattgtaaccgtgtgttcttttatcttttttgtgccaataattgcattgggtaagcaattaaaaaagggatttgatttttatccgaatttgaattttgcgcttaattaaggtcattgtctccgccaccggaagaagtgaaagaaaaagcgggacaaagcatcacaaatggggcgtcttatgctgacaatgagtga

SEQ ID NO: 74181 - DNA, 613 bp, Heterodera glycines
ttggatttgcaacgacgttttgatggacattctcccatcatttgaccatgcccaactcggcctcaaattggcattgctttcgccacgtttcaatgcgttggtggacaaacattttgatggcaaacgcgaattgacaatttggagaacggtcgaaattcatcacaaggacaaaggatctggaccaaaactgtctgtagtgtttgatgacagagctgtggaatttccgttgcccgaccgtccgttctcctgcaaaatccgttttaagcaccttcagattgagtaattataaataagagtatatcgcaataaaagcattcattcaatttttaggtacattgatcactacgtcatcgcttttcttcgtttgaatcaccaaatttttgacaaaagaggcatcaatttagagttgtggaatccatcatcacacaccatggatgtgcagccaatttgggatgttttggcccatgaaattttgccaattttttcggcaaacattcgccacttgggctttaacagtggtgatcatttggacaatttgcgtcgtctcatttcgccaacaattctcactgaactgaatcaattgaattcaatccattcatttgatctgttctga

SEQ ID NO: 74182 - DNA, 1706 bp, Heterodera glycines
atggacacggaggcggggaaagcgcaactttatgccaacaatacggttccatttccgctgcccgagcgtccgttgccgagaaaaattcgcttccaagccttggaaatattgtgagagtgttggttgcatcgtttcccctcaccggttccgctcggcctggggtcggagggatcccgatcagtctcgaaaattttgaaaaagccatcggtacggatctcgaggtcgggatcccgatgccgtccggtctctaatccaaaccatataattaaaaaagcttcaaagcatcgttggccccactaaaggcattttccttccttttcaggtacatcgaccactctgtcatcgaatttctgcgtgccaacaagcaaattttcgacaacaaaggcaccaacttggtgttcaaattgtcatcgtatttgtccggaaaagaagacggcagaaccatttggcaatttttgtgccgcgaaatttggcccatttttacgccgaacatccgtcagttgggcttctacaacggtgaccatctcgtcaatttgcgtcgtctcatttcgcccacaattctcaccgacctcaaccagctgaatccgcttgattccggtgaactgtttcccgctggtgttgctgacgatggaccgaacgcaactgctgggcaagcactcaccaaatggttgcacacgcctaccgtcgatggacagccgaaggaattgtattgcagtgatcatgtttggggcttcaaattcgactggatcaaaacgttcaaagaggtgggtgatgggggcggaaaattttcttgaaacaattggtcgaaccaacagcagacaaaatccaacccgtaaatcgtcataacttttatcagcttcaattaaattaagcattttttggtataattgatagaccttaactctatttacagcaaaatttcaaaaaattgatcctgtttaaaaagtttatggaagacatttttttacaatttttggtttttttttttaaattgtaaaaaaaatttttgaatttgcatgcaggtagtttatttttttcgaaaacttacaagaaccgggccaccagcaggtccttggtaaaatcctgtccggtttctaaagcaatatgtttggtgctactggttcggtatacttggtgatcaattttttccattttttaggaatttctccgttccaccactccggccagttactacatcttgctgcacttatgctcaatgccagaaaagccgtttgagctggtgaacgagcaaacccaggaaaagctgagcttggccaaaattgagggcaatgtgttgatcagttattggttgctgaagcgatggccaatcgccggcggggagacggcgcagcgcaaagacgaaaatggcaacaaattgaacaacgtccgctttctgattcgtggcattaactgcattgggtaagcacccagcaacggcattttctgttttcaaactattcaacgaatgaatttatataggccattgtccccatcgacggcggaccaaagcaacggaaatgccgtgccgagtggcgccggttccagcgaatgatcggacggaagaaacgaatatttaatttgaggaattgttttgatgagggaaattatatttgttgagatgatgatgcacacattacaaatgctattttcttcatgtgtttatccattttttggctgcttgttcattttatttgggaaataataaa

SEQ ID NO: 74183 - DNA, 1026 bp, Heterodera glycines
atgggcaaaactgtagaaagtcaacttgaacaggtttattacaacctaaattcgccggccagctacgcaggaatgcaaaaggtgctagcagaagcgcgaaaacgtatccccaatctaaagcttcacgatgtacagaagtttcttcataaacaaaggacttacacacttttcaaacccaaaagaaacaaattcccacggttaaaaactgtcccaagtggtttgcatacggattggcagtgtgatctttgcattatggactcgctgaaggagcacaacgatggatacaggtatattcttgtctgtattgatgttcttagtagacagatttatgtcgccgaagctgagtcgaagaagagtgagcatatgattgaagcgtttgaaaaagttttcaaaaaggcacaagtgctgcctaataaaatgtacagcgacagtggcctagaattccaagccaaacgaatgaatgagtactggcgttcaaaagatatcattaaacatgtaatgtacagccctcatctgcatgcaggtgttgtggagagagcaaatcgcacaattaaggaaagactttaccgttattttagcgaaaaaaacacacacagatgggtagacattattgataaaatagttaaaaacctgaacaatttagtgaaccgtacaacaggaatgcgtcctgttgatgtgaattttcgtaatgcaacagagctgagaaatcgtctatataaagacgtggaacaacaaaagcgaattccaaaattcaaaattgatgatatcgtaagaattaccaaagagaagggagacttctccaaaggatattttccaaattttactgacgaattattcaaaattgttcgggtaaacccgaccaatcctccgtcataccgaatcagtgatttagaaggtgaaaatataaaaggtattttttacgatcaggaactggtaaagactgttgctgctgaacagacaactcatcgagcagaaattttgaaatccagggtacgaaacggtgttaagcaacattttgttcgttag

SEQ ID NO: 74184 - DNA, 551 bp, Heterodera glycines
atgacttggcacggcgtcatattttgtgtggttccgttgaatatcagttccatttcaattgcacctcttttgttttttactaggtaaaaatcgcataaaaatgaattttaatatttggaatttaattattcttataatgaaaaataattttatttttttttaattaaaagaaataattaattaattaaaaattgatgatagacagaaatgttattaataatttttcttttaaacaataatttaaattaaaataaccaactaaaaaattaaaaggccttattaatttatttaattactttattttattaattataatattaaaatgccaatttttagcactgaatatcacaatgcttttacaaaagaatgggcacgattacgtgctttgttcgtcgggcttcaaccgtcaaacacaatttttgcaacaactgttgagattttctaaatgtgttgatgagttattttaaaaagcgataagacgaaaattatttatcatatttatttatttataacaatttgtggtttttcaataattggtttaagccaataaa

SEQ ID NO: 74185 - DNA, 846 bp, Heterodera glycines
atgcatttttctgaagctaatccaataatatttgcggtaatttttcaaaaaaatgaaattaatattatttaaatttcaatttttagctatttttgcaatataaggatgaacagccgtgttggccaatcataagctgcgcattgttgctgagcataattgcattttttggtttgatattcaatacggcactcatttacgtcacagtacgagcgcggtataaataaaaccgggaaaatattttataattcaataatgattatgcgtaattaggcacttaattagaaacagccaattattatttaattgctcagatcttagccctgaaaaatgttgttgaattaaaaataaattgaaatcataataattcgaaaatttccaattaaaaaataatattataaattcactgaaccatcttttagaaatattatttaaatttattcgaagttaattttcgataatttgacaattaatttatgtgaaattttgtttaatttgttaattttgtatgaaatttcttgtttttatgttcttgcatttattataaaatatttttcaaaataaaaattattttttaattttagaacattaattagcccgacaaatcgtttattggcatttaatgcggccctcgaaattgcgcatcaatcatcgtatttcacatttttgttcctcagtttgaccggccaaacattcattgactataaaatggccgtcaaaattggcacactttcaatcattggttataatgtgtgattcctgcaatgctttgtactgcaattgatcgcctcttttgcgtcatattcccttatttgtaaccaaattttttaattaattaatataaataaa

SEQ ID NO: 74186 - DNA, 547 bp, Heterodera glycines
atgtcaaaagaatataagcaaaaaagaaaatattcgccaaaagaatggaagcaaaattatgccgaaatttgtaagaaaattggagttggcattgggacaattgaaaattggaagagaaaatttggcatttgcaataaattaacaaagaatgaaaaattggaaaaaataaaaatttatctgcaaattaaaagcgaaaatccaaaaatgagtgacaaggaaattgcaaaaacattgaaaattgatagaaagagcatttcaagatggaagaaccaatttggagaagaaatattggagaatttaaatgaatgattaaaagaaaattggataaatttgccgtgaaattttatttgaaaaactgtttatcaaaatttgtatttatattaaaaaatatatatatatatatattttacagtccggttgcaaaagtaatgcatcaaaatgtttaatcgaccaaaactcaattttaagtttagataaaattctaaaacaatttctgctaagctaacttttgattctgatcaaaaaaagtctttaattaaataataaa

SEQ ID NO: 74187 - DNA, 362 bp, Heterodera glycines
atgcaagaagtgatcggaacggtaggaattttttttattaaattttaattaaacattaattgaataattattgtattaaatcatattttttaaattgaagtttttttttgctatttcctcaaattcttcaggccattgcctttgccctgctctccaacggacggtgtttaaattccattcttttccttttgaactttccctcttccaagaattcccctctttgctggcgttctgatcaccatggtggatacgttcacttttctgctgatcgatcgctacggctttcgcaaattggagttcattttcgccgttctgatcagcacaatggccatcacttttggctttgaagtgaggcaattaaa

SEQ ID NO: 74188 - DNA, 947 bp, Heterodera glycines
aaattaccaactaattttgcaatgacatacagtcaattaaaagcaaatttaaaccgtttgcgatcaaaacccgatttactggaattgtatcacaaaacaattttggatcaggtcaatgatcagggatctgttgaaaaaaccgatcggttactggatccaaacaaaaggggcaaaaaatacattacttacctcatcatgcggtagtgaaagaaaccagtggacgtacaaaactaagaattgtttataatgctaatgcaaaaagtggtaataatccagcattaaatgagtgcatagaaaagggtgttaatgagtacaacgatttaacaagcattcaattatggagacgtttgaaaaatattttgattgggtctgatattgctaatgcttttcatcaaattgagttggcaccagaagacagatattgtgtacgttttttatgggttgaaaacccattcaatccttatagccctttagtgcattatcgatttaagcgagtaacttttggagttatttgtagcccagcccaattagcattaactattaaaatacatttagaaaaatatgaccatcctctcattaaacaattaatccaaaatatttacgttgataagttaatagtgagcattaccgacaaaaaggaatttaaaatagtttacaaaatgataaaacaaatattttgcgaagcaggtgtggatgtgagagaattcttgtcaaatgatttaaacaaaatacaaaaattacccaagtaagatcgtattgaaaaggaaactgtcaaattgtagggaatttggtggaatttccgagaagatgaatttattatcaaaatgccgaaatttgaaacgagtaacaaagttatcacaaattgctaagacatttgacccttgtgggattacagctccaattatattagctgcaaaacttttctgtcaagaaattgaaaatggaaa

SEQ ID NO: 74189 - DNA, 490 bp, Heterodera glycines
atggaatcgtctaagaaatacagtagcttatgtaattcgtgcatgggaaaaacaggaaaaagagcatctttagaaaagaacgaaaaagatcaaaaatttaagaaaaataattctgagggaaaaccaattaaagaattagttagtctaattcgacctttagaaatcagtgaaattgctaacgccgaaattttgattttaaaacaaactggtacaagaaaatcatccgcctacaaaatcactaataaaaagtttggatttgtttaaagatggcaatcaattatggcgtacaagaggaagaattttacaaagtggtctaaataaaatttggtcagaaattttcagagacgaaaaacgtgtcgaaatccaattgagagggttgtgtgatcaaattgggtgttctttgcgtccaattgatggagagagagtcccggtgaccaacgtcgtttggctgatagccgcgcacctgccaattctcactgatcagacccaa

SEQ ID NO: 74190 - DNA, 269 bp, Heterodera glycines
ctgccgacaaccgaccgccgcccgcgggatggtacaacggacgccatcacggaaaccacgagggatggcattggcacaacggcggaagacgatgagacagaggcactcacattaaaaaatggatttcattttgttaaataatatctactttataaattaataatttttacaaaaaaataagtttatcacaatttaaattctttatttttttaattatgtcatattttatatggagaaatgaattaatttttatttattattttaaaata

SEQ ID NO: 74191 - DNA, 814 bp, Heterodera glycines
attttgtgcacaattttcgtgaattaattttcaccaagaaattttacaatagtgaaaaacttgtgctcagaccgccccaaattgacgcattttgggtgcattttacgcgtcattataaggggagggacaaaccggtgcaattgtccactgattacctgaccattttgcatctttcaaaggatgtaattaaaataattttgaattattaaaaaaagatggaattttctttatgacagatcgaagcaaattcaacaaaaggatacaatgacaaattgctaacacaatttgatggacaattgggcaacggaagtgcttttctgaacgactcgaagataataaaggtacagaaatgataaccaaaaacccaaacggaatggaaaattatgaatacaatataaaaaatttatttaatgttagccaattaaaattacaaaataccacttagataattgaccgcatgccgaaaaggttttattattttggcgccattcggcactgttcccgcttcatcaacaattatccaaatggcatttttactattccttcgccgtgcctttcatacaaactgtgcgatttgccgaaggcaaaagtggagtgtaccgtaaccaaaagcaaatattacagaagcacgattatgccaacaaaaatttacagggtaattagtgggaaatgattagttagttattgcgcatcattaaaacattcaggttcacgttttaaagaggaccatttttgtgaagaggaaaggcggatgctttgccagaaaactgatattttaactttattaaaatgtatttttttacaaaaaaaaaaa

SEQ ID NO: 74192 - DNA, 686 bp, Heterodera glycines
ccaccgtatgctcttccaccgtatccctcttccccatcgctgatgtgccttcttctctccctcctcctcctcttcctttccccattcatttctcttcctctcttcgtccctttttccctcgcccttccgtccccccaaaagcgttgtccctcccctctcttccgtcagtcgcgaagttcgcctccgcccaacggcacatcgcctcactattcaactccaattcacttcttcgccatcactcaggtcattttgattggcaaattttgaaatttaactaacaaaaagggcactcaaagcaaaggcacacaattcattttgattattttgatcaaaatgcaattagaattgccaatttgaaattgcccatcatttaggattgccaattcgttctcgctcgtcccgaccaacttggccaagtcagtcagtcccactattctcttctctttctctctccaattctctctaaatttcattgtctctgattgtctgtctgtccgtctcagttgccctctctctccgtctcttcgtccgtctccgattgtgcgccctcgcgaattaatttgctgtggtctttgaactcgcccgtcccctctctgctgctgctccaacaaagggcccacaaactttgccttctcccaatcgaagtgccattttcggtgatcgctcacagcacggaactgttcagg

SEQ ID NO: 74193 - DNA, 1151 bp, Heterodera glycines
atgattgctcaatctgtgccgaacattggccattattatgatgaagaggaagtgatggaagacgaggaggaatattcatacgaagagattgacgaagaggaggaggaagaagaagaagaagtggagaaggaagagaagcgaacagtcgccgcaagggcactgccagcggcgcaattggcggaggacggcggacagaacggcactgcccaaggcaatgaaattggagggcaaattcagtggcgagacaagggactgtctgcactaattgcattggaactgatcatttggcactttctgatcagttgggactgaccaattggaactgtctgcactgatcactttcccatttttgtttctgttttgtcaccgattttccccaaagtgttacaccacccaatgtgaatttgcataaatttgtccgcatttcgcctattttgacgcaatgtcccgccggtgacttagttcactgtcccgaccgacggattgcaaactcttccggcaaaagtctgtcccaaaaatttaagtgtttggtttttctgtccgttgcccgtcaaaatcgatcatttgggcaggaaattaacttttctgttgataaagaagcactttggcagccaaaataatcactcaaatgagaatgaatacaaaaacggaactcaactcactccgtcgccatcggcgaattataaattaaaagaaggaaaacgaacaaaaaacaacggatcaaacgaatgattgatctctcaccacagccactttccctcgaaaaaacagaacacaaccccctcctttaaacctaagcctcattaagttcatacctcattaatgtcttttttatcattccaattcccctcccttccctgtctgatcagtctcaccctaacgatcactttgtcagtttggctccctaaatccgatcagtaggttagctttctccctcctcctctctctcccccaattgttcgtttggtcattcggccattcattttcattttttgggtaccataaattctgggctggtcaatcacagcctttattatgagaggggaggaaactgttgactttgtaccccgattagtcattcatcattttccgatcagtgcgcaattaattaatttactccccccgcacctttgacaattccacccccgcaa

SEQ ID NO: 74194 - DNA, 833 bp, Heterodera glycines
aagataaaagagatggaagccgccaaaaaacaaattgaagtagaagaaagtgctgaagaagaaggacgaattttaaaagaaaaggcacggaaaacggaagagcagaaaagagggcaaaaagctaagaaagacggggagaaatggggaagaacggaagaagaggggccaaagcgtgatggcaagcactgcctaatgagatcgtatgtggcatattataattacccgagggagggaagtgatcaatcgatggaatgccctgaggaggcgagaaaaagagaggaaaatttaaaaatgaaaacggtcgaagagcgagaccatgccttccggtcatttgtgaatgccgacacttcactcgacgggagagcgaaagtcgggcaacgcttcgctcgaaatttgttggccccggtggagagggatatcatccggaacccgggaattcccccagaaggacggggattttgccaaagtgccacaggttggcagggactccctcatcccgaaggacggaacaattggcacgccacggggtggcagggatcgagaaagagggcctggaatatgagccctattcggtcaagtccggtgggcgcaacgatggaagaaaagatcgaacgtgtgcgctcacttttatttgaatgtacgcacacattgagagacgtagtcgatgaaatgaacgcaaaaaagaagaaagaggaagagatgaacaaagagagaacgagagaaacagacgaaggaagagagcacggaaagaaagagggcagtgagaagagtgagggaacgaaagacaaatgaagagaaagaacagaggacgaaggaagggaacaacaaaaaaa

SEQ ID NO: 74195 - DNA, 80 bp, Heterodera glycines
caatactcaccaatcacggcggacggcacaacaaagcacggcacaatcaaaattccaaacaccaaaacaacggacgtcag

SEQ ID NO: 74196 - DNA, 642 bp, Heterodera glycines
atggtttttagtgacatagaactaacgtttgtcacggcggacgctgttcgtttggtccaagacaaaaaagtttggactgtcattggtacagacgggtgggttaccaaaaaacgaaaatgaattaaacgaattttctacagaaatgattttctcaacattaaattttgggaaaaaaatctggaacgtttgattcgtgacattggcactgatttcaaagtttaattattttgggaaataaaaatcttgatcttgcttaaggaaccgagcaatgaagaaaaagccttttttacatttttgagccacaagttttccatcgccggtgatttcagcccaataccaattaaaaaaattcggaaaggagaaaattttgtgtaattaaagccatttaaaataatattaaaaaattaaataatattaatatgttagtgcattgttattaaaacattttgttattccatttagcgatgttgaagctgaattatgcaatgtcagacaattacgtgtagtccctgttcaagggaacgaatcacgggttttggatgttttggttatttaagaaaaaaccaacacaaaaataactgcatggaatattttggcggtttttttgaattttttattgagtggcaaagaagtagaaaagca

SEQ ID NO: 74197 - DNA, 1263 bp, Heterodera glycines
atgtttaacaaatgtgatttaataaatgaaaacatacattttctggtaggttttacgattgtacctaaagtactggaatgcacatttaccggttttgttttacaactttgattttgtgcgggaaatgcacattttccgttttgaacttaaattttagtttttttttcggttacgtttttttttgtattttcaacaataattttactccgattgcgttttttttgtaaattaaatttttttaacgttttttcgaaatttcattatgaattactacttttttaacaaaataaattatttttaaaaaattttattgaaaaatttctatgtttgaattatgctcagatgccgccgtcaagcagataaaatattttttgtaaattatttaaattttttcatacgagggttggcgaagaattccctttttttgtcagccagcgccagactaaaatttttgaaattttcctgcattttgtgcgtttcgttgtaatgtgccttcacttttgcctgccattaacaggtaccattgagctgtttgaggagttaactgtgtgcaagacgggtgatcaactgtccgcggaccaggcccgcattaattttaataagtatgccatttattttaaaactcaagaatgataattaaacattcaaaatgagaaaatacttaatctaaattgaaggtcagtaaaaaataattgaactcaaataaatcgttcattgtttttgccattggtttaagtcaattttaattcaccagacaagtgcatgaatttaaactgcttctgcataaatataaaactattagaaaagttgaaaaagaaacatgattcaatcaaaattaagaaatgaaggtcagtaaaaaatataattaaatataaaagaaaaaaataaataaagcaattcatttttcaatgaaattgattaagctcacgaaatgggttaagaaaaatattgttaaaattttacaagttcatttaaatttatatttatattatgtaataaatataaaaacgaaaaattaaacctaaagaatcggcctgaaaatttacataaaaatgcagctctatgaaatgaaaagttttctaaaatttattattttattttcttgacaagaaataattttatttttttaattacagccccctttcttcgggattcaggaggttgtactaaaccttgaaattgtgagctacgattgaatagaaaatgtaatttggatttgcaatttttattttttattaaatgttttttaagtcaattttttca

SEQ ID NO: 74198 - DNA, 5289 bp, Heterodera glycines
atgccttcaaataaacgaaatttgagagcgaaaaggcaagagcggtaccagcggcagatggagcaatctgtcagcccagatcgctcacccgtcccagacggaagtgcagatgagaatggggtggcatcacacccgggcaccaccacgcccaatattggtgctttgcaattaagcaccccggcctcttccattggaagtaaaagacggagtatgcctccgaaagccggagcggagccattcagggcttcgcaaaacagtgtgtcatccgttggcacacaaattgcatcggccactcaaaatgatgagtcatcgcctcgcaacaaaaaagggaagatcgacgattttgatcgacccatatctgctcttgaggcaattgctttgacaccggtttccacgcaaaggagtggagggcggccggctaagaaaagaggtggcccaggcaggggcaaagctaatgattccatgggcgaaagctcttcaatggatcagagctctgaagctggcataaatgcggcggttttgcccaatgtgcctgaaaaaataaatttcagcacagtgcaaattaatttcgcaaccacgcggaatttagcctgtaaaatttggaaatggggagcaactgctctttacgaatgcgatgcaagaaggtcaggcccaagattcattgaaacgtgctggaatgatctggcacagtttctgaatgacgcctttattgtcgaatatttggcatacttggcaagcatatcacagcgaaaagtggtcgttgttgatccagctgtgtggcaaatgggcattgaccgtgtcattgaatataaaaatatgacatttgggtatgaccccaatgtcccggcagaagtcatacttttgccattgcatttccctggacattggactctcattgtccatgatgttcagtgcggtactcattttgccgactctttgcctaccccatatggcagattggatgtgcaactgacggacaaaattataaagatcatttctgacattttgccgtcaacagtgttgaccgggatttttaatgccgtaaatctgacggtccaacacgatggaaatagctgcgggtactttgtgtgcctgtatgctgaatcctggcttatgaacaaccgcacatttgttctgccagatttatccatcaattatgaaaaaaagcgcattttgtggcacatcaatgagctgtatggctctgataatgtgccataccatccgagggagggggtaccaactccttgcccaattgtctatctacatgcggatgaggtgcagtcgacatccaaggccgctgagccaatggaattagatgagccggatgacataatgatcatcgaaccacagacaagtggaaaggcagctaatgcaattctcacccaatgccaagtggcaggtgaaaaccaagctgacacgcttggtttggtgtcggaatcttgcgttccgcaagagccaattgcgcaggctgacgatgcaatatttgtcagacctaagacgcctccaaggcgatcagtgcgcataggtagacggcaatcagcttcgattagccgttcttcttcacctgcaccgaagcgtcgcacatcggaaaatgtacctggacaagttacaccgctcactaaacggtgtcaccttgtgcacaagggttggtgctgtgctgccgcagcagcaaagcattatccagaatacacagattctggtaggcttggcgaaaaaaagtgctctcattgtggagcactactcttcccgcatgagaacagcagcctttgctgtcgacagggaagagttgttttaccaaagcttaacccacatccaaaagagcttgcaaagctccttgtggacgaaaaccaatcccgtgaagggaaggagtttgtgcgacatatgtcgcgttacaacaatttgctccaatttgcgagtgtttcggctggcaataagccatgtccggcaggcggaccaatggcagtaattctcaatggagagttccatcgccgcataagcagtatgcaggctggcacaacccagattcctggcttcggtcagttgtacattctggacccagtcgaagccatggagcaacgacggaaaaatcccacattcacgggtgaaaaaatcacaaacgaagaagagtttgtgcaaggtcatcaacttaatgataagacccttgagatcttggagcaaatgatccaagcgcatcatcctgctgcgcaagcatataagcaggcgcatgagcagctcactgagcttctccaacaacaaaatcaggaagagcttcgtttcttccgtatgactttgttgaatgagcgcagagctccagctggcctcaaagacccaaaattgcacccacaccaaataatcaccccttctacgggtgaagggatgttcgctattcatgcggaccctacgggtgcacctccgcccaaaggaatttgggtagagaacaaacaagggcaattaaatgaaattgctcctttcagtccgtggactgacagcctaacgtacccattaatcaaaccattgggagatgatggatacacaactggcattaaatatgctaagccatcatcgcgtaagcgaaaaggtgctcagaatgcatctggcctatttgactctgaagccgagtcagataatgagtcgtgcgagactcagtcaattgcatcatcagatgctgggtcagtcgcagactcagatgctgaatctgtagcttctgcttcatcagcgtatggacgcattgacaaatctaaaagatttatctcattgcgagattactgcaagtatcgtctcgccataagggacgaaaatgtggagttgaagtaccaccacattctttcatgtggtggaggacttggccaacgctggatccttgatcaggctgcaaaaattgattggcaagtcgccacatttttgcgcagaccagacatggacctgcggatcagcactccaaaaaatttgctgcagtatttggtcaaccaatacaacaggcagcaagcacggcaaaaccccaatgcccaacagaaaactgttgatgacattggcagtgttgttcggctgtccgagcacaacgtaaattctctccaatattggaagaaaatgtatgaggattgcaacaccgtttttgcacggtgccatgacgcgaaaaaggcgcgtctcttcatcacattcacgaacaacagggaatggcctgagttcaaagagaatatatataaaaatggtcaagtatttactgaccgttttgacatgtggatgcgtgtctggaccagcaacatcgccgagttccgagaagaactttatgagaaaaagttctttggaacaatccttggatatggtgaatccatggagttccaaggtcgaggaggcccacacgctcacattgttgcccaaactgacctggacgcagtaccacatgtcattcaggaatacatatgggcgcacattccatctttgcccgataaagatgacgacacgcccattgcgaaaattcatcgcgaaatccgcgaaacaatgcatatgcaactgcacagatgcagtgacagttggtgtggtcctagcgacccaatttacgggcggtgcaagaaggggttcccagccccttactcaaaatgtactgttttacgcccggataggcccgcgatgtatttccggccttcaccatctgatggtggtgcccaattagaggtaaacggcctaatatacgacaactcacatgtcgtgccgtataatccttatgttctgctgcgttaccgagtacaccataatgtactgtttgcatatggtaacaaagcgaatattaagtacgcactcaagtacccgtttaaagggccaggacattgttatgtcgagtgcaaagaagagtccggcaataaaatcggaattgacgagccggctcaatatgccaagatgaacttccgtggtgcaacggaagcatatgccattgttcattcaatgccatttgcccgtctttcgcatcatgttgtcaaattggcaattcatttgccaaaccaacagcccattgtatatagggcattccagctggtgagcaaagctcaacaaatccagcaaggcgaactgccagaaacgcagtgttcagcatattggaaacaatggcaaaatgagtggaagaatgacccaaagtttaaggacattctttttgaaaaagtcccagagcagttccgatgggcaaaggacaaatgggtcctgtacaaaaggcagcaaataaaaaggccacctatcggccgaattgttcctgtacccccatcggacccggaaaggttcgcgctctattcacttatgcgtcactttcctggagatccagatcatcttaagatggttaatgggttgctttgtacctcattcactgaggctgcaataatgcatggtcttcttgaagacggcaaaatttgggacaaaactctggcggaggcagctctgtcgcgctggccagatcagatgagatggctttttgtgagcatcatggtctatggccagccgagtaatgccatagaattgtggaacaagtacaaagaccaaatgtacaatccgcaaggcattattactccggcacagcataaagcagcagagcttgaagccctagccgaccttgattggcggctgcacagctgctttaacttaagctgtgtgcattttggcctgccagacccgccaaactcaattgccaaaaatactgacgcggcaattgaagagtttttctttggcgatgatgatttgaatttgcctccagggcaaccaaatcttcgtccacagccaaatgcccctccgtcacttaacagcgaccaacagaaggtctttgatgctgttttgttggcaatacagtcgaaccctagggatccgactgtcccccgccgtttcttcatatacggcgatggaggtacaggaaagacattcctgtttggccaaattattaggcgcttgcgaaaggccccatacacctacaaagtgcttgccacggcatccactgggtgtgcagccattttgctgccatatgggaaaacagcccattccacgtttcgtctgggtagagaagtgtcattagacaagctcccaagcattccgctggagagcttctttgcccgtcggattcgtgaggcccaactcatcatcattgatgagatcaccatgcttcacaacacggtgattgaggtcatcgaccgagtgtgcaaagagatggcaattcgccagcacaaggatctcctcttcggagggaaaacagtcattttcagcggtgacttcaaacagtcgctgccggtcgtgcctcatgaaggcttaaccgctcag

SEQ ID NO: 74199 - DNA, 734 bp, Heterodera glycines
atgactctccagtggaccgtggttgcgttcattctttacgcagaaatagccacaattattgtgcttcttttgccatgggttcggccgacaatgtatttattgaaaatgttcaaaatacaaattcagtttaattttaggtggaaaaaagtgtttaacagtcgcgttgtgcacaaactcaaacagttttccaatgtttacgcctacgctttcatttttgtgctcattcttttgttcgttggtaagtttactccttttggctcaagtacagtttatgtgtccaatcttttttacatatttcagatgccacccgtgaggtgcgtaagtacagccacgtggacacgactagagagatggtgggacgagtggccgaggcggacgccgtcgttcacatgcgtctcttcaggtgactgattcattctcactttggcacggcagcaaatgttttccttttagagctcagcgaaacctttatttgagtggtttttctctgcttatggcactgtttgtgacggctttattaatttgaccactaataaactttcattatcaggattatcagtcgcatcgtcactttgctcgcccgttgtgcccacctcgaattggctgctgaggcggcgatgaaacaggcggaaggggcgggcaaagcggcgcaaactctgctcggaaaagtaaaattgaaacaaaaatggacggataatgacgaaaatttcgactggtttaggagggcgatgtga

SEQ ID NO: 74200 - DNA, 494 bp, Heterodera glycines
atggtgcgcaaaaaacaaaagctaataactgacgattgtgctccaagcacttcaaatgatcagcgcacgaatgacgggttcaaagctcccggtcaaaaaagcggtcaattgattgaaacggttcaaagctccgtacaaaagcggtctgaaacaatacataattcgattgaattacaaagcaaagaaaaaagtacagaaagacgttgtttgaaaaggaaacgattgcaaatggaagaagttatagatttggatgatttgcctgatgaatttttctctcctagcatatcaaatgaaaaaattaaggaatacgatagaaatcgcaaaatatcccgctttcaaatgaatgaagaacagagaaaattagagagagagttgaatttaacagttgtgcaatctagacgatttttttatatctcagtgcttaactattgcctttttgtatgataactggtagatattgggagtgaaaaaaagtttgtttgtgactatttaca

SEQ ID NO: 74201 - DNA, 707 bp, Heterodera glycines
ttccggttctcgctttggtgctatgttggaccaactcactgatcgcctcacttttcttggtgttctgatgaccctttgccattactacccaacaaaaatgctcttctttcaatttgttgcttttttgttcgtttttacaattttaatattttcaatacaatcagggtcatttcttttagcattacccttttttaaaaagccgtttacacctttggatatgttttaggatctccaacaaaataaaaaatttgaggtgctaattatatgaccatggctgttattagcctattcgataattattaatttattcaattcagagacatcgccgcacattggatgcatctccacgccactgatctaaccggaaaagagacgcacaaagggtcgaagaatcccattttgaacgtttattatacatcgaagtcagttgaccggtagattacgttcgtttgttatccatttccttcaggacatgtttgttttggatgtgctttggcaacgagttattctacggattgctatttgtcaaccatttttgggctggccctgggcttttaggaattcattttgtgcctctgttggcctgcgttgtctgcccggtcgcccttgctaagtcagcgatcaatgtgcttcatttagtgacggctagtcaaactgtggctgaacacgatcgagaaaaacgcggctatttggtgcaacagtcggta

SEQ ID NO: 74202 - DNA, 3118 bp, Heterodera glycines
atgagcgctaattctgttcctcactctcgcgggtggtcgctcaatagccgaacattggccattgccactgccttgggtttaggcagtgcgcttatttattgggtgtgttttctttttccttctgttttcttattttataatttttagttttaccgttgtcggaaccgaaacgattgtgagcagaaatcggtgtccattctccaaaaggctgaaaagaagaaagcccagggtgttgaagcatatcggcgcaaagactttaaggaggcaattcgtttgtttggcgatgccattgacgaactgcgaaaagtcggcaaggaatttagcgaccaagtggatgaagcgaaaatcggagaacttatgtctttgtgcgagaacaacaatggtgggttaaaaggcttaatgtatcaaattttttatttttttggggcgctgcaattagcccaatcgataatactggagaatctgtgctccacaaaaaatattctgttatatgttatgtcagatttgcaagagtagcaatctttattagccaaacaatgatacgacataaacattgagatgatcatagaacaatcgtacaaaacataaataatctgatttactagccaaacaatgatttttatggagctcagattctccagtattaccgcctaattaaatcaaatttttttattgaatcgtttgagcttcttaacctatgccgtttagctgcctgcttcgacgagttggttggttgacttgcacttttaaatggatcaaaacgcgacgatcattaattctccgcatagggaaacactgaaaaatgtttggaccattgcaatttggcacttcaaattaaaccgaactacgaaaaagcgatgagacgtcgcgcgagaacgcacttcaaattgggacaaaatgataaggcaattaatggtcagtgtgaattgggcgacttttgtttgcatttccaataaaacttcctcatttaattggaatttcagactatcttgacttgaccttcatggaaaatgtaagcaaagaaagccggaacacttaccatgttgagcttgaccgtgtcgctgaggccaccatcagcccattgctcaatgaaatcattcaggtgacggacagagtttccactaatattcttctgcttattttaaggataagattgggaaacccatgaaaattccacaaatgatggtctgtgaatggatgattagtactgtgaccaacgacccgttgttggcgagaatgaacaaattgacgaacgatttaaatgaggataaaactcgatggattagtgctttggacgatgctttgttgacgctcaaacgaggagaatacgagtgagttattattgtaagcatttgtattcaaaaaacacctcctttcacttttcacagtgaaattgcttctttggcttttgcaattgtgaatgacgaaactcatgaaattgtggaccgtatattggcagtgcttttggcggcgcgtttcttgttctatcaaacgctgaaacaacaagcaatggaaacgatgcaaaaatttgagcatttttgggacaaacttggtgaactcgactttaaattttttttgtatttcgtcgtcttgcagacgaagcgcagaaattggcgcacaaggatatccatgttgcacacataactttacaggtccgtaaaggattttcccttctgaaatgaaataattatttttgagaaaaattataaataaaaaaaatatatctattaataaatggagcctcgcctatttgtccattttgattttttgttgtttatcgatgtttatacattcagttttttaggtgactttgactgatttggtcgagagcgaatcgttgagcaatgaggagaattacaaaattgatgagacagctaaacaacgctgccaccaattggttgaggagggacttcgaataaaccctaaaaatgtcgacccactggtaaattttgaaaaacctaatctctctaaatcactttccgcatattttcggtcacttttggtgttcaacttattcattatgatcaacatgagaattccttagtcatttttcaacgtgctaaaaaacttgatcagaagaatccattcattcggtgcgttttgcttttcacttacaattggtgtcctacaaaaataggggattcgttcgcaaaggaatgaaattcttttgattcaaatgcatttcttcttttatagttattacgaaatcaatgccagcctttcaattgccattcgtcagcaaacttttcttgacattcaaaatcagatgtttatgctacaacaaattttgacggattcggaaaatgttccgatttttgcgtttatatttctctctaaggtattttttaatatattaacaaattaaagaatatttaagttcgcaatgcttttgcacaacaatcaaatcgtgctcgaagcgtgcaaaaaaacgcttgagaagatgcccaattgcgcctacgctatttatctcttggggtaatttcctaagaatcggcattttatttaaaatttattcatgtacagccagttaacataaagggtagggaaatgaaaaattgtttcctttttttgcgcgagtcggctttaccctcccccagccgaattcctgggaccgtccctgccccctcccctcggtttctcaagaaaatcccatgaaattcgtttacaattagtgaattttttccctttttatttatgttttcctgaaaatttattacgaaatatgtctttgaccccctccccactcggatttttctctatttcatgaatgtttaatttctttagcctcgtggatatgtcagaccgcttggatttatcacaagtcgtgcagagtatggaaaatgcaatgcgaaaagcaattgaggcggacccgaattattgggagccgtacagaataatgggcaaaatatgcggagaaaagtaaattacaaaaacattttattttagtaaataatacataacggttctaacctaaaattgttatttttgtgggtttttgttaaatatcaaaccgatcaaaacttggcaaaattctagcaaaaaataatcaacattttgatctaaaacattaggagtcgagtcagacgaccgacccaagttgattcaaataaccaataaa

SEQ ID NO: 74203 - DNA, 362 bp, Heterodera glycines
atggctgaaaggtgcgttctttcttggggtattggaattgttttgcgtttgttttagcgtcggaatcaaacgctgtgcgcctttgggtttgcgtgagggttctgtcgacaatgagactgtacgtcttccgccctatgactttgtgcccgtcagcgttggttgtcctccgcccgtccgtccgagtgatgagaatgtttttttgttctacccaaacctgctcggttatgtgcgtattttgctcgcttttggcgctctttttgcgatgtcttacgaggaaaagccatggagcgccgcactgctatacttcgctagtgcacttttagatgcttttgacggatatttggcccggaaatttaaccaaa

SEQ ID NO: 74204 - DNA, 229 bp, Heterodera glycines
agcaccatcgcccgacgccgcccaagtgcaaagcgatgagcgattttctgcctttttcgtggacagtgcttttgccattgatcggacttcttcgcattacaaaggcggaaatttggcggacagacaagcgaaagaaaggcaaaagcgacgtcagcttaaaaacaatacagacgcagattagactctgttaacagatttgtcatcaattttcactgatttaaataaatac

SEQ ID NO: 74205 - DNA, 649 bp, Heterodera glycines
ggaaccaacttttctactagtcagtatgaaacggcggatgttggtgttggaaatcagaaaagcatttgtttttttgttaatgctgatactcccactattcgttcgtatatgtcttcgtttcggagacatcaaaaagaggagactttgcgcaaggaatgggggaaaaagcgagagtcaattgttaaggtccaatacatatacatattttagcgctaataatatatattttgttttcaaagactttaaaatgtttctaaaagatcatttaaactattttcatatcaaaaatacaaaatccttgtagacattcctgaattttggactttttgttctaatttatgtctggatttagtaattggtcgaaatgtacgtgaaattcctgatcggctaccccggtctctggaaattgttttaaggatttaaaattttattttaaatattaggacaattttttgcgaaacaaaagatgtcctcttttatttatttttctaatttaccttttcgtttttaagttttataaaaaagaaaggaagtctgcactccgatatttaaagaaacgggcacaagaaaagcgataattttatcagaccgatttttgtccgtgtacatgttccatgcgaggtttaagaagccacgactaaattttata

SEQ ID NO: 74206 - DNA, 445 bp, Heterodera glycines
atggtaaacagcggaatgttttacgacgaattgggcctgcgcgaatttactgtaaaaatcttacttctctatgtcttaaaacaattcctttttgaggttgccccaccaggaccggcactgaaaaacaaattggacaaatttgtggaccggaaattgaatgaatgtgtggcacgagtggagaaattagtgaataacaaaaaggttaaattgagtctaataaaacattaaattgtggatggtgcaaatgatttcaggacgaagtgaaagacctggccgagcatttggaggcaagcgacggttggcacttgaacgaggaacagatccatcaattcttcaaacgcagaaacgcaaatgcgtccccatgaagaagcaaaagaaatttatttcacataaacattacaaaaacaaaaaatttgtactttcttaacccttcccctgctgaaaa

SEQ ID NO: 74207 - DNA, 236 bp, Heterodera glycines
atgaaggaacgaacagcaaaaaagaagcaaattgacgttgaagatgatagtcgttttatggatttggcgaaaaatccaatgttcagagagatgcgcaagaaggagcacaaggttcaaatcgatgacaaacacaaagttatcttttgattaagcccgtttatacaattcaaaatttattttaggaaccgtttagttttcttgcttcaattggtcgggtttatacaagtgatcacgag

SEQ ID NO: 74208 - DNA, 1415 bp, Heterodera glycines
atggaggtgatgcgcggcatctcctgggacgaggtgtgcgaactgcgtaaaaagcaccgcaaacggggcgacgacttctacacgtccaatgtcgggttgaacggatgcgtaaagcacagcattgcgttcatcttcgggctgggcattgacaacgccaacgggtgaggaggcggggaatttttgacgaaatgaattatgcaacaatctgctactttgccgagatcgggacaggaattcatggttttttttaattccgggttttggaaatgaattgccggtcaatgcattccagtcccgccggtttagttctccttttcaattgcagtgatcaccacctcccggccggcttgggcatgtcgcgcatgtactgcatcaacaagccgaacaccggccgaagtccgcgctacgaaacgatggacgagttggcacagcggttcaccgcagtgcaaaacttggcacatgcagaaaagttgtggaaggagcagtttaacggtgagaacagggcaaggaaaaaggcgaatgatggggagaagcactatttttgatgggtcttaaaatttggggtcgaacattttcagttttcatgagtcttaaaatgacactcgctttccatattagaatttccgacccacaatgacatttaaaaatggatgttggcacttttcagcatgggagcaaatgtgccaccaccgtttcttttacggcaaatgttcaacggaggtgaaaggcactttctgtgagattggacgtcgcatgcgcacttattttgtgctgtccggctcactgatttgcatgtggcccgagctggagcaaattttgtccaccgacgggaagggcggcaagcgatcactccgtcgacggatgcaaattgtacgcgtgcggacggacagcaaacaacgcattgttggtgcgtatgagtggccatttttcgtataaaccagaattgggcttacaaatagacagtttgatcgctttacaaatacttttcaataattagataaacgtaagggtgtgcactacgttccccccccccccccaaaaaaaatttttttaaagaaattttttgagaatttttatggtcaattactaagatttttcaaaaaattattacttacactttaacctgcaataggaggggttcgcaaaaaataaatcatagccatcacaagattcaaatttcattgacgaaattgtttttaaatatatgggtagggagggcgcacggtgatggttttgtacgttctggggatggcgggtgcctgcttacaaaaaatttgttgcgccatggaattctactttttcaagtttggctcgacgccattcttggttgtaccatccgtgcaccaaatctcggccctcacgaactgttcttcatccaatgcaaacggagggccgaagcgacggcgggcaaatga

SEQ ID NO: 74209 - DNA, 87 bp, Heterodera glycines
acaaatgacttaatcggtggagcaacaacagctgttccgaatgaacatgttcgccttccaacttgacgaggcggccgatgtgttcag

SEQ ID NO: 74210 - DNA, 85 bp, Heterodera glycines
aacattatggaatttttgattggtgtttctcgaaattaccagatggatgcttagaattttatgaataaatttttgggatgttaaa

SEQ ID NO: 74211 - DNA, 2716 bp, Heterodera glycines
cgattgggcccctccgattgggccacaagggtctgtcacattttccattccatactgtcaaaaataatttaacatcccaaaaatttattcataaaattctaagcatccatctggtaatttcgagaaacaccaatcaaaaattccataatgttcgccttcggcacttcaattattttccatcgtgatattaatatattaaataataagctgaattaatgttattttagttaggcaatcaagaaatgggaaaatataaaaaattataaaacaaatatgaagccaaatatatttacaaatatgcaatgaaacacgcaaacaataacatttgacaatataactttttttattctgactccccctcccctcccttgtccatgtagtgactgctctatggggcccaatcgacggggcccaaccgacccggtccgaatacccatgggttgtctttttcaaaaaaaaaattctctgtaaaattttgtaaatttattgtcaatttttagaaaatttgtaaattttctcctttacattccccattatttttttaattctttacatttgtgcaatttttttcttttacactttttctttaaatttcctggtggcgtttaagaaaaagaaaatccaaggaattttgatttattttttgccacccccccccgcccttccaattttatgtcattttattgtcatttttcagaaaacgctgttggaaaaggaactcgaagcggtcggaattcggctcaacaaacggccgccaaacatttatttcaaaaagaaaaatgggggcggactgaaattcactcatacagtgccgttgacacattgccacgagaaactgatccaaacggtgctgcacgaatacaaaatttttcatacaaaatatttaaaaccaaaatgccaagcttttatttgtcctattaaatgaattgttttgaggccattaaggatttattcaaaggtatttagtgatgtttatgttaccatcattctattagtttttattctttgtttgtttttgtaaattttaaaaacaccttttacttccataaaatttaaatggcggtttggtgttgacatcccaaaaagagaaattctccatgtttcagcattgacgaactgatcgacgtgatccagggcaaccgggtgtacatcccctgcctacacatatacaacaaaattgaccaaataagcctcgaggaggtggaacgactcgcccggctgccgcacagcattgtgatcagttgcgagctgagcctgaacctggacgacatgttggagaaggtgtgtgcaaactgcacaaatgtcaccggactgcaattttctcccagtttttttgagaccgaaaatgataaacatgggctttttgttcggcattaaaggacaactgatcctcacattttttccatttgttaaatttccattattttctcctttaatcctttggttggtgtccagacatttgcgtcccggacatttgcggtcccagccaaatcggacatttgcggcccggacatttgccattccatccatttgaattgattttggaagataaatatgtttaagagatggcaggacgttgagcgacgcaacaattacattttcgacatctatcgaaagcaacaaaatgtgatgaaggaacccgagagcggagtgagttttatcctttcaataaattgcattttgttgaaccgaaattgaatcagatccaaaaattctgaagagaaaatgctcgaaaacatcaccgaagaggacatgcgcacctacctggaaggcgtcggcatgttgcagcagcagccgggcgggcgcggtttcgccttcgagcgcgacacagtgacaattcccaaattcctgaaccgcttgctcggcctgccggtctacgcgcagaacaaactgttccagtacttcagcgacatttgcgcggagctgatcaaagtggccaaagtggacggcactttcgacatgggcattttgggtgagtttttgaagtttttttccaaaaaaatgccaacattattttgtgccatagatatcggaatggacaatgatcgggtgcacaagaaagagtaccgtcagtttcgcggtgttggcaaaagtggtgactttgtggtggaaatgcacaaaatggtggtgatgcgcggcatctcctgggacgaggtgtgcgaactacgcaaaaagcacctcaaacggggcgacggcttctacacgtccaatatcgggctgaacgaatgcgtaaagcacagcattgcgttcatcttcgggctgggcattgacaacgccaacgggtgagggggcggggaatttttgacgaaacgaattatgcaactatctgctactttgccaagatcgggacaggaattcatgggtttttttttaattccgggtttcagggacggtcccaggattttggcttgggggggggcacctccccccgggcgacgacctttttttttttttgcttttcacacccgttttttatgtggcgcggtttttgcaaaaaaatttttggggtacagggggtccggcggtgccgataggcgccgccggaaaaatttttgcggttttaaatgcggtttgttaatagattttgtccaaaaaatgaccaaattttgtgattttgagccatttttagcagattttcattaaaaatttgtggattttttgaaagatttaacaacatttcttggaaaatttgagtgaggccagtatctgcggggtg

SEQ ID NO: 74212 - DNA, 1276 bp, Heterodera glycines
tttccagttgggaggagggggatgactcttccaaataaattagcccgaacgattgggtttttagccattctcccgtaaatttgacactgttcaattgcgttttgtcaggtccgccgtcctcggtcaggttttacgcctccatctgtcttctgctcgttggccatgcgttgcatgggcaccgactggcccttctccgccgtttgggccccgcttggctaggccgagtccgcgaacagttggccgactgccgagccatggacgaggcggacaaagcggcacaacagcagcagaatttcccatcctttggaaagtcaacgttcctttgaaccgtcacaacaacagaggcaatgttttttgtgaacgcttttgcagaaaatatattttttggttttacaaatcatgcttttaacaaattttaattttcgcttccaaattgttgtgtaaaattccggtattatagtttttgacttctttttgttttcagagtgttgctgcctcgtacgaattcaccactttgacatgtaatttcattttgggctaattcaatgtgaaatgtttcatttttcctgttattttaggcattcctggtgtgattgaggtaggcgtttattttgctgcaatttgtccacaaacgctttcgccagtacgaaggagcgaacatccaactgctcgatttgccgggtatcattgagggggcagcgcagggcaaaggtcagcagttgagaaccatttttaaaaaacaattttggcatttcttttcaggccgaggaggacaagtgatctccgtggcgaagactgccgacctcattctgatgatgttggacgctaccaagggggagatccaagtaaacacttggcttttttgtaccaatttgcatatgtcattcaacaagcccgtagccaggaaaaattttcggggggggggaaagagaggggtccggtccgaagacctttttttttcaaatttatccgtaattttttttcgctgaataaaattgataaaagttgtttacgatctgcaaataactgcaattttccacttgtagacttttctattgtttggtcgtcggcggcggctgcttaaaaaaaactttttcccgctactgggtaaaaactccactttttcactaaaaaaggacccaattttggccgttttacggaaaatttgagtgctatttgttacgaaaattgtctataaaatttttaaattttcgtttggggggggggaattcgaaaaaattttcttatttggctgaaaaattttttaaaaattttc

SEQ ID NO: 74213 - DNA, 686 bp, Heterodera glycines
atgagcgagaactttgatgtaggacgggggaacgtcccagaggttttttgattttttttcattttctacttaattggtatttccatgcattacaatttttgggaggacagggtgagctgtacccactcactttagccctctgcccacgtccccatggttacgccatagtttcttctactgggacccaattcagcaatggtttcaggcacgctaaatcgaatctgacagcttcgatcaatttcggaccccggacccgaatttgaaccaaaagtcgaagatctttttttcgtccaaatacggcttaaatacaggaaaacaaacttagggccatcatttcctgcgataaaaactatttttaagtcgtttttagatgaaaaatgcgaaattctagaatttaaattttcgactttttgttcaaattctgatccggggtatgagattgatcaaaaagtgtgtcaattcgtgtctaacttgcccgaaaaccaccatagaaagtgcttttagaatttttaaattttttttgaagtgttattgatcggctcccatccctgaactgtactttctcttaaaaaaaagtttttaatgtatgtgtaaatctgcaggctcgaactgaacaacccgttcccggtggaagtgccgctctcgaaggtgccagcgtagccggtaatcattttttcgttacctag

SEQ ID NO: 74214 - DNA, 573 bp, Heterodera glycines
atgcgcttttctggaagtttatattttcaacgaattgtaaaaattatttggttaaaaaaatttgtggcaagtttttctcgaacggtctgtaaattggcaattttacgaaatgcccatgttgacaattcttacgaaacgacctaacaaacacccttttgaatttgcctaaatttttgaaatttctattaccatatttggaatttttcagagaattcgtgaaaaaaattctaaaattttcccacggcagcgcctaaggtgtgaagaatttcaatttaaaaataaatttttcgtccacctttgtgagcatgaccattgtgttggagcccaactcccacacggttcgccacatttcgttggatgcctgcttggaccgtaccgattgggtaacgacataggctttctcgcgtatccaactctttaattgatcatttacataattaatttgtattttaaatttaaaatatttaaaaaaaaatttttttttttgaatatttaaaatttttaataataatttgattttaaacaaattaactgttttttggactgatttttaatggtgaagttttcattaaa

SEQ ID NO: 74215 - DNA, 2672 bp, Heterodera glycines; identical to SEQ ID NO: 1522
  unsure (1)..(2672): unsure at all n locations

SEQ ID NO: 74216 - DNA, 885 bp, Heterodera glycines
atggtggaggtcgcagcggtgcctttctggcgctggatgccaatttggaactattgcagcgaacaggacagttggacgtgtacgagtacggcaggacgttggccaactcacggcaacatttgatcgacacggtggaccagtacatattcatctacgacggtgggcactgaatatgggctcagatcagttcaactgatccggaaagacgaattggttcctaaactcaattagtttgatcggattagtttctaaattcaatcagtccattatcatatttaatcacaaattttggtcgtcaaaaataagaccaaagaaaatcagcgatgagcttgatggaaattctatcgctaaaatcgaaatttaagaaataatattttttttccttttattatatttttattttaggtttaaaagaattttttaggtttctttctttttatttatttatttttttaagaatttaataaataaaagaaaatttaagtaaaatttatttactaagtttttttatttaaataaaacaaaaatttaaataaatcggtcagtccattatcatttaatcagaagagatcttggtcgccaaaaaaagaccaaagataatcagcgatgaatttgatggaaatttctatcgctaaatcgatcatgatgaagcctgttcaagaaatagtaaatcagaatggataccatctgctgagcttaatccaacagaaaagaccaattaaactgtttttttcagttttatgcgaggccgtcctctgcaacattcagcccattggcatgcatcagctgaagaaccgcagcggaatgtacaaagcgcgcaaagaccgcgagctgatggaggtgcaggacagccacgagaacaaggcgaacaccatgaaatattaa

SEQ ID NO: 74217 - DNA, 7010 bp, Heterodera glycines; identical to SEQ ID NO: 1524

SEQ ID NO: 74218 - DNA, 87 bp, Heterodera glycines
atgttgaccgactaccgtatatgctctaattatagcccagtctctattaataccgcagtctccaattatcccctgtattctgaggag

SEQ ID NO: 74219 - DNA, 371 bp, Heterodera glycines
atggcagatcaatttgtacaacccgaaactgcggaggagcaacaagtgaaagctaagaagccacgcgttgatgagcgatttctttggaaaatcacgcggggccaatttgtactagcgattcggctgtgttcaggttaatcaaatttttcgaccaaattaattgacaactttcagaggactggaacaatttatttcacaacaaagacaagacacgtcggctggaagatgggcgagtggcgattggattcgagatgtgtgaagaatgtgccagaatcaattgctgtgtcagtgatatgattgccgatcaaaagaagaagccaaaaaccaccgaataattcatcaaatttttcgcattagttgtagccaataaa

SEQ ID NO: 74220 - DNA, 857 bp, Heterodera glycines
gtataaaagccccggcaatttgtcagctatgtctcatttgttctgctacaatggtccttgccatcgaattttgtgcccaaattctcggctgttcccctaaatcactccgcgacaagctcaatcatcccgaggaccgagtgaaggcactgaaggagctggtcggaaaaaaggttcggacgacatacaaggaccggaatggaatgcagaaaacattttttgtcgacggaatatcggacaagggagcggctttgaccccggcgtatggcagactcagacaaccgtacaacatcaacattgctgcccatttctacgctcgccaccgtatcaagctgcatctcccgtacgtgccatgtgttgtggagaaatactccgggagtggcgaagacagatactacccaatggagctactcgaaattgtggacgaggactacaccatcaaagagcgatggcttggcaaactgtttaccgaaattgaggaaattcctgtcaaacgccttggtcgagttgaggaagtcgaagaaattgacgacaacgatgatgatgatggtggtcgctacgaatgcagtcaaccgtcttacgtttattggtaaacacattaattttccttaattatgcacttttctacctaaaaacgacaaattcttttttaactttatttataaaaattgtatcttccactccttaataatttacaaattgtgtcttcttgctcttaattctgcacttttctacctaaaaatgacgttcccaattgcttaataatttacaaattgtatcttccattgcttaattctgcatgtattttaactccttaattatgtacttttctacctaaaaacgacaagttcgtgcacata

SEQ ID NO: 74221 - DNA, 381 bp, Heterodera glycines
atgtcagaagatggccaaattacattgggactcgacgtgttcgagtgctgtccaccaactgcccctccgttcccatggccatgggttcccgtgactattcgggccgagtctaaggactccaatgaaagagttgactgcgtgtccccctccacgttgtacatcctcaactcgtcgtatggccccgtgttcgggtcggtctccaagtcgttcacttgtgcattcagtccatcatctgttgaagaatgttgtgcagaattggtcgtcccgtcccttcttcgttccctaccaatttgcctccctcccctgggggtacactttggtggtgcccccgccgagtccgtttgtgtccaatggcatcaccggcttcctcaggttggatag

SEQ ID NO: 74222 - DNA, 469 bp, Heterodera glycines
ccattgtcctccatttttgatttctctctttctctcttcttgccatggctctctctttttcacccttttccctctttttactttctctgttttctcaattctcttttcgcgtctgtcttcttctctaactttctctcatattgctcactcttttcccttttttatcgccggaatttcttcaaaatctttcattaacattcattgaaacgccttcttcataacgtaaaatccttttgcttttcatttattatttatacatatatttttttatttaattttgaattttttcacttttttattttattaattttacattttttcattttatgatttatttgtccgatttgttgtcctttcccttttctgccaatcttcacacatttccattcattttgtctttttcattgcattttgtgcatttggttgtgtttgataagctaaagcttaaaaatgaataaagaaatatgct

SEQ ID NO: 74223 - DNA, 810 bp, Heterodera glycines
atggcactccaccgcaaattcactttggccaatgccaatgccattgagacggacgcggaaaagagccgaccgaaagtgtgccaattgcgccaattggaaagcatagaaccgacgcattggaataaatgaaaaaaggataattaaaaatcgaatgcctaaaaattaaaacaaagaaaaaaggttggccttcgcttcggaatccatcccaacacgaccatttttcctttttttctctccccatttgggttttgaaaaagaaaggagccgtagggtcaagaactttgattggaattgaatgaccaaatttgcattttgagtcatttttacggctgtgccgccgttaaacgaattgttcagaaaaatgacaatttttctaaaattattcgataagaaaaataagcaaaacttagaaataagttcagttgtagccctaattatttttattttaagcttaaaagatttttcatttattggaatttttattttattaatagaatttttgtttttggtttagaagttatcattaagaaatttgagatcatttgaactataaatttcatttatttttaaaaatctctgatttattttagataaccgaaaatttggaaaaaattcaaaagattacttttgaagcaaaaaagttgcgaagaaagagggcatttttcaacagaaccagtcttatttatggtgctgcttttggggatttgtgtgaaaagacggagacaaacaaagatttatggcctttgtcataaatattttataaactgaaaatggccaaatatatttttattcgaaggtttttcttttaaa

SEQ ID NO: 74224 - DNA, 220 bp, Heterodera glycines
ataaccgaaaatttggaaaaaattcaaaagattacttttgaagcaaaaaagttgcgaagaaagagggcatttttcaacagaaccagtcttatttatggtgctgcttttggagatttgtgtgaaaagacggagacaaacaaagatttatggcctttgtcataaatattttataaactgaaaatggccaaatatatttttattcgaagttttttcttttaaa

SEQ ID NO: 74225 - DNA, 679 bp, Heterodera glycines
atgtacctcaagttccacaatgtgtacccgtgttggaatttcatcattgccgcattggccataaatgcggtggcaatgttcggaatggtcagcaacttttccgtcatttgggtgacctataggacaaagtgggtattcgctttaaaatacataattcataaaaataaaatgactattcatttgctaattaatgaacaattactcaattgatcattctaaaatgccttttttaggactctccgcggcactgccaattttctgatcgctctttgctccttcttcgatatgcttcacgagcatggccatttgctgttcctttacactgcgctatctggccaaaatttccttcccatctcttctgcggttcgcttttgctccgtttccctttttggcgttggcggaattgccgtgtccattgccttcactgggctcgatcgtcttttgtgcgtcctctttccggcattgtaaattttaaactaatttaaattcattaatttatcaaatatttttcagtccaagacgagtgaaaccgttgccctatctcagtgcgatcactttgctctgtttggcttcttccgtctgcactttgattggttactacaaaaaaaacaatgaaacgccagagtttatggtcactggcacattctccgatttagtctcggttggcatttttttgtaa

SEQ ID NO: 74226 - DNA, 1791 bp, Heterodera glycines
atggaaccacgaaaacgctcctctaacttttccattgatcatattctctccgcgcccaaaaagccacgtcaaggcttcctgatcaatgaactcttgggtgtcgtacacttccttggatcggtgcagcaaggcgaaggaacatcaaaacaggcaaaggactacgttaaaaaattggagaacagcatcgagcacatggccaaattccattacgtcaaagtcaagtcaaagttcaccattacggatttgccgagcacgcctgaggcattgttggctgggattttccaacactgcatcgacgaagcaattgttgaaagccgtgagcgaaacatcgaacctacacacctcggctgtatgatcagcagtcctctgctggaaggcggagatatcccaatcccgatacgacaaatgacaaacaacactctcgacaccattctcaaccagttcaaaaaagtggcgcagtccaaacaacagaaaaatgtatcgttatggggtgagccgtttaccgtcaccatcacgactctcgaccgtaatggactgccatccaaacgtcgtgtcaatgggggagctcgtcgccctgtcaaaacggccgttcaccaccgaattaatgaccagtgcctgattaaaattcgcaataacgacaaccacttctgccttttctacgcgctgcaggcaacaatggtcgacaaaacatgcaattggcctcgctggaagtttttcgactatgtgaacgacagaaaaggacagcagggacaacttcatcatgatgcggttgagctcatgcagcaggttaatgcaccaatggacttggatgggtacgacgcggacacttttgtgcctcacgtcgttgaccattggaacaatacgcagcgacaacaccgctttgctgtgttcatctttggatcgttgggacagtataagccgctgtacaagtacattgacaacatctacgacactccgctgctgttgtacttcaatgaggaccatttcgatggtgtccagaagcagggtggtctgttcggcaaaccgtactgtttggagtgtgaacggccatacgacaaaatgtcaacacacaacaaaacatgtaaagcgcgctgtgtgctgtgctcacgtgttggaccagcttttccatgtccatcatccaccggcttcatcaaaaagtgtaaagagtgcaacaaaaaattcaccaacaacggctgctaccagcatcatctgcagtcaggctactgcaagcggtcgaaaaaatgcaaagattgtggtgctgtttgggatgtgcacgacaacactcagaagggcagaaaaggacatgtgtgtggtgaacgcttctgtaagatgtgcaacaactaccacaacaccgagcggggatgctacatccaacccattgagcccaaggaacgcgacccctaccgcatcgtggcatttgacttggaaaccatgcagcacacgccatctgtaaagcctgagaagcgtgagcatttgccgaatttcatcgcagcacgagtcgcttgccccgactgcattgaaaatgagagctggcgagaggcatcgggaggctgtgaagtgtgcggtccaagtcgtacagtcgccttttgtcaacgccgcttcactgaaacaacagtcaacaagcaagtggtggcggaaaacccattggaagcgtttgtcagctggctgataaacgacttgcctttggcctacgacacctatgccttctctcactttggcggccgcttcgatatggtgctggtgttccgcgaattgttcaaacgcggatataacccggacatgttgcgcaaa

SEQ ID NO: 74227 - DNA, 1349 bp, Heterodera glycines
atgaaacgcaccaatttcaacaatgctcttccaatgagtgagaaaaagcccaaacttcgtcgacgcctgccggctgaattgaacagcgagctgatcagtttcgtgcctttgatctgcctatttgccaatgtgaagcggactccaattggtcctgtgtgctaccaattcgagtgttttcgtagtcgacgccaaaagaattttgaatatttggtaatttcccctttttttattttattacataaattattatagaagggtgttattgcattattcgatgtgatgtttgaggagaaaaggacaccgaagaagaagaaagtggggagactgcatctacaggaagaactgccgcatgacctcagccgaaatgagctcctgcactacctgtgctacggacgactgggaacgaatttgttcgagacttattttgtgatgagccaagcaacaaatgtaagcgaaaagttttaaatttttaataacaacacaaaatttttagtcaattgccattgggaatttgtttgggcttctgctcgattttgcaatgagctcaccaactccttggcacatgaagcgaccaatttgctgtggaattttcttccgtcaacatttgccgtggattctgcaacaaccgatgaacgtaatgctttctcatggcttttttccggaggtccgaagtgatggttttgaatttttttggctgttcaacccacacttgaaaaagtatgctgggtatgtccgaattctccctgagcttagtcaacctgacaatttgcattttttccttagcattttctaagcatttatttgatcattttattcatcattatcattacatacagatcggaatttgtcgatttttccattttctcaataaattgttgaaatgaatgaccttgtgacatatgatacacaaaaacaatacagtgtggggcacacgttgacactaattgggattgatagggacgtatattttttcttagacccatcggaaacttattcaggaatgatgacacaatgacagatggtattttttgggctaagctgtcataataaatcactggttcttccattcccttcgcataaattgcacaccaatgagaccctcccttgttatgtgggtcccggttcacaattagcgctgcgggatactgtagagtgaccggaggcggtaattgatcactggcgaagcagccccgaaagactcgcgcggtcccccggttttcgttcaagattgatgtgatttgcacgctgtccattcttcatccaaaaaatagagcaaagttgatggagaaccaggctgacaataagcatcaagtacaatgcaaacaccgcccagcaaacggcttgttgga

SEQ ID NO: 74228 - DNA, 303 bp, Heterodera glycines
  unsure (1)..(303): unsure at all n locations
attatggggagcaaaaatccaacgcagaattaaagtacaggctatagggaagctattcccgattttttcggtctccccataaatctgggcgcatcggttcggggggactgccccgaaaacaaaaaaatcgattttttcaagtgtccgtttggggtactcaaacatttatggggagcaaaaatccaacgcagaattanagtacaggctatagggaagctattcccgaaggattcggtctccccatacatctgggcgcaatcgggtcggggggactgccccgaaaacaaaaaaatcgattttttc

SEQ ID NO: 74229 - DNA, 383 bp, Heterodera glycines
atgaaccgacggtaaagaattttaaaagtcaaaattcatcatttatttaactaaactgttttccataatttcagttggatttgcaacgacgtttggatggacattttcccatcctttgaccgtcctcaacttggcctcaaaatggcattgctttcgccacgtttcaatgcgttggtggacaaacatttcaatggcaaaagcgaattgacaatttggagatcaattgaaattcacaagggcaaaggacctgaaccgaaactatctgtgtggatggatgacgaatctaacaatgttgtggaatttccattgcccgaccgtccgttgcccagcaaaattcgctttgattccattctgattaggtaagtaaaatcagagctatgaca

SEQ ID NO: 74230 - DNA, 787 bp, Heterodera glycines
atgccaatggtgccatttgaattgcttaacgaatggacaaaggaaaagctgacattgaccaaagcaaatgaattggacaacagttggataatgaagcgatgtaaaattattggggagtccgcggcggttcagcagcagaagaaagatgataattgggacaacaattgtaacaatgtgttcatttggcttgttgctggcactaattgcattgggtgagcaattaaaaaaagcatttgatttttatccgaatttgaattttgcgcttaatttaggccattgtctccgccaccggaagaagtggaagaacaaacgggacaaagcatcacaaaagggacgtcttctgctgacaatgagtgacggacaaacgaacaaaatcaatgagcagacgcagaagaaatgaatattaattgaaaatgaccggacgatcataattcatcagtgatcaagtgcattttatgaagaaaaacctctgaatttcggtaaataaatcggacgcataaaaatggcaaaaaatgtacgaaaacataacaacttagagctttaccaaattcatttttctgttcatgtgccgtcaatgccaatggtgccattcgaattggtgaacgaatggacaaaggaaaagctgacatttgccaaagcaaaggaattggacaacatttggataatgaaacgatgcaaaattattggggagaccgcggcggttcattgggaagacggaaattggggcaacaattggaacactgtgatcatttggcttgatagtgacactaattgcattgggtgagca

SEQ ID NO: 74231 - DNA, 450 bp, Heterodera glycines
atgccaatggtgccatttgaattggtaaacgaatggacaaaggaaaagctgacattggccaaagcaaatgaattggacaacatttggataatgaaacgatgcaaaattattggggagacagcggcggttgattggaaagacggaaatttggacaacaattgtaaccgtgtgttcatttggctttcttatggcattaaatccattgggtgagcaattaaaaaatggcatttaattttgtttaaatagttcaaattgtgcttaattaaggccattgtctccgccaccggaagaagtggaagaagaagcgggacaaagcatcacaaaagggccttctgctgacaaatgagtgacggacaaaagaacaaaaacagtggtgattagtggaagaagaaatgaacataattcatcagtgatcaaatgcattttatgaagaaaaacctcaattggtaa

SEQ ID NO: 74232 - DNA, 309 bp, Heterodera glycines
atgctaattttcgaactcaattacgaatatcatcaaaaacaacagcaacaaaaacaagaagttcaagcagtacaacaacagcagcaaattttgatgggaatagagatgaagatagacaacagcaaaaatggagaaacaaggaaagaggtggaaaagatggagggaaatagcattggggaaggaggaggagagacggaagagaaagagaggaaaaggaaaattcggcgcaaaaatgaggaggagaaaagagagagaaacagcagcaaatcgaaactgtttaattttgctggtgctaatattgctaattga

SEQ ID NO: 74233 - DNA, 805 bp, Heterodera glycines
atgcaaatgaccaaacgaagaactgcactttcaactccaaaacaaggtaagaacccataaaaaagataacgcgaagaacggcgaatgcaaatatagtaattattctcgagtttcgctattatcacaaatgtttggctattgcatatcaccaattttttgttaaggaaatgattggactttccgctcaaactgcttaaaaatttatacaaatttgaatttttaaccatctttgacaaattttttatgaaataaagtaaattttgctgttaccgtaaatccgctatttgaaggcccggccttctaatggacccatcaattgaatatggcaattcaactaatttagtaaagcctcgtttcttattcatttgttcgaataaaattatggcatgaaaaaaagtaatgatttgcggaaaagttttcacgcatattctaattttagttacactagtgtctttgcgtgcgatgagacagctgtttgagtgttttaaggcggacggagccataccaaattttcatgaaaattgataaaattggcaattatttacaagatgagagagaaaaagagaagagagcgaaagaagtcaaaaataacaaaaaaaaagaggtctggtagcaatttatacaaatttgaatttttaaccatctttgacaaatttttttatgaaataaagtaaattttgctgttaccgtaaatccgctatttgaaggcccgggccttctattgttcaacccctccaaaaaggggcttttaattggagggggccttctaccagagaggggccttcaaatagcggatttacggtaa

SEQ ID NO: 74234 - DNA, 1138 bp, Heterodera glycines
atggatggtgctgaatcagtcattttgcagtgcgcaactgagaaaggaaatggcgttggtccatcagtcgcggccgattgtgaggcgaacaaattggccgaagtcaccgagggattggcgagaatcaccgcgacggcggagggcggcgagactttctacaaccgagtgcaggagttcaaccgagacttgacgtaaggcttcaaaagccgagcgaagggcgcgtctctttccatcttaaggagtttagggtcgtcgttttgagggcattcgctgccgaaatacccaacgaaaaagagccgaaaacggaagaggagggcccaaaagccaaacagaggaaaatggacgagggaaaagcacccgaagcaaatgcagcgcaatccgtaagcattttttagtcattgaaagtgcccattttcgcctcccagcagccccgtgccttttctgtgctcgatgccttgtccgcttctggtctgcgcgccattcgcttcgcgttggaagtgccaaatgtgacgcgagtggtggccaatgacttctccgagaaggcattcgaagcaatccgtcggaatgtgcagctgaacggcgtccaggacaaagtcgaggcggtcttttccgacgcaatgtttgagagacgacttttcggcttaaatttcgcttggatttgtgtccctttcagcgatttgatgatggcacatcgcaaattcggcaaaaggttccacgccgtcgacttggacccctacgggtcggcgtccgcctttttggacgcggcggtgcaggcggtgatggacggaggtgagcaaaatggaccacaatacacttggaatgagctttttaaaggcttactgatggtcacttgcacggacacggccattctctgcggcaacactcccgaggcgtgcttcaacaagtacggctcggtcccgctgcggcacaaatcgtgccatgaattggttcccccggccctcgctgcccttcccatgccctcccttaaggcccttcgcattttgctccgtgccatcgacgcccatgcgaaccgtcacaagcgttacattgtgccgctcctttcggtcagcgtcgacttttacgtccgatgtttcgtccgaattcggtcgggcgctgcgatggccaaagacagcgtgac

SEQ ID NO: 74235 - DNA, 939 bp, Heterodera glycines
atgttttctcaaaaagcagaaaatcgacgaaatgttgagcaagctcacttgtgtgttttaacaggaaatctatttttcttgaataagtccatagaattatttattcgaaatatattaaaataataaaattatgctttcagctctgcaaattattttcaattgagtaatttaaacatttgtcatcttttcaatgaaattaagtttttttttaaattttcttgcattgaaaaataaattttttctttgtgttcataataattattaaaattaattctcttcttttatcaatttaaataaattaaatttttattttgttaatctcttgatttttgtgtgctgatttttgaaatttggcttccttgataatttaattatttctgattattaatatattttcaaaaataaggctttgtaatatattgaagcttgtgattagttgcgatttttacaatatattttttatttgataaatattatttgttattagggtgcgaaactttactcctattcatccaaaatttgaaaatatttatcgtgtagagccacatatcttgatagtcctaataatttattcgatattttcaaagaaaattatataataataattttaatgaatggcttttttaattaaattatgcaaatattctatttttagtcgcaacttatattgtaaaacacaaaaatcagtaagtatccatgttctaaaatttggtatttcaacgcatggaaagggatttgttaattagacgtaagaagaatgcgaataaggcaataaaaaaagaaaattttatatttatgtaaagccttttaaattgaaaattaattaataccgtattaacattttaactatttatccttaaatctaaattgcaggcaaaaagtcgcacaactctgatgagtcttcgcatgtttaaatagatcataattattgaaaataaa

SEQ ID NO: 74236 - DNA, 631 bp, Heterodera glycines
atgagggagaaagttggtaagtggttatttttttaaatatataaccaataaataataaaaaaatttcgtattgtataaaatattattaatcaaaaagtgaatattttacgtcttcacattatgtcattaaaataatataaaaattaataatatggaaaataaaaaataataaaataatttccatattaggtttgaggcttttaagtccaaattcttcatcttacttgattccttgtcagaaatggcctcaacaagcaaatcttttggtaatttttaaaagatttcttttattattcaaacaaaatttaaagtgcaaatcgattcgacatttgacgaagaattcaaaaaatattgttcggttgatttgattggacacgaattggaccctttggattggtggaaaattaacgaatgactatttcccattctcgctgcgctttcaaaacgatatctttcagcccaggcaacaacgattggaagcgagcaacttttcagtgttgcgctgatgtgtttgactatcgtcgatcaaaatttaaggctgaacatgccgaaatgctcatttttttgaataaatcaattccaaaaattcaatattattgataaaaaattttgttttgttattttttcttta

SEQ ID NO: 74237 - DNA, 684 bp, Heterodera glycines
aaaacaattgcgaacgccatcgaattgcggcttaaacaagccgaagaacaaaaaaacttagttcttgccactattttggaccctcgattcaagaccatttaccttgacagcagtcgactgaatcagtacaaagactggctgataagtgaagtggagagttaccacgcaaagacagatgtcatattattttttctatttttgtaacttatttttttaggaaattgatttacaaattgacctaagagactgcagtggttcaagttcgggggatattttttctcgttttgaaaaggacgcggaatttgatcaattaatgaatactgtaaataaactttatattcccctcaaattaattaatttaaggcaacatcccccagtccatctgcattggagacacgacaaaaagccgaagttgaagtgaatgaatatttacgggaccaaaaaatcaaatccagggccgatccagcattatactgggaagttaattcacaaaaatggccattgattggtgccgttgtacggaaatttctttctccgcctgcaacaagttcagaaagtgagaggcttttctcaacggccggcctgatttcagatgacttgagaaaaagtttacaggcggcaaatctggcaaagcttttgtttcttcaccataacttgcttctaaccggattttcaattgaatga

SEQ ID NO: 74238 - DNA, 327 bp, Heterodera glycines
atgtgtctcacacggtcccattggttcgtaactccttcgattgttagacttaacttttgatctgaaatgctaaaatttcaaaaatggtaaaatttcagctaccttataaatccttcatttggcccactccaaatgtctgatgtacaagaaaatgcttcacattttcgtaattcctctttgatctttcccttaactagttcacttgcaaccagggctggacgcaagtggatttacaattacggaaatccgcaatccacaattgcggcgattttctcagttgcggaaatccgcaattacgggtgtccaaaaaccccgcaatttccgtaa

SEQ ID NO: 74239 - DNA, 1210 bp, Heterodera glycines
atggccaaggaatcgctgcgggcaatgcaggagcaggtgcaggaaacggcgatgaagctgcacgacgcggaaatgaggtgggccgcgggcgcgctttttactatacaaaacacaacggcacattatttggaattggcacttttacatgggtgcagctcgacccccccccccccccccctctccccaaaaaaatttccaaaggattttttacgaattttttttaaaaaaatctatttcttttttttttggaaatttctgtttaggggaaacgataccgagggggggggcatccattattttgtatgggggttttctcggcagttgccactcgccgtttcaaattttactcaatttcccatcaccaaattgaaaaaaaaaatttttttttgtcatgtgattgtgtgtcgtaaattgaaaattttgttcaaaaaataacataaaaggttaattgggaaagcaaattctgaaaattattttcggatgtcgctaaatcaacatcaaacaccgtccgccaaccattttcgtgcttaattcccatattccttcttttttgttacagtttgatcaacgtggaggaagagtgctcttttttgcgacaacgttgcgccgattttgagactcaaatgggccgtcagcgtgacgactacgacgcactgctcgtcaagtacaattcttccaaaactgcaccaccaccgccaccatcaccgtcgccgccgtttgcattggatgcacagaaagaagagtcttcggaggaaagcaagcggaagcggtggtggtgggcgaaccggaacaacatcacagcagccagtgctggagacgatgccgacgacgacggcatcgaaacaggaggtggcaacgcaaatgccgggcgaagacgatgacgaaccgccaccgccgccgccgatgccgaagaaaacagcatccaaggaggcagagacgcaagtgccggatggcggtggtgatgggccatcaccgctgctgccgcaagtgccgccgaacaccacagtgaagatggaagcggcaacccaaatgccgccggacggaccgccggcagcggaagaaatgacggcggtggtggtggcgattgtggcgatgattttgatgtttttgttcgaattcgtgtctgcagttcattagaatttacgtttctacattttttaacaaacattattttgtaaacactccgacacaaaaaacgagacatgcgtca

SEQ ID NO: 74240 - DNA, 1658 bp, Heterodera glycines
atcaaaattgtgcgcaacccggaggacgacgaacggctcgcctatgtgaactttgagcggcccgagtgcgcgaagagtgtgcgccgctcgctgctcccacgcttacagaaaatgttgggccgaaacattggcgttgacccggccggtgtcatccgggaccaagaaggtggtgatggtgtacaaggcaggcccgtagccagaaaaaaagaaatttttgggtcgaattttcgaaaataaattgtaaatgaaggtccgacggtgctgtcagatgcaggaaaaaaacaattttttttttgaaattttaatacatttcgtaagaaatttatgaaagtttcaaaaaatttgccatttttcttcaaattttttcatttcatgggtgggtggggaattacccctcctccccctggctacgggcctgatggtgtaatccgctaattttcggtgggcctttattttaggttttccagcccctccccggagatatttttgccattttttgggtatgtttcctttatttttgggggttaccagcccccccccccagacatccaccatggtaccaacaaatgtttgcccattttcagggtttcttgatacccgtatttatcggcccttgcccttggaaattatgttatttttcgcctagctcaatcaggagaaccctattaatttttttaggcaaattcatcccggaccgttacaatcgtgccgtcatggctgctgccgaccgttcaccaccgcccggtgggcccagtgccgcgggtccggtgccgttgcgacgtgccgcgacccctccaatgcagcagccacgtcgtccgccaccgcgccgcatggaaatgcccgttttccgtaagccaactgttttttgtcaccaattaattcaaaataatttttagggggcgggggttggaaaatttgttcgacgagaccttaggaaaataaaatttctttgtcagacttgaaccaagacgacgcacaagcgggacgtacaatttttgtgggcaatttgccgggcgatgttcgcgacacggaattgcgtcggttgttcgaagcatttggcactgttgacgatgtgggaccaaaaaatttgaaatttgttgttgtttttttcccattacaattttaccccctttaaataggtggacatcaaattgttggccgattcaaacgcagcctatgcctttgtgctttttgaggtttctgtcaaattttaattagggcattgcaataatgaaaaaaaaatcaaattcgttattttgaatttttgagttcggtttttgttgaattttgctttcaaaaaaaattttcattttcaaaaaaatcctggaaacgacctgctgccaaacataagcacattgtaatattattacttttttagacggttgaacaggcactttccgcccgcgaaggccaacacaacaaaccgatgcgtcccggtgaataccgttgtcaattgggttggtttttccccacggtatatctaccgtatactccctccacaccgtgttttaaggttatggtaaaacgcagccgtgcaccagcctaatcatcggtggattgggcccttgggcttcggaagatttgctggagaaggcattctgcgactatggcgaaattgcgtccatccaatacgacggtggcactcatgggttcatttg

SEQ ID NO: 74241 - DNA, 689 bp, Heterodera glycines
atggaccaaagcaatggtttttacgacagggaagaagacaaagtgaaattgattattgatctcacaactgttgatgaaccaaaagtggacaaattcaatttggatcaaagcaattcgaaaggcgcactctttatggaaattgaaaaagtgtcggaatttgcgcgagaaatcttttggagtgaacgtaaaagtgaaactgttcacatcggaggatttccatggaaaattttggcacaaattggaaagaaaaaggaagcactgacaaaaatgagaaatggttgggcttttatcttttgtgtgatgctccaaaagaaggtgcaaaattactaataattaatatatatattaacgacaattaattaattgatattgagcagaaacttggagttgcaaatgttcggcaactcttcgaattgtctctctaaagagcggagtgtcggatttcagaagaaaactcgatgaccatgtttttgacaataaaaacagaggctggggattcaatttcatttcatttgctgtgagtgacaattaaacattcccttaattgttccaattatttatgatcaattaaggaactgatgaacccaagcaaaggcttttacgaccaaagcgaggacaaagtgacattggccattgatgtcacagtgaaagaagcaaaacggaggacgaaacataaatgcccaatatga

SEQ ID NO: 74242 - DNA, 2688 bp, Heterodera glycines
atgtccaattcgatccaatcgattagtgttcggatgaagcatttgttgagcacgggagagtacgcggatgtgaaatttttggttggggacggagacgcaaaagaggcgagttttaatttttaattaattatttaaaatttgtatggtacagtacggtgcataatttaagaccactttatttaaatgcataaattagatttcaagtaaatttaaaaattcttattaatataatttttgttgcattttttgttgattagtttattagacaattatttagagtaattagtccaaaaatacaccatcaaattgcgactagacaatgagttctaggatttttttattagaaaatgtattgttttctttttttttaccttttatgaaatttactccctgaggagggtgtttttgctctaaattttacaaatttctccaacaatttcctgacaaaatttgtcactggactttcctctcccgattcccgaatttgctctccccgagtgtcagggatgaacagtatatacccgctataaattcctctgaatttttgtactgatttttttaaatctttaattattttaatccttttagattattttggcccatcaaatcgttttgaaatctgcttccaaagtatttgaggcaatgttccgctttgattcaaagaatgcaaaagcggataatggtaaaggttaactattatggaaaattaatatattaattagaaattaatataaaccggcattttataggatttgcttttttttccaatttatttcgatttaaaattaaataataatatttttggcttaattttaagcttctaggttgtcttttatttacatattttcacattttgcctatgtttcgatttaaatccatattttgacattttcatttttacaaaaaaataaaaaataaaaatacactccaaagatgaaattttttcaagaaatagatattcctattgaaattttaatatatttttagtaaattaaataattttttgcattcatctaaaaaatttaatggtttaacgatttttcaaaaatttgagctcgatttaatttgtttcaattagcctttgcaaattgccctgttgttgtggaaatccctgacgttgaagcagcagcgttcaaagtgatattgagcttcatttacgcggacgatttaagcgaattgaatggagacaatgcaatgggagtgctttgcgccggtgaatttttttttctaaaataaatgctttaattattggatttactaattagccgataaatacaatatccctgatttggtccttccatcttcgcaaattccaatttccgaattgcgcaatgttttccttgcttatgcccaggctcgtcttttcgactttgaggtgggagagaaataattaaaaatgaattaaagagaattttaaatgcaattattattcaaaacatttttaattttaggaatattgcaatgattgtttggattatattgacaaaaatgcggacgctttgcttaaaacggaggaatttttgcaaattgaccaaaaattgttgtgtgaaattttgggacgtgaccaattgcaaatcagtggagaaatttcaatttggaatgcagtaattctacttaaaaataaattaatttcatttttttaaatattgcattaattttaattgtttttttaaaggcactccgttgggccgatgaaaaatgccgtgaaaatggcattgaatgctcctcgggaaatcgtcgttccgtacttggtcctgcactgttcaaaattcgttttcctaatatccatgaggaggattttgcaaaatgcgtcggtaaaatttttgaaatcggaaattaaatagaaattgttttggtcgataaggtattttacctttaatgcttgaatttcatacatggacaaggagggtcagaaatttttacataaaatttatgggaaaactggacaaagagaactgatgcatacagaataataaattttgaaattttacagttccatccggtgtgttaacagtggaagaagtgctcggcgtttatcagttcaattcccatccgtttctgtatcttcgtggagtgcccgggctgtactcgttgaaattcccaagccatggacgaatttttaattggaacaaagccaggggcaaccgaagagggacactttcgatggaaattgaaaaaatgtcggaatttgcgggagagtctgtcgggagaagcagatacagtgatgccgtgtatataaatggatttccatgggaaattcaagcagaaattacgaaaggcattgatgagaagaaatatttgggattttacttatggtacgatgcaaaagaaggtccaattttaattactattttaaaaatatatgctactgaaaaaggtgcaaattaactgttattaaatgctaattaacaacgatgagtaataatcattaagattcgaattggcgctgctgcgttcgttcggcaacttttcgaattatctcgcaaaacaacgtgtctaagaattccattgggacattgtgtgattatgtttttgacaacaaattgaccaatttgggattcactaatttcgtttcgtttgcggtaagtgccaattcaaacaaatatttaaatttgacattcgtggaccagccaatattgaagttcatttatttatttgcctggtgtaaagaaatcataacaaaataaa

SEQ ID NO: 74243 - DNA, 4316 bp, Heterodera glycines
ctgtcacaaaagttgggacgaatattccaaaaaatttgaccgtgtctaaacctgttaaaattcacaaaattgaaaggccgttggtgtcaactgcgacaccaacaaaaaatctaacaattacacaaaaacccaaaaatggagtcaaaaaatctcatttcgtgtcggaattcacaaaaattgttaccacgaccataaccacttcaacggtaaagcccatggtaacaagtacttctgtcactacgatttctacaaaagtcacgcaaaatgcgagtgaaataacagtgttgccaactgacaaaacaaatacaagtttaatgattggctcaccaattaattcaaatattttctcgggattggggaatgccaccgaagttattaagtcagaaatgggtgagaacattgagactgaatatgaaactgaaagcgagattgagatacgtacagaaaatagttctgaaaatgagagccttgaggaaatggagatgaattttataaatgaggaagatgaagggagtaatgagggagagtacgttgaatttgaagtgttagaaaatgacaggagaaaacggacaacagtgaccacgcctgatgcgcaatggcttaaaaaagttgagaaaagtaaaaaaaggggtaaagcgggacaggaaaataagaacatgaacacccgcgttaattatgcgatgtataggctggatgaagccagaaagcaacaatatgatcagatatatattcaggcatgtgagagcaccaaatttcaaatgcaattggctagggcaatcttacagataaatccaaatgagggggttagaaggatttttgatagagatgatttggtcgcgcattgggaaggtgataatttggaagttggattttgcgcaccactaacacctgaaaaaatattttgggataaaaaaattggtaatgagtgttacgaatggacgccagtttttgcagaaaacacaatattttttgttaaacccggcacaagggagttgagcattttggggaaaaagtcggaatgtgtggaaaatggcagtgtaaagggaatgcagaatgagactcaaaggggaataatacaaaaaatgggtgaaaatattgagaaaattcgacccaagtaccgaaatatacaaaacccgttaattttaaaagccggagcgctttttgaatcagacaatgtgcgaattgaggaaacaattcgtgaatatcgctcaaaaatgaataatttgcccacaccgatattacgattagttgaaaaaccaaacattacggaagttattaaattggttaaaagtgaggcaaatgaaacgcttggtgtgataattggtagatccggagattggttggaaatagtaaagaaaattccggagaaaaccaagaagcaataagttatttgaaaggcatatcatatgtactgattgcgataccattattaattcttttggcattgatgggttacattggaattaaatacagactgataatatttgccggggttcgtgctgggtcagtattggcaagagtgttaagagcaatcatgggaacaaaaaaacgaagtactcgggttttggcggtaccaaccgcaccagaattggattcaatcgatgaagaagcttatgttctggattatcttcctccgagacgggttgcagcgattacgaatgacccgaggagactcccatccattagtgtccgtcttaatgatttgttaacagcagccttggttgattgatgtgctagtgtatcctactgtagagaaagaacagcaagaaaagcaggacttaaaattttggagcaaaatgacggaaaaggaaatttgactgcggcaaacgattcgagcatagaaattttggggaaaactatggcaaaacttcgaattgaggataatgtgactggaaatgtcggagaatgggaagttgtattgcttgtctcagtggacgaacattgtcccggccctttgcttattggattaccacttcttatggaattaaaaggtgtaatttccctgggagagaaaagagttagacttggtgatgtgtggacaaacattgtgtcagtaattgggtctgaaaagccaaaaccaccgtctgtgatacttgaaaatacggaagttttagagccaaggtcggaaaatatactttcggcaaaagtaaacgaatgttttccaatggaacaaaattttttggtgaaaggaattaagcttaaatatcccggaataattgttggacgaactttggtttcaccaggaaatagtaagaatgtaacaatacaaattttaaatgcgggaaattcagcggttaaattatatggaaagtcacatttggcagatttggaatcggttcaaattaatgcatcaccaggagatgaaatcccagcaaaagattacattcctcccgagacacgatggagcgaaaatttaccaaaattaccggaaaacggactaaataggccaccatcaaaaagaatcaatcttgagggtacaaaattaagtgaaaatgcgcaaaatgatttaaagaaaattgtggatgagtgttcagaagcttttgtaggggatgatggaaaaattggcaaatataacggaccaattgtgcataaaattgacctaattcctggttcgttaccatttcattgtcggccatatcggtacccaccggagactcagaaagaaatcgaaaggcaaatcaaaatgatgctggaccagaatataataagggaatcggaatctgagtttgctagccctatagtgatggtccctaaggctgataaaaagtcgtggcgttttgcgattgactacagagcactgaataaaatgacaaaaaagagagtatttcacttgccaaacattcaagagttgttagatctgatgggggcaaagaaattttacacgtgcatggatttacagcaaggatttatgcaaattccggttgccgaggaagacattgaaaagacggcattcatttcacacttgggcatttttgaatttataacgatgccttttggtctaacagcggccccggacacctttcaaagagtcatgaactcgttgagaagacggctaacggctgcgatgttaatttatttggacgatataataattggcagcgaaactgaagaaaatcatttaacggatattaagaattttcttttattgctaaaaaaagttggacttaaattaaaattggaaaaatgccattggggaatgtcagaaatacggtaccttggctttttgttaagtgaaaaaggtgttagaattgacccaaagcaggtcgaagtggtacaaaattttaaggcaccaaaaagcctaacagaattaaagtctttgttgggtgcattgacatactttcggcgctttattcacaattttgcgcatattgctcgaccactacagacattgactcaagataaatttgaagggaaaatagaagaaaattggggcccagagcaggaacatgcttttcaaactctaaaacaaatgctcacaacagtaccagtgctacagtccccaagattcgggaggacattcacaattgagtgtgatgcttcaaaaaaggccattggagcagttctcctccaggagaatgggcccgttgcttacatttcaagagcattaaatcggcacgaaacaaattacccttcaattgaaagggaagcattggcattagtgtatgcggttaaggaattctcgccatatatagttgggtctggggttacaaaagtaatcacggattgtagtgccttgaccggcatgatgaaagctaaggaattaaaagggagacttgagaaatatcaagtaactctccaaagtttcgaattagagataacttatcgcccgggaaaaaagaataaagtggcggattttttgtctcgatataatataccgggaaatgaaaaagattgtgaaccaaaactggaagaaaattcagatgaatttgaatttcagccaaaaattttaagtgcaaaaaatattaatgaaaatttgattgccaaaaatgatggaattttgaatgaaaatccgagaataaccttaaaaacagtgattgaggcacaaacaaaggtaaaggaattggccaaaattttctacattttaaaaaccggaaagtgtccaagtgatgttctgaaatggaaaagagttgtttctgattataacttgataaatggagccatttatttcgtaaaaggcaaagaaaacatggagaaacctaaattaataatccctcattctttaagacaaaaactttttcttattttccattcagagggccattttggattcgaaaaaacgtggcacgaaattaaaaaacgattttattggatcggaa

SEQ ID NO: 74244 - DNA, 116 bp, Heterodera glycines
tgatatacttaatttcttaattctctctttctctctcttatcctctgatcattgttcccccgtcaatgtcagcccggggggcggtcctttcttttcactaatcgagactctttata

SEQ ID NO: 74245 - DNA, 1025 bp, Heterodera glycines
  unsure (1)..(1025): unsure at all n locations
caaattccggcacataaagcccttttgatggccgcctcggatgtgttcgaagcgatgttcgcttatgactcccagaatgggacaatggcggggaattgtacgaaaatcggacaattaaattaaattaaattattaagcttttttcattttaagctccttctaaccctgtggaggtcattgacatttgtgccgtgccatttaaggcgatgttacgctttatttacaccaacaaattgagtgttttggacggacaaaatgcaatggctgtgttttatgcgggtcaaaaattgaaattgatttcattaatggattaattattatttatttattatttagcaaaaaaatatgccatcatcggtctgatcgaagcattcgctgactttcccattgcaaaattgccaaatgttttccttgcctttgcccaagctcgtctcctgcaagaaaatgtacaaaaattaaatttcgatttattaaataataatttcacttttgttttgggactttgctgatcgatgcttggcttgcattaaccaaaaagcacaaatactgatcagatcggatgattttttacctattgatcaacaatcattctgtgagattctgagccgtgatcagttaaaagttggagaagaaagtgctatttggcaagccgtaagaaattgataatgttaaaacaatataatggaattaactcacttaaatttgattttggaattttattaaattaattaattttcaaatctcattaaagtctgacaattacgaaaaagtttcgggcactttttaatttcgtaattttattttgacataattaagaattttgttgtatatcctaacaaatctaggaattcaatgcttttgttaatttgaaaaatttanattgtaggcactgcgttgggctgacgaacggtgccgtcaaaatggcatcgaatgttcgggggaaaatcgtcggaaaatgcttggcccaattttgatggctattcgattcccactaatggcacaggatgaatttctgaaaatcattg

SEQ ID NO: 74246 - DNA, 511 bp, Heterodera glycines
atgtccaaccaaaacgaagtgccacaactccgtgcaaaacgagagaatcacggacagagcggactttccgtccaagcactcgttgaacttctgctctgtttctttctccccgttcgtctttcaaaatgactttcttttaaatgttgcccttggcgttctgtctccccctcaaaataatttcacattttttagcccgcggcggttgccatccacggcggccccagcttcaaaatgcacattttgctcaatgttctgctgtgtattctcggtttggcctgtcctccttcattcgcattgactcccctctttaggatggatccccggcattctccacgccgtttggtactgtttcatcagcaccaactgattttaaacggagggtgatacattattttatcagcaaataattggaccaaagacaatgatagtcatatttttgatccgaaaaatgattaatatcataaatataaaattatttcaagaaattctggttgctaaattcggaaacaaa

SEQ ID NO: 74247 - DNA, 103 bp, Heterodera glycines
gtcggaataaaacatcattcccctgcttgtctactgtttgtcccaatttctattttgccaaaatttttgccgggccgaatttgcctctgtttggtcccgacaa

SEQ ID NO: 74248 - DNA, 603 bp, Heterodera glycines
gtcggaataaaacatcattcccctgcttgtctactgtttgtcccaatttctattttgccaaaatttttgccgggccgaatttgcctctgtttggtcccgacaagtggtgcaacggccgggaacctctgcactgatgaatgcttgtgatcagcgggtggcagacgctggtacaagggcgacaggacggagaggagtcagtctggtcaactgatcgctgtccaccgccgcggagcggatcttcacaagcaacaagggatcagcctgggcaactgatcacctcacagattttacgattaaccaaaatcaaccgcccgcctttctcagcacagacaacccggaatgaggcatgaaataaaacaacaacatacaggcagacttgcagcaactgaaccccccgacaactttgctgtggggagtgtcgcgactcacgtcacgagaaataaaatggaaaagataaattttaaagcatgatgcaatttcattaaaaatgggaaaaccttaatttaattggaaatgttccccctcttcgtcgttctattcaaaaaatatttgtttgtttacattcaattcttattcatttctcacacaaaaatgtattattca

SEQ ID NO: 74249 - DNA, 190 bp, Heterodera glycines
gtgtcgcgactcacgtcacgagaaataaaatggaaatgataaattttataagcatgatgcaatttcattaaaaatggggaaaaccttaatttaattggaaatgttccccctcttcgtcgttctattcaaaaaatatttgtttgtttacattcaattcttattcatttctcacacaaaaatgtattaatca

SEQ ID NO: 74250 - DNA, 1111 bp, Heterodera glycines
atggcgtcccaattgactgcgacatttggggtgtcgctggtgttgcaggtgcgtttggagggaattgctgctgcgaggccatttgtggcgtcatcatctgctggttgtaaacgttgtggggactgaatggagttccgcctgcgttcgtgtggttgtacataggcatctgagcagacgaaaaataatttgagcctcgtcagttagcacttcacctggtacatttgttgttgttgttgtggagagggcgccacattcggcgacatattttgtggcactgcagctgatgcaggattttgtggtcgctgctaaatggggggttttatgaaaaatataagaacaattaaaaaaaggtgaattcatttacaaaaaaagtcaaatgtttggttcgtaagtgccataaatttctgcttgccatgtgtctcactgcttgttgctgctgctgttgtgcgctcataccacctcctaattgctgctggactgattgttggtaattcattgcttgccctaaaatacgtatctataaaaaaccaaaatgtgcattaatatacactaattaaattgtaaggcaatggttgtgcaacatgaatatttttgtttttttattagagaccaccgagccgggccgggtggccggcgttttttggaaaaaatccggtttgactagtttttgagaggcccgggccattgcttctgaaaaaatcagcctggctcggcagattcggaaaatctcggtctcttttttatataaaaattcaaaaaaaaaaaaaaagcgattttcaaaaattattttaaagctttttggcaaccaaattggacacttttggtgtcattcgaaagcttttctacgcaaacgaaatcaatttgatcagtttgaaaaaagtaatgatcatttcaaatttacagttattagagacatgataatagcgcgcataaaagagaggaaaagaaagcaaaattggtacttatgtggtttacagaccataaaaaaaaattttttttaacacatttctagggggttttcggggtcgctgatcacgaatctgacatccattgcgaccaatttcgaactccggacccgaattcgaacaaaaagtcgaaaattaaaatttaa

SEQ ID NO: 74251 - DNA, 531 bp, Heterodera glycines
ggcaagcaatgaattaccaacaatcagtccagcagcaattaggaggtggtatgagcgcacaacagcagcagcaacaagcagtgagacacatggcaagcagaaatttatggcacttacgaaccaaacatttgactttttttgtaaatgaattcacctttttttaattgttcttatatttttcataaaaccccccatttagcagcgaccacaaaatcctgcatcagctgcagtgccacaaaatatgtcgccgaatgtggcgccctctccacaacaacaacaacaaatgtaccaggtgaagtgctaactgacgaggctcaaattatttttcgtctgctcagatgcctatgtacaaccacacgaacgcaggcggaactccattcagtccccacaacgtttacaaccagcagatgatgacgccacaaatggcctcgcagcagcaattccctccaaacgcacctgcaacaccagcgacaccccaaatgtcgcagtcaattgggacgccattgtccgtgcacaacattcaacaacccg

SEQ ID NO: 74252 - DNA, 1939 bp, Heterodera glycines
atgttgatggatcgcggacgccaaaccgaggccgagtcccgacgactctttcaacaaattgtgtctgcaggtagaggtggtcgtcgcgtcgtcccaaagatgcaaaaaaaaaaaaaaatttttttttgtttgaatttttcatttctttaagtggcctattgtcatgcgcatggcattgtgcaccgggatttaaaggccgagaatctattgttggacaagcgtggaaacatcaaaattattggtgtgttggtgttttctgttttgctgacagaccgacaaatggtcgacatcaatcaattggacaaaatgcctacttctttggcttgacacaaacaaaatcttgcccaattaatcagttttttagcgtgagaatattgccatattcaacacttcctctcatttgtcaaactgctcgctttagacctcatttgtccactttttggtgacatagtagtcaccagccaattatttttggtattttgtccctttttggagcaacatttcatttgtccacctttttggtgacattttgtccaggcaatgtttttttttttgcattttgtcttctcaatttggctacaaattcatgccaattgtccttttctgtatattatcctattaaaaaaaacaatatttcatttgtccatctttttggtgacattttgtcccagccaattatttttggcattttatccatttttggttagaaatttcgtgccaattgtccttttccatctattttttgttatttttcagattttggcttctccaactaccatcagcctggccaactgttgtccacctggtgcggctcacccccatacgcggcacctgagctgttgctggcccaagagtatgacggtcgccagtccgacgtgtggtcattgggcgtcatactgtacattttggtgggtctttttttcgaaaaaaataatggacagaatgccaaaaatgccattattataaaacaggtcactgccggcttccccttccctggcgattcggtagacaagctgaagcgcgcggtgctcagcgatcacttgaaaataccgttttgggtctctgtcggtgagttcaatgaccgcataataccgtaccgttttgtgcatgtcgattatactataaagctttgacaatatacagtatgcctccgattttactctgtttttttttggtttcggtcaaatatcatttcctcaattttttgtgacttgttaaagttgatgatgaagccttgtagctctgttatggtgcagtaaaattttattcctaaaattctaccgtagcttgacttattaaaatacaaaatacggttgtaaacccatctatcacggtaccagccaacttttcttgcatcactcactactgtgactgtactgtaccgaattttttccaaattgctcaccaagtcatcctaccgtatcctggcatcatggtgtgccactgtaaacatattttcttacagaatgtgctgatctgatccgcaaaatgctcatcgtgcagccggccaagcggtgcacattgcagtacatcacccagcacaaatggttcacctgcgacatgcccgagcacatcaagcagcagttgctggtgccgcagttgtcatcatcagcagcggcaactacagtagacaaccaacaagaaaaccgcgcgccgtatacggtaggaggaggaggaggacgagcagtacagcagcaacaacaacagttggacccgacaggtggttgcgctcattcccccccccccctcccgtcgtttccacacgaaaaattaaaaaaaaaaaattttttttaacatagaaatttgtcaaaaaatcttaggaaatttttcataataaaactcccaagaattataatttatatttttttattattttccaaatatagtgttgatcttcatgcaacagcacacgggctggtcagatgagcaaatcattgag

SEQ ID NO: 74253 - DNA, 455 bp, Heterodera glycines
atgggcggggatggtggcatggtgttgctgctcggccggctccacattggcacggccggagatgatggagccgcgcgagccgcgccgcgcgtactcgctgtccaactgcaaattggtgcaactgccgcccacaattgtgttcagcgccatggccgtcgctgttgcgcgtgcggcgccgccgccaccgaagacaagcggagatgccatcatggcggccgcaattccaccgttactactactattactattactaccactgctggtgccaccggtggtggtaataatgccggtgccggaggcggaagcagccgcggcggcggctgcaaccgcttccgcctcgcgaatgtcggacagacggctcaacagcagtgcgtacgtgccaaacacggacgactcgtagttgtggcccaacacttcctgttttaatatttaataattagttaaattataataaa

SEQ ID NO: 74254 - DNA, 629 bp, Heterodera glycines
tacctactaataactgttgtactcttctaatcactgttttgcctcttctaatcactgttgaacctcttctaatcactcttctaatcgctgttgtacctcttctatttactgttgtacctcttctaatcactgttgaacctcttctaatcactcttataatcgctgttatacctcttctaatcactgttgtaccacttctaatcactgttgaacctcttctaatcactcttctaatcgatgttgtacctcttctaatcactgttgaacctcttctaataactgttgtacctcttctaatcactgttgtaccacttctaatcactgttgaacctcttgaacctcttctaatcactcttctaatcgatgttgtacctcttctaatcactgttgaacctcttctaatcgctgttgtacctcttctaagcactgtcaaaaattatgtatttaaggccttttaatgacgctgatcacggatacgtgattagttttcacttttgacatcgttaaggcctcagaatccccgtgtgattggggattctgaggcatcattttaagggggggcagattcgaatccggacagtgtacattatttgatttatttatttttttggtaattttcactgcattta

SEQ ID NO: 74255 - DNA, 592 bp, Heterodera glycines
atgccgctggcactttgccgttccttcccttctccgttgatggcgccttttctgtttcctcccaatggcctcggcggactgtgccaaacacggggacgaacagacgcaccaaacaatgtggcaaaatcactacgaactgttgaccaggaagctgaacaaatccaggagttattgcgacgtcgcaattcaccggtggacccgagggatcgagtaaagaaagccactttttttgatcaatttattttactattaatgcttttctgccccatagttcggctcaattgcggcgaaaaaggtgcacatgccgcagacggaacgcatttattacggctttcagccggacgtttggaacgaaggcgcccaaattgaacggctgctgcatgagcgacagaatgcgtttatggcggacgatgaacgcgtggaggacgaattcgctgagggacgcgttccacagattgtagagccagcgcaagggacatgtccgggactgaagaagcacgcgcgaatccaacgaaaacggagggagtggcgcacactgatgaaagcggagagaaagcgcaaggcggtggcgactgacccgggctgcgtttaa

SEQ ID NO: 74256 - DNA, 983 bp, Heterodera glycines
atggtcgaaaatttgtgtgcgtcacttcccggccctgtcggaaatgggccgtacgacacggaaatgtgccagtttttggtactttgttaattgaaactgtcagtgacccagtaactattgttcccaattgaaaatagggccaattgctcgtcgatcggtttgctggcgacggactcaccgcccattacacttggctcgattgggatgaacacgagcgggagttgagcccacagtgagtgagtgacgactatccactggttcaccatcattcattttgcgtagttcctacttttcccctcctcccaccattttcttacaaatttgtcttaaattgttaaaacagaatttctttttaggtatttgattgtttctcaacaaattgaccgttgtccgctcctcttcgatttgctgcttttgctctccgatttgggtttccatggcctttccttttgtttgccgctcatcaaagcgcaatttgccaatgtgtaataacatattcagctgtttcctacaataattcgcttttcttctgcagactttctcaattggagtgcactcctctcaaagatttgcccatttccgtcgcaattaggcagcgatgcaggcaactctttgcacttctcatttcggtaaaatatctttttaaattaattgtttctataatatttccacaattgcaggctgattttttccccgatctgatcgacatttgcgttgaaatgctccccgagacgacaaatcacgaaatggctgtgttaatgcgtgacttgtggaactttttgaaggtgaattggcacacttctcttaaattttacttttttcccaattttcagtccctcttctccatgtcttcctctccaacgtcgcttcattcgtccgatgttcgtccgatgcctccgccgtctccgaatcgaatggacgcgctcacttccgtaaaccaatgcacaaaaaaaacattgacacataactgtttttctcgttag

SEQ ID NO: 74257 - DNA, 1413 bp, Heterodera glycines
cagttccgcagcgatctccaattccaatggactctgctccgatcggtgctcgtcgggggcaatcggtgaaattctcccactatcatttcaggcattttttgaatttcagtgggaaattaaatgccaaactgttgtccatccttttttggactgtgtcggatcgcgaggaatggcaaaaacgaacggttgcccgactcatttatgcggcaaaagacgacaaagaggcaggacaaacgggcgggaacattacgatgaaaattcaacttttccaacaaattgcttttgactcccatttcagctggccaacctggtctccctcgtcattgctgtgttgccccaactttgccaacaccgacaacagtcgtcgggtgaacttggtctgatgagtgctgccattttgcttgctttggccgatgcccgtcgctttggcaccgaatgggaccaatttgtgatggccaccgatgccagtggaagcaccgacccaaaaaatggcagcaaagtggtggagaatgtgctgacattaatccgatggcaacaaaccgcgccggaagacagtccaattcggcacttggggtgagcatgggaggacgacccatgagatgtgaacttgtgaaactcacaacaatcagtgggattccacaaccaaaatgagatgttttataatttctttgcttagcatttctttgcccgaccttcgtggccaattgcaagacgcactgctcggctggaccctcgactacgttgactcgcttcttcagcaaagtggtggcactgaagacatctttttggagtcccaaaatggttccagtgttggtgccccttctttacgcgttttggacaccttttacaggtttgttggcttgccaattaaataattaatgctttgttaattgctttctttaattcccctccctcctatctttttaagtttgatgtgtattattgtgccccaagtgcaacttccacttcgttaccacaacaaattgctcactaaaatttgtgcgcttattgtctcaatgcttcggcttgtggacagaagtgaattcaatttgcatcatctacttaattatatttttaaaatattttaggccactggggcactcccgccgatggggtggactttgtgtgccgctgcttcgccatttccggcaaaattttcactgcccaaattggggccagcaaaacgcatttgttggccgcgttgatggacgaagtgtttggggtaagtgccagtctaaaaaatattatcattttcaaattaagtcctatgacaaattattctccaccgattgtgggagtggtgacaaacactgtttcaacccgtcggtgggcgggtgccgcgatgtcggtgcccggttcaatttcgacgcttttcgatgcttggattttttgaataccgacaaaaagaaagag

SEQ ID NO: 74258 - DNA, 916 bp, Heterodera glycines
atgctaattgtaaacattagaccactcaaaaaactcgaaacaattgtccattttcaatttaaaaaatgttatcagaaatatgtgaaaagctgtgccggaagtaatcaccgagttggggacgaaatgagcagggaaacggcggccaattgccaacggcaccaacaaaacggcaccgatcagcggagaccaccgctgccccagcagaaggggtcggtgatcggactgacggatatgagaggaaatgcgatggcactgagccaaaaccaggcagcttactttgatcagctgagaaagtattggaactgaattgggtggcagaagcaggcggcacgggacgaattgggagagagttttattcttcttttcccttaaaattgattattatcccctcattatgctgctgtaattattttttcactgaaaacactttccttggttttcgggtcgtgaactcgaatcggatacccgttttgacgaattccgaacctctgacccgaattcggacaaaaagtcggaagactcaaaattatcgaaatatgccgtttttgaaccaaaaatgctaaattcgaagatttggactttagattttttgttcgagtccgggttcggaattagcggaaatagataccgggttcgtggtcagtaccatctaaaacgcaaggagcttgttttatgacaaaaaaatttcactgacgcattttccattgacgcattttccgggcgccctcccgccgcctcggcttttaggatttataaaacccccattttcatttcgttttttgagcgataatcacatcaaaaattttaagcaacttcatatttctgtgtatgattgaattttgaatttccatttcaaaattaattagtgattgctagggctgctaattttatgtaaaaaaatttgcgaaatatgtaa

SEQ ID NO: 74259 - DNA, 244 bp, Heterodera glycines
gcaaaatgcgctttcctttccgctgctggcaatttccttcctaatgcttctcctcgtggcaccaattcaaattcatggaatgtttggaagcaatgggagaggcagacaaatgagcgggggaaggggccaaatgggaagcaacggcatgggaccaggaatgggaggcggtggtggcagcattagaagaatgcaacaaggccaaggaatgggaggcaatggtggcggtggtggcggcatgttctga

SEQ ID NO: 74260 - DNA, 2076 bp, Heterodera glycines
  unsure (1)..(2076): unsure at all n locations
atggatattcccgacaaccctaaaggggttcgtcgcaccacttccgcctgcgggcacaatacagtatatgagttgagaaatgaggaggacatgagtgaaatgacaatttcggtcattaataggaaattttggtcgggaaagacggcagtgaaagtctctgacttagaggccgcccataacgaattggtcaaattggaagacggaatgaaccgttccattagggctcttaaccgttgcatggacaaaaagacaaaatgggtctcggaggttgtctcaaatgccaactcaaattttgagatagtcaaggcccaaattgaaacattggttgaccaaatcgacgatctcgaacgagcaaatgatggaacagatgccaacagcacagtgcgcgagcaggacgactcctcacaatttgaaatgccgttgaaggataacaagggcacaaaccgtggcttgttaagcacaggtggcggcacgacaacgcagacacagaaaggcgtcgggacctcttccaacaatcctgctggcccaacccgatctttctttggcatcaacatgttgagcaactcattatcgataaattcaaatttggagttatttggagaagaatcggtatacgctttcgatgattgggccgagcgattcaaggactacttatcggtgtccgggaaaaatctgactgaaggagagaaagtcacgcgtctcaaattagcgctcaaggacacgccgaggaccctgttcaaggaactcgaggctgaccaaatcgtaactcttaccagcgccttggatgccctgagagccaaattggactcgcctcaacgacgggaattggcgaagcgaacccttgcactgtgccgacagcgtgaggatgaaacggttggccaatttttaaggcgtatgactccgctagttgagtcatcaaatccatcattgtctggtgatcagcgcaaagagaaagtttgtgaggaatttttggacagactcaagccaaacatgagcttcctcattcgtcttgttgaccttacgcaagccaagaatttggaattggtcaaagcccaagcagaagagcttgaggctctatttcttgcctctaaaggagatgatgtcactcgcctctctcatctgattaatgcgctgaaggacaaatccgaaaatgagcaatcaaattcaaatccaaatgccgaaaatgatcgcaactttggaagacagcaacgcaataacacttgggggttcaggcccttcacggctgatgatgttcagcgccaacgtgctagcaacaggggaggccgaggcaacagcaatcgtggctgggcaagagggagacaggagcacatgagccagagaaattggtctaacaacccggtttgctatttctgcaatagagtcgggcatttggccaacaactgcaatgcaagaaaagcccaattccaaaaccgacgtggaggaaattcaaattggaaccaaagaggaaacaatagctggaaccaacgtggcacaaatgttggatggaaccaacgacagcaccaatcgcgacaaaattggcgtgaacaggcacatgaagtgaacgtgatgcaaccatcaacttcctcatcatcgcaaggatttatggaagaattggtcaaatcgctaatcacaatgaatattcgagggtcatccaatcaccctccaatggacaatggaagaggtaatcctggtagtatgaacttaatcgcgcatgtggactcgaacaacgagcaaactgccgtgaaaaccgaaattgagaatgccgacgagagaccagaaatcggcttggcctgcgggcaaaatacagacaaagttaaaccgaaaacctcgaattgggaatcgcgtggtgttggaaaaatcaatagccttttctttaccacggcaattatgacaattttcttctcgatttttattagccctgtctttgggactcttcccgatcatccgattttatgccagacgaaagaagagggaaaggtttggcaattgcccggggtctcagggtgttcaaaaatggccatcgacccctcaaaaccaatcgtgacccgaattttagaaattttttcccnaaaatga

SEQ ID NO: 74261 - DNA, 719 bp, Heterodera glycines
atgcccgatcggattggcattgagcgagtgttggcactgagcaatggacgaatttgcagcggaacaaacgcgtcggaagaagtgtacgaaatgaaggaaacgcttctgatgaaaaatgctcaacatccatcggggtaattaattaattgattaattaacaacatcaatttctaaaaaaaattttattttaaaatgcatatcgaattttggttaataaaaaataaataattatctcaatattttattaaataaaaaatattaataattaattacaatagttgatgcacattctctttttaattactaaacaataataataatcatttattaaaatgaatttttatttaaaatgtttaaaattacatttagataaaatgaatataaaataatttttaaataaaattgaattaattataattccgaactaataaatggcaatttattattgtcaaattcagtagtcaaagtgcgatgtccatactgatgagcatggctccgacctcatcaagcagtactcagcagtacaaccacaaccaacaacaattgcaaatgatgtcatacacgcggggagaggagacgggggcgggggagcggggaccacttttgccaaacgacggggacgacgaagcggggattggcatggccggcgcaggggacgaagagataattaaattagcaaaaaatttgataaatttaatttaaaaaaatttaataataaa

SEQ ID NO: 74262 - DNA, 601 bp, Heterodera glycines
atggttgcccttcatgtgcatgttgttcatcgtcgccgtgtccgtctcctgctgcaacaccaccacctcaacattgtgctgctctccatgctgcggttgccgttgttctcctactactgcttcgttttctcggcatttccaactgccaatgctttcgttgttattgttattgttgttgttgctatgataatgattatgatgccgccgattgttgtaagaatggccatcaccaaactgttgctgcttttcctgttggtactggttcgacagctgttgatgatgattttggtgcgtccaccgctgtttctgttcatgcttcaacttctgcggcggcggttggccattgtgccgttggttgttattgtggcccttttcaatgcccaaccgataagcggtggtgtcgtggtcggcatcggcaacaccaaagcaatgcctttgtgccattgtgcagttattgccgacgatggcactgttggtgctcttgaacgtgctcatcggcattgcaacactacctccagcatcgccactgctgctgcaaatgttgtgattctgctgttggccaacacccatgtactgttgatggccaagtacggtagatgcc

SEQ ID NO: 74263 - DNA, 3652 bp, Heterodera glycines
atggaacatctcactgatgcgcctcaatgggcgtccgcaatgttggaactggtgaaccaaatggtcgggatgtgccgtgaactggtcaccatggtacgcgaacaggacggagaaagaaacccgaacatggtcttcgacgaggaacgacgactgcacagcgtcgtcatcgcgcagttgccagaaagcaacagccaaatgccaacgcagcgtgcaaccgacgacttggcaaatgtcaaagcattgatggaccattgtgacgtcgagtgcctgccgacgcaagtgtacagaatgggcaagaaacaatccaacggacgaccgaggttactcaaagtggaactcccgactaaattccataccaatttgttcttgcgcaacaaaaacaaaattaaaaattttaacaaattttccaaagttttgttgcgcccctccctgtctaaaagtgatctcattgaccgtgcccggctcatttcactttgtaaagctcaacgcgaaaatgacccctcctgtgattacattgtctatgcggggcatgtgcttgcccgtgacgacatttccgccttcaaatccgaccccaattttaaatgtatttgtcataacagctcataaaatcttgcggggaccacccatattgcaatctctaaaaaatttgataccgcaagattttttaaaagtcctcataaggataataattgtttacaaggtgctttagttaatataaggtctatttataacaaatgtgtacaagtagaaactgtttttgaatccttaaatttagactttatttgttttacagaaacctggggtaaaaatgaaaacccatttccttttcattctaattttctacaaaaccataccatttcttacactaacagattgaataagcgtggaggcggtatagcttttgtcgcaaaaaagaatatacaattttttgtaaagttttctgaaacaaaatttggctgtgaaatactaatattacaatttcaaaattacaattcgctgaatttaatccttgtctataggcctccttctattaatttaaaaaataccaaaaatctttttaaattcctggaaatttacatttcagaaaattgttgtttacttggggattttaaccttggaactaaagatttaactataaaaaataaaaaaccgtaccctttaagtaattttggtactttattctgtgattttttcaacaaatataatttgacatgctgcattaatgaacccactagggagcaagccttcctagatttaatcatttcaacaaaaactgaattaataaatgcggtagaagtaaaaggtggacttctagatacagatcatttaacaattctttttaatttttgtattttaaagaaaaaggcagtcaagaaacaaattattcttaggaattttactaaatctaatacttttctatttgatgcatatttatcctcatttctccctcaactactacaaaaattttatacagttgaggataaatatgctattttctttagttctgttcgaagaaaccttgaaattaatattcctgaaactattttatctattaagtccgccagaaacttttacccaccgcatttattggcttcaattagggaaaaagcacgtctatataagctaatgaaagaaaatagaggaaaatatgaacctttatataaaagtatctccttacatattaagactcaaataagaaatattcaatcccgtaaagaaaataaaatactatccggtgataagaatagattattttcgtatcttagaaaatactttaagccagtagaggatccaccagttattcaatataagacttcttttatttctgactcaatttctaaagcggaaatttttgcaaaaattttttctgaaaactttactgtaaataattattctcttgattttgatacttctttttcttctccaacaataaacgacgttgaatttaatattatttctgttggtaaagtacttagaaccttacctaacagaaataacacatcaccggacggtattacctttagactgttaaaaaattgttctctttcgtttactccttttgttactgaaattttcagactctcccttgatacaggaaagcttcccactatatggaaacaatcgattattatccccttgcataaacaaggggacaaaagtaaccctatgaactataggcctattgccttaacttgttctttatgcaaaattatggaaaaatttattgtttgggctatttccgattttcttttaaagaacaatttattctccgaacatcaatttggatttataaagggcagatcaaccacaacacaactaatttcaacccttgaaaattggtatgatggtatttataataataagaatatcgattgtgtctatatagattttaggaaagcatttgatgttatcccccataatttacttttatataaggttcatagaatcggtattaggggtaaaatcttaaactggttatctgactttctttcaaaccgtacctttagggttcgggttgataatactctctcttctgagtataaaatgagctctggcgttccccagggttctgttcttgggcctcttttgtttctgatatatattaatgtttacctgaattaattcctaaacaaatttctataaaattatatgcggatgatgtcaaattatattccgtacataaaacaaaaactgatagaattgctatgcaccgtgctttaaatattctctctgattggtctaagaaatgaaatattaaaatttccatcaataaaacttttattatttactttggaaagaataaccccagggaacaatataaaattaatgataatgcaatttgtgaagttgaaactatccgtgatttagggattcttattgacaataaattttctttttccgaacacataagcaaaatcactcgtaacgcctactaccgtatgcgtttacttttccgtgttattaaatcaaagaaaatagcaatttggaaaaatatttttgttagttatatccgtccacttcttgaatattcccctgaatcttggaatccgcaacttaaatcccatattatcaaaattgaaaaatttcagaaatattttactcgaattgctttcagaaaatgttgtctgccaaatattccctatgaccaacgactccgattttttaaattagctactcttgaaaaaagaagaaaaatttttgacctcctaactacttataaaattctacatggttttacacatttggacccaaattcactgtttaagagaactaacttaaatactcgaaacaagtcttttttccggttaaatgttaaattacaatttaaaaaatcttcgaaatcttttgttaacagaacagtcaaggcctggaatgcccttgataaaacattaatgtctagctccttaaacacctttaaaaaattattagaattgactcttgattctcaaagcaccaatgtataaagcaattattaacttttgaggcatctcattgactctgacttccattttatttttttttcattattgtttgttttaacctgtgatctcactcgatatttattcacttactctgagactattttactgtgatcagtcatcagagtaagtggtctccgcccttctgatggcaattttttctttatcgataa

SEQ ID NO: 74264 - DNA, 447 bp, Heterodera glycines
atgaaagaatttgttaatagtgggcaggtgaagaactgtttctaaaaaatattttttcttgtctctttaattcatttttcagactcataataaacaaaggacaaatgagaccattttgcctgccaattggtattgcgaccgcattaacagaactgaatatgaagcgcaatcaaaagactcggatcgtcatttgctcgaccttttggatcagattctgagtaatcaccatccaaattctttgcaacgatatgaccagcttaaaaaggtccatcccggcacattccgccgattgattctcccaattcattttcagttccgactcgcttatccttcaatttatgagaagcgtttcccaacacattcgtctcatttggttgtgggcactaaccttaatcattcttgaaactgaccggaactctgattgtgagaaggaaatctcattcataa

SEQ ID NO: 74265 - DNA, 650 bp, Heterodera glycines
aatgtccaccttcctgagtccaatctttggttgcgctattaatttcaaagtgtgcgaaatgtttgaagacattttgcagacattgagcttgttctcgggggattataggcgccatcgaagtcaaatgtttttttaccaaaacgaagtgagcaaaggcatctaacgaaagagagggaaaagggcagtcaaagagactgacaaaagaggaccattggaggggggaaatgtctcttgcgattggtccgtcccgccccattgcccaagccgacgcagagagaagagcaaatcgcgatgcaattcacctaaatctatttgtttggataatattgaaaataatcatttcgtaaaatgtttatttttatgtcttttggaatatagatccgcgctcatttgaggaccgttctgttcacgaagtcgttgaacaatcccagtgttttcgttgattcttttgcaattccaacgaacatcggctccagaaaagttggcatgaaaaaaatatccgagtttattgaaggaagcaaaattagtaaacctaaacgaaaatcttaaaaataatagagcttgaatttttgtgaattgcataaattcttaacgccaagaaatgcatttaaactctaattcctaatcattactcactcaccaattgacga

SEQ ID NO: 74266 - DNA, 797 bp, Heterodera glycines
gttctctcgctgcggttcgtgttggcccgactgttggtttttcaacgagaacttaacataaaaatgtgtacatttttaaaagcacagattgttttgccctccaaaattatacgcgttattacgtcaaagactacggaaaactttcgggacggtaaaaaagaaaaagaataaaattgagctggatttgctgttgtttttaatcagactgcaaatgatgtccgaaatacacaacagaggaccaatcgcttgcgcaattggagccacggagcaattcgacctcaattacaccgggggcatcttccaacaaacttcggatgccccggtaaacaatttgttttttattactctgaagggctgcacgagagtctcgacaccgagtcgaaaatagttcgggtttttgggtgtcggtgtcaattgcttgtctcgaaaccgataaaagtcactcttgagttgccctttgcttttggctgttggccgagactaattaatctcggactcccgcggcgccactaattaattctccaattgcagaccaatcacattgtgtcggtgtcgggttggggttgggacgacgtgtcgaacacggagttttggattgtgcgcaacagttggggggacgcgtgggtaagcattgagttgcactccttcaacacaacaatcattcgagcatttagggagaaacgggatggttccgaattgtgaccagcatttacaggggaggaaggggcgaccaatacaatttgggcatcgaacgcgagtgttactttgccgacccggacatttccaatttgaactga

SEQ ID NO: 74267 - DNA, 1040 bp, Heterodera glycines
atgggacaagcgggaggagagacgaaccaaaatggcaaaggcgacaaaagcccgatgggccaacaaaagtgagtttttcaccaatttttaacataaaaattccatttttcaaatttcagacgctccacagccgaaccccaatgccgaaacgccacagcaggactaagcagggccgtcaacatctgctgcatccgtcgaagaagcgatggagccgccaccaccaactccagcaccagtgccaacggtggagatggacgagtaaatgttggaatttggcgattcgctgccgtcgacatcagcgacgccaatcggcgatttggtgccgttcccgtcgacacccactgcaccaatggacatttgggattcaatttggaaggtgctaaattttcaggagatgaagcgttgcattccgtttggcgacgacttgagcaactttggaagacgatgccggacgctgaacaaatgcgtcaacagcttgagcatcatttcgtctcgaattggcttctggacaccggcagactcgacgaattgaagctggtgagttcatggaaggcattaaaatttgatcaaacaaattaagagggaggaggaaatgcgggaacaagcggccgaagaaaaaacgaacgaagaaagtgatcaagaggccaacatcgatgtcgttgactgatcgaggattgatggttttcattttcattacacgtgacaaaaaaaaatgttaaaaattcgtaaacaattttcaagtcattttggtcacttgtccttttatttattcattaaaatcatcgaaatacagctacagcatgaactggactcgaacctgggaccctccctttggtgaccttctcacagaccacttcgccacacatgcaaatcttttctggtacagcagctcatttcccggacgctgtgataaatagcattgacaagtctgtgtttcattctcgttctcagtttgaattttgataactcaattaatttcgtaatacattcaatgtccatacatatacctatttagtacatcaaaacagctgcaaaataaa

SEQ ID NO: 74268 - DNA, 380 bp, Heterodera glycines
atgaatccgccgatggtccgttgggtgctttttgggaatggcatcggatggtcgctggggctgacaaattcggctccatctcgcagcgaatgcttcatctgcgtccttctttggtccgcacttgcgtcgtctttagcagtccaatcattctctcagaaagtgccttccgtctccaagcgaattgccttcccttcgaccgccttcccaaatccaaatccgaacaatgccatccctccgccgaatgtcgtccgtcgccgtgcccataacattccaagggacaaacccccgtgccttcgaccgatggacagaccattccgagaacatcggacgtacccgcgcagttgggaaatgcctggctttgaggcaaccattccccgcca

SEQ ID NO: 74269 - DNA, 73 bp, Heterodera glycines
atggcccaatgcctcaagctctttgtccaattcgccatctttatggctgcggcatcgcatgccactttgaata

SEQ ID NO: 74270 - DNA, 529 bp, Heterodera glycines
atgaacttaaaagtaagtacaagtcttagatccaagccaaggaaggctttaatccaggatactggtcttggaaaaacacgctttctaaggacgagtgtattgatttcctaggaaatcacgatatttttttaattgaattcaaggacacttaacaattttctccatttacaatgaaaaatggttaattttttattcaaatgtttgtattttttgccagatcaatattttttctactgatcattaaatccggcttgaatctcttatcataattaaccaaaaatggtccaaattcaagataatttcagattttcatgtacgagcatccaatttcaaagacaaaacagccggacgaaattgtattaattaagccctttaattttattatttgatttgttcactgcttgttctgagtctacggcgagttgctagagagcataagctttaattttcaatcacttatgttaattctattaaatttaacatgagtcttccttcaattaattaattatttgccaaataatgaaataaa

SEQ ID NO: 74271 - DNA, 714 bp, Heterodera glycines
atggacgaacggcacacatttttaggttgggaccaattggaggacgaagagggaaaagaggaggattattgggacaggggaaggcccgactcgaaaagtgagtgcgatgaatttgatgaacatttcaaagaataattgtcagaattggccgaattagttgagcacgtggagcagtacagaaaaagcgcaattttgtcgaaaagtgagcgggggggacaaagggacaacaaaccaatggacaaaagggaagggacaaagggacgacaaaccaatggacaaaagggaagggacaaagggacgacaaaccaatggacaaaagggaagggacaaggacgacaaaccaatggacaaaagggaagggacaaagggacgacaaaccaatggacaaaagggaagggacacaaagggacgacaaaccaatggacaaaagggaagggacaaagggacgacaaaccaatggacaaaagggaagggacaaagggacgacaaaccaatggacaaaagggaagggacaaagggacgacaaaccaatggacaaaagggaagggacacaaagggacgacaaaccaatggacaaaagggaagggacaaagggacgacaaaccaatggacaaaagggaagggacaaagggacgacaaaccaatggacaaaagggaagggacaaagggacgacaaaccaatggacaaaagggaagggacaaagggacgagtaa

SEQ ID NO: 74272 - DNA, 446 bp, Heterodera glycines
atgcggcggaactcatccctttccatggacactttcggggatttaagcaccaaaatcgcttcaactcaaagtggtaaaactaggcatttattaaacaatgcaaaacaataatagaaattgttgactcatcccattcttaattttttttcctttttcaattattctattttaaaatgcaaatttgaccttttttagccgagaaagttcattttgcttgtggcgaacaggaccaacggttggaaaatgaaggagaagccataagtcggggggaggaggaggaagacgaagaggaagtggagggcggacagtccagcgacagttcgtacgtcaaggtcattgcctttgcggacggagtcagcagcgatgaattgggcacggatctcagcgaatttgtcaaggaggtcaaattggcaccggacgatttgtgctccttttcctcggagccc

SEQ ID NO: 74273 - DNA, 330 bp, Heterodera glycines
atgtcaatgtgcgggtcggacttggttatgacggtgctacgtcatttcgcgacaagtgcaaaaagggcacttcgcgacagtgcaaaaattgggcacttcgcgaaaaatgcaaaaattgggcacttcgcgacagtgcaaaaatggtgtaaaaatggggcgtttcgcgacagtgcaaaaatgggcacttcgcgaaacgtgcaaatttaaccgaaagagaccgggcctcatcagtacggtgtctctttgggttaatttatttaaattaattattatttgtgtttcggccctaaaccgtatacacacaaagccacagcaatcaagcaaagcaaa

SEQ ID NO: 74274 - DNA, 956 bp, Heterodera glycines
atgcaaaaattgggcacttcgcgacagtgcaaaaatggtgtaaaaatggggcgtttcgcgacagtgcaaaaatgggcacttcgcgaaacgtgcaaatttaaccgaaagagaccgggcctcatcagtacggtgtctctttgggttatttatttaaattaattattatttgtgtttcggccctaaaccgcatacacacaaagccacagcaatcaagcaaagcaaaataaattttattaagcaaactaaatattttatattggtttttaatttaatcttttaactaattatatttgaatatgattaatcaaccaattaaaaagcaaatcaatttactattttaataaaattatacttgattatttaaagagcaaatttttgttattattttaaaaaatttatgcaaatgcttttaattttataataagctagttttgctttaactccgcaggatctataattgcttggaaatgtcccaattcaacaaatttaaaattccttaaaaacccttaaaactgcaaaaaccgtattatccactctcatcggagctgccggaggggcctcatttgccctaattttggatgaatttttggagatgttatcggaaggttttgaaaattatgtaactttttaaaagctgcgttaagataacgatttattatcggcattgttccccttgacattttccattagcggcggtgaaatgcttatacaggaagaagattttaaaaccgaatatatcttcgatctttttgaacgactaacaaaacatcaccacgttaataagatctgttttcaggatgcaaacggaaagcagaaagaaatccacaaagtccaagaaaaccttccccttatcttgctatattgtttagccaatggaaaacgtttagacttgtatttgtgtaaatgattctacacagaataatgcaaatgttgaagccttgcaaactcaaaataaa

SEQ ID NO: 74275 - DNA, 287 bp, Heterodera glycines
atggtcccccgcttcctgaagaggtcgcaaagtggttcatctggggtgggggataattagagcatatacggtattcgacttaacacaaaacatacaaaatatttccttttcattcatttctacacattcacttttagtggcggggtgtcgcagttggtaaagcttctgcttatgcctcgatgaaacttatgagttcaattccgcttaccttctgtccaatggatcaagaccgagctgcgtcgcccatgtttttttaatgtttttaattagcttttaaaaaaattaaa

SEQ ID NO: 74276 - DNA, 1833 bp, Heterodera glycines
atgcaaaaacctactccttctaaccgccccaattcctctgtctccaaaacccttgcctgcgggcttgaaaaaattgtgaatttgagtggaaatgagccactctcggtgccggtgctggcggatcggagtgatccgctggggctcaagtcggtccaacccgacccggtgccaatggaaagtgccgaggctggcacaaaagaattggaagtgatggaagtggatgaaatgagcggagaaaaagggaaaaagggagaaatgggtaaagaaaaggtgaaaagtggtggaattgaagaggaggaagaaagtgagtgcagtgagggtgaactgctaggagacggtggatttggcaatttgcaactaaaccccagcctgagggcgggaaataaagcagttgaaaaggaagataaggggaaaccctatctggtcgcccaagtgagaagcgacggtgtgatcgcggcacggatgaaacttttctgggatttcccggaattggtctttgtcccttttagcctcttcgacaacgcccagccgatcgaaatcggcgatttgttccgcttacataagtgtgagtggacgaataacgaaacaggatgggaagagcgcggagattggctgtatgaagcaaccggacggctgaactaccaagccacggcaacggacgtgagccaattgcgccagcgcatccccactcaggccgtcggaattttggtcgatgtgcaaagagcccgtgaccgacacgtcaaagtggccatggtgtcagcacctgagctgagctgcgtgatgcgcgcctaccgtcgccacttcccggccgatttcacggataacgacatccgctaccgctccgttgtccgtcttcaacttcggcagatcaacagtccgccatgggtgctgtattcacagcagtttgcgtatgttttgccatctgattttggtaaaaaaaggggcgatgaactgctcgttcatcacgcaaacgtcattgctggcgttgagcctgagccaatgggctatgagttccctttcagtgccgaattgagctgggcgaaggtccagctgggcgagaaagtcatggccgcggctgttgcggcacaggcattcgatgtgaaggctgatctgcggaagcacactctgttcgtcgagccggtcgtcatcaatgagatctcgacaagaagcgtgatcatccagttcgtcatgccggtgccgagcatcgaagagctgacggaattgtgcaaaatttgggaggtcgatttggcggtgggttgcaaagtcaatccggcaaccaaggcaaagccttgcgcgcatgggtatgtgctgagcatcgaaaaaagggcgttatgtcgggggtacgaaattgatgttaaagtgatcctttcctaccaagaagcgaaggatcaggacgcgcaggaggaattcgatcagatgcgctgcggcgaactcgacggatgcgttgaactcattccgcagacgtcagtcagggcactgcaggaacggatgttcaccttgcgatccaatgactgctcgaaagtggcgatggacgaaggaaaaggaaaggtgggccgaattatgtcgattttattgggccgaccggtaaaaccggaaagcccaaagggcaacaacccattaatgacttttggggctctttcaaaattgaaagagggacaggtcgacaccgcgctgtgcatgctcgacgaggtgccgcgcctggtctttcaacaggccgggcccggcaccgggaagacgttcagcgcagcgtcgatcgtggccactatcctggccacggatcccacggctcgtgtgttggcgctggccccgccaaatgtcgccgtcgtcaagctg

SEQ ID NO: 74277 - DNA, 1879 bp, Heterodera glycines
atgccaaagatttgtattcatttcgaaatgattttagacgaaaacgaagacagatgcaaaaatgtgagtcgaattggcagaatttcgcgtcgtaaatgcaaagaagcgattgcacgtgctcaaaatgtggcggaccatctgagcagcacagttcacgcgtggaaagtgctgcaaaagggcggcgcattggaagtaaaaaggcgaaattagcaaattaattaataattaatgagtggtaattaattggaaaaggtccgcttccacgacgagacgaacagttattatgtgaagacgaatttcgaacacaatgcccaaggtgggaagggattaaaggggattttgaactaattgagggggattgaaagcaataagcgatttgaaactaattgaggcggattgaaaacaataagcgattaattaagcgatttggaatgcgatttggaaggaaagccataaatggaacacgcagttgttggagtcacgaataattgcaggtaaagtgtggaaaaaggggaatggacatattttttcaatgaattaaattgggataataattttaaattatggcatcagcaaatgccaactttcataccgtatgcctttcagtgattgacagtaccacggacatcatcattagtgtgacgaaggccgccggcggcggatacattgcgccaaggcatttcattgatatcaggtggattttgaaaaattgtgcttaattaaaatggaataattacttatttaaattaaagtataattaataaaactttagacgctttgtcactgacgaggcgggcattgtttttgtgggtgtttatgtttcggtcgaatcggccgaggacacaattcggccgcaccaaccgccggagaaacggcgcggcggagggggcgggggactcgaagttcggttggcactttcgaatttgacaaatgctttaaagacagcttcaaaagcataagcattgttttttccctttcagcggtcgtaacggtgtgaatatgatccgaatttctcagctgggaccgaacaaatcccttttcgaatggattatgaacacggatttgcgagtacaaaaaacaaacaaacaaatgttgtttgattaatttctcacttttcagctctcaatccctcgcatgctgataagaagggtcccattattattgaattaattattttaattaattaaattatttttattaatttgcaatattttttcagacattgaccactttcttcgccgactattgtcgaatgattgcgaactttttacatgaaaatcccagcggaatcaaatgaagaatgtgactttcaaaatcaatggaaaaccaaaaaagtgatcgctcgcttctccaaacattggcatctgatcagtccgcgttggtttggaaaggcccaaaaatcattcctttgccattccttccaaatttttgatacagacaaattattttataaatggctatgtctcttttattgtgtatttcttttgtatcatattaaatttttgtacggaaaatattcgcttaaaatgccattgtttggcatttcgtcaataatttctgacaattgccggatggaatttgcttggccttggaaattgcgcttcctttttgccgttttcgcatcgctttcggttgcatcggtgcagcaaatagcaaatgccccagcagaagaaaatcaaattgacaaaagcgactaccaaagcgatgttcactaaaaaggtggaaatttaaattatactaaaaatagaaaataattatttgccaattaaatatgtcattaattaattgcttttgcattcgcttttgccaacctcggctcattcgttctgcttcttcgtcatttttttcggccgatgacaaagcaaacaaaaaagtgaga

SEQ ID NO: 74278 - DNA, 1474 bp, Heterodera glycines
atgtgctctttggggcccgtatttgtttcatttgcttcctctggtggacttcaagttcgggttggtcttcttctgccggtgtttcacggaatggacgagaaccgttttcagaattcaggtctcagcattgtcaacaagttgacccttcaggtggccattatttctaaatgtttaacatacgcttttaatttttcaaaattaaaaccgtaatgaatgaaaaacatgtccttctttggtttgttttccctattaaatcctaccattaattggtttggctttaattcccctcccctccattgcgtgtccctccaattttaaatttttcctccctccattttatccgtttttctctaatcccccactttagaggtatcccttccctctgaccattgctctgtcctcctgccttaacaatgtgctctattccctgcccctactccgctttttgtccatctcttccgtctccgtgcccaccgattatttgcttcgcattgttttgcccatttccgtcggtcgcgcggtggccaccgtcagcgcatattttgcgctgtggaaaatcagtgtcagctacacgcagacaagtcaaattgggaagggatttgtaaaagcagaaaaatgttgggggtttgggattagcctcttttttgcagccttcacggaccttaaaaaattacacagccaaaaatatgacacaaaaaaataacacaattaaaacaaaagttattttgagtacgtagctcatcttaaaaaggctagcactttcgcaaaatcaggcgcccaaaatcatattttttccccaactaggccgggccttgatttttatgtgacccaattgggcaaatttccaaattttaacagactttgataagccattaaatgcgctttttgctgtctttttatctgtccattttgccctttcagttaaatccacaatgcctttgttcactgtgctcatttctcgtcttttgcttggcgaacgtcagcccatgcgaatttacttgtctttgttgcccattatcacaggtgttttttcactggttttcactaaattttcaattctcatttatttttaatttttcggtgtttttattacgactgcgaccgaattgcaattcgattccttcggcctttgcttctcattactttcgacgggaattcttgcttttttgaatgttcttgccaaaaaggtgggcttaagattaccattttcaacagattttagagagaagtcaattcgaacaaagttcgaatgctcggtttgggaggggaacatagaaaccctctacgattttaaattgctttttccttcccatcccacggctttgtaattttaattttgcaggtgctcgatgagacgcgaatgcatccgataaatttgctctctctgaactcccaattggcttctctgctgctgttccccttttggctgttcaccgatgctctcaaaatgtggtcgaacattcattcgacaaat

SEQ ID NO: 74279 - DNA, 1041 bp, Heterodera glycines
atgttttttttgactggtaaatggattattttgggtattaaaatgtttttttttgactggtaaatggattattgttcttgaatatttttaaaaaataattaaatgacgttctttattaaattgtgtctttttaggctctttaattaacattctatatactttaaatggtctttttttgattcactaaattactaattcaataaatgaatgcccttttttaaaattaattaattaatttttgtttaaataatttttttcgaattatttcaactcccatttttagaacattagataacatttttcttacctaatttttcgggatactaaactatttttttgggttcatttaacgagtacttttaatgaaagattattttattttttttaataattaaatgccttttttaattaaactttgtgttttaagtcatttaattaccacaactgtacccattcctgttcatttcttggcccatttttccatttcaataaatgttcttttgtttttgaaattaattaaattatcatccttaattcaaatataaatgcaatttttttttttaaattttaatgacatttttttggaatgttaatggtaattattttttttctaaaattagactatctggcccctcctgtcatgcctcttccttttctgttgccaatgccttcatcgccgccgccttacttccctcctccgccctattacgattgccaggaggagaaggaggatgatagggcgggggaggggtggtacgacgggtggttgcacttccacaaccgctctttgggaggttgggagttttaggtgtgttaaccaaatttaaactaagaggcgagtaatttaagcatagggcttatccgcctatttacatttatttattattattttttttttcttgctaatttatttagggtatttttttttaaatttaatttaagttgtggaatgatgggtgcgcagaacacaactcgtcaacaaacaacgaaagaacaaagaatggaaattgagaattgattgttaaaaaataatctaataaa

SEQ ID NO: 74280 - DNA, 1727 bp, Heterodera glycines
atgatggatgataatcatgatgatgatggtgatggaagaggaggagaggaaaaggaaatggtgaccgcgccgaagaagaggaagaagaacccagtggcaggcatggaggaagaagaagaagaggaggaggaagaagagacgaatggcgtgcctttatcctcgtcgtcctcatcatcatcattgcctttcatgttgccggcaatttgtggtggtgttgctggcggttatggctttggtggtggtggtggtggtgtaatgcttaagactcgctgtcccatgttgctgccatcgcataaaaaaccctttgttgttaccgccgccgcctccgctttggcggctaatgcctccgttacaattaaccatgctgttggtgctgattgtcgtggtggtaactttgtttcaccgcctccgtcgtcgcagtgccgtgatggcactgttcaaccggctggtggcacatcgtcatcattgttgtccaccacgtctgcgaggagcacggcgcaatcgaaggtgcgtctggtggtggtgtcatggacaacatggcctggctatttgttgtttgttgtccccgcttttttgttgcttcttttttttcgctttttgcttttttatgtgccatccatcatttttcattactatttggcacttttgctgttgggggatgtgggcgattcaattttttatggttttctgaggaagcaaaaaaaaaatccgcctaccccaaacgctaaaagtaccttgaattttttaaagtttaacccaaaaatctgcaaaaattttgttgttgttttttgttaaaacttttggcttttccattttcttttagattcttttgtggttgtccaatttatttttgttattattgtgtctgtctactaacttatcaccctcccgtttttcttttatcccttaaattcaaatttatttattttttctctaaaattgttgttttgctttgcttcaaaatgtttttccatttgtccttgttcttcgtacgtattaattaactttgtttgtctgttcagcacttgtttacgtatttggctcattcatgcacatggcttaatttaatctttttttcccacttaggtattcagatcatgaattaatcttttttttttgttaaattggaatcatacttcgaaaatggtgtgccactatattttgcaaaaaattccggattaaatccctattcaaacattcctttccctctcctgtaaaattggcatcaaaattcgaaaatgatgtgccctcatcctaaatttttttttttattgtattgctgtcgcatccctctattattttttcgtgatttgttttttttcctctctttcggtcttcaaaaaattatttgcactcatcgcttttttcacgtgaaattttaacacccttgtacagtcatcatgattacagtatctgttgaattttctgcacaacaataaataaatgggtgggggctcgggaggcgttaaaaatatgaattttaaaagattccttaaaaacattccataatttcctcccgttttcagtaccgctccaagatgatcaagtttgcccgctcgcgcatccacggctggggcctgttcgcgctggaaccgattgcgcaggacgaaatgatcgtggagtatgtgggcgacaaaatccggccagaggtggccaacgtgcgcgagttggcctacgagcggcagggcatcggctcctcctacctgttccgcattgacgaccacaat

SEQ ID NO: 74281 - DNA, 1306 bp, Heterodera glycines
tgccaccgctgcgttggaagcggtctttacctgttgctggcccgtctccgcgaggcggaactgcgctccgtcaagcagtgggccaagcggtcgccagcagaggaggacgcgatgctgagcgagtacatgcgggtaaacaaaatgaaatatgttgtaattttgaagaaaaaaaacgcccacccaaatttgttttatcgaagaattttttaatttgacaaaaattttttcaaaataacaatttgacttccgtcatgacgaatttaaaaaataaaaattttatgttttctatatttcattgagttttttgaggtttttttcgaaaataatctaaataaaaaatatttcttcaaagatttttttatgtaaaaaactataatttttaacaagttgcttcccccatattaaaaatgtttttttgcaaaaattcagtcaattataaaaaattttggcccatccctgtttttgtccaatccatcataaaatttctctaatccaagttgttaaagccttggaaatttttttttaattttatgtctaaaatcattccccctcctccaggacggtcttgagctggaggaaattgagtacctgaagatggcattcaaggacttggacctggccgatttgtgtgcggacatcaacgagtcggccttccaaaatgtgcgtcgaatgccgtgtgccgatgcggcggatgtgcaggcgcagcagccgtttgtctgggtggagccggagggcatttgcgagacgccgaatgtgtttgtgagttgtggcatttcactttctctatattttatataaattataagcatttccttctcaattcacttgtttggctagcaaatacgacattcttcctggaaaattttatttttagagttttttaattaaaagaatttttaaaaaaatgtgatcaatttatgattaaccccaccgttgtaatcactaatttctttcttgaatcaaattttaaaaaaatttgcagccaggtggacttgaacccatcgcccaaaaccaatttttaactgaccgttcaactcccacaataagcgcttgttttcctcttaactcctccaaaaatgcattcccttttcaattatttacttaaaattaatattttttttgtttgtttttccagcccaaaccgtacacggatgccagacggccgggctccatctactactacgtggacgcggagctggagggcgtcatgccgaaccggaccggcagtgcccggaccgagggacactacacgcgcaagagggacctggagaaggagcaactgctggcacaagtcggtggtcaatag

SEQ ID NO: 74282 - DNA, 325 bp, Heterodera glycines
atgaaaggcggcgacggacacggagcggaagtgaccagcaaatggacaccgacgacgacagtcggcgaagcggtcaccatcgttatgccgccaccatcaccggtggcagcagtcagcgccgaacaaagctgcgcgaaacatccatggcaagttcatcacgacgaagcagtcacagcaccagcggcggcagcaggtcgtcatcaacttccacaacaacttcaagcagttcatcatcatcatcttcccgtcatcggtacaggtcccgaagacggaggagggacagtgtcacctcagccaccagcagcagcggtagcagcagtgacag

SEQ ID NO: 74283 - DNA, 2835 bp, Heterodera glycines
atggcacaatgggggcccaaaaaggggggtgagtcgcgggaggcgggcacatcaccggagaaaggcgggaggggaagggtccgggcgaatttgctctcccgcaaattcgcaattttccatcaaatgatcgccgattttcatcggctgtccgccttggtgatgtgttgtttcgcccgtcgcaccgcgatggtccgatcggcgtttttgcactgcctcgggcgtccttcatgcggagaaggcgccacctccgctttttatcgctttccttcccctcattcacgtgctcgcctgctgccgtccctcccttcgccccctttttgtcctcccttcccttcatcatttcccgtttgccctatttttcccatctttccattcatttatcactccttgttcgcaacttcattcactcctccccgttctcctcatttgtccgctcaacggacattcgcggctgtcgttcagccgcgacattcccacggctttgaaaacgtcgcttcgaacggaatgcgaccatttgtcgtttcagctccatcaccaacggtgacggctcggggtcctcttgatgtgaacttgacgtttcgttcgctctcatttcctggggcattgaaggcggtaccagctcaattgcttcaatccttgaaattgccggtgctcgccgtgtgcctcgagtagctctgttccgctgcgtccactgatttcccgtcaccaaattgcggatggtaacgatgacgggccccattaagtagacccataccaagggtatcaggacatcgcgcccaaaaatgaatgtgacgtaaatgcagcatgccgttgtccagtaggagacgagcagccgaagtttgtccatgaaccattcttcggtgaggccaatcactccgttcgggagagctcccagtgtgagcgcacgcgaatttcccctgcgctacattaacatttgcctccacgatgtcaaaatggtatcaatttaatgatatgtctgctctccttatttttctttggatgacttttgtccttatttttcttttgatgacttcgaagttaggaaagtcggaaatttactcctgaaaattttccctgcgctacattaacatttgcctccacgatgtcaaaatggtatcaatttaatgatatgtctgctctccttatttttctttggatgacttttgtcctatttttcttttgatgacttcgaagttaggaaagtcggaaatttactcctgaaaattttccctgcgctacattaacatttgcctccacgatgtcaaaatggtatcaatttaatgatatgtctgctctccttatttttctttggatgacttttgtcctatttttcttttgatgacttcgaagttaggaaagtcggaaatttactcctgaaaattttccctgcgctacattaacatttgcctccacgatgtcaaaatggtatcaatttaatgatatgtctgctctccttatttttctttggatgacttttgtccttatttttcttttgatgacttcgaagttaggaaagtcggaaatttactcctgaaaattttccctgcgctacactaacatttgcctccacgatgtcaaaatggtatcaatttaatgatatgtctgctctccttatttttctttggatgacttttgtccttatttttcttttgatgacttcgaagttaggaaagtcggaaatttactcctgaaaattttccctgcgctacattaacatttgcctccacgatgtcaaaatggtatcaatttaatgatatgtctgctctccttatttttctttggatgacttttgtccttatttttcttttgatgacttcgaagttaggaaagtcggaaatttactcctaaataaggaaagaagcagaaacggaagcgaggaaggaattggaagaggaagcgcggaaggaagcggaaaagaaggcgcagaaggaagcggaagaagcgaaagaaaaatcacagaaagaagcggaagaagcgaaagaaaagacgcaaaaggaagccgaagaagcaaaagcgcagaaggaaagggaggagaaagtcaaaagagaggaggaagaaaagcgaaagaaagaaaaggaagcgaagacaaaaccgaaaaagaaggcagaaagagaagaaaatgacacaataatcgccaggggaataaagaaaaggcgcttaacagaagcagaaaaggaagagcgaagccagaaggatgccgaggaaaaagcgcgccgagagatcacggatattgtaaaagaagtcgaagaggaggccaagcaaaggcaaatccgaaacaaaattgaggaattgacggcaaaactggcagggaaacccagagaagaaatgggagaagaagaggcaaaggagttgggaaaggagaaggagcgctttgagaaccccccggagccgccaagagagcgcaggcctttctattccagcgccgtggcgcgctttgagtgccaaagcgaattggactcagcgtcgaaaccaagaggaagagaagaaagaggggacagagaaaggaacttgggaatgagcgggaagcgcttgttcacaaacatgctcaaatcggccgtcgggacagtaaatgaccgtccctgtattccacccgagggattaaatcgcgaaatgcttaaaagaagaccgactccagcgccagtgccgcagtttacgacacgcagcgcggagaggagccccgtgaggaagacatacgcgccgtttcggaaagggatgccactggaacgcgcggaggaagctatctacaaaatccgcaagtcactgctccaggccgcggacgctttcagagctcgccgacgaactgttcccgcacggagaagcgcgagagaaagatga

SEQ ID NO: 74284 - DNA, 1000 bp, Heterodera glycines
atgccaaccgcaacaccagcaacatttggtggtgctgctggtggtgatcagaataagcaaagctgtgccaacggttcttccaacacttctccggcacggcatggacatcaaactcagatgacgacgacgagtcgaagcagtacaacgccaccttccacggcgccgtcgttgtgcccattgaatggcgtcggttgtgacggagaagcggcgcaacaaaaacaggacacaattcagccagccaattgtgttgctggtgcatcttcatcatcatcatcctcgtctttttcagttccgaatgaggtaaaaaaagaaaaaatggggccctaaattatggacgattttacttggttttgtgagcaattttttgcgtcttaatccggctcaaattgttttttttattacccaaatggttcaaacttcttaatgaaaaaaagcattaaagttttagcatttcgctcaaaaagcctcaaaattttgcaaatctttgtccaaatttgtaataaacggcctaaaaatggaaacatttggacttttttgtgtgccattttacggttgtaccccatttttcggacaaaaatcgctgcggacgacggaaagccaatgccaaccgatggaagaagccattgccgacatgccaatggatgatgatgagaaggaggatgaagacgatgatgacatcgatgtcgaaagcgtgttggttaaccagaaactgcaacaacaaccaaattgcatcaccaccacttatatgccgttaattgacaccgactcgtaatccattttttaaattttatttaaatttcgaatttgatccgcaaaaaaacccacgctttattagcgattatccgacattagcgccaattataacgggttaaaatacatgtttttttttgtttatcaattaaagtttatatttattcaagaaaaaataggcgatgtttatggaatttgggattgaaaaaaaacagaaaaattttgagtccaattttggacattgacgcaa

SEQ ID NO: 74285 - DNA, 2025 bp, Heterodera glycines
  unsure (1)..(2025): unsure at all n locations
atgctttaccgcacgccggcattgccgttgaagacgcgctcaacgccgctctattcgctggtgctcgacttggttcggttttgctttatttaaaaaaaattgccaggacgaaacgctggtacactgcagtgtgcattttattggccaaaatctgtttttcaatgcgaaataaatgcaatttggcattttttttttttttggaattgaatagattttttttaagtcttttgtttgttcaaaaccctcaaaattagctctttttttcttaaaatttgctttgtttttttaggcccgcaatttttactcagtttaaaagccgaggacgacgacgacaaaaataacaacaatcgccaactgtcgcactgatgttttcggtttgcacatttttttcacggttaaatttaaccaaaaaccctgagaaatttcaattcattgggggtttcgattgaattaaaaaatcgctacattttttaaactttttttttgccaaatttcgtttgaattttttaaaaaatgccaagcaaggactacaaactttcaaaatgaaacccttaaaatgcttccaaattgttgtcaatatcatttttggccaaatcttttgtctataaatcagctaaaatgccttggtctttcacccgaggcacctaattttcaaagcatcacactggctaaaacaaattttatggccaagactaaaatttttcgtgttttccgcccaaatccgatttttttttgttcaattatgagccctccgatttcaatggtgaatttatttttagcattttattgcctcccccgaagctcgaaggagtgttggccgaattgaacggcacaatttgcgtgttggagcaattgttggagcagcgacagcgcatcctacaaaaattggtggcttttgccgggaaaaaattcttaagaaacttattgttagtaagaaattttcaagaaaaaatttttttgaaactttctgtgatttttttgatgaacactaccaaatttttttaaaaaattttttgaactttttttactaatatttttttaaataatttcttttgtgaaatttttaaagtaccaaaacttgaattttttttgcgttttttgcgcctaataattgaaaaattatggtccaatttttgttttttttgcatttgaaacccctaacgaatttttttttgcgttttttgcgccgaaaagaatttcatgcattttttataggccaaaaactcaaatttggcctaaatttttttttgtgccaaaattattttaaaagagctttaatggattttgtaaagtagcaaaaaatcaattaatggtttaatttttatttatttatttttgcttttaaccctaaggggtttgtttccgaataattgaaaaaatgctttaagttcttattggtttttttggttttaaaacctaaaggggttatggttcctgataattaaacaattggcctattttttggcctttttttgttttttaaagccccaagggcttatggtaccggataattaaaaaactgtctattttttgtcttttccctaggggttttggtaccctattattgaaaaattgatatactttttgggttttttttgcttttaaaccccaaggggttttggtacggaatatttgaaaaaatggtctaatttttatttttgctctaatttttgggtttttcttaatccagacgccgtttcttttgtgttggccaccacagcgcaggagttgttctcgcccgatgttgctacgatgatttcgtttgccatggttcagttcgcttttctccgcttcctggtcatgttttcgcttccgtcacttttggtgcactgatcggactcatttcggcgttggtaatgcaaaattttgccgttttccgactctaaaatggcatttttgtcgccaatcaatgccatttttattatttttaaaattttaaagaatttttggtgtttttgcttttaaaaccncaaggggttctggtaccgaatatttgaaaagatggtctattttggttttttacca

SEQ ID NO: 74286 - DNA, 1393 bp, Heterodera glycines
atgccttcaaaacaacacgctaaaagaaagaaggagcaagagcggtaccaaaggcagatggagcaatctgtcagcccaggtcgctcacccgtccctgacggaagtgcagatgagaatggggtggcatcacacccgggcatcacaacgcccaatattagtgctttgcaattaagcacaccggcttcttcctttggaagtaaaagaaagggaagacccccaaaagccggagcggtgtcaattatgacttcccaacacagtgtgtcatcttctgacactcaaattacatcggccccccaaaatattgattcatcgcctcgcaaaaaaagagagaaggtcgacgaagttgaccatcacatatctgctaatgaatcaattgcttcaacacctgtttccaggcaaaaaagccgtggagggcggccgaccaaaaagagaggcggcccaggcaggggtcaaacaaattattcaatgagcaatggctcctcaatgaaccacggctctgaagctgccacatcagtggtcgatttgccaactgtgcctgaaaagataaacttcagcacagtgcaaattaatttcgccacatctcgaaatatggcctgtaaaattcggagatgggctgatattggcctttacgaatgtgatgagagacgctcaggcccaagattcattgaaacgtgctggaatgatctgacacagtttctaaatgatggctttgttgtcgaatatttggcatacttggcaagcatatcacaacgaaaagtggtcgttgttgatccaatggtgtggcaaatgggcatagaccgagtcatgccttacaaaaatatgacatttgggtacgaccctaatgttccggcagaagttatacttttgccagtacatttccctggacattggactctcattgtccatgatgttcagtgcggtactcattttgccgattctttgcctacaccttatggcaggttggattggcaactgacggataaaattggaaagatcatatctgacattttgccgtcagcagtgttgaccgggattgttaatgccgtaaatctgacggtccaacacgatggaaatagctgcgggtactttgtgtgcctatatgctgaatcctggctcatgaacaatcgcacgtttgttctgcctgatttgtccataaattatgaaaagcggcgcctattgtggcacattaacgagctttatggcacagacaatgtgccataccatccgagggaaggggtaccaactccttgcccaattgtctgtcgacaggtgcagtcgacatccaagaccgctgagccaatggaaattgatgagcatgatgacataacgatcatcgaacctcagacgagtgggcaggcagttaatgccgtttccacccaagcccaagtggcag

SEQ ID NO: 74287 - DNA, 1038 bp, Heterodera glycines
atgcattgggatgagcacaacaacgcagcagaggaagaccaatgctttggcccaatggttgaatttggcggttgcgaggcgaaggaaacgccggagaaagttgaactgaacgaaagcagcgaaacgttggtggacgatttgaaccaacagctcaaagagttgaaggaaaagctgacgagtgcaaacgaaaaacttgtgacggttgcaaatcaaatggacaagacattggacgagtcattcgttggaatggagcagcaaaacgaatgggccaacaaagaaagcgcaaatggcacgcgggaaaagacaacgaccaacaaaggactaaagggcaaatccacacaaacaatgggctcctggtccatgggcttcggtgctccttttggaaaagacaattcagcagttccgaggatgtcttcagatttggaatggttggttttgtgtgggatttacacttatattttagttttttttcacacacctttctaaatattttacaataacaccaaacaaataacgcacttttttgtttatgtcgaaatttcaaactttttatttagaagaatggagatatttggatgtttttaatcggttgactgaattcatttgtctaaaaattaagcaaaatgcggatggagtgcagggagctgatgagaaagcacatcgaaacgctcagagagcatatgaaagtgcgcgtgtttttgctgcacgccaaaaggaagggaatggcagcggctgagaagaaaaagtgccagacaaaattcaaagcattaatggacgaatttgacgaagccaaacggaagataaaggcggactttaagcggggaaatgcggacaaagtgggaaatcgaagttaaatttaaattttaccattcaaattgagggaatgatggcgaagcattacgtggaaattggccaattgcagagggagacgcgaattttgcaagcgaaactccagcaaattgtcaacgggaaaaacgctgtcgcaaatgcgtcgcgattgtacgttgtttttacgttttatagacttatttgcaagaa

SEQ ID NO: 74288 - DNA, 1033 bp, Heterodera glycines
atgcattgggatgagcacaacaacgcagcagaggaagaccaatgctttggcccaatggttgaatttggcggttgcgaggcgaaggaaacgccggagaaagttgaactgaacgaaagcagcgaaacgttggtggacgatttgaaccaacagctcaaagagttgaaggaaaagctgacgagtgcaaacgaaaaacttgtgacggttgcaaatcaaatggacaagacattggacgagtcattcgttggaatggagcagcaaaacgaatgggccaacaaagaaagcgcaaatggcacgcgggaaaagacaacgaccaacaaaggactaaagggcaaatccacacaaacaatgggttcctggtccatgggcttcggtgctccttttggaaaagacaattcagcagttccgaagatgtcttcagatttggaatggttggttttgtgtgggatttacacttatattttagtttgttttcacacacctttctaaatattttaacaccaaacaaataacgcacttttttgtttatgtcgaaatttcaaactttttatttagaaggatggagatatttggatgtttttaatcggttgactgaattcatttgtctaaaaattaagcaaaatgcggatggagtgcagggagctgatgagaaagcacatcgaaacgctccgagagcatatgaaagtgcgcgtgtttttgctgcacgccaaaaggaagggaatggcagcggctgagaagaaaaagtgccagacgaaattcaaagcattaatggacgaatttgacgaagctaaacggaagataaaggcggactttaagcggggaaatgcggacaaagtgggaaatcgaagttaaatttaaattttaccattcaaattgagggaatgatggcgaatcattacgtggaaattggccaattgcagagggaaacgcgaattttgcaagcgaaactccagcaaattgtcaacgggaaaaacgctgtcgcaaatgcgtcgcgattgtacgttgtttttacgttttatagacttatttgcaagaa

SEQ ID NO: 74289 - DNA, 2174 bp, Heterodera glycines
  unsure (1)..(2174): unsure at all n locations
atgccacagccattccaagcgacgatctctccacaaattccgccgcttaatttcgaccaactttctgtcaatgacattgaatatgatgacaatgatggcggcggggaaggcttacttaacaaaacgtttactctccccgaagaacagaatgacaatgttcatgaagaggaggcggagaatgaaaatgggagcaacgcggacgagggaatttggcaggaacaggtgggaaaggaggggagctcaacattcgcctctatttctgtatcgaaacggggaaaaattgaaacggggtatataaccggggattagctttttctttgaaaattatataaaatataaagtaaatgttttgaaaaaactttaatccattcacagatagttgtgtccaatctgtcgacgagccattcagaagtcggaaatgtcactcagaacagtgacaaaattagcaatgaagttcaaatggtcgaatgccatgccgatggtcgttatttcaataaaaaaacagttgtttgggtcttaaatctttacgtatttaaggcgttgaacactcaaaggaaggctgtggcgacaatgtgagcttttctgaactgaccagcatcgccggggggaacaccagcgacgacattacctcaatcccttacccgagtgaagcggacaaaagggcgaataaggacgaagacaatgttgngaatgacgacaaagcaaatggagaggaacagcagggattggtctcctcccaaaacagtggttcaaccccaacctcgtcacgtcgtgtcaaatacaaaatttgtgcggaagaaagagggacaaaagtggaagtgtcggctcacggacgccaaatggacgtggaacggacgcattgcgtagttcaacagcagcaaccaattgaggcgattgaaagaagcaaaactggccaaaatgaaatccaaccgatggacgacggatcggccgacgatgacgagccgagcgaacgtaccgcagcggaggattcaacccaatcgagggaggtggccgactcagtgttcgaagagacaacgcaaaattcaaattcatcgccgaccaacaaaataggggagagtggtggaccaacaaacacgggtgaatgcacaccaaatgcacaatctgtgcatggcaaacgacagagaggggaggaggaggaagaagaggtggaagtgatctcggcaaaaagtttagttcgaagttcggctttaacgcagaggacattggcggaggtcgagagtatccccgaagaggtagggggggggggtggcgaaataacgagggcaaaagaactgtctcaggaaattaacttacaatcagtgcaatttttcatagaatgggtgctctgcttcaatttttgtattgatttaatctatattattgctagctttcaatggcttcacattcggcgaaatccttgccaaactcctccgtttccaccatgtcatctgggaaggggatggtggtcgccgtggaacccgtcgctgaacaccagcaacaacaacagacggacgattcgattgcggaagaagtgttttcggaggacatcgtttccaccttcaaaccgtcggagaagtcgctgcactccattctgtcattgcgtagcaattcgatgagcaccagtgcgcgggacagcatgggcaaactgaggagggactcggccagcgaagcgctgctcaaactgagaacgatgaattgcgtgccggagctgagaagtcctcgcgagtccaaaagtccacccaagtaaagccattacatgttttcagcagtcccaatccaaaaatttacagacccctgaggtcgccacgtggcattgaccgttttatggccaaattcccgcacaactcttcccgagaggccagtttcagtgaagagctgagtgtcaagggagaaatgctggaggaattgccgaatgcgagtcaaattgggatggtaatttttgggcaatcggtcccactcactttacccttgaattttttagcttttcgatgttagtggagcgtctgttgaaggaactttgtccaaattggacagcactgccgactcaaaacgtggacagtcggacatttttttgggcacggacaaacgcacggattccgtcgaatccaataaaatggagagaggcaattcgttgggcggtttcggtgtgccggaaggttaagtcttttggcgaa

SEQ ID NO: 74290 - DNA, 865 bp, Heterodera glycines
atgtcaatttcgaacaattcaatgaattgtggagatgatttcacaccagcagcagaaaatggaggtaaatgatgaaaaaggggaaaatatctcagtgaaattattttaaatttaaagaatattataaaaattttagaagtgaatggcgattcaattagtttggacaatgatggacaatttgatggaaatagtgaatcgattgctgatcaacaacagcttaaggtgggctaaaaaaacaaaaaacagagtaaaatgggataataatgaatttatatggtacaaaagtgattttgttaattgaaattcaggaattccgtgaaaagtttgccaaaatggaaatggaattgaaaatggccaaattggaactcgaaaatgtgagttttggtataaaaaatttttgagtaaaaataaatctcaaaaaattaaaaaataaaattatgtttagaaggcacttgaacaaaagttaaagcaccaggaaatgatgggtgaacagaaggcattgaaggaaaaagtgaccaaaattgaacaggaaaaggagaaaaacggtaaaagaaaataagtaaagaaattggtaaattttaaggaattaatttaattgaataagttgataaaatactggaatttattaaatcatcattaaaaactttcatcagcgaaagcattctctccactccaacgtaaaatattttgtttaaaataaaaatttgaaaacccaagaatttaattttttaagcaattattccaaatctgagcacatccgaggaaatgagtgttctgattgccagaattgctgagctgtatcgagcgaaaacaattgaagcatctgttgcaagcagctctgatttatttggacaagtcggaaacg

SEQ ID NO: 74291 - DNA, 2097 bp, Heterodera glycines
atgtcttcaaattttatcggttcgccaaattgctttttccgtccaacagctgatcagggtaagagaaataattaaaaaaagaattacgaaaaaaggaaattattttatcttttttaaataaaataaaataaaaatttatcaccattagcagcagcagcagaagaagtggacaagtatgaagtgttcagttggcacggagatttgagcgaccaattggcagcacaatttttggtcagtgatcagcagctgttgaaggtgggacatttcagaacggacaaatgagcacagaggggggagcacaaatgatcacagtgggggggggggagggggagagaggccggacggatcagtcacggacaaagggccgaccaattccgagagcaatcaagagacattttgccaaaaatcatgcaattaatgagtgaaggaaattggaaattatttagtggactgaaaaactttttttatttaaggaatgccgagaaaaacttgccagtgccgaattgagagaaacgaaattgctgtgcaaaaacggggaattgaatgcagagaatgtaagaaaaattaattattaaaaaaaaatttaaaaaatgacgaaataactgagagcgaacgcgcataaaacagaaactttcaaattttgtaagaaaattcagaaggcgcttaaagcagagttggagaaacaaaagctgatgtcggaaaacagtgaattgaaggcgaaagttgataagatggaccaggaaaagcagcagcaattggacaaaaaatacggtagagacaatttaaaaaaataaataatttttattaccgtactcggacagtactgtatgcttcaaaattatttcagtttctgtcgatgtgttcaattcattggtggagcgaatcaaacaattggaaaatcggcagaacaaagaggagggcagaaagggtaaataataaatttgaaataaataattaacggaccgaaattttgcatactttgaaaaggcgaaaaaattttaacggaccataagcttttacaattttgatcagttacaaattttaaatgaacatatttaattagctgaccaatgccaattatttttaattttcattttctattattcaattggatacattttttagcagaggaaaagcagcagaaggaaagtgttggtcaacagaacaaaaacaccgaacagaaattggatggaaaatatgccgtggtggacaaaaacaatgttttgggtgggcacaattggcaaattatttaaaattaaaaattggcgttataaaaaaaatgcattttttgagaggggacaaaaccctcgtattatatcgggattttatacatatttggtacatatttcggacttttttcttacatattttcattttttttacatatttgaggattttttacggaaatttttggaaattctcaaaaaaaaaatccaaaaatttcggcaaatttttcatttttttacatagctattctgagaatttttgaaaatttttagaaatttcttgtgaaaaaattaaaaaatctttttttaaatgtacccctccaaaaataatttttcaaatgttaaaaggtgattttaaacattttggtcatttttatggcattttgtgcctatttaacactttatgaaaaaaaattttccaaaaaataacaatttaaaaaaattttatttacatattttcgtacatattttgggtttttatacatatttcttacatatttcgggatttttttttacatatttatgtacatatatgaccactttttgtacatattttttacagccctaattataaatatttaggtgttaaaaaattaatttttctttttaaaatgtatttattgctaatttagttgctttagtgacgtcatcgggcgaccattcgccgccggcggttgtctcagcgaaagttgcaaaggtgggaaggaaaccttaattatttcacaaatgccatttaatttcaggaagtgcctaattcgcagcaacaaaatggctgggatgccaaagtttgccacaaagacatcgaaatcattggggaaaagcaattgacgatcaattgcaagggcagcagatttggtatttaatataaaaa

SEQ ID NO: 74292 - DNA, 1509 bp, Heterodera glycines
atgacaccaaatcttctgcccacgctttatctgaccgcgttgcccctacgacaccaagacggacctggtgcagaacaccagcaacaacaccagcaagtcacccgtgtgttctaccctgattcgttggccgatgaaaaagaggtggtccgaacaattttttgaatatttaattaataaacaaatttattttgggtgttgcggggtgccaatgatggttgtcgtcggaaaaaaaaattctttaataaattattctctaaaatcagtacatttctgataaatcagagtatacggtacccttggtcgaacccaagagcgtagccaatgggtcttttcggcgggcgccgccggtgctattccaagttttcagactataactaaaattgcaacaaaaaaaagtcgaaatattttgaagttttttcttaataaatgttttacaggccataaaattttttttgctttttgtaaggctaatagagcatgtgaaaagggctttcaaatgttaccaagaattgttatttttccaggtgactgttgatggtctgcacgagaaatgttggtactatttgtgcattgaatgggagaacttcaatcggcacaacgaaactacaggcacagatgtaaaaaaacttaattaaaatttcttttagcgattttgaaaaatttctgttcatattatatgaaaattcgattgataaaattaaattacaaaattttctttaaagtgtcgtctctttcgcacattggaccgtcttggcaaaggtgcggacagtacggtgtccgaattggaacccactgatttctcctcacaaatgatgcaattccggctccgttccgtgtccgattttccgatgaggtaggtgttggattacgaaaatttcaagaaaatttacagcaagtataaaatttattaattattgatttatttttggcactattcattaggaatctctctttcctcttatctctcgttttcacagtctgtcctcttatctctcgtttttctctaactgtctgtcctcttatctgtcggttttctaatctaactgtctgtcctcttattttttgctcatactctcatcatttcctttttctttctttaacattggtcttctctcaatttgcttaagtaattaattttaaatcaattaacaaaatccctgttaaggctaactgttgggttggagggtggtaaattggcaccgacaccacctgcccaagtgtttcaattgtccggtgaacggccatttgtcgaaatggagttgattttcacgtaaaaccaattttctttattatattaataatttaaatattattttgagaaatttaattttattattttgacagatttttgcgacaactgatggattacggtcagttatgtacggttgaagagcctatggtcatacggtacacagctttgggccgacttgtgtccggcatcagcatccgaaaatgccatttccgtaggacaaaatattaatttttcaaaataatcttgatattcacaaa

SEQ ID NO: 74293 - DNA, 283 bp, Heterodera glycines
atgaaggccagcttcggccggtgggctgatcgaatgaaagaatgtttcggagacggcacattctcattggcacctccaatgttctaccaaataaattgtttccatttcttcattttgttaattattatatttaacgaaaaatttgcttggcgccaaaacgtcggcgccaaaacgaccctggcgccaaaacgtcggcgccaaatcgtcggcgccaaaacgtcggcgccaaaacgacctggtcccttcaaaatcgtctctgatgctcaacaaataatgtgccagt

SEQ ID NO: 74294 - DNA, 1686 bp, Heterodera glycines
aaatgcaatttaggaacataatatggccgaccggcttgtcaatttggcacttattgccggtggggctgagcttgtcgacgcggccgatttttacagggaattgccaggacatgctgacaaagtggtgatgctctaccacaaggtgtccccttttcagcctttgctttcactcaccaaattgctttctaattaggccgggcttatcggtcgtgccctcgatttcgcttttcgaaccgaacaattcggcgccttggatctgatcacgcaggaattgaacgaacattcggacccttccgttttggcacgcgccgctgaattcttttcggccaatcagcaggacggtgtggacattttcagtgtttggcatttgtcacttacaattagcagattttggaatttcaattgcatttctataccaaattgccttcctttaaggccaagccgttcgtttgttggtttatgccaaaaaagtaaagacccttttcggaatgattttcaccgctttttgtccgtttagtattcacaagcggtcgcattatgtgctgataaaaatgtacaaataactgaagagttagaaaatgttttgacgccaaataaattaggtataattaaataatgaataaaataaattggacaatttttaaaacttagaaagtttaccctcgggggaacggtcgcttttgctagaacaaattgcgcgctgtgctcttcagcaagggaattatcatattgcggcaaagaaattcacacaatccggcaacaaaatagaagtggctaattaagactaattatcatttcgttttaattggctaattaaggcaatgcgcgcccttttaaagtcgggcgacactcaggcaaacaaatgcaaaactccttttgttttttgctcgcatattctgctgctttagcgtgtccttctctttgctcagacggcgcgagtcggcgccatttatcgcatggcgggtaattacctgcaaacgcttaattggaaggaggacgcgcaactgatgcgccaaatcgaagcattttatgtgaaggcgggcgccatggatttgctgtccaacttttacgaatcgtgcgcacaagtgggacgaaaagcaaaacgaaacgaaaagcaaaacgaaaataaaaagcaaaacgaaacgaaaagcgaaaatgatagaaacgaaaagtactttcgggaataaaagtaggatttccatttgactttttattgaaactgaataaaagtgcaaatttggaaattgaggtggaaatcgacgagtaccatgactacgaaaaggcggcggcagcgtacggagaggcgtaaaaacactgaaaattggcatcttttgatgcgttttttgttttgtttagcattcaatgtttggccaaaaaattggctgacggggacgagaagaacaaaaactatctgacagagagaagggaaaaacttagccaaacgttggacataatcgcgcactttaatgagacaaaagggtgcacttgggctggggtaattaattaattatgggtcgtaatttggagcttttcagtttgtatgagaccgacccgggggaggccattagccaactgagcgaattggcacaacggaaaggcatcgatgagcacgtccgactgggcgatatttacgctttgatggtggcccattattacaagcgggaaaattacagaaaggtggggcaa

SEQ ID NO: 74295 - DNA, 1444 bp, Heterodera glycines
  unsure (1)..(1444): unsure at all n locations
ccatgacagcactcgagacttaatcatgctgaatcagtcgcgaatgtcncaagtggagctcaagtgggcgcaatagcaaatgccgagaaaaattaggacatttaacctntaatggtcagccgaagattggaggagacgacacgaaatttgaagtgtttggccaatgcgctaaaggcggaaaagcaacggactgaggcgagagagaatgaaataataccatgttaatcaattaatgactaaatttgcctaattaactgcttgaggggttactttgcgaactgatgccgcccagcgtggcagagtctcttcggcgcggcgcaacggtcgacgcagcggaattctccgaggcgaccgtgctgttcacagatgtaatttgtaaataatgctaataattcgaaattgaaaatgaaagcagttgggccgggaatggggacgaatattcggcacattttaagctgtcacatgggttaattttcaaagtgttccttcagatcgtcacttttacgaacatttgctccttctgcacgccttacgtttgtttgcccaatgcttcatttgtcggctcttttgccttaattggctaattaaggatgtgatcaaactgcttaatgacctataccaacgatttgatcgaattgtcggccttcacgacgtgtacaaagtggagacaattggtaaattagtgacaaaggaataaaacagaaagatacaataagcaaaagcttcttttcattaacaggcgatgcttatatgatcgtcggaggggtgccgaaagagtcccaaaatcacgcggagaaaattctgaatgttgccattggttttctgatggagtcgcgatttgtcaggggtggcccctctcctgctgtactccgttctgtgctttttgcaggtgaccaaccccaccaacgaattggccatttccatccgaattggcgtccattccggccccgtcgtcgccggcgtcgtcggagtaaaagtaaagcttttccattttcccttatcttaagagtgctttaccaatcatttttttagatgccaaggtgtttctttctttacataaattgtgtttaaatttgtcgttagatattgcctttttggtgacacaattcatttggccaatcgaatggaatctttgggtgcgtttgaacaattcgcacaaaattaacggattttagggatgccatccaaaatccacgtcagcaaaactgcgaaggctttggcaatcagaaacaatccgtcatttttgttcacagagagaggggccataaaaataaaggcaaatggaaaaaagcagcaaaaacaaaagtttgattaagggaaaggaaaaattgcgcacatattttttggagagaaatgaccgccaaagtgtttgggagatttgtgggagagtgagggaaatggaccaaagcatcgacgggtatcaggtggacgaggcggggggggg

SEQ ID NO: 74296 - DNA, 969 bp, Heterodera glycines
cagttcggatggatccacgaaagttttcggcaattgatgacgcgcaaatacggaagagaaatttggactaaaatattgtaaaatgaatgtttaccttgctaatgaatttgcacattatttatggcttttagagaaattgccaaattcgaggaagggacagaaaacgaaattggcaaatattacaaagacgaggaatcctttcggatcgtgtccgccatgggatcagtgatcggttgcctttgaaatgtcaaatgatcgacttttgaagccttcacttcccttaggcatccccgtcgaggaagtgtgggaggcttacggtggctttctgatccaatttacgatggagacagggtgggacgaacttctgagggcactttcgcccgatttggaggtgcaattgggtgaaaattgaaataattttcaattctcaagggctttttggatgcattggacgcattacattatgtaagatcaatcaaaaacaatctgtgctaatcgttggcgattggcacagttcattgatcatgtcgtctaccgaacaaaactgaaagggccggcgtttcggtgtgagccccaatcggacgggtccctgattttgcattactactcccgacggtgcggactgtacccaatcgttaagggtaaacgaactaatggggaaggcttttaaatgccaaatatgccaaaggcgtgatcagagaggtggcacgacgaatttacgacacagaagtgattatgaaagtgcaagagcgaaagcaggagcatatggacacgatgatgacggagcatgtgattttcgtgatcaaccaagtgggccgatcagcacacaaggccaataatatgtgaagcgatgccccaattgacaggtcgagaacggcataagcataagccgaccgatcgcgtgccgtccttcctcgggaagtttcgtttcatcctcccgatcagtcaatgtttttcctcctttttttg

SEQ ID NO: 74297 - DNA, 746 bp, Heterodera glycines
  unsure (1)..(746): unsure at all n locations
cccccctcattctcctcccactttcggtcccttcacttttcatttttgtnccatccnncncccccnccccccccccccccccccctcttttgtcaattctttcatccatcagttttgctttgctttgcttttgcctgctgaccattgttttcattcattccttatggccgcttctttcctttctttcattgagccaatgaatgggagaacaaattggggttagccattgggagggaagcgaaaggccgagcaaaaagagggaaaagggggagaggaaaagcaggcgaaggggcgggggctaaacaaagggtgcggaattgttaatcgaattcgaatgatgagagagaagagcaaagggccacctgccgaagggacaaaggcaaatggcgggaaaagtcgcaaataaattgaaaaatagctaattttttgttttgcttaagcgaattcacacgggtgaaaagccattccgatgcgaacattgcgggagagcatttcgacagcctggcaatttgacaaggcatgcttatacgcacacgacggtgagcacaaatcgaaatgcgaatagagggattttgataaacattcaataatggtctgatgatttattcgttcccaaatgctttttggcactttgtcataattagcttcgcctgattaaggtgaagccgtttgtgtgtgccgaatgcggcaaagcgtttaatcgcgccagcaatttgcaggcgcacctccgcgtgcattccaccgga

SEQ ID NO: 74298 - DNA, 932 bp, Heterodera glycines
atgccaatgaatgaaaagtgccatttaaggcccaagagggcagaacgacaattgtggtcgctcatcggttggccaccattcgaaacgtcgaccaaagtaagtgacctcaaaatgccaattccctttcttttctttctattcttttcagttctcgtctttcacaatggccaaattgtcgagacgggcactcacgaagaattaattgaaaagaaaggcattttccatgggatggtcagccaacagcaaatccaacagggaaacgccgaccaatccctccagaaaatcggtttctgtccctctctttggaaatcgaccccaatgaaaattcgaagacaaaaatattttcaaaaaattttccagcgatttttttgaaaactttttagaaaaaaacttaatttttcatcatttagttttgaaaaaagcgctgtaaatttttttaaaggtatttttcttgaaaaattgctgtttaaaaaatttttaatttttttttcggagtttcggcggcagagttttgtcctgctccggaatcaacgacccttttttgcttctcaaaacgccctttttcaagaaacttttcgggacagtgggtccggctgcgacgataggcgctgtcttgaaaaaaacatttttagaaattctcccctctttcagatgaggcgccaaattcggaagaaagcgaaggtacggcggaaggccagcggccaattgaaaaaccgaacgacgaaaacggagatgcatttgaagacggaagtgaagagaaagacatggcgattccgttgttgggcgagggatcggtcggatcggcaaaaagttcgccgagaaaggcaaaggcggccgagggcggcggcactttgtggcgaaagcattcgccggcgatggtaaaacaactcaatgcactcactgctccaagtttacgcaaatcaaaattttag

SEQ ID NO: 74299 - DNA, 521 bp, Heterodera glycines
gctcatgcagatgcttaaaacatttcttctccttttttcacatgatcacacaatcaatgttttacctggcaatagtgcacgagatgggtagcacatcgtatccccctgttatatcacgcatcaatatttttctgaactgcacaattgccttcagaagaatctccgtatcattttggcaataggattgaagctcgtccggcaaatagaagggtgttgttgttttattttcctcatacctatgtgaaatggggaacccccaccactgaaataaccctatagttttgcttaccaactgacaaatttatcgtatttttcttgtttcattgagccagcacagtagtcttctattggcggcaaatgcggaagcctcacgtcatagttttcccttaaaagcattatttttttgacaaatgtcacagctttcggaaaaaaccttcggttgaaagcatagggaaaaaaaggtttctctgcacagtccaaattgaacgtttttggcagttgatcgagacgaacgggcatca

SEQ ID NO: 74300 - DNA, 582 bp, Heterodera glycines
atggacaatggtaagaaagaagagctcaaggatcgcaaaaatgtgaaacgacgatacccattcccgttggtgtccgcacgagcacaggactcatggtaagtatgtgcaataagacacagcccaaactgcagatcaaaacccaggaggatcaaacttgaacaaatggaggaaaaatacgccaaaatggaagaggaaatgtcgtcggaagatagcgacgatgccatcgatttcttccaagacaccattgaggatattgtggaaaagtgggttcacgtggcatatatgtttggatttaattgttatattcctaataagaatcaaccgttccgaagaaaaaatcaaaaaatgggaggagaaaggcagcagcagcattaagatggagaacatgggcacaatggtcgaatggtaggccaactacagaagtgctgctgcagatacgttttttttgataaaatttgcagcagtggtgtggacaacggcgaaatcgatgacatggatgatcagcaggatgatgatgatgctccaacgtcaactgtttatttgaatttgggcaaagacgagcgcaccgcgaaaaattcttaa

SEQ ID NO: 74301 - DNA, 1557 bp, Heterodera glycines
atggccgatgaaatgtgcgttaattggacacggccggagcagttgccataccgcggcattctgcgtgttcgagttgtccccccacggggtctgcgcgtcccggtgctgcctgtaaaaattgacgagcgacttttgttttgctgttgtcatcattgtgcaacgatgtttcgcaaaaaaagcacgcgccgcccacataaatgtccacacacggatgcacaaagatccttcaccggcagctacacgcatattgaactggaaagagcacttgaacacgggtacaaaattgatcgtctttggagagcttggcactatgatgaatggtaattgtctttctgtttaaaatttgtatgcgatattttttttctctgtaggagcgaccaaatttttaaagattatgttagactgctcatcaagttgaaggtttgcctgcagatttttgacccatttgtttaatcatgtgtttttttttgttaagattgagtctagcggtttccccgaaggagttagcagcgtggatcagaaacagcgctatgctgatgagtatcggcgcatttacgaagtaaacattgaattggagaatgtgaaaaaaaatccggggcttcgattcattgccaagcttatgcttaacagtctctggtttgtatatatgtccagccgattaaggtgcagcctatttttaggggaaaattcagtatgagaaacgaacttggcgcaaacaaggtcatcaccagaccacaagagttctttagtctgctctttgatcataaaattgtaagtttataacataccgttttgctggcttaactacaactaatgtgtgtccaggaggtttctgcaatcgtaccattctctgatcaagcgctacgcgtgctgtacaaaccaaagaaaaacttcgtttccgaacatacaacaagcaatattgtgataagtttgtggacaacaagctgtgctcgtctcaagcttcacgactacatggtacaagtcgaccaaagagaagattctgatttgctctatacagtaaacggggttttcgtgagcgcactatatttgtgattttaaggacacggacagtgtcattgttctacataagcgggacactactccacttgagactggagagtttttggggcaaatgagtgaggagtacttggattgcgatataaaaacgttcatatgcggaggttagtcgtaaatagcttattcaaaatttttatgcattaaggtgccaagcaatatgcctttcgtatgcgccacaggcggacaaacgaactggaatttgtccaaaaaatacggggaattacttttgatgtcaacaacagcaaggctctgcaatttgaaaaatttgttgaaaaagtgctcaattatggtagagttgatgataacgacgacgacgacgacaatagtgctgtttcgcctgctgttttctcctatcaaaagataatgccaacgcgcgacagcaaagtcataactcggaagcagttgaaaaaatatttaccagtgtgtcaaaaggggatcatcaacaacagctatgaagtgtttccttttggatatgaatga

SEQ ID NO: 74302 - DNA, 672 bp, Heterodera glycines
atgctttcccaagcggaagacagagggtgtagtgtggtaagtttaaatgtttgtggaaaaatatgaattaatttacattcaggagcgaacctctgtacgtggaactgaaggatctgatgatctgtccgggcgactcgcgggaatgtctctcacgttgcggacgagcgagcagcagcagcagttattaccagctagcggtggacgagttggacctgcacagcgcaagcaacagcgacgacgacaaagagaacgacgcgacttggtgagagtgctctgccgattcaaccgatgttcgccaacttggcttcacaaaatgcttcagaaaaggaaggaagaaaatttgaaattcttgaacaaacagtcattagccacccatcacctgaaaagaaatgtagctgtttccgcagacgcgctatcccgacatggagccaacatgatgtttgcctaccgtggattcatgggaataactgttcaacaacatttatatgcgcgtcatcgtattgtgctgaaatatccccaattaccatgtgttgtacaatttggtggcagcagtcaccaagacaattttccacttgaattactccatgttgtttcagaagagcatgagaccgattaatatgtttattttaactattactatttttctctaacataatcacgatgaagaataaa

SEQ ID NO: 74303 - DNA, 991 bp, Heterodera glycines
  unsure (1)..(991): unsure at all n locations
atgcaacaagtacaacaacaaanagcagcaatgggaattgatgatggcaccactcaaagaaaaaatgctggcattacggcgagagtgccgttggcgagcagcaacattcgccaggtgcggtagtgagaatttgccaagtaattatgtcatggacacactaaaaattataactaagagaactgactccgaaagcgccagaactgaaaatgttgtgagattttgttttttatgcactgataagaatgggtcggggagagaaaatattttttgaaaattggcatttttagaaaagaatcatttaaatctatccctatttttaaaaatctcatttttaaaatagccaaaaaaacacatttgttttttcttacaaatagttacacaaatttcccaggcagaggagacttctggcatcgcaggacctaaaccccctaaatccaaaaaggccagaaaaaatgcaaatttttatggacaaaatcttttgggttggttaaatttttgagatgaatttcaatttaattttttgttttctaaaattaaactacaatttttttgttgaaaatagttttttttttcttttaaaatattccccaactgtctcatatcgtattctcgtgtttttatggtgtctcgttcgaaatgaatggcaaatttaatgacagacgtaaaattcttgtaaaaaaaattttacattccaaatgatttgaagcttttaggtgcttgtcctttttgtaaattttcggtgcttttatccccaaaaaaaaacccgaaaaaatttttgacaatttttagctcctaaaaacgcctccgatcaattcatgtctttcgctttccagtttgtgatcaattttctcgtcattgttggtgttgcggtttcctgggcattgtccgtacagttccgcaagtcgactttggtgatcgacccatcccatttctatgcaccattctcactggtgtctttgatttattaataattaaaatatatattaataaa

SEQ ID NO: 74304 - DNA, 385 bp, Heterodera glycines
atgaaaggatgcttattaacttctttatttgtatttttgatcaccatcttaattagtaataattatgttggatcagtaaagaaaaaattggaacaaaaatcttttgaagaaatatttggagaaaaatgggaagaaaaaagaaacgaagaacagaaaagaagagaaataattggaaaattttataaaataaaagagaaaattaagcaaaaaggaagaaaatattcaacaaaaggggggcaccatcgatagtattgccgactggggccttattcccggttaagttaaccgcggttaacgccttaaccgtggtttatttaaccgcggtttatttttaaccaaaatatgtattctcgtctttaaccgtagttaagctaaccacggttaa

SEQ ID NO: 74305 - DNA, 842 bp, Heterodera glycines
atgtgtgtaccgaaaaggatgagatgtgaaagtgcaaatcgttctgttcagccacataaaagcctgaaatggaataaagtggaaaaaatgagttttattcaaaaaataaaacattttgttttcgcagatatccgtgccaaagtttaaaatttttaatggaaggatggtatggtaaaatagaacttgttattgtacgatgtatatcgaccagggctggacgcaattgcggattgcggattgcggattacggaaattgcggggtttttggacccccgtaattgcggattgcgggttgcggatttttgggatttatccgcaattttgatccgtaatttgactattggattatttttcgagacgatttcttgtaagattattttttataaaatgaatttttttctatttttatttaaagaaaatatgtacatttgtttaaattcttatttctttagcaatttaaaaatgtccatctgcattggagacacgacaaaaagccgaagttgaagtaaatgaatatttgcgggatccaaaaattaaatccagggccgatccatcattatactgggaagttaattcacaaaaatggccaatgattggtgccgttgtacggaaatttctttctccgcctgcaacaagttcagaaagtgagaggcttttctcaacggccggtctaatttcagatgacttgcgaaagagtttattaccagaaaatcttgcaaaacttttgtttcttcatcacaatttgcttttaaccggtttctcaattgaatgattttgcttttataaatttgctttttaatatgcttttaaattgctttaaaagatttataggattttttaaa

SEQ ID NO: 74306 - DNA, 560 bp, Heterodera glycines
atgccaaacattttcaaaatccttctgattgtgcttttggccgtcgtctcattccgtctctcggcttctactggtgacaaaagtaaaatattgaaataacttttgaatattccttccaattgtgtcaaagttcaccattttggtggccatggaaatccttattctgtgatgaaccctaaaaataattgacataaaattggtatttgctttaagaaactgctaatgatgggagtggaaacaactcatcagctgggattggtacgaagatcaaaagaattgtcaccgctggactgctcttcacttccctggcgacgggtggggcggaagcgattgggcgaagcaatgctcagggaggaaaagccgccggattggtgcatcgcatatgacaaatcgctcaatggtagctaatagtgccaagttatcacgatacgactgaaactcatttttaccaggctccaccgcctcctcctgcgcaatttgaaaagagggcaactcgagtagaaaaaatgagggcacacctactcgaactttcggagaaaatgacggacaaagagcctaag

SEQ ID NO: 74307 - DNA, 1685 bp, Heterodera glycines
  unsure (1)..(1685): unsure at all n locations
atggtcacttttgagcagttcatcaagggtgcccaattggcactcagagaaaggtgcgaaaaatattaattaattaaaattttttaaaattatttctatttaatttaactcagaaatttaattaattaaattattttaattaacactaattgttttcttagaatgaacacggcaggccgattaaagagagtccaaagtgaaggcaaattgtttggcagtgatttggaaaatggcaaaagcggagaaagcaacagagcaaaaagtaaattatttaattgcttaaaaatcaatttaaaattaaaattcataaaatctggctaataatgcttgtcttaattttattttaaattatatataaattatataccgtatttaatgaattagacccctcaggggctctagttttcaaccgcctttgcatgggcggctttatttcagagggggttctaattcatggaagggattctaattaagggcgcgggggggggggctctaattctgtaaatacggtactttgtttgataatttttaaaagattatttattttaaggaaaaaaaaatcatttttttattttcaatttttacgtttttacctttccgtatacaaattcatattttaattacggtttccgcttccccatttaatttatacaaaaattcatattttttcaacttataaatattacgattccacccaccccccgactcgctcccattatatttatatatttaaatgtcaaattttgaatttccatttatacaaaaggtcgtggtgccccgtcctcaacccctcctcctcctgctgctgctgctgctgctggcccacatccgttgcgcagcaatgggcatccgtccatgggtttaagtgggcgcaaattggacggacgcggtggcgctggcggtggtggcgccggtggcgatgcggccgcggccgcggcggctgatcaccgcatgcaccggctggtacgactgaagagggccagccggagccagccgcagctcaacgaattgtttgacggggcaggacagcaacgaaaaaatgatggtggacaacaccagcaccaccagcagcaacaacaaaacgcagaagcagcagcattacgaaggtggacgggggggggggaagaacattatatgaacattaataataattataataattgattcttattcaattaaataagtgggtgatcgatgcggtttgtcgccctagtctcgattgccgagaattttctcgtcccggattccggacccaaaactttttgaaaaatctagacattttttgttcctaatcccgaatcctggtaccaaaatattttggaagtctctaccaaggatatcggcatttttctcaccccgagtcccggatccgaaaatttgtggagtcacgacctggatcccgactttttcatgtcccacgacaaccctgctgggatgttggatcaagggtttagggggaggtcgatatcgattaaaatggatcggaaatttcatgatcatgctcctttgcttagcaaattaattaactaattaattaattaaatttttttttaaaaataagtattttttccagaacgaattgtcttcaagaaaatcagtttaattttcactttgncgataaaaatggttctgcttcgcccgantaagatggaaatgatgtngaaattgtttatcgatcaaaaaag

SEQ ID NO: 74308 - DNA, 775 bp, Heterodera glycines
atgcaatcatcgccattgtcagccgtaaatggtcagaatggaattcataagcgacaaaattcggcaattcaatcaaatggcaccacaaataattatgccgacgaattacaaccccaagtggtccgttattcatttaaattttattttatttatttttaaatataataataataattgatataggcaaagcatgagcgattgctggatgaagagttcaatattgtcaaaatgggaacaaaaaaagcgcaggaactgatggattggtatgcgggtgagttaacatttattgaaatattaaatttattcgattaaacattaaataaatttttttaaattatatattataaaatagtttaaattaaataaattcatttaaatttaactatatttgaattctaatttaaatttaactatgttttaatattgaataaagacgaattaattaaaaataattaagtaaaaaaataaatttaaaataaataaatttacaaattttttattaatttaatttgaaatagaaaataaaataattttaaaattgttaaatcgctaatctaaaatttaaatttaaattacagatcgggcagagagtttggaaaagcgcaaaagaatgctgaacaaagggatggtggcattggtagccaattaaaaattttactttttatatattttataaaaattccaggattcggctatccacgagcagaagcttaattttcatagggctcaaattgcggaaatgaatcggcgcattacggcaaaatattatcattaa

SEQ ID NO: 74309 - DNA, 432 bp, Heterodera glycines
atgctattcatctgtgccaaactcctcctcaaattgctcatcctcctcaagctcatcggcggcatcttcagcactcgacagcagcaacttttgtaccgcatctgaagcggaatttttacgcgcacaaaaccagaaattgacgagggtaattaaggcctaattaataaatcttaattccacaaatttaaaatttcgccatcttccaatatcactaaatgtttctacacagtattagcttgagaaatttcaaaaagtcccatcctgactgatgaaatagatctgtgcatccttaaagcatgaaaaaagaagattttcttgttttctagctattttgctaggacttggcaaaaagaattattgagaatcttcgagcatgagaactacactgatatgttagagctacggaatcatgtaaaagttaattggttttga

SEQ ID NO: 74310 - DNA, 1043 bp, Heterodera glycines
atggtgagaaattttaggtataattttcccgtttttgtgtaggtttcaattttttcatggactgttttcgaaggtcacgcgcaactcgccaccttaatttgttagtttttccataggaaagttattaattatgaatttggcatttgattattaaattaagccggttataatttgccagaccaaaattaatccgtggaaaattattaagtcaagtacagtatatacagtacgattcggtattaccctttgggacagagttcttatggtggtggaaattttcttcatgaaaaatttctaaaaagtaaaaatatggaaggtaatttaaattaaaaacctaatttttttcgatatttcaaatggaaaaaattgtaattatttccaaaaatgtgagaatttagaggtataattttcccgttttttatgactttcaatttcacggactaattggcattaaaaaacattgaataataattatttttaaatgatttccagttactaattaataaacttacaaattttctcattctccggctctttgcactcgtagcaggtgtacttggcattgcgcgtcaacgtgtgacagaaacgctcatccttgaaaagaaattaacatcaattaacaattattaaatggttataattagagaccggacgggagacttcagcaggtactgagttgggatttttttctaactcaagaattttaaaatgaaaaaatttcgaaaacatctcaaaaacccgcaaaatttgtcatttaaatgaaaacgccagcgggcaacggcatgccaaaaagcctacagttaataggagagatatttttgagaattttttcaaaaattttcattgaaaattccaaagttaaagaaaaaaaatctggtttttcagtaccagaagtcacatccgatctctagttaaaatgcttgcacataattggatactttttgagctgggccagcagtgttggcaaaaacaaaacagcaaaaaatggtgaacagaaagaaaaacttgaacatttttgctaaaaaataattaaaaataataaa

SEQ ID NO: 74311 - DNA, 137 bp, Heterodera glycines
ggtcccggttttgaccagttttgaccgggaccgggaaattcccggcttttttcccggttttcccagccaaaaagtcccggtttttcaaacaaaaaagtcccggtctcgtccaaatttcccggtcccgctgcactcta

SEQ ID NO: 74312 - DNA, 907 bp, Heterodera glycines
atgaccttcgaaaacagttcgacgaagacggatcgcgatgggaagtcgggtttggatgctgtgcccgtggtcttgcaatgccgcgaccccaatcagctgcaaacggtgcaaaaaattgcccataactttgcttaaacccaactaaaattttaattttgatatttattcgatagacctaagagttcattattagcctacaaattcagttttaaaaaaagtttggccaaaagtacacatgcaatcaggttttcaaaaattttggccatatatattttttttgaaatttgacgaaatttttttaaattttattgcttagaaataaataattttgatcatcaaaatttcatttctgattaaaactttcttagaaccaacaaaataaagtgatcttatttccatagccctaaatgttttctatagcctgcaaagtttcaaaaaagttatggccaacatttttgaaaacttagttgcttgtgtactttttgccaaaactttgttcaaacttgactgaatttcttgaaattttgaaaatttaatagagaaatgttaggactatcgaatgatatcaataagtaaaattttagttgggtttaaacaaagttattgtattatttttttttgttgaaaaatttcatttagtttttttttagagtgcagcgggaccgggaaatttggacgagaccgggacttttttgtttgaaaaaccgggactttttggctgggaaaaccgggaaaaaagccgggaatttcccggtcccggtcaaaactggtcaaaaccgggaccttggtactcagttgtccgtgtccagagtagttacccccccagattttgggggtgacaattcagtcccgtcgtttcagtcccaggctagtcagtaccggagcaattaaatactattttacaaaa

SEQ ID NO: 74313 - DNA, 1070 bp, Heterodera glycines
atggaattcgaggaattcgacccattcctaaatatgtttgttggccctgaaaaagaccttgagtacgatcctttatttgatctgtttctatcaaacggtgaaattaattaataaatgaataattaattctttatttaaaggcaaaaaaatcaattttgaccaaggattcttggactatttactaaataacgatgatgcggaacctgtggtaaaataaataaaattaaatgaaacattaaatttttaaaaaatacagtacatggatttggacaatgtgcctacggcacccccacaatttaccatacctcaatcacctaaacatgtaaaatgaataataatatttaaaataatttgaaacagcatttcgatttggataatgtgccgattactccactacaagtggacaacccacaacaaattccttcattccaggaggaacatgtaaaataaaaaaaattaaaaaaatcaaataaaagtttaaaatatgttaaacaataaaaatatataatttagttggctgatttgggaaatttattggctaaccctgccccacaattgacatcgcaggtttccccgatttttccacctcataatgaatatgaagtggaacaaatcattgaccaacgaaaaaagaaaggaaaagaagaatttttggtagtagtagtaataataataaaaataataatttaaaaaaataataataaataataataatattaataaaattaattaaaaaataattataataataaaattataataaaaataaatagtttaataataataataataataataaataattaaaaaataattataataataataataataataatttatttgaaggttctctggaagggattccttccagaggaatcgacgtgggaacctgtggagcacttagaaagtggtcatgctcttttggaggagttcaagaaaatgaaagtaaaaaaaaaaaaaaaaaaagtctacacacctaaaataaaaaaaaaattaagaaaaaaccaaaaaagcccgccaaggcgacaaaattggtaaaataataaaattaatttaaaccaaaaaaa

SEQ ID NO: 74314 - DNA, 674 bp, Heterodera glycines
atgaaagtctataatccaaatgctaccgccataattttctcaactggaaaattcgtatgtacaggggcagctaatgagaaagaatgtacgcaagctgttgagcatgtcacggaacgaattaggcaatgtggctaccaagaggcactaatccataaatttgatgtgaaaaatttgattgcgactgctgatgtagggttccatataagattaggagaactttcagactttcttggtgtaaaatgctgttcatttacccccgaacttttccctggactcgcctacagaaacataaatcccaaaatgtccataattgtcttctcaagtggaaagctaaattttacaggaaacaactcgattgatgatatcaaaattgcatttaatcagttttatccgattttgtacaaatttatacattcaccacaaagggtatgagtcataataatttttgataaaatgtgcattatttgaactttcttgcgctgaagggacaactttagtaaaattttgaccaaaataaatatcagcttgatcattttcaatcattcgcacaagctcaagcggatagaatcgatcgtgcccattcttattcttctctattacacacggattgtttgcataacggagacaaattctatgccgtacataaaagtgctggtcaacggtcacattcttga

SEQ ID NO: 74315 - DNA, 405 bp, Heterodera glycines
atggacagtgggaaaaggacaccgggaaagggacagtgggagagtgacactggggaaagagacagcgggaaagggacaacgggaaaaggacaattggagagggacactagggaaagagacaacgggaaagggacagttggagagggacactggggaaagagacagctgaaaagggacagcggaaaaggacacgacaagggtaggatgatgggatttgcgcgagaagcaatagagcgtgtgtatgtgaagaacgaatgttattaaatgtacccaacagaatcattcatcttcatcttttttttgttaatttttatcttaactacttatatatatatttaaattattttttcagttatatattttttaattttatttttgcaatttaaatccgatcacgagttttga

SEQ ID NO: 74316 - DNA, 1450 bp, Heterodera glycines
atggacacagcgacgataaatcggattctaacaatgaacgaaaaaacaaaagaacattatttaggatgtttcccatgcaacaaaatacccctaaatatcaacaaattcccatcagtattagtggcgaacaacgacccatcaaataaggaaggaacgcattgggtttcaatttttatcaaagattataagaccgtgtactactttgacagttttggacgtacacctaacaaatgtattgaaaaatttttaagtcaatttaagactgtggaaggtaataaaactcctatacaatcaattattagtgagaattgtggatatttttgtatttattttgtatattgtatgtgttcaggaagtgttaattttaaaagtacttttttaaatctattaaaaaagttaatgatagatacaatatgatcccgacttctttgttgtaaattttgttaagaaaatgataaaaagtatttaaggaatttttcattaactcatttataaaaatggaccgattagacacaataattgcttctcttctgaattgcagtgcacgtaatttatgcgatcgtctaaatcatcctgatgaaattcaaaaggttgaaaatttttctcaaagataaaactctacaaacaacttataaaaaaatcaaattggagaacataaagaatttatttatggcggaattacgaaggataatgctcgcaagcaaatggcgtacaaaggattcaagaatgtgaccgttgaccagcacttttatgtacggcatagaatttgtctccgttatgcaaacaatccgtgtgtaatagagaagaataagaatgggcacgatcgattctatccgcttgagcttgtgcgaatgattgaaaatgatcaagctgatatttattttggtcaaaattttactaaagttgtcccttcagcgcaagaaagttcaaataatgcacattttatcaaaaattattatgactcataccctttgtggtgaatgtataaatttgtacaaaatcggataaaactgattaaatgcaattttgatatcatcaatcgagttgtttcctgtaaaatttagctttccacttgagaagacaattatggacattttgggatttatgtttctgtaggcgagtccagggaaaagttcgggggtaaatgaacagcattttacaccaagaaagtctgaaagttctcctaatcttatatggaaccctacatcagcagtcgcaatcaaatttttcacatcaaatttatggattagtgcctcttggtagccacattgcctaattcgttccgtgacatgctcaacagcttgcgtacattctttctcattagctgcccctgtacatacgaattttccagttgagaaaattatggcggtagcatttggattatagactttcataattacagcatgaattttacgtggattatatttagtggagggtgatattaaataaa

SEQ ID NO: 74317 - DNA, 1737 bp, Heterodera glycines
atggcgacgaaggaagagctcaaaattattctggaagcgcagcaaaaacagtttttggatttaatttcaaaaattttgcctaaaaatacggcaccaagtgccagttcttcggacctcttcagtcaaatcaatagtcaacttccccaattccattacgaccccgaggcagatgaaacattctcactttggtgggatcgttttggacaatttgtcgagaaggacggtaaggatttgaccggcgacatgaaagtgcgtttgattttgggtaagctatcggcaacggattatttgaggtatgaacagcaagttcttcctaagaagcctgccgaaattgagtttcagcttacgatttccactcttaaggcattatttggtgacactaaatcaatttttgtcaggcgcttcgaatgctttcagctgtcatgtggcctcttgcaaaatgtcatggagtttggtgccatggtcaatgctcgctgtgaacgcgccgacatgactctgtcaaaggaggaagtcaaatgccttattttcatcacaggtttgagcgacgcgcacaaagaacttcgacaagagtgtctccgccaaatggaaaaagcgcgaaaatcaacgccgccgaggtccatgactttggaagcacttctggaagagtgccgctccatccaatcgcttcaaaattcggccgccgctttgtctggtcccggacaagttcattcagtgcaggtccgaccgcaacgagtaagcgatggaagtaagaagtcgaaccgaggtaaaatggtcaaccaaaagggcaatatttcggttccaaattcgaaagagtataattttcctttcaattcgaataggaccgatgaagatcaacagcaaaagtgcaagcgatgtggtcaatttcatgtcaacgactgtccttatgcagaggatgtgaattgctaccgctgtggaaaacgtggacacatcagacccgtttgtcctgaacgcacgcagtcaaacgctgtcactgtggcctcaacattttgtgttactcaaaagtgccacgattggatttggacgcatccactgatcaatggtcatcctgtgaagcttgcggctgacacctgctcgcatctgacgattattcaggaatcactttggataagtttgggaagtccaaaattgagaagtcaaggtaaaaaagttggtagtttttacgggcataaattgagtttgttgggcgaatttgattgtttggtgaaatttaaaggtgttgaatttaagctcaaatgttcagtagcaaacaccggagctccaaacatcatgggacttgattggattgtaccgattgagaaggccacgcaatctcccatcgcgacgacattggatttgtcaagcgccccaacaaaagtcaacacaattgatgaacgtccctgtcatttcaaaatcggtgacactgttcgtgtgttgaactacggaaaaactggcaagtcaaattggtttgaaggcaaaatcgtcgctggtaaaggtctgatttggaaagtcaaaattccattgttgaatattactgtcaagcgacatgtaaaccaaatgcgttcttttgtcccttatcaatcagaaacgacgtttccgaatgatacaattgagcaagttccgcaacaacaaagtccttgccaccgctctgtcgcgactactccgccgaccaatctcccagttcaaccaacgcaacgtcctcagagacaacgccgtccgccgatacgttattcgccgtga

SEQ ID NO: 74318 - DNA, 855 bp, Heterodera glycines
atggagcgacacgacgacgaccaattcaacgaaaacgcgaatcagggggatcctcccccctctgatcagcaggacgagaggcgagcgatcggagctcagccagccaagcccaagacagtcttggaagcgcacggacttgggacaagccaaccgggtgttacacccgccgtgacgaagaatttgcgtagcggactaatcgcagtgcggtcggcacgggaccaaatcgaaagagcagcgggcactcttgccgcgcgaatcgtcgaagcgcgggagctgatggacgacgattacacaaggggcgaagcgctcgaacacgctgctcggatgatggcaatggagcgggggctcggagaagtcaagcgaatttttgaagggcattttgagaagggcatagccgaagcgggtgcggcacctgatgaacggcaggacttcttctatgattccattgccgcccctttgccagctgcaacgaaataccttcgactgcgggagcacccaactcccgccgaactccttcaaattgcggccgagcacctcggggatctgcgagcgatgcggcaaacattcgaggacgaagaaagggagagcatctcccgatcgagcagatcagtcgagaccgagaacaatcaggcggaggaagaactcccacgtgccatgccacgacggagcatgcaagagtgggagacatcgttcagagaagcttatgttcgacagcatgacgaactgttcggccagcagcaaccattggtcaaccaagctgaacgggtggccacacccgtaatgtcaaacctggccgcgcttatccaacgacgctcaaatgctccctcggtggccagtgttcgtgtgaacaatccg

SEQ ID NO: 74319 - DNA, 1044 bp, Heterodera glycines
  unsure (1)..(1044): unsure at all n locations
atgccatcggtcaaagcaatcgaacagttttggtcggttgaagcgatcggaattcgcgacgacccaacacaagacgccgacacggaggcgatcatccaatttgaacgatcagtgcggcaacacgacgacggacggtacagcattcggctcccatggcgggaggaacatcccgagctgccctccaattatgcggtggcttatcgacgactgatcgggctactccagcggcttcagaggacgcccggagtcctcgagcagtaccaaggagtgatcgaggagcaattgcgggctggcgtgattgaggaggcgacagtggggacgggaagtaccgagtatttcatccctcatcaggccgtgatcacccccaagaagctgagggtggtgtacgacgccagcgctcatgccaagggagttccctccctcaacgactgccttttgagaggccccgtgtggctgccagacttggccggaatgctcatccgttttcgggcatgccaagtacccgtactcgccgatgtggagaaagcttttctgatggtcggcattgaagaagctgaccgagaagtgtgcaaatttctgtgggtgcgcgacccacttggaccattgacaacggccaatttggtgccataccggtttcggcgattggcgttcggcctgacacccagcccgttctgtttggctgcggtggtacgtcaccacttgcgcaaatacaactccgaatttgccgagcaactcatccgggatacatacgtcgacaatgtgttaattccggccgacaccattgaggaagcgacgacaaaggcccaagaagccaaacgaatgttcacggacgcaaaaatgaatcttcgggagtttctgacgaatgaccaagggctcaatgacagcttttcggaagccgacgcgctgggcaaaacgacagcgaaagttctgggactggagtgggactcagtggacgattcaatccaaatttccttcccgggagttactcccgagggagagtgccgccaaacanggaggacagtcctcaagaccattgcgcgactg

SEQ ID NO: 74320 - DNA, 352 bp, Heterodera glycines
gaatgctgtaccgtccgtcgtcgtgttgccgcactgatcgttcaaattggatgatcgcctccgtgtcggcgtcttgtgttgggtcgtcgcgaattccgatcgcttcaaccgaccaaaactgttcgattgctttgaccgatggcatttgatcccgctcgtcctccccacatggggggatcgcgaataccgacgaatcgggagtaactcccgtcgtggtctgaaactgctccccgcaaatcacagtgccgaagacggtgtcgatcagataagtcccctccgccgtcttccgaaatccttgtacgaagtcccaaaatcgccgtattccgatcagcagctgcggttgcactgtgtc

SEQ ID NO: 74321 - DNA, 3368 bp, Heterodera glycines
atgatctgctcgccgccagctcgtcaaccagcagcagcaaccgattctgtgatgggcgtgaaatttttcatgtgccgcgtcaacgggggggcggctgatcaacgacaatatgttttcctggcggatgccatgcgaaatgatgatgccaatgccaatttgaatgatgctgcattggcgaaatgttttgtgcatttttacaccgtcaaaacggacaggaagggccgctttttgttgcgatcggacggcaaactggcggaccgttcttccatcttcaaccagcagtacaatgtccatttgatcgcattgaatgacaattccgtaagcaacattaaaattaattagggcgctagttcagctctggaatatggttcgtccttgttttcaagggcatgcattaaagcgggtagacgggggcaactgatgaggcttccttccgtccttattcacatagggaatccttgtaaaggggaactcatgtttttcgtccttatttttaagggctagcttgaaaaagaaagaggttcttgaacaggttcagcagttgtaccgctccggatgcgggatgggaaagaggggtgggaccgattgtgtttcggtcaattggtgagggaaatgggagtggtcaggtaataaaaaactcagaaacacaattacggggacaaaaatgaatgcttacaaattagtcaagatgtaacggagttgaaaagaagcggagagaggatgaagagaattgttgccttacaaattggcggcacttcgtagtcaaaagtcgtctgctgataaacactttgttgatcagaacaaattaaggcgattttgaagaacaatttattttttttaaaacacggagagaggaagacaaaaaaatcggagaaaatccagaacaacgacaaaaataataaaaatatcaaaacgaatatgaaatttaaacacaaaaataacgcgaaaagtcatcgttttaaaataattaaattgtgatcccagtacgcggcaagtgaatcgtcgtccttgaaaataaggacggagcgtgtccttgttgaattgtgaaaaaattggctgaattgtggccgtaccaaaattttcatagaatgacgtcctgaagaggaaggacatgcttgtcttatgtttgtcattatacgaatcgaagttcctttttctcgaaaaaaaattttatttaaatgtttcgtcactttcagtaattaaacgctgccaaaatatgcagggtttatggctcaaaaaacaacaaaatagtaattaaaaatgaaaaaaattacctaaaatgctaatttgtgaggtaatattgttaagaaaaatttttcgtaacttcataatagcacctaaacaatttttcgtatgtttaagaccaatcagaactcatgggcagggttccatctctaaaacatcaaaacataaaatccggcacacaaagttgaaaaacccggcgaaataaaaaaaaaccggtaaagcctggaacaacccccaaaaacctggcaaattcggggtttacccgatcaaatagcaaccctacctggcaaatgcggggtttacccgatcaaatagcaaccctacctggcaaatgcggggtttacccgatcaaatagcaaccctagctggcaaatgcggggtttacccgatcaaatagcaaccctacctggcaaattcgggggtttcccgataaaatggccaaccctggctcaggaaaaaatagataaattcttaaaaatcttttattaccttccaacaaataaaaatttatccttcaacaaatttttcacacctttttgaagcagccaatcgttgatgatgtgtcatatgcggcatctaccaaagtggtggcacaacgtgtttatgtcaatgacatgcgaaactcggtggacacaatatgccaacatattgatgagcgatgtgtgatcaatttttatccgacgggatatgatcgcgagaaacaaatgaaagaaatgacaaaaagatggctgacagatcagcagcattaccaggaaatgtcggaaatggtgagattattttttaatgttgattgacttaaataatacaaaataattaatataaaaataccaaaatatttttgaaaaaatatttttttgcgtaaagggtcaggaaaagccttctattagcttataaaattaaaaaatcgaaagttatcctcaaaaaacgaaatgcttgacttaattcaaattttggcatcctaattactttaacaattaatttttaaataaagagcaattgataattaattctttcactaattgaattaattatgcaattaattattcaaggtaaatttcttcctaattgccgtttttcgcgaactgattacaagtgccaaagagaaatcggcattaaacgttggcacattgacatccaatgaggcccaattaattggccatttttggaacaaatttgcgagcacaaaaaagaacggactgttgcataaacgattgagattgatcgatcaccaaatggtgcgactgatcgacgatttttgtaaaatagacgactcatttctgcgatcacaccacgagttgaaaagtgctttatcagtgcgtttatatcaaattcattttattaattgtttttaattataaaatgaaaatcaataattatgataataatcattgtgttaaaatatttattaaaggaagtgtaataaaagtttcataaaattctaaaaaaataaatcaatcaaaaaaattcaaatttttgttatctttatgaaaaaagtaaattaaaaaaatggaaaattttcaaaatctacttctataaaagtttcacattttataaaattcattttcattttaagctaagtgaaaaatttcaatttgcctgtctttattattcataaatttcaaatttattttaggccttattttccatgaaatcttatttattattttggaggctttttcaaataaaaagtcaaccccaaattaattggtttttgaaattttattttgcagttaagcaatcagccagaaaaattttgtgaaaattggccaaaagtcaaagaaacatcgaataaatatacaaatttggacattgtaatggaagcatttggccattggctgcataccagtgaacagcttaacaatgatgaggaaaatattatctttttttggattgaagttttctcgaagcggcttcaatcaaggtgttataattggccgtttcttgaccaaaatttgttcaaagaaattggtaattttttggatgattaatttaacaattattttaaaaaaatcatttatttagcatgaggaccgcaaaagaaaaattattatttttgatcgttttttgctaaaatttttagaaatcatataattaaaatatttattaatttttgtaaaattcaa

SEQ ID NO: 74322 - DNA, 625 bp, Heterodera glycines
atgatgtttgtcacagtaaaagatgaacataaattgacattagacaaaattgtacgaataaaaaacattaataatatgttggacaatatttgtagaaaaattttccaaataagtgccaatgagcaattcaatccagtgccgtggaaggaacagctttgtacaggaagttattttcaggtaaacttaatttttctgatcattaatttttcgagtatttcgaaatattatttcaaaaagttaaatatgtttttatattttgaaattttattccatcttccagaaaaaaatttcgtatctttttttaattatgccccttaattcctttggaaatccttgtctctttaattaatccctttaattaatttgcgatacggtatttcattaataattatgcgtaatacaaaaatttaaatttgcaaatatcactaaaattttgatttcacaaacgcaattttttcagcaaaaattaaaaaaaagggtcaacaattttgataaatgttctgggttttatgtttggaatttcaaatgcaaattttagaataattctcggtttaacaaaaaaaaaataataattccatataattacactcctaattacagacagtctctcctaatgatcttagaa

SEQ ID NO: 74323 - DNA, 324 bp, Heterodera glycines
atgtccaggatctccatcgcaagttacgaagcactgcttgccgagtttaacaagcaggtgatgtcccagtgccatctgagcgcctctacggcaaagtctgagcacatcagtgctttgatagcgatgcgaaatgccgcttccgctggacacaaccccacaaaagcacaccaaacaatggcagcaaaaaatgcacaacaaagttcgacgacagcgacagctgctgagcagccatctcaacaacaacaaccgcagcaactgtactcctccaagaggccgatgactttgctcaaaatccaaccacctgcaccggccgtcaaagcataa

SEQ ID NO: 74324 - DNA, 1996 bp, Heterodera glycines
atggcagaagagacgcaaagccaccgggaaaagacgacgaggggaaagtcgcaggaaaattcggaacggggacgatctgcgaatgtaagacaagtcagaagcaactcatcatcgagcaacacgtcgacagacacatacagccaggtgggtatactgctctaacaagtcggaccatatgtcaatcattcacttcaatagatttgtttacatattttttttctgctgcgtctctgcaccactaacaatgaatccccatttcagaaatttatacaaaaaagaactgaaatcttaatctgactacacatttaaattgtttattcttatttcaacataaattttttcgtttttaagtctcctcggaagcgttggcgtcatcctccacaaccgtcggaattcaacgaattttccggaagcagacacaaaattacgacaaagaaaccagcaccagaaacaaagcacaagtgggaaagaaaacatcgctctcagagaagcacagaacggagaagggaaagtcgcgtggagaaaagagagaaacggcgcgagagactgcggtcgcggacacgacagacacttggggtgggcagagagagggagagatagcctttgacaatttaccactttaattgacagaccgcgagacgaacagagggcgaaaggagcggagagattgcctcaggcggagacagaagcaaaaggggcgaacacggcggaggaaaaagcacttcagacgcaaacaaacgtagcaaaacgaccagcaaagctgagaagtacaaaggccgatcgaacggtaagccaagaaaagctttgtcaatttccttgcttgcattttccaatttgactttaaaaaagaaaggaaatgcgcgaattttttaaaatttctcttttgaatttaacatcggcgatttaggacaaatcgaacactttgcttgatattttgtaacatattttagaaagggtacacaccaaaacctcctccaacagcaacagcagcagtcaattgctccctccgccgcctgtgcctccgcttcgaattgataaaacacacgaccaacacaaaaggcgtcgttccacttcctcatcctccgattcccactcgtcctgcacatgttcctcctgttcaaggtccacccacaacttttatcattttcctccattttagttttacttacatggtttaacagtaaccctttagcaattcgtcatccaactctcggaccaaattcgttgtcggaaaatagtgactccgagttgagcagttctgagaatgaagctgaacaggagcagtcatcaacacgacgcagtcatcggagcagaaaggatgggtttgtttcaccaattgtttttgtttcgccaattgttatgcttattggtttagatttaccgacgaaccttcccaagtcgacacccgacaaccatctataaaaagagagacaccgaatgcacaagctgtgcacattaaaagcgaacaagtgccattggtcactccgattgagtcaacgacaattgtcactaagaatatcgtacaaaatgctggtaaatgagtaattgttggatatcttttttaacagcattcttttagaacgcggaaatgaaaaaattatgcaaaatgaaacaaaggaagagaacacagagaaaagcaaagacacaaagggggatgaacagtcgaaacagaaaaaccaaacggcgtcggaaaaggacgaaacggcaccgaaaaagagtactgatcaatccatgggaatttgactatggtggggaaatgctctgagcaaatttagcaactgccgttgctccatctttgcctgtgcagccaccgcaaacggttggaaaggtccaagtgccaaggccatcccaacggacggtcgtctgcatcccattggatgtccaatcgacgtcatcaccacccaccgatccgcgacaaatgcgtccaaaacagcaacgaccaagcgctgttacggagtcaataatgtgcttggatttgccacgctttgtccataaa

SEQ ID NO: 74325 - DNA, 822 bp, Heterodera glycines
atgatggctcagaatcaccaagcacacagggattctgaggccttaacgatgtctaaggtaaaacctgatcacgtattcgtgatcagcggcccaaataaccatcgaatgcatttttatttaaaaattttttaataaaatagtctttattaattaaaaacacatttaaaattattaattgaatatttattaatttgaattaaattaattttttacaaattcaaaaataaataatgaaattctttaattaaaaaaataaatttaattaatttaaaagaaatcttcaaattaattaaaaacggtgaaaataacttaaaatgcatagaaaaataatatacgccgtccggattcgaacttgccacccccctgctcaaaatgatgccccagaatccccaatcacacagggattctgaggtcttaacgatgtcaaaagtaaaatctgatcacgtattcgtgatcagcgtcataaaatagccctaatgacatgtttttgaaagatttttgatgaaaaaaatttttcactcaaaaatcatgtgcacccccctttggtctggaatcccaaaatcacttttatttttataacttttttctaataatttataaaattgtgaaataaaatttatataatagagcaaaaaattgcggatttttatagcattttacttttcgagaaagacctttcagaatcgagttctgaatttttttctgaaaatccgaatttttccagaatttctggaataacttttttcatatttatgttagaaaagccaaatataacccataaaattctcctgatttttctctatttttaaagctttaaaacaa

SEQ ID NO: 74326 - DNA, 1042 bp, Heterodera glycines
atgtcctggcccgaaaatcgtgtcatgaaatatcacaaaaaaagaaatgtggtgcataaaaagcacataaataggggtaaataaaaacacataaacaaaaaataatcaattaaattttctagtcgaaattttaattttttcaaatttgatcggcttgagtaaagactttttccaccagtgtattccttttctattgaatttaaaaatcccattggcacttggtaactgagcaagaaaaggtgatgaaaagttgacaaattatgtttgcttgggtccggggcccggaattggcctcaatggaagccgacgtgatcaacgacctcgaaaactccaggaaacgtttaaaataattttgcattttttttttaaaaaaggggacaaattacagtattatgtaccaaaaacattatttgttgtaccatttgaacgcaaatgcttaatttctgagcacttgatagactcagataagtatgaaaaagaggggaggggaggcttaatcagccgacaatcaaagcgaacatcacaaaatgggccaaaatgaaaagccgtgtcgggcaaaatttgctcaattttggagttccattcgttggcgaacaaacgcatgggacggaacacggacgaacacatcctgaaaaaatgggaagaaaacaaaactgacattttgtactcctcaaactcaacctgtggtggaaggcgacggttggggtggcccttcaaaatttgaaattgcaaaaggaaatccaaaattggacacttacaattggtcggatagatttggtaagacggaattggggtgttaatgggggcagggttataagtgcggtaggacggggagggcggaggggagggaacggtcgcgtaatgagggggctcattagtgtaatgagctgacaaatgagcaaaacgattaaggaaaggcaatgaatgccgagttaccgcgggaaagggcgaagaaaagtgttgggaaaagtgtgaagaaattcaaacggaacatttcatcaaagggacgcgaaatttgggaattaaatgtaagagaaataaa

SEQ ID NO: 74327 - DNA, 503 bp, Heterodera glycines
atgggaacaaagtcgagaaagtcactgaacacggaaaatgaggggaaaaatgaattggaaaagggaaaagcacgcgaaaatgttcaatgggagagtgaagagcagacaaaggtgggcaagctgaataatgaacacgacggtccttttccaactgaaaaccatcaaaaaggcaatggcagaggcaattgtggcgactaagcaaaggaaaaggacggggacagactgaaaaaggaaaaaataaataaaatacgaagaaaacgcacgagaagagaagtgtcagcagaggaccagagaaaggcgaagtcgcatttggcagcgtaaagccaattccaaaggaaagtggaaaagagggcacagagaaagacgtggccgatgacagtgaccatcttcaaaagacggaatttgataagggaggaagaaagggcagaagtacgtaccccggtggacaattcattgtcagaaacgaaggaattcaagaaatgatccatgaagaaattaaatga

SEQ ID NO: 74328 - DNA, 643 bp, Heterodera glycines
atgggggtctgggtgagaaaggagaagtggaggagaaatttttgaaaaaaaaattaaattatttattttcatttaaagcatttgttcatatgcataagtggtcaagtggctaaaccttctgattttattatttgtcgcttgggttcaattccccactcggatagaatattcttcatattttctttaccattattttaattgaaattttaattaaaaaaatattccaactttttttctttcattttaagcatcctaaaaacccaaaaattaatcaattggtctttttttacaaattctgttaacaaatcgcattaaaaaatacaaaatttttcccggcggcgcctatcggcaccgccggccctcctgttcccaaaagtcttggaaaaaacgtgccgcgtaaaaagcggtcttgaaagcaaaaaaggtcattgatttacattaatttacatggccggagaccccttcgcaaaattggaaaattggctgctgaccccttgttttgcaataatctgaattttgaggtctacatctgaattttagtgttctttatcctgaatttgaaaaaaaaacttggtcaccctcaatatacatatacttctgaacaattctaatgctaaaaaacaggcacttgcgcgaaaactga

SEQ ID NO: 74329 - DNA, 1188 bp, Heterodera glycines
atgctttattttacaaagggatacgacgaaaactttgatggtaaaattaacaaataaaaattagattaattattgattaagaattaattagaattaatgattgaattaattaagatgtgctgaacgaggcggtttttgatgaagacaccgatgaaatggtaaattcattttcataaataatttaaacactcgaatatttattcattttttcaggtgattgtccgtgacattgaaatgttttctttgtgtgaacatcatcttgtcccttttcttggcaaaggtttaatgggcaataatttttagagatttttaatttatttaattttttaaatattttacgatttattaatttttctttgaatttttcagtccacattggataccttccaaacaaaaaagtgttggggctcagcaaattggcacgcattgtcgaaatgttcagtcgacgtcttcagggtaaaaacatttaaatcaaattgttacatttaaattactctatttttaattaaaattacttttttcagtgcaagaacgactgaccaagcaaattgcttcagcaattctccaagctgtgcacccgacgggcgtcggagttgtgattgaagcgaggtgaacatatatatttacattatataacggactttggggaagggcacacaaaattcaagacggcatttgtttgctttttctatttaaaagcaattctcgaactcaattggctatacaaaaccaaaaaccatatttttacgctttaaaattgagccaggtttaattcatgtgagatttatagatttttttacaaaaaattttccaagtgtaaacttatgcaatgctttagtatgatatgaaagttgaaaattgaggtgctttttaaaaattaaaaatgtaatttatttgcacaaattatgtcgctattatttttcttggggaaatttatagcttttttggttactcaaatttggatatatattatattgtttgtatgaattcccattcttcagccacatgtgcatggtgatgaggggcgtgcagaagatcaatgccaccaccaccacctcgtgtatgatgggcgtttttcggtaattttttttttcaaaaattcagaaaatttattgttttagtacccccttatttttcagcgatgatccgaagacgcgcgaggagtttctcactctgatcaaaaaatga

SEQ ID NO: 74330 - DNA, 443 bp, Heterodera glycines
atgtgtgtccggcggcgttcttttttgtgctcccctcaaaaaatatggtttttctcgttggatgttgtaaaagtaggtaatcttttttttacaaaaaaaaggtaaattttttatttggaaaaattggtaattttttttcttttttttgaaattttttttttattatttttttggaattaaaaaaaaattaataaaaaaaattagaaaaaaaattaaaaaaaataataatagaaaaatttattttttatgtcggcaatagtgaagattattggtcccacaaataaaaatttaaaaaaacatttttaggggttatttgatgcgctgagcacgaatatgacatccatttcgaccaatttcgaaccaggaccggaatacgaacaaaaagtcgaatactcaatttttcaatttcgcacttattctacaattgattaaaactagcagaa

SEQ ID NO: 74331 - DNA, 712 bp, Heterodera glycines
atgagcagcacgaccagtcgggagtattattttgtgattgttggtcgtcaggaccaacctctgttcgagatggacttcccgccaaagaagcgcgagcagcagcaggagacgcaccatttgctgcagttcatcgcgcacgccgcgctggacattgtggacgagcagacacttcgcgagacgcaaatgtattttaaggtggattattcagaaaaatactctgattgtgagtcccaaaaacgtcgaaaaatcgtttgagcgaattatagttgaaaataccgataagactgatttatcaaaaatttttggttttaatatcgaaatttcttacgcctaagagcccatttccagcattgttcactttctatccattccccaacctctatatttgattgtttttttcatttttattgtcatgatgccattttcagattgtagacaagttcaacgaatggtttgtgtcggcatttgttactgccagtagaattcgctttttgatgttgcacacgcaaaaaaatgaagacggaatcaaacaattcttccaggaaatgttcgtttgttgtcattgaatttagcgaaaattcaaatatcattcagttatgagatgtacatcaaattctcgatgaaccctttctatcgacaagacactccgatcagatcgccaagttttgagcaaaaagcggcgatgtatggacggaagtttttaggggtttaa

SEQ ID NO: 74332 - DNA, 1559 bp, Heterodera glycines
atgttcacgccaaatgtgccgtaccaaacccatttgttgcaatcggtgccatactcatccaccgccgcccatcaacaaaaccaattctcctcacccgctgctgctgctgcttggacaacaacttcggcttcttccgccgggatttcccgatggagtcaacaacaacaacaacaaaataatgagtccctaataaggtaaaagtgtgtagcagtaaattaaagcgcaatttgttcaccgctaattgtcttaacccccaatcaaagctaaaaaagcgtcaatgatagtaataattaattaattaattaaatttaataattattttattttttgtttgcagaaaaataaatcataaattaactcaaacttgttagttagtgttttatgaattatacaaaaatttatgcacatcctaacgctcaataccaaaattatcattgatccgtgcggatttggagttcggaattagtgagatttaattcttccttttcctctacaattcctagaccggtctaatggacgcctcctccaaaccagggatggcacggaattccgatttccatcttccgaaaatttttggagcctcggcggaatgccatccctgctccaaaccctaggaaagtaaacctaggcaatggtttacggaaacttataatttttgccaccagaaattttgaaaaaccactttcctcccatttcaaggaagcatcgttcgctggagggtgttcatcaactgttggcggacaacccgtcctgttcctccgcgccttccatgttcccgccgccggcaccatccaccgtagtacaacagtttagcgagtcgctaccgtcctcccactgtcaccataatcatctacagcagcacaacattatgccacaaaatttgaatggtccaactatgccaaatttgaatggaccactaccaccatcgcttcttcaaccactgctccccgccgctggtggaccatcgccttattttggcgcctctggatatgctcatgtgccacaaccaacaacagcagcaacaacggcaccaattgcaacaacgacgacgacgaagacggcggcgttcatcaatgattcgtcttctaccgcctcccgtcaattgttggtgtcacaaaaatttgttaggccctatactaaaatcatttattgcacatcctgggatcccggtgttcgggattggcactctgttgaacaattttggaccaggactcaaatcccattattattattattattattttattaatttatttatttttgtaaattaaattgccgatcatgatttttaccaaaatgttgagactgtaaaccagtttctggcaaaattgatccgccattcagctttagccagccaacaacacaacatcatcacagtctatggatgccgtcgtccagcggcacagtgccgcagcagcagggcattcatccatggggaaatgagggaatggtaccaatcggagatgtggaggacggacaatcagccttgcgcattgatgaggatgatgatgtgtgtgtgtgctattttatctttttggactatttttcagggtcgctga

SEQ ID NO: 74333 - DNA, 373 bp, Heterodera glycines
atgtcgcttcttgttttctctcgtctccgtactcttcctcgtcttgcgccgcttctgacgaacagtccttgtgcactcagcaccagtgccgttcgcaaagacattgacagtgccgcgaaatacgtcggagccggttaataacaaaaatgattttcgtacgaattttttgcattttttaggggctgcaactgtcggagtggccggttccggtgccggcattggcaacgtgttcggctcgttggtcatcggttatgcgcgcaatccgtccttgaagcagcagttgttccagtacgcgattctcggctttgcactgtctgaagccatgggactgttctgcctcaccatgggcttcttgatccttttcgctttctga

SEQ ID NO: 74334 - DNA, 1294 bp, Heterodera glycines
gaaaacgaagaatggacacggatgtgctgaaattgtgaattttaccatcaaataaattgactctcacaaattttaggattgaatcgaaccatgaggtggtcatcaccggtggactgaatgaattcctggtaaatgagttgatgaattttgggcatttgctgttgtggacccccgaaaagcatccaaaaagggggctatggtaaatgaattatgctccctaatgaatttttttttttattttcggctcaaaaataagttttatgaggattttcgaggatactgatcgcgaatttgaaccgaatttatccaatcccgcgtctgaattcgaacaaaaattcaatttttttcataaatatgcatttttctagggtaaaatgattcaaattaaagtgccgaattctgtatgtatttttttgtaatttaaattttcaggtaaaattttatggcccaaaaggaagtgagtggttctatatcttcgtacaattatatgctaatccatttcaacaaattttagctgcttacgaaggcggagtttggcgagtaagggtcgatttgccggagaaatatcccttcaaggtgcaaaaaataataaaaacaacaatttatttttcagaaattttttaaatgcctttccacacaatccgtttagtcaccttccattggcttcatgaacagaatttatcatccgaacattgatgaagcatccggcacagtttgtctggacgtgatcaaccaaagttggacagcactttatggtctgtttttttttgttgtggatttttgctttcttttcgggatggacgaatgtaaaaagactcagaaaaccctcccaaaaaggtaaaatcgttgggcctataggttcatgtattttttgtaaatctgcatttttttacgaaaaaccaggtccttggccaatcagaaattggaaaacatggatttcatgcaagcaattttagcatttaaaaattctgtcattatcattggctttaccattatttagaaattccaaaaaagtttcattttttggacccatacaattttttaaacgacttttcaaaaaaccaggcctgtacctagtcggtttggcacgcctgcattttccatgaatttacagaaaatacatgtcaatcaatgttaaatatgaaatccaggtccatgaacttattgaaattgtttagatctttccaacatttttgagtcgttccttccccaactgttgacctatccgaacccagcggatccgctgaacggcgaaacggcttccctgtacatgcacaagccggacgaattcaag

SEQ ID NO: 74335 - DNA, 551 bp, Heterodera glycines
atgaatttcactgattatgagaggaaatttatgcccgccaaaattcacttcatttcactgattggcaccgtccggttcaaagtcaacggtgcacattcgtcctcaaataaaattccatttatctgcgaatgcaattcgcgattttacactcactgtgaaagtgaacttttctgctggcgcaatgctcggcgctcgcaatttgtcatagcactgactttggcacttttggccaccactgagcagccaacagcacttgtgggctggttttttgggggaccggtaaattggacaccaaaggaaaattggacactgtcggaattttggacaccaaaggaaaattggacactggaaaactggacactaaattcctcttttaaaatataaacccaggaatttaaacactcaatatgcacaataattgatcaaatgtggcaaaaaagtgtacaaaattagacgatgattgatcaagatgccaaaaaatgtacaaaattgcgtgatgattgttcaatgtaccaaaaaatgcgcaaaaatgggaactccataaaaataaa

SEQ ID NO: 74336 - DNA, 2171 bp, Heterodera glycines
atgggaaattgcgagtttgagttggggttagattggtcaaatcagatgtgtcagatttgtgatcataaaccctcaaggcccagagaaaaaatgttgcagttacttatacactaataatttaggttctctgacactgcctcggttaattttcctccgtcaagtggccagcccggcggtggtggccctgttgtggtccacggtggcaatgcggtcaactttgctgctgccgctgctcatcagcagcagcaacagcaggctgctggtgacccatcgcaacatgttgcggctgttcatcatcaccaccagcagcaacagcagttgcctccgcaacaaaacaaaacgcttttcacaccggcagcaaacccagcgatggtaagcgcaacgccggccatgcaacaacatttgcaacagcaagctcagacaatcttccaccagacctcagccactgcagtgcctcagttccccagctacaacatgccgtacatgtattcgccggtggccaccgcgcaaacgctgcaaggaccaaatgcggagattgaccgtttcctcatccaacagtatgggacgccgtattcgcagctggacttgcagatgggcgcaatggttggttatactttttggttttttatggtacattatttttcagtcaattggaccaccgacgactttggcaccaaaccatcatcgtgccacattggaatcgtacatggagaacaaatttgggcagcagcaacaaaacggtgggaatggggtttggtggtggtggtcattcatttgtaattttgaattttttgaaaatttgaactttcgactttttgttgtttgtgtgtgagggtcaaaaaagtgctttccttactaaactattataataatcaaaatatgcctcttttcagtcaatcaagcggccaacaatggacactatcaacaaacgcagcaaagtcagcaacaacagcgcggacttgcccaatcggagcaggcaactttgctggggggaccgccaagccatgtgggaccgcctcccggctttggtatgcccaccgcaccgacgcagccatcgtatgtgcagccggccaacatccattcgctttttcaggtaaattaaagtaaaattgtcgttatctccatgcgattagataaatctttggccccatttttccacatttcgcagatgcccacttatccgcatccgtaccagcacccgcagtacatgatgtccaatgccaatcgtttccaagctgcacagcgtcctgcacagacttcgccgccggaggccaatgttcagaaccagcgccgcggtggtggcgatgcgcagggatatgctgggggtgcggtgccggattcgactagtgagcaacattccgctgcggtttcgcaacaatacggcaacaatttcaaccacaaatatcgctcctacatgtaatacggtgcgcgaccaacactacaggcagtctaagaaaatgatggatggatgcctgttttttttttgaccaattgacgatgagtgagtgatgttatgagattttggctaaatgattttgtggcgttatcaccatatgttttcttcttttgatttgaaaaatatttgacaggaaaatttatttgttgtctcttgcattttggtccatttcttgtcttacccgaaggcttttaaagtctctggattttataaattgaaaaaatgagagattggaatttaatatttccaatgcacattttggagcaaatttaaaaaacatttctcgattctggattatttattttattggcattatgataatcatggaaaatagaatggaaacaatgttggtcttttatgctttgcttcattcattagttgagcttttccgttccgttgtttcttgtctcattcattaggcccaatttgagtaaaacatatgctggcaccaaacaattctcgggcttgttcaattccacaaggctaaatcactattaaatgtgccgttcacccgttcgcttactcggcacagtctctcagcgggtcaaatgtgcgtccgtgccgtgccaccgctgtcgttgcccaattgttgtcccaccagtgcagacacgctgagaaacagctgtgcaccaccgcctcgcggtccgtcaggcagcaaaaaaagaaaaaacatcgactttttgcaaaaaacttgcaggaaaatctttaaaataaa

SEQ ID NO: 74337 - DNA, 810 bp, Heterodera glycines
ttcggctgggccgcgtgttcgcactgaacgtcagggacagggattcaaggggcaaaaccgcacttttaccgccggaggagcgtatcgacgtgacaatgttgcagcgaacaagcagaccaccaacaaagttgtgggaacgggaacaaacaccggcgacttttcttcaactgttgagcaatcttatggcgaaacagcgggacacgaaaacgacgaatgggtttgtttttatgcaataattacgggtattaataccaaacaattaaaacttgtagaaaaatgggcctcgtgtgtttatgccatcttcggctgctactgttgtgatggcggaaacatcgacaaatggtggtgtgaagtggcccgctctggacaactttacgccttctgttgagccggctgaacccgccgcggttcacaagccgaaaacatttgccgctgttgctgcggctaaaaaggcatcaccacagccttcacctccacaacatcagcaacaacaacagcagcagcagacaatcacatacgaaagtcgggagccggattggacgaaagaaaattggacaacggagccgacgaattggtcgtcagaaaattgggcatcaaccggcaaattggaaagcaccgaaatattggacaacccggaaaaattggataccaccgaaaaattggaaaacaccgacatgttgggcaccgctggcaacattgaagctgccaacaatttggacacctctgtaatgctggacaccagttgcaaattggacacggccggaataatggataaccattgtgacactgctggaatggctgacaccaatg

SEQ ID NO: 74338 - DNA, 496 bp, Heterodera glycines
atggagcttcaaaaacagccagtcatggcaacaaaagaacagttgcgtctggctgaactcacccagatagggcatgacgctacaattgcacatgatgacattgctgagcagaaacctgtcaaggtttcattttcagtaaagttggacctggctttttcctggacgcatgtccaatccgtttttttttttgtaatctgggtttttctgggtatgtattctaaattattgtccaggagttgcaagattttctcctgctagatttggatttaagggataaagcaaaaacacgtttaatggttctaaaatggtgtataatgaatagatatcatcattttttaggcaatcaaatgttttactggtcccaaaattttttctttttgaaacttttctgtaaattcaaaaaaacacggttataggggtgtttttggacgctgagtatgaacccggcctcctttttggccaattccgaatccctaacccgaattcgaacatttaa

SEQ ID NO: 74339 - DNA, 726 bp, Heterodera glycines
atgagaaattttcttcttttactatgttttgctataattttgcaagttctttgtgacgaacatgaccatatttacaagtgaaagataatttatcctaattaaatttttcgatttttttaagtccaaatgctgaagttgtgctttggatgaatacggtgagcgcaattattgtgttgttgtctttaatggttatgattttttaaaggttggcccgtacaacaatcgtcaagaaacgtaggtcctaaaaatccagaggagggttttatgggtgggtcgctgatcacctaacattcattttgaccattttcgagtccctgacccccactcgaacaactcttgaaaaaataaacaaattcccaataactattggtcataattaatgtcctttgttttagatacagttatttctcgctgccattttgtcaagtaactttggacacaatcagtcattcaaactttttcaaaaaaaatttagggttacaaaaaaacaattgagcattaccatgagactttgggcgaagcactgctcggtgttgagttggaattttccggtttggacatacgcttcaccgttgatcagccaaaaacggttgaacaaaaaaaaacaaaatcgccaatgattagatgaattaatttatattccattattttctcaggagtattgcaacacgaagctgactcctaccgacatcgacgcactgatttttgcagttgaacacaattatt

SEQ ID NO: 74340 - DNA, 106 bp, Heterodera glycines
tgacgaggccgagagtagcagcaacagcgagagtttggagtcgggattgccatgtgtggcaatttacgcgggtaaaggcgcaccaaagccgcacggagagtgttga

SEQ ID NO: 74341 - DNA, 75 bp, Heterodera glycines
tagaaaaaaaagataatgtttttctctggcactctctatttattggtacacatctcgttttttcggacggtgtgt

SEQ ID NO: 74342 - DNA, 65 bp, Heterodera glycines
tgctctatccacccacgaaatttcattcggaaatcccacggacacctggggaccttcctttgtca

SEQ ID NO: 74343 - DNA, 176 bp, Heterodera glycines
gtgaaacgaatttttagcacattaaacacaaacaattaaacataagcgataataattttaaaaaacgaaatgaaaacgaaaaaaatatcaaaaagtcattaattaataattaattgtcgtcaaaatcgttttgagtgttcgtctccatccttctgcttggctcagtcctccaagtc

SEQ ID NO: 74344 - DNA, 111 bp, Heterodera glycines
gattttaaccctttctcggcagggcatccgtctgaagcttttcccttctacggccatcgtctggcgaatttgaccattgcgaccgggggatttctgtacgtcggcgatcaa

SEQ ID NO: 74345 - DNA, 1459 bp, Heterodera glycines
atgagttcaaacaatgcgttgacccaaatgatgcggcgtgagaagagaaagttgctgggaaacgtcgacgtgcagaacccactggcctttgtcatcccagcaacgttacgcgaaaagggcggtgaggacatcgtcttgtatgacagtcgaaatgtcaggcaaggcgaaaaggacgttgtccttattttcggcagtgttaaggtacattttttggctataaaattctgtttgttattggcatttctttagactctggacattttgcgccaatgtggcacgtggcacctcgacggaactttcaaatgcgctccagcgatgtgggagcagtgcttcgtcattggtgcgtcagtgaatcagaaaatgtgcatctgtatgtggtgtcttctgcctgggaaacagcgacgctactacgaagaagcactgaactttctccgtgaacgcatctctccggaggtcccaagcaaaggttaaccctttgaaatttacaaaaaaaaaacaaatcaaaaatgtgatttttagttttgtgtgattttgaaaaggccgaaattgcggcggtgcgtacggcatttcccacggcacagattaagtgctgcatgttccactacgggcaaagcctttacaggaacttcaaacgacttggtcttgtccatttgtacggtgagaagacagaacgtggggaggaagttcgcaacacattccggttaaaaaaattttggtgaaattcaaattccttttcagaagtgttctttttttgcctcttttgcctcccagcattgtcagaatggttttctcaattattgtggcgtcagctcctgcaggaatgcatgagtttttcctttacttctctcgaacatacataggcttgacacagcgtcagttattgaatgtttaataaattcattcattttttatatttatatttgggtcctgggttaggaaatgggttaggtaaatgtcatattcgtactcagcgactccaaaaaccctaaattagatccgttttacgggtttttggacaattcgtgttttttactcttatggacatttcgaggcttggacatttcgtggcttggacatttcgtggcttggacatttcgttggtcagcgaataaaatgatatttttttttgaatttttcctaattttttcacacatttcgccaaaaaatagtgattaaaaattaatacagaaaatacaggtttttaaggcctgtacctgtacctgtattccaaaaatggcctgtacctgtattttctgtgcaaaagtacaggaagatacaggtacaggaaaaatacaggttgccgaacaatggcctgtacctgtacctggatccaggaaaaatacaggttgccgaacaatggcctgtacctgtacctggatccaggaaaaatacaggcctggatccagatacaggccgatctctagtcccaactataatttcaacgtgccaaaaatgctga

SEQ ID NO: 74346 - DNA, 1055 bp, Heterodera glycines
atgccattcgcccttttcagcggcatgacttgcacagcgatcatttacaccgccattaatttcgcattttttgtcgttctcagcgtttgtgatattcaaaattccaccgccgttgcgatggtaattaaaagccaactaatatacatttgaaattactattaatgtgcataaatgaatgtaaaagaaaaatcaaaatacaaataaattttcagacattcgccgaccaaacgatgggatattttaccaaacttatgccatttatcatctctttggttttgttaaatgctctgaatgcatcagtgtttatgggaagtaggcacgtaaattgaatgctttatttcttaaaataaatattattaatttttttagatatttatacgctgtggcgcgtgaacggcaactcccctcgtttatcgcgtgtgtccaccgaacgcacgacagtccccgggcggcactgatagtccatgtaaaaggaaaagcatttgcaaatttaacattaagcaattggctaaaacatttacggcattcagacagtgttcattatgatcggattgtttcttggcaatgtcaatgaactgatcagctacgtcagcttcgcggtttggcttcagcgcggctgtgccatgtgcgcacttttgtacatccgattcaaacatttgccggtccactcggagtttagttttaaaaataatttaaaaaatcaaatggttaaaatgatatttcaaccaactgctcccatattttggacaaatgtttcggcattttcaaaaaacttaattttcgaataaaaatatctttaaacacaaatttaacatgaaaataataaccgaatttaggccattcgtatgccaattgttctgccatttctgtttttggcaatttgcttttccctttcaattatcacaattatcaaagacttttccaccgcttacattggccttacattaattggcagtgcactgataatctatggcatatttatatgggaaaaggcgttgaatcgaatctcagcttatcgggaacaaagcagcaattggaatggtcagtggaaatga

SEQ ID NO: 74347 - DNA, 287 bp, Heterodera glycines
atgcgcttcttctttcttctgaccattgctcttctctccgttgttcttctcctttccccaagtgcactcgcaaagaaaagagcccgccgttcgatggtaaaatgaaaagcactaattttgcttaattactaatgacaaatgctaatgattcagcccgttaacgctgccatgccggaatggaaaattttgtccgctgaagtggaaaacgatggcacagcataagaaggaggaggcaaactttggatcatcggcatgatcgaagaaggaatttgccaaaatgatgaaga

SEQ ID NO: 74348 - DNA, 604 bp, Heterodera glycines
atggaggaatatgaagcttcatcagtgagacaacgggccaaaattgaagaaagggatggcaaaagggcaaaagcgaatgcacaaaaggcaccaaaaaatggcgaaaaaagtctccaaatcggatggattgtttgctttgtgctcttcacttttgcaattggaatcgtaagccaatcaaatcatttcgcatgattacatggcttgcttatccataggattggtttacgagttttgaattacttttgcaatttttatgcaaatttttaatggaaaaaccaacggttaaccagcttttaatcattaattaccaacctaaaatttaatcataatttcgtgcagttaatgtatcaaagtcgtgaaacaccgacaaattatcaaaaggaggtgaaccgagaatgtgacgaagggacagggcaatgtattgcaatagcagattatacacgggattctgggtataataatgaagccgatttaaaaaatgttaatatttttagtaagacatggcatcgaggcattttttatgtcaatgaaacgacattcgattttgagaaaatgctcgagaaaaaaatcggagcagaagcaattctcaaatgtcctgcaaatg

SEQ ID NO: 74349 - DNA, 210 bp, Heterodera glycines
atgatttcaaaacattttcgattaatccatgaaaaagtaagttttccgtgctattcttaagccattttctgaatgatttgaatgttcataattgtcaacaccttttttaagagaatttaatacatttacacaatcccattctaaattcagactttcttttatttcctttcccatttttaggtcacattttagggtgtttcgtaaaataaa

SEQ ID NO: 74350 - DNA, 2374 bp, Heterodera glycines
atggctaacctatttggtcaaaaacaatctgtagctgttgttggaatgctcaaatgtaaagggaagccaagtgctggtacaaaggttaagctctacgacaatgaccgtaagttttcagttatttacaaaaataataatacagtagtttcatcaaaaatgtttccaaaataaggacatcatttgttaaaaattatttttgtggacaataataaggtctacataattatacgctctatgtacatttgtcatcaatttttaataccctttaaattcaaggaaaatttcaatgatttgttagtctaaaaataataaaatcatagaaatatttaaaaaatcaaaggtgatatgataaatatctcaggaattaatatttttttgaatttataatattttgagtcttacaattaggacaacccttagtttttcgggatcaaaattaggatatattaagtgccgaatgtcgtcataattaaactttctacgcatatatttaactacaaattttcaatgccatttaaattcagagccaaatttaatgggtcggggtcactttggcatgggccataacttgtttgtgtatcagtcagattttgtttagaatttttgcatgcgaatagggactatcaagcgcttaaaacccatatccattttatttaatttggatgacaaatataaatgctttaacaaaatcgtagaaatagcgaaaaaatcaagaaaataggggcgaaatattgacaaatctaagaatttggtatttttgttattttttttttattaccgaaacatgcaaataggggggattaagcatcgaaatttggacaaatgctacctttgttttttttaaatattcgttaatttttcagattttacgactgatgatttgatggcacaatccaaaaccgacaattatgggcgtttcaaattgagtgggacggcaaaagaaattacgaaaattgacccaaaattgaatctgtaccatgtgagaaattaaaaatacatttaattcattactttattaattttgacaatttaaatttcaggattgcaacggcgatttcccatttacaccatgcaaatggaaaattacaattaaagtaaaaaatataaattgaataattcagcaaaaatttaataataaaatagctggaattatacatctaattagtgatatcaatttaaaaaattacatttacctctaattaggaattgaaataaatttgacaaggcttatatggtgatgaattaggttcccccttccgtatcgtgcgcgatcaaaaaattttcaaaaagttttcaaaattttttttatagaaattcctcattgaaaaaattttctcatttttgagcatatttttgttttgaatttttttttataattgctcccttttatatgtattagcagcatctccgtactaattttgtggctttattgctttttcaattccatttttttgggtaattgatcgccaagcggaattttctaacacagctcattgttttcgaaagagtttaaaattttgcatgaaaatactttggtataaggcctagcatcttgccaaattctagaattttttatgcactcagagattttttaaaaaatccgctttttccagcctgaacgccaactttgtggtcaagttttgaaaacaggcggttttttgtaaaaaagtttaaccaatataaaaaattctgaaattttgcagggtgctaggtctcttgccaaagtattttcatgcaaaatttcaagctattctgataactctgaaccgaattacaaaaatcaacttgagcaaaatgcaaacttttattcactaaaattcacagccctaataataaaataaataagaaattgccgaaatgttaggccttgggtgggagtcgagcccacgccttcagctagtggttcaagcagctctaccattgtgccaccgagacaaaaccacaactttatatatttgtagaatttaaattgtaatctcaattttatattttaatttttataataaatattagccacttttcatttattttttacagattccaaaaagttacatcaccactggaccacatgcaccgaaagtgtttgatatcggcgtgttgaatttggaaggcaaattcagtggccaaaaaagggattgcatcaactgagtgcgatggttgattaaatgttacaaaaactcaaaaacccattaattgttgacaattattaattcaatgaaatatttttgaattaaattaatgcatttcttgaatatttgaaattacatttgcaagagttaaaatgtaatcatttttaatgggattaattacgcaatttttataaaacaaactttgacatatataaaatttaaaaaaatttaaaaaacctcaaaaa

SEQ ID NO: 74351 - DNA, 623 bp, Heterodera glycines
atgccaaaggagttgcgattagcatatgttagaagccacgaagaaagcaaagtgagaaataatgaattgcattaaacaatcgatttcaaatgattaaagacccaaaagggggagaaaggcgaaatgaaacggtcgctgttgacaattcactttcgaaattgtttttcattagcgtggagaaattggaataaaatgggcaacaaattacatatcaaatttaagttaaaatgaaaaatggaaaattaaaaggcaattggaggggggggggggagaattaaaaaccccccccccccccccgaaacccaaaaagtaaaaaattttcagtgaatttttttgaaattttaagcaattttcttagcaaaattgcattaaaatacttaaaaattttcccggtggcccctatcggcacgccgggaggccaaaatggcaaaaaatattaattttttggcgaaaaacggcgaaaaattttgtaaaatacaccccataattcgggatttaaaaaaaccaaaaatacacccctaaaaatcgaatttttgacttcacccccccccccccccccaaagccaagggtctggctacgcccttgcaatgatccgttcaaatagtcaaatacaagcaataaa

SEQ ID NO: 74352 - DNA, 759 bp, Heterodera glycines
atgacacttcaaagacgcaaaaatgactgctcttattaccctaataaaattcttttaaagaattcaaatatctgttctgtacgaaaaatttattataatcaaaataatggcggtgaaagagaagatgataacccatccactggttttatatacacagacattggtatgtttcaacaataaaatgaaagacgaaatattaaatttaatgagtaaaaaattaatattattatttttatttagatggaaaaaagtattttggaattactttacaagaagtccaaccatcaacattcattattcatcgcactgaaagtcaaagtactaaaaataaaattaatagccttttcttcgggagtcgggtcggagaataggcctaaaaatatcggggctcgggatgggcggggggagaaccattttttttaattgataaatttggtgtcgtggttctttgagtttccattgcttttgtatgatttaaaggaaaaaatttaataaaaattttttaagctttaaaggaaatgttggaggagaaggcaaaggaaaagaaacaagcatatgacgaaaatggagagccaaaaagcaaaaggagcataatgaaagacactgactgaacagaaggaaatgggaagaagctgatttatattagggagagagagagagtaatagagcatttattcagcaattattagaaagtatagacaattaatccctaaatgttttgtatatttaggacatcttttagtgcttaaacctaataaa

SEQ ID NO: 74353 - DNA, 1041 bp, Heterodera glycines
cctcaatggcctgcggactgcaacagcgcgcgttggatgaggcggatcaaatacacaacgaaacgacggacatttggccaaccgatgatcgaataccatgtgggtgaggaggaaatggcacaattttccatgaaatgccatgggttagttgaacacagaaaccgaggggagaaaaacaaaggaatttaattgtgttagaggaggtttatttttgaattttgttaacgcttcggcaaatgctcaatttcttttgagggcgtctccttcaaactcgctgaaatggccatgcatttggaggcgtccaaaggccttgtgaagcgggcgggcaaaaaggtggacgcgcaggcggaggacgccgtttattttgcgtcaatggccaaatgctttgcatgcgatgcggcattccaagtgcttttttattaggaaaatactttttctgaatttaatttctttttttaaggcggcatcaaacgcagttcaggtgattcggggaatatttccataaaaattttctgtgtttttttaaattaatagtttctatgactcatcttttcgtatatgaaagaaaataatctttcatacctatctcaacacacggttcaatttcttttttacataaaaaactattttaaagtttgtgggttattagaattttgtcatgtgattcgtcgggcgactttttgtctccggcaggcccgtagccggggggggggggggggggaatccgaccaccgaaatgaaaaattaaaaaattttcaaggaaaaatttgcaattttttaaaatttttaatttttgttttaaaagttaaatctttttttcttcggttcccccctccgaaatttttttctggctacaggcttgctccccggtaaaattatttgctgtgttcatttgaatagattttcggcggcaacggtttcaacgaacagtttccggtggaaaaattgctgcgcgactcgaaaaccttgcaaatctacgggggcaccagcgaaatacaacgggttgtgattgcgcgggagttgcgcaaaaagtacggcaac

SEQ ID NO: 74354 - DNA, 1694 bp, Heterodera glycines
atggcatttcatggaaaattgtgccatttcctcctcacccacatggtattcgatcatcggttggccaaatgtccgtcgtttcgttgtgtatttgatccgcctcatccaacgcgcgctgttgcagtccgcaggccattgaggctgaagaagtcgacacggtactttcgggttttgtgtcatcaaactttttctctttgttaaattgattttaaattaataaaaagtcgtttctatgggctttcggggtcgtagaacccgaatattatgtccgttttgacccatttcgaactccgaacccggattcgaacaattatcaaaattcaatttttttttcaaaaatgctttcccacttcattgccgactaatttccttatcagcaaattgcttcctacctacgcccacacccttttccctcatttataatgcagagaaaataaaaacagaaatatttgaaggacgaaagagcaacaatcaaacgcaacaggaaaatacaaaatttaatttaaaatcgccaattgaaagcaaaaaaacaaattttaataaagatgttcataacggggaagtatcgcaaattggaaatataaacgttcataaaagggaagagaaaaaaaccggaaacataaatgttgcgcaacaaaacgacgatgttggtcccaacacagaaagccaaaacactaatacgcaaccaaacgacgatgttggtcaaaacacaggaagacaaaacacaaatgttcataacgtggaacaaacaaaaaatgaaaacacaaaccttgcgcaaccaaacgacgatgttggtcccaacacagaaagccaaaacactaatacgcaaccaaacgacgatgttggtcaaaacacaagaagacaaaacacaaatgttcataacgtggaacaaacaaaaaatgacacaggaagacaaaacacttatgttcataacgtggaacaaacaaaaaatgaaaacacaaaccttgcgcaaccaaacgacgatgttgatcaaaacacagaaagacaaaacacaaatgaggaagagactcaaactgaaaacacaaatgttgcgcaactaaatgacgatgttggtcaaaacatcaaaagccaaaacacaaatgatcataacgtggaaaagacattaaaaggaaacacaaaaaatgttaaacaacaaaaatttgacgttggccaaaccaccgaaggacaacaaataaaagtcagtcttttatatcggctccaatttatttttgtaatatttctatccttttcggaatcaataaaactagagtagagcgggaccgggaattttgggcttaaccgggaccgggaccttttcgggttgaaaaaccgggaatttttggctgggaaaaccgggaaaaaacccgggactggtcccggtcccggtctaaaccgggacctcagtactcagttgtccgtgttttggtcccagtcccgctctactctaaataaaactaaaatcactttttttgcttcaagacgattagattttatatttttgtaaaaaaataaataattatatttattttaggctgaaaatgaaacagctaaagaaagtgtgaattccaactctattcaaaaaacaattgggagaaaaagtgtaggaactcaaacagacgaaacatatgttggtacattagtgcattataaagtgacacaaaatataaagggacactaattttttgataaataaa

SEQ ID NO: 74355 - DNA, 1286 bp, Heterodera glycines
atgttaagctttcgaatgacaccaaaatgttgggtttggatgacaaagaaaaaagctatagtggaaaaacatgctgggccgaaccgtgtgggccgaactgaggtaaaccgttcgcaacacaaaacattgcaatgaacaatagaattaatgagacaatgcataaataataaaagggaccggattaatatggataaaaacccaaaatttaaagaagaaaaaatttcattaagaaaattaattttcttattttttaaaaattttaaatagaaatctaaacacgcaaagaaattttttccaaatagtgttcaaaaaaatatatatcaaaacaaatccgggccctaataataaaaacattaaattggcagttaaaatagggatgtgttaaaattttttggtcaaagttgggacgacggcgttggcgtggccgccaccgtcagttggtcgccgccgttgccgtactttttgcgcaactcccgcgcaatcacaacccgttgtatttcgctggtgcccccgtagatttgcaaggttttcgagtcgcgcagcaatttttccaccggaaactgttcgttgaaaccgttgccgccgaaaatctattcaaatgaacacagcaaataattttaccggggagcaagcctgtagccagaaaaaaatttcggaggggggaaccgaagaaaaaaagatttaacttttaaaacaaaaattaaaaattttaaaaaattgcaaatttttccttgaaaattttttaatttttcatttcggtggtcggattccccccccccccccccccggctacgggcctgccggagacaaaaagtcgcccgacgaatcacatgacaaaattctaataacccacaaactttaaaatagttttttatgtaaaaaagaaattgaaccgtgtgttgagataggtatgaaagattattttctttcatatacgaaaagatgagtcatagaaactattaatttaaaaaaacacagaaaatttttatggaaatattccccgaatcacctgaactgcgtttgatgccgccttaaaaaaagaaattaaattcagaaaaagtattttcctaataaaaaagcacttggaatgccgcatcgcatgcaaagcatttggccattgacgcaaaataaacggcgtcctccgcctgcgcgtccacctttttgcccgcccgcttcacaaggcctttggacgcctccaaatgcatggccatttcagcgagtttgaaggagacgccctcaaaagaaattgagcatttgccgaagcgttaacaaaattcaaaaataaa

SEQ ID NO: 74356 - DNA, 857 bp, Heterodera glycines
cgatgttttgatggacagtctcccattctttaaccatgctcaactcggcctcaaattggcgctggtttcgccccgttttgatgcgttggtcgacaaacatttcgacggcaaatccgcgctgacaatttggagacaaatcagaattgacaagattggaacaatgccgagactgtccgtgtttatcaactatgtcaaatctgtgccatttcctttgcccgaccgtccgttgcccaacaaaattcatttcaaggaccttcaaattgcgtaattccaaattaaaaacacatttaaaaaacattccttccgttttcaggtacattgaccatttcgtcatcgcatttctccgtgccaataaacaaattttcgatggaaatggcactgctttgaaattctccatttggtcagccaaaaacgatgtggtgccgatttgggatgtttttgccaatcaaatttggcccatttttgcgccaaacattcgccacatgggcttgaccaatgctgaccatctggacaatttgcgtcgtctcatctcaccgacaatcctctccgatctgaaatggctgaattcaatcaattcctatcgtctgttgccagatgcgattggtggtgattttgatcagtcaaatgcaactggtggccaaattctgtccaaatggttgcacactccgacaaccaatggccaacccaagcgatttaactgtgtttattatcaggagccagcaattaacatcgacgaatggatcaacaccttcaaagaagtgtgtggccacattttcctcaaacaactgattaatgattgccttttaattttgtttcccattggttatgtaggaatttggtggatggcggaggtgtaa

SEQ ID NO: 74357 - DNA, 377 bp, Heterodera glycines
atgaaaaatgataaaagaccgaaaattgtaacaaaatcggagttaccgtgcactaaaggtgtttctaactactgtagtataagtattaatttttactgcaatattatgaaactaattgacttattgtactaatttttattttttaatgcaaaataaaaatttatgacaccggtgaattttatcagaagtctttaaaacataaattattcctttccttgttatttaactactttccatttttagggtcccttttggacgaattttgaagaaattttctgtaattttaagttttttcaggactgagggacccaaatccaacatctatttcggcaccccgaaccaggactcttaagaaaatgtcgaaaaatagaatttaa

SEQ ID NO: 74358 - DNA, 689 bp, Heterodera glycines
atggaggagggcggattaccgcccgagaccgcccccggctcagccaccgccgaacaacagcagcaacaacaacaggcaactcaaccgagtggaaacgaagcaccgcttgacgatgggttggccatgttgcaggaggtcagagtcaacggatggacgattgaacacaccaaaaaataaaacagcaaataaaggccgaatgatttattattcctttggaggagtcataaattaaaaaccttcactcttcgcatatttatttattttttgttcagctttaccaacgacgtcatgctgaactgctcgcgcagttccagcagtctcagagcattgcccagcaggactacctgctcaacctgcagttgctccagtccgcactgcctgccgctgctgcgatggttgtgttgcagcagcaacaaattgccgtgatgccttccgccgcttcgcagcaccgtccgctgctcggttcgttggcgcacacgagcagtgagcagtccaccgaagagtttgatgtctcggcacagcaaaccgcgcagcaaccgcaacaccaccagcagacgtgcagttcggtgccgctggccaaggaacacgcggcgggcggaattgcggcgacggcacgcaaccgacgcactttttcgggatcaggccaaacaatttcccaacacacgcgagaccgactgaaatccatgtga

SEQ ID NO: 74359 - DNA, 306 bp, Heterodera glycines
atggatcgtaacagtcatcggccctgtggcataatggataaggcgtttgacttcgaatcaaaagattgcaggttcgagtcctgccagggtcgaaaatcttttttggatattttatattcatcgcaaattaatactttttttcgagtaaaagtcggttattttggattttctaaaaaatatgatataacaatttagtacggctcttccaatgatcatttaccctaagggctcgttttccaattttatgccctttcaaatcttttacgactaattaacaaaatctttattcgcgttttacaaaataaa

SEQ ID NO: 74360 - DNA, 2557 bp, Heterodera glycines
atggtctggaaggagtgggtcgacggggggggggacggtggtgcggctaggcgccgccggaaaatttttgaaaactcaatgcaatttgatatttcactgccaaattgcgattctttaacaaggcgactgcactttttttgtttttaaaaagcgtttttttttgcggcacacttttaaacaactttttttgctatttgttagaagattttgtctaaaaaatggccaaattttaagatttgggctaaattctctttttattattttttttaattctattttttttatttttcattttcacatttttttctcccatttttagacactctcatccagctgtgctatccgaaatgcgaacaatcggacaccggcacctattccattcgcattgtgaatgaattcggctcggcttcggtggacttgcgcctgaaggtggtcgatcgccctgcaccgcccgaggggacattgaaggtgcaaaacattgggaatatttttgtaaacagaaaatgatgagaggggcatatttgtaaaacaattaggaaggattttttgaatttttttttagaaattaattttaacggagtatttttcgtttttactgtattttcttttttacaaaatattcttttaaatatttaatgtataaaaatatgaacaggagcggaccgcgtccagtagccgaaggcgacgcgttggcagcacagcggcggatcggtcggcacaggcggcagcagcggcttgcgctgcgggcgaagaggcaaaggacgaggtgtacaacaacgaggaggagcgacagaacatggcggtggtgacaaaaaggatggcaattttggtaaaaaaaaaatttcaaaattattgtgtatgcttttcgggatttttgtgcttaatacctaggcgccttttttgtgcctatttcgccatttttggcgcctattttttggattttttatttattaatatttttccttgagaaaagcagcacaaaaacaaaaatctttcactttttaattgtttttttcaatttttgggcaccccttttttatttctattttttaaaggacctggaaacatccggcacaccggcacggattgtcgaaatcccagaaaatgtgacggtggttgagggcgaattggccatcatcaaatgcgtcgtggagggcaacccggcaccgacaattgtgtggaaaaagggcggccgaaaaatgccattgaccgacgaccgagtgcggtgccaaacggacggtgacacgggacatgtaagtggcaatttttaaatgaaatttttaaacacagaaatttaaaaaaaactgctgttttttggaaaaaactttttttgtgaaaaagtcatttatcataaaactgagaaatcataaaaaattttttgttttaatttcaataaaattacatttttcataccgtagccctcaaatggaggacaagaaaactttttactgtagttctaatcttggaagggatttttacggcactcaattaattaattaatgtagctcatttatttctaaactaaattcaaaacttagcagcaaatttaataaaaaaaattttatcaaatcctaaaataatgttaaaaatattttatcaaattaaaataatgttaaaaatattgtcaggtttctctgatcatttccaaatgtcggccacaagatgggggcgagtacacattgatggtgaagaacgcgcatggcaagcacaaagttggcgccaagctgcttgtcacgccagcggccgaagtgaaaaaaaattgccagccaaatttaaataataatatttacaaaaaataaatttacagtcaaatttggacatccgggccaagcagaaaaaacgtggcacgggcattagcaattcggaacaggaaaaacagcgccaacggagtgatgccgagcccaaaagcaagcaaaaaagcggagcgcaagccggtgaccttctagttcgacgatgagttgtattaaatttttttgtttttcactgttcctgttttatttgtgcccatctcttttttaaactctgtgaattgaagataaaattttattttcctttaattgtcctattttatggtatatcccaaatccccagggctggccgtgattgaatttccaatcacggaaatccgtgagccgtgatcacggggctttaaaaaaaatccgagatcacggcaccccaaaaactccgtgagccgtgatccttgattaaaaaatttttttctaatgatttttttaatttaaatttatttagaaaaacggaatttaatcgctggaaaaattcctaaaagatattttaaagaaaccaaaacacaatccgctttttttgctgcgtaccttttccaaaaaatgactaagtttacgattttgagcaaattttttgatgaaaattaggcctttttgtagaaatctccaaggaaaaattttattttttaactaagtttattaagaaaatttttcaaatttttcttaaatttaaccaaaaatctatttatatagagaaaaaaatcagaaaaatttcctctaatttgtaagctaacttttgatgctgaacaaataaa

SEQ ID NO: 74361 - DNA, 1701 bp, Heterodera glycines
ctttttttggcccatttttcttttttctgttttttggccctcttttattttgaaagagaaaagaaagaggaacggaacggaacggacaggaataaaaaggaacgaaagaaaaaagagaaaaggttagaggaagtgagagacagggaaagagtaagagattttaagtggccctattaaaagtttgagtataaagaaaaaattattgaattcccggccattataaaatccaatgcccttttataaaaaattttttggcgaggagcgccctctagtgagtgttaaatatcgaaaatttggaagttcaagggtctgacctaggtcataaactttaaaaatcaggggtcaattacggtatataaaaccatagcacttaactgaataatcgctgccgtgctctagttcttatttaataggactgaaaaaaacttttgaaggcttatataattttcaaacaatacttttttaatccttttaagaaatgctcggcagctatttccttaaattttatttgtattatttacatttttctacacaacatgaatatactaaggttaatacctcgacctggattaggccctggaatttccaatatttttttctttaagaatttcagtcgagaaacccaccagatttgtgccagccaaatccgtagttttgggaaagtctggaaatttcgccatcctcggcttgtccttttctcgatcacttgtagaaaatgaaaaaataatttgtaaatctaaaatattgtaattaacaaaaaaaatcatttatttttttcgaaaattcgcaaaattaagactttttcaatgaaaatatggtcaaaattcttaatttttcccggcggcgcctatcggtagcgcggccccaccaaaagttttttggaaaagcgccgcaaaaaaatcgagcgatttttcatgctcagatttcacaaaatgcttatttctaacaataaattgaaaatacacataacattttgaacattttaaacttgttttgaaaaaatttgtaaaaatgttaaatgcaataactaagcaaaaaggtcgcaatattgggacgacgaatagaaaatgttgtattaaaatggcgattttttagctattatctttagagatcggtattttgaaaaaagcctggacctggaccagacaaaaatccaggaaaatccaggtccaggaaaaatccaggctcttcgagacctggattttttgaaactcatcctaaaaatcaaaaaaaggttgaaaaaattaattaattgcttagaaacacctaaaaatatctacttaataataataatgtatttttaaattaatttaatctttttttgaaaattaaaaaaaacatcggtcacttgaaataataaattctaaaattttgtccaggaaaatccaggtttttcgtgttttgcctggacctggacctggatttttttttcacattggacctggacctggatttcctggacaaaaatccaggaaaatccagtgccatgaaaaatccaagatgccgaaaaatgacctggacctggacctggatccaacaaaaatccaagcctggatccaggaccaagccgagatcaaatctaaagcatactgtatcactgactcattttctattgtaccgctcagatatgttacagaaatgataggtgacttgtttacaagtatttttatgattattttctcatttatattgaaatcgtag

SEQ ID NO: 74362 - DNA, 3002 bp, Heterodera glycines
  unsure (1)..(3002): unsure at all n locations
atgaaactgttgaacaaaattgaacaattgagaaactgtaaaaatgaaaccattgatacggtacggtacggtaattaagttgtctgtttttttgtttaaaaatgacaaaaatagggagcaataaaaatacacatttgttaatgtttttatggcaaaaaattttttgaaattttttttttcaaaaaagggggcgggggcaaactacattatgaccaaaaattttccaaaaaaaaaaaatcaaaagagggaggagttgttgagagttttgaaaaaaataaattaattttttttctttcgtttaaattagggttgggcccccgacgtcggaccgggtcgactgggcgccgccgactgggcgacgccaactgggcgacgccgactgggcgacgccgactgggcgacccagatcaactgggcgccgccgactgggcgccaagacccactttcaaattccctttctttaggcacaaaaatcgcaaaataggtttaaatagacacaaaaattttcgaagaggcaataaaatttttgagaatttttactttcaattctgaagggtgtattttcaaagaaattttttttgtttttatttttaaaagtcatgaaagcatgatttcaaggggttttgggtcgcttatcacgaatccgacacccatttcgacaaattacgaacccggacccaaattcgaacaaaaattgttagatttgggtccgagggttcgaaatggatacaggattcattgtcagcgacccagaaaacttttggaacaacaaaaaaaatttcttaaaagggggcctacaatcataactattacgcaaaattttatgcatttgcctaaaaaatccctatttatcacatatatggtagggggtagggatagcacgtaattccgtttcgaaaaaattttgggcttcggaactccaattttcaaaaatttttgtggtctcggaatcccttctctggtagggagggaaacggggactggcgcccagttgattggcgcccagtcggcgtcgcccagttgatctggcgcccagttggcgtcgcccagtcggcgtcgcccagttggcggcgcccagtcgacccccaccggtgtacccccccccncccccccctaaatacggtactgccatgtatttagaaaaaaatttcagaaccgaatgaaaaaataggaaatttttagccattttcaccaactttggccattttggggccaagttttggaaaaaaaacatggaaatattggatcgggcgatgctgttaggcgtcttcatttgaaaatagataaaatttggtaacaaaatttagtaaaattaaaaaataattttccattatagaaaaatagaattttttttaatatttatctgctctttttacatcacttttcattttgcaggaggccgttgccattgagcggaacaaatttgactggaaaattggaaatgcactcgtcaaattggcggccatcgaagaaacgctgaaaagtcgggcagcaaaagtaaatttaaaaaataaatcatacatgaaaaaagggggaaaagaggaatttctgaaatgtttgccattttcttacaaattacacataattcttcataatttttattgcggtttttttttcactgaacgcacaccttttggcaccgcccaccaccaaattcttagttttttttttctttaaaattaattcaaattctaaaatttttttgttggaaaaaccccttttcgtcgttgttatctgttgacaccatcggggcctcacccttccccagatgcattttattcataccagggttgttccgggttacccgaaacccggcctttttctcgcccgaaacccgacccgatgattttgggtcgggtttcgggtcgaaataagcactggtaagaaaggggtctgggtgaaaattaggtggataaggaaattgagaattttttttgaaacgattgtgttcaatggaatcgaaaattttgtatttgtttttgttcattattagggatgtcaattttatgtaaatatgtacatatttttttcctggcttctccatgctctaaatagtaggaaaaacactttcttttttatgtttgcaaacaaaaatcgggacttttatttacatatttttacatatttcggggttttatacatatttggtacatattttggactttttcttacatattttgattttttttacataatttgcgggttttttacggaaaatttttggaaatcctcaaaaaaaaatccaaaattttggcaaattttttatttttttatacatattttgagaatttttgaaaatttttagaaatttctagtgaaaaaattaaaaaaaaaactttttttaaatgtacccctccaaaaataattttttaaatgttaaaaggtgattctaaacatatttaggtcattattttaattttggattgatttagcataagagtataacaataacatcagacagaatctaaccacttcaatttatattgtatttttaggggtttttttgaaaattttttgccaaattttctggcactgaattgtcggcttttcaacggattttgaagaacacgccatcgtaaacttcaaacttggagaaacgaaaagaggaggcattcacaattccggacaaattacggctgaaggatggcgaggacatagtgctctacgacagtcgcacggtcagaattggagaaaaggacgttgtgcttgtttttgggagtgaacgggtaatcatcaggggcgaaaacagaatttaaatttaaattttttagactttggacattttgagcaaaaacagtgcaacttggcatttggacgggacattcaaggctgcaccaaacatgtgggagcagtgctttgttgtgggcgcgtctgtcaaccaccgaatgtgcattggagtctggggtcttctgcccgggaaacatcgacgctactacgaggaagtgctgaactttctacgaaaccgaatttcaccggtcgcaccgagaaaaggtgaaaactaa

SEQ ID NO: 74363 - DNA, 3836 bp, Heterodera glycines
atgactcatcgcactcaacacgagttaatgtgtgacaataatgacctatttttggacaataaatctgaaaaaaatgctgagatgggagaggttaatggtcagtgacgcccatgttagtggtcacagtgcacacaaagttaagatttgacaggggacggataaacgtacaaaaatggaaaaaaaagatggatttgtaaggattaagcaagaagcggacggataaaacgctttaaagccaaagcataaagatccataaaactggaagggagtatgggatagtttctggtagctcgtgatgctcgagaccaaaaatttcccgaaactcgagatcgagacttaaccacgagaccgagactagaccaagagacccgaaactcaaaaaacccgacttttctcgaatcgagcccgcggctctcgagcttcactgctggaagtccagatgctcagatcacaatggttttactgagaagcaggactgtatacgtgaattttctattggaaatcagtagtaattgcggcgattttatcaattaaggaaatccgtaattgcgcccagcaaccctgtgagcagaagcctagcaaattaattgtcaccatcatcatatataatactttatcatttattcttgctgattttatctgttatccctgctttacaccttcggatatatttggtttattcatttatagagtattaactaaaataaaaatttcttaggcaattttaattttttttcaaaatttcaaaatttataggaaatttaaaaatttaaaataagccggcggcggcgccaatcaacaaaaagtaaaaaatccgaatcgaaaacggcgcttttgaacttcattagtggaccgaaacaaaatcaacaacaaattgcgccaatgaaaaaaagacaaccactttttctatgctttataatttttttccataacaattaaaaaatacagaattccaatttattgtatactaattaattatgcattattcattcattcatatttcacgccaaattgtccgatgaaaaatggggtggaaaatttgtcggatgattttgtgatgatttggccaatttataaaaaataaataaatgaataaattacttttgtcatttatcggtgtccacaatctctgctgcaaaatgtgtggtcgtttgtccgctttttcttctgctggtggcttttcccccatttttttttttacttttttacacgtcgacacagaaaattcagtgatttgtccaacgacggaatttactgcaccaaccaattccatcccaccattttcatccattcatttcattcatttgatcatttgggaatacatattttatttgtaaaataaaataaaaatattttttaatagtaaataaattaaatataattaatattaattaactagcaaatgaactctttttctctattgaccgtctttctttgcttggtcattaattgctcagctcctccgatacggtaatttcaaaagtaatctcaaaccaataaatattttaaattttaaaagcatttcaaaataatcgagtctaagccttgattcaggcctaatcaaagcctggatatttggcctgaatttttctaatttttcaaaattttcaattttcagccctttgtcgtccgacgttggcatttggaaattgtgcaatggcaaaaatgggacaattttggtggaaaatggctgcacaaagtaaaatatttcaataatttattttaaattaactatttttaaaccatttttaggctcctcatctgctaccaaagcgaaatggccaaaaacagaaaaatcggaaaacgttttggggtgggcaaaggaataattggcaaattgaaatttgtggaatgtgccgaagagattgccgaagaccaatggcacggtctgatcatttccaagcaccaagacggagtgatcagctacgaatcgaggcaaattgggagagataaaatattttaaattatgaatttaattaattaagccatggattcgacgacattttcggcaccgatcaaacgaaaaaaacggaaaaatatttggaaattaatttgaccaaaagtaaaaccaaattaataataatattttaataataattattattttacagatgctgaaccactcggaaacgaacttcaagaagcgctttcttctgccgcatttttggacgattttatgccatttgttttggcattcgaatttggcacaaaattttgcgcagaaaacggcggcaccaacaaattgtgcaaagagaaagtccaatttttttatatttaaaattctcaatttaattaattttgatttttagtgccttacaaaggcaccgtttgttggcacaaccaaatcccatggcaaaacaacaacaacaacttcaatcccgacaaccaccgaagaacaaacattttcgtttcaaccattttccgaatttgtgtcccattttggcactaattgttcgaaaattgttttccccgtggaggtggccaaattcattgtgaacatcaccgctaggccctaccgaattgcgtgcaatgactatgaaaaagagtacgagatcggaaaattaccgccgcattatttggaaaatgcacacaaagattttttcaatgcttgcatgtcagtgccgacaacaaaatgcgcaaagtgattgaaattctggcacaaaaatttggtgccaaattgagataataatggcaattcatgttttcaaaaataaagcctaagcttagcctaagcttagcttcaagtaagcctaagcctagcctaaagcttaggcctaatagacttgcataggcatagacctaaccaagggcctaggcctaagcaagtctaagcttaggcctaaacttaaagcttaagcatatgcataagagtctaggttttttaggcactatacaaaattttttcaataatttccatttttcattaaattttcttataaaaaaagttttgtacacaaaacggcaccataaaaaatttgcaaaatggtaaaattgtttgccaaattctcacaaattgttttttaggcatgcggaactgaacgcatgctataaaagcatgaatccagtggtgccaagcaacaatgccatcgccaaattatgccaagaccatcttaatgaatcgaatgctgccggatttgctgtacaaatttgcatccatcgggatgaaatggaacagaagcttgtctttgaaacattcttgaacctttccaccacagacaaattgtatgtcaattaatgatgagagagattaaatgatgtcattaattaattaattgggttaattaagcatcaaaatgacgcgcaatttcccaatttccgttgaacaaattatgaaaacaaagaaaattattcccattttctttctcgaatttggcaccgatcaacagcaaagcgcaatacgagaacaagaaaatgggaaagtgatcagcggagcactgaatgaaaatgtgaaaataaaacgtcatttttaataattaatttagaattatagcaatttgccaattctttttgaaaataattaatttaaaaaatggacaattcatttgtcaattattttcttgtttaaataattaaattaaattagccaatggcatttgccaattattttttaaatgatgaattttattttttaaagaataatttgttttaataattaattaattaaaatttaggccattggcattggcaccgttctcaatgacatcaaagcagaaaattttgccaaaatgattcatttggtgccgcctgttgctgatcggatgaaagcgttcttccagattccaacgcctaacttcaacaaactgatcagtgcccagaagccatacgaaaatgactaa

SEQ ID NO: 74364 - DNA, 910 bp, Heterodera glycines
atgcaacgaaggatcaatgaatgtcagcagactcggaagaaaaaagtcactttccgcgaaacagttgaggaaataaatggcacaacaacggaaattggtaggaaatgaacaataattaaaatttaataacaattttatttaatttattttttcttgaaaactaagcttagatttttacgaaataaaatgacaaaatatttgccaaaatatgcaataaaatattatgcttttttggacaataaatttttagaaaaacatgaaagagatggcacaaaatgccatcaaaaagaaagacccaattaggcctaaaagaaatttaattctaaaaaatctcaaaatatgtaccaaaaagtttgaatttgtagaaaaatatgtaaaagaattttcacaacacctaactatattattattaaaattataaattgatttaaatgtacattaaaaaaagaattcactttaaatttgccctcatttgtcagggcagggagcgcggctctttcgcgtttacacaaatttatttcatttaatcttttaaatgcttttttgacttttttttttatctgtgggttttttaattaatgctgctaataataatttaattcttaatttcaatagtaattagcgcgtcttaattgctttttttttgcaaagaataattttaatttaattcagtgcacatggaaacgtcgagccatggtaatcgacgacaatcttctgacatcagcaccagcattagggagctgcaacaattacacgaaattgttttgtccatccaaaatttggcggcaccaaattcacggcgacggcattactcatctgctgatgatggtgagcatggagaagcatcggttgccattcaccaactgcaacaggccactcagcaacttcaacaagttggatgagcgaatta

SEQ ID NO: 74365 - DNA, 1878 bp, Heterodera glycines
atgagaaagaatggcaattatcaaaatgtgtgtagaaatgcttttcattttactccatcaccgatcacttgtgatcagcgagtgcagcaaaaagatggggtacaaaaataatacaataattattttatattattttaaacattagcattttttgaaatgatttttaaaaaattattcattagcattttaaatgatttaaattgtaaatcccaaaaaataatccgttttctagctgacaatttgctataattaaaaaataataattaatttcagttgtttgctatacatttgaaaaattgttgggacaaatacgcctgtcacattggcctcaaaatccttggcactcaatttttgaaggttcaaaaaacagatcaaagcggtaaaaaactttttagttccatatacaaaaaacattttgaagggttaagagatttttttatttaatttaaaatttaaaaaaatgtaatttttttaaattaaatttttcttgtccagtggttaaaaactgagattcctgaccaagaaatttcatgattccagggatggacaattttttgtttatgaaaaagtcaccaaattatgaacaaaaatactttgaatgtaaccaaaattaaaaaagtacagtataccattatcattattatacagtgggttggagttctgtgttcgcaacatgctgtgttccggcagaaagtgccggcattttttacttcgaagtgcgcatttttcacgtgctcaggtaaggaggcaggcactaaaaatccaggacaaatcttggcttgtcacggcatggacccatgcttgtgtaccaagatttttgaaacatattttaaaaagcaaataaattatttgaaaaaataaattaaatggttaggaaaaattctctaaatttttaattgacaaaactaattctacggtagtggaactaccgtaggccttgtgctgggggtgggaatttgaaattttgaacaaattcaatataaattattattgtcctaaaaggtccaactttttaaatatgatatttgtattaaattaaaataataatataacctacaaaagtctacggtattgatctaccgtaggcgtagagcactgctgcttctggagttggaatttgaaattttgaacaaattcaatacgaaatccaatgtacatttcgggcaaattgaacattgacaagcatgctattgtaattttaaaatttgaagttgcttcaccatcggactggccaccaagcaaatgccattggcgccacaatttgccctgccggcacacaacgcttcttccgctgctgcatctgctcccggtggcaccacccatttgtttggtggcaatgaccattttttgttaatgatttccatgagcagcattaagccaacacagcaaggatcaacaacaacgaacacaacaactacaggatttgcatgtggggatattgttggatttggcattgaattggcaaatcgacggatttttgtcacgaagaatgggcgccgtttgggtgaataagttctttattgcactttttaggcgcccaatcggtgctaaatgactttactcaaaaacccataaaaatgggcgttactcaaaaaaccatcaaatggaaaaattttgacagaaaattaattcataacttcgcccaaaaagaacagaattttaaaatttgggtattcgatagaatcaaatccctcgatagcatgcaaaatttcaaaaaaattcattaagtttcaaaaaagttatgacctgagaaactcaaaaactaagtttttttttttttgaacatttttggtcgtaacttgttgaaaccttaatgagattttttgaaatttcgcatgataattagaaaacaaattgtgctatcgaatgcaatcaaga

SEQ ID NO: 74366 - DNA, 139 bp, Heterodera glycines
atggtggtggagacgcaggaacagctgaatattgaccaccatccatccgcgtttcaccgtgtcggctcggccactgttgcgccacaaccgcccgctgctgtggtggagacgaacgtcgttgccggaacgatgccgacag

SEQ ID NO: 74367 - DNA, 2032 bp, Heterodera glycines
  unsure (1)..(2032): unsure at all n locations
atgtataataaattaaggattttaagaccaattaattgctgctgtctgattgtgagaccgaaaaacccttgactttagactttttttttgtaaaatatgttcctcaaaaaatgaatgtttttttaagtttgtcaaaagccaaacaatcattagagggcttaaagaaatctcggtcttctaaactcgaaaacctggacaagaaaaactcgattcttttctcgctttggcactctcagagaaagactacattttaaagattatttttcctttaaattttagaattttgccaattgttgtttggcttacattggcaaaaatgcggacactttgctcaaatcggatgcttttttgcaaattgaccaaaaattgttgtgcgaaattttggagtgtgacgaattgcaaatccgtggagaaatttcaatttggaatgcggtaattttaacaattaaatttaaaaactgaaaattttattagtcatttaattatttccattaaatttttttaaaggcactccgttgggccgatgaaaaatgccgtgaaaatggcattgattgttcagcagagaatcgccgtcaaatgcttggcccggcactgttcaaaattcgctttccgcttttgtcaaatgaggaatttacgaagaaaattggtaaaaaaataagtcaaaatttcaaactcgttctctgatgagatgccgtagaatattcattgtttttgtggcgattttttaaaaaagttttttaaaatttatttttcaataagttgatacatatttacagttcccttcggtgttttgtcaaaagatgaagtgatcgccgtttaccagttcaaatcccttccaaattgtcatgggatttccgacggaattttcccaatgccattttcgactaatggacggatttccgatcgaaaaaagggcacacttttgctggacattgaaaaagtgtcagaatttgcacgagaggaggttgagagcagtcggtacagcgaaaaagtgtacataaatggattaccatggaaaatagtggcagaaataagtcagttgacggaaagcactgacaatattgagaaatgtttggacttttctctttggtgcgatgcttctgaagaaggtgtaaaattactaataattaatatatatattaacaacaattaattgttaattagtactaattaacagcaataattaataccccattaagattcgctttggcgctgctgcgttcgttcggcaacttttcgaattatatcgcaaaaaaatgggacggagaattcgattgggacacttagtaactttgtgttggacaacaaattttttaacgggaatcccgggcgggaacgggaaaaattttttttcgaaaaaatattgattttttttttataaaattttaatttacttattttttaagtaaaattttatattttaaacaattaaaaaaatttcttgctatgtaaagattaaacattgctttattaatgacgaaaaatttaaaacttgagtttttgaaattaatccggtaataatatttttgagggtaccggcaaaaactggtaatttttctgttctaaaatcctagaaaatttttttatatatgtacaataattttcattaaaattgtctattatttttaaaattccaaaatattcttagagaatttttctatgttttcaacttatttacaaaatctttttttggttaaaatctcttttttttgtgagcgccttttacaaaatcctttgtggtacagggagggggtccggcggtgccgataggcgccgccggggaaaattnttgaaatttttagtgaaatttgctaacaaattttgtccaaaaaatgaactataattggttaatttgttggcttatggctatttaaaaataaaaataaattaattttttagtgaaattgctaacaaattttgtccaaaaaatgaactataattggttaatttatggccttatggctatttaaaaattaaaaaatatattttttaaagttagacaaaatttcttattaattaaatttcaaataaa

SEQ ID NO: 74368 - DNA, 1698 bp, Heterodera glycines
atgaacgttatgaagactggagaagaacaagacatcaccaatttcaaacttgggaaaactcaaaaggtaggcggactgccacgcgtgacagtcattgcttgatggcgtcaacgcgtttggtgttcgttcggcgagtgttttcttgccccaaataagctttcaatgtttgttctaataatttttttggtattttacggttatctgtactcagggcattttttggttatacgagtcgtcgtcgtgtcattttttggttgtgcgggtcatcctcgtgacattgtgaagcgattttgtgtataaaatgtgaattttttgaaaaatggattttgactttttttcaaatccgggtttggggttcgaattgggtcaaaacagatgccagaatcggtttccccgaccttgaaaacccctaaaacaagtttatttcaaaaaaatgttttttttcaaaatctgaggacagataaccgtaaagaaccattttttataatttcctctttgattatttgcattttaagcattcgcggggcatcattttcaatccgttgaacccgaccatacgtattcacggcagccgttgtagttcggcatcaattcacccgccccctcaacaacaacattggtctcgaagtaacccatcttttctgtattttttacttgtaaacccccaaaaaacttaacaaattttataagtgtctgatcgcccgaccctttccgacttaatttttgaagtcagcagaaacatcgaccgacaagcggacgcagcgaattgagctcggaatttcgtgcactatgaaaattttgaagattcgatcatacaattctcttttttcgattcattcaatatttaaaaatatcattatttttcgtgaaaattgttatttatttatgcgattctggtaaagtattaatgaatttcgtattttgaagccttaggaatgtaattttaagactttttcgctaatttttatttggcgggatttcgactcattttggctttggcggaatttcgacgcggcgggattatgacgcggcgggatttcgacgcagcgggattttgacagcgcgcccaaataatatcaaaaatatctaagttgaatggttctaaaaaagttaaggtacatcaaagtttaatttaatccgcttaagatctgttgagtgcatgttcggaagtgagcgaggttggagtggtagcacaaaaagcacaccacaaaacaagttttgaacaaaaaacaacaaattctattacttgtcagagtttgtaattgtgttgtttctttagctttttattgtaaaaagagatagataacttttggaaagtcaaatgtagcatatcccattaaattcacaaaaaacttactcatattttctcgaatagtcttttgataaactgctcctaaaatgcgcagacaaacttcaaactttgcaggctcaatgcaaccgtttgaaggaagcgaatgaaactttgcaggaagcgaatgaaaaacagaaggaggaaattggcgaactgcagaaacagctcgacgccattttccaaacaatgcttagccgcgcagaggcggaacaacgaggaggggagaaggaggatccgcctgaataattgtccatgttcggatttgttggattgttctgtttgttggctttgttaattgttgtacggacgatatgttgttgtcattgtaatggattttgagaaataaa

SEQ ID NO: 74369 - DNA, 387 bp, Heterodera glycines
ccgaattcggtcacagttcgttggaagtactgtacaaatgtccgacgtgtggcaaagaaacgcacagaaattatgagtgcttcagtacgtcaaattttaccacaaatgcactcaattacaataattgttccgctttaagttgacgtctcttacaactggggccgacgacacggcgatacagaaatgtttcgctaccgtactttcgcgggcagtttgtggggacagtacacgaaaaatgtcacaaaaacgatactgcagaagcggatgaccatgaacaactttgagttggtggagcacaaatacgatgtgatgagcaatgtttggatgggcaattattacaagacaagcgatgaatggaccaacgatttgataaggcgtcttttatag

SEQ ID NO: 74370 - DNA, 2100 bp, Heterodera glycines
atgaacaatcgcacatttgttctgcctgatttatccatcaattatgaaaaaaaacgcattttatggcacattaacgagctgtatggctctgataatgtgccatatcatccaagggaaggggtgccaactccttgcccaattgtctatcggcatacggatgaaacgcagtcgacatccaaggccgctgagctaatggaagttgatgaacatgatgatataatgatcatcgaaccacagacacgtggacaggcagttgatgccattctcacccaagcccaagtggccggtgaaaaccaagctgacacgcttggtttggtgtcggagtcttgcatcccgcaagagccaattgcgcaggctgatgatgtaattttcatcagacctaagacgccaccaaggcgatcaatgcgcgttcaaaaaaggctttcagcttctgttagccgttcgccttcaccggcgccgaaacgccccccgccagcaaattcgctgggagtggcaacgccgatcacacggcgttgctctgcatttcacaaggggtggcaatgcgctgcagcagcagccaaacatttcccggaatattgtgactccgggaaactcggtgacaaaaaatgcgccgattgcggtgcacatctcttctcacatgaagacagtagcatttgctgccggaagggaagagttgtgctgccaatgcttaacccgcatcctgatgagctcaaacagctgattgtggggaataagcaatcccgtgaagggaaagaatttgtgcgacacatgtcgcgttataacaacctgttccaatttgcgagcgtttccgctggcaacaaaccaagccctgctggcggtccgatggccgttattcttaacggagaattccatcgccgcataagcagcatgcaggctggtacaactcagattcctggctttggccagttgtacattctggacccagtcgaggctatggaacagcgtcgaaacaaccccaggtttactggggagaaaatcacaaacgaagatgagtttgtgcagggtcaccagctaaatgagcagactcttgagatcttagaacaaatgatccaagtgcatcatcctgctgcgcaagcatataagcaggcgcgtgagcagctcactgagcttctccaacaacaaaatcaggaagagcttcgtttcttccgcatgactttgttggatagccgcagggctccagctggtcttaaagacccaaaattgcacccacaccaaataatcaccccttctacgggtgaagggatgttcgctattcatgcggaccccactggtgctcctccgcccaaaggaatttgggtagagaacaaacaagggcaattaaatgaaattgctcctttcagtccgtggactgatagtcttacgtatccattaatcaagccaatgggcgatgatggatacacaactggcattaaatatgctaagccaccatcgcgtaagcgaaaaggtgctcagaatgcatctggcctatttgactcggaagccgagtcagataatgagtcgtgcgagactcagtcaattgcatcatctgatgtggggtcagtcgcagattcagatgctgaatctgtagcatctgtttcatcgccgcaccggcggattgacaaatccaaacaatttatctccctgcgagattattgcaagtattatctcgcaataagggatgaaaatgtggagttgcaataccaccacattctttcatgtggtggaggacttggtcagcgctggatccttgaccaggctgcaaaaattgattggcaaatagcaacatttttgcgtagacctgacatggatctgcggatcagcactccaaaaaatctgctgcagtatttggtcaaccaatacaatgggcagcaagcacggcaaaaccccaatgcccaacagaaaactgttgatgacattggcagtgttgttcggctttccgaacacaacgtaaattctctccaatattggaagaaaatgtatgaagattgcaacaccgtttttgcacggtgccatgacgcgaagaaagcgcgtctcttcattactttcacgaacaacagggaatggcctgagttcaaagagaatttacacaaaaacgataaa

SEQ ID NO: 74371 - DNA, 871 bp, Heterodera glycines
atgggaggaggaaaaggaaaaaccgtaaaaaaggtttctgaaacggaacagcatgaaaaagaaaaagtgaaatgcgctgaggatgttatttcactcgattctggagaattttatgacgatcaggctattttgtatagcccaaaagcacaatttgatcgctttggattttgggactcatgtgtcaacacggaagcaaaaagagatttaaaagaattgaaagagaaggagaaaatcgtgaaaagtgaattggacaccccgtctatcgaaaagtggggaatccgagtccaaaagttgcgagagcatgagaagaagacgaaggaggcccgaagtactccaatgccttttaaaaattcgcgaaagggcactcatggatgaacttcacaggcccatcgacatcggccgcatggactatggtaccaggaccatcaacggccatggactttccgagaatcaccggcggatttcaacagaactaatttgattggatttaattacaatgctacattttaaccaaattaatcctttttattttaatcaaaatacccaaaaaaaaaatgtagcataattacattttgtatttcgaccggggacggtcttttagcgtgccgtggatgaatatgataataatatttaacacatttattcaattatctaccatattttgtaattcacatgtcacactttatatcttatgtcctaaacaattgtctctctcctagtgggcgggtctttgagcaccccctccacctttgattacgccccgggaattttacctggatcactctattcttcatcgggcctctccctcggcagtctctgctcccgagaccgaatcgggttgagtgcctaagaattgtatccttccccctga

SEQ ID NO: 74372 - DNA, 439 bp, Heterodera glycines
atgacattccagattaaaaatttaatatcaaatagaggtaatttgatataaacccaaccttatagtaacagtttgctgagatttatttaaggacaaagttgacgattgggattaaattttctgccgaactggatttacgggattaatcagcgaagaccccgcaaatctctcatttaaaattgcgagttcctcgcgggatcttgagtcaataaattcttttctagctttttaatttttatagccgaagctttgcgtataaaatcttttaacaaatattttgaaacaatttggcgttttttaaagaatttatcataatttgtactcgaattttcaaaattttccacggcggttctaccggcaccgccagatccctctattattcaaattttcagcatcggataagcaagaatttgtagccttttatcgccaaaaggactga

SEQ ID NO: 74373 - DNA, 871 bp, Heterodera glycines
atggacaacagtagacaaaactcgctcaaccacatgtatccaaatctgtttgggagtggggggaattcgtcatcaggaaatttgggacagggacagaatttgtacagcactcaatcatcatcagttggtcaatacggaacggcaccattgcaacaatatcaacctatgccatcatcacttggtcaaggagcagccacaagtggagatatgctgcataatgtacaaatgatggcaacaaataatcagcaaattggtaccagcggaagtggcagctacaactattttaaagatcaaaaagatttgtttgacgaggtcaacccttttgcctcgccaaatgcatcatttgcacatacgcatcaggaagttgttcagcaacaacaacagccgcaaacgcaaacgccctcattgaatgcaatggttcaacaacaatcacaacagaaacaaaagctcaaaaagaagacgacaataaagcaacaaagcacccttgccactgggcagatgggtaatttgtcaattaacgagtcaaatacagcctcttcacatacggctgtgccagtgccattatcatcacaagcaaatcaaccgagcattcaaacctcgccattacaacacactggaggccgtacaagcttccaaaatttaccaccaggaggaaatcaacagtcgcatccacaaatgttggcgcactctccgctaggcaatatggctggaagcactagcatgggccacgcatcggcgggacctattcagggtgggcaacatccgctaggcaatatggctggcaaagccagcattggtcaggcttcggcactgccggcacaaactggacacatagggctatcaccgcttggtcaagcggctggcaacaaca

SEQ ID NO: 74374 - DNA, 650 bp, Heterodera glycines
atgacaggcagtggaccaatacaattcggactgcattcgccacaaccttcaactccaaccattccattgtcagaagaaagcagcttgcagcttattccacgctgggaacaagacatcgtctgtcctccacgtttcccgatctcgttttggaatgtatacaccagggctcaaatggcaattgagcgaacgaacaacggcatggaagccgcgcatggacaatttgcagtaaaaaatttcatcggaaaacattattttttggtattttcagcgtgagctcaaccatcatccatcattgagtgacttcattgctgcattcacgaaggacatcaacaaacagttggacatcggacgcgcagaacagctccagaaaagcactaaacgacgacaacggtacgtcatcaaagaacaaaatgtggtgcggatccttgacgaggccgactttgaatcggaagaaggattgacaaacgcctcgcatctgatcgggctcgtgatgcaagtctttgcggagggacttcacgtccgtggaaattcagagagtggtgaagaaactgaggccgatgaaaattgatttaaacattttcatattattgttttttttattgatattttatatatgttatgaagatttctttgcttgaagcacttttata

SEQ ID NO: 74375 - DNA, 81 bp, Heterodera glycines
atggccgcacaaaacaaaggcaatatggccgagattggcatcagattcggcttattgatgaaccttttgttggacaccttg

SEQ ID NO: 74376 - DNA, 106 bp, Heterodera glycines
ttggcgaatcatggaagttttgcactatttcacttcacgcggatgggttttcgagtagcgaaatgcgctcaaaatgtgggaacggttaagcgaagaggacaaaaag

SEQ ID NO: 74377 - DNA, 225 bp, Heterodera glycines
ccctaccgccaattccctaccgccaattccctaccgccaattccctactaaggcatttgggccatttccataccaaaagtgttgaatattgataaacattgagagtaaaacacacaagaaaatttattcactgctttttagatagctcgtcaagagctttcggatgataccaaatttatcaagattcgatcgttttaaaaaagttagaagtgtcaaatctctcaa

SEQ ID NO: 74378 - DNA, 599 bp, Heterodera glycines
atggaaagaatagaaaattggcaccaaattttggaaggaaagatgaaagaggaaagggatgatgacgaagaagaaagaattgactggaagaaaaaaggaacaaacaaaaggaggtggaaaaaaaggagaaggatgatcaacgaggaagaggatgaaagggaattggaagaaagaatggaagagaaaagaaaatcttccaccgccgatcggtgcatcaaataataatgggaagaatggggagggggaagagattagacagactttggggcgccgggggcggcggatgatcgccctttgggaatgatgaatgaatgaatagactgatgtgctgctattgatgtgtgaagtgaagaataactagcaaaaagtaacaccacatcacccactttataagtgttttctgctgctgatgggttggggacacaattggcaatttgtgagactaatgactaatgatgatttagagagagagacccccgcttggggcgggaactgttttttgatggtgcggtgaatgtatggagaaaaatgggagagaggaaatgaaaattgaaatttgtaaagaaaatgatttgtatggttgcggtaaattcaaacta

SEQ ID NO: 74379 - DNA, 264 bp, Heterodera glycines
atgttgagcatggaaatggtcgcgacagaggaagacggagaaggacaacaactacagcagatggaggaggaggacaacgacaatgccgacattctgacccactacatcaagccggagcgcaatttgtggttgttgaagcgtcgtccaaccgttgggggaggaaaatggcaaaaacagtgggcccaatgggaggcggaggcaatcggatggaattggaccaatgcatggaatgtgatcgaagttgccaatgaagaggacgtggac

SEQ ID NO: 74380 - DNA, 1321 bp, Heterodera glycines; identical to SEQ ID NO: 11048
  unsure (1)..(1321): unsure at all n locations

SEQ ID NO: 74381 - DNA, 1511 bp, Heterodera glycines
  unsure (1)..(1511): unsure at all n locations
gcacggattatgtgatgtatgtgctaattgttgcggaaaagccaactattgcagaggagattgcaaaaattttatcgaatggcaactacaaaaagctgagaggtgactaaattaattaaaaaataaaaacgagttgaaaaacattttatttttttgcaggatggaacagccatacttttgtttttgaatgccttggcaaattttatcaacaaattgtcactttccgaattacgtcgacttttgggcacattatgagtaagtcaaatggattttaacaaaccaatttaatatttattaatattaaatcgtaatttaaaattcgattacaatttcaaatttcagtaaaataactaatgaaaattcaaatttaattcaattttttgtcagtcgtccacttaattggtgctttaattcctgctttttagacacctcttttccccagaagttcacttcatggcaccgcgaagagccaaaggcgctgttcaagtgccccattgagccgagagtggccaacccaatgcacaatttgaatgaagtaagtgggtttttgcgccctaataacattttagaaattttgaaatataataaagtaagtcatggctcctaacaataagttacagaaattgttgtcggataaaaaattggtttgatgtatcacttattaggccacttttcgtcgaggtgcataaattcatttattttttttcaatctaacccaaaaattgaagacaatttgtcattttttggccaaaatctgttaataaatcagttttagacagctttatctcccccattttgttcagttcctcgctgccgaggcggccaattgcgagtttattttgttgtggttagattgtgacagagaaggggagaacatttgcttcgaagtgatcgacgccgtgcgcaaggaaatgtgcagggcgaagggactgacggaggaggaatttatggacagagtgttcaggtggacaaatggacgcattggggcaatgggtttctatgtatttaaatttctgttttttttttcattttaattttctttccccatttttaaaagctaaagacacaaataatttctgatagcgaaattccggcggtgaaattttggggtgcaccccttaaaaatgttagaccaaacgcaaaaacaaaatgccgccatttgcgtttcagggctcgtttttcatcgatcaccgccaaagagatcaaacgggcaatggctgatctgggcaagccgaacttcagcgtttcacagtccgtgcttgttcgacaggaactcgacttgaggatcggatgcgcattcacccgctttctgacgacgcattttcgggttttcaatttttgctatttttcaacaaaatttcattttttaatgcagcgtggttattgcgactttgacgacaattacgtttcgcttgggccatgccaaactccgactttggcattttgtgtgagacggcatgacgcaattggacagttcaagccccangccgtactgggtggtgcaagccgag

SEQ ID NO: 74382 - DNA, 243 bp, Heterodera glycines
atgtgctgcatattacttaatattcatcatgatggggattcggatgataatcagcttgatgagctttatgcagatcaccaactcgttcaaatacatgcaaatgggaacaatgatcaccccgaaaatgacaatctttatgataacaataacacggataagtcaaaaataattgaccatgacaaggaattgcgggatcagtcccctgagctcaccaaagtgccagaattaaatggaggagagttg

SEQ ID NO: 74383 - DNA, 473 bp, Heterodera glycines
atccggaattgggtgcttatggacgagtggacgcatggattcgaaatcgaattcaaaacaatggattacaggggaggtctgcaagtttcccacaggaaatgtggaatatgagtgaaaggtgaaagtggaaatagaattttaagaaacaaaaatttagagttgagcaaaatttaatgaggacaaataacagcatcgaggggtggcatcgctctttcaatagccaattccgcttccttcatccgccattaagttattttgtcaaaaaaatgaaagaagaagacagacactggaatttgattaagcaagattacaacaataacccacaaaatggaatgcgtggcaggggaatggcaaggaaaaacatttacgtacagcaggaccaagcaattcgcgccattttcttggatcgtcataacagaccttttttggcctatctacgtgcaatcgcttatcgaatgccggaaccaaattga

SEQ ID NO: 74384 - DNA, 360 bp, Heterodera glycines
atggggggaaaagagagaaaaagggaggagaaaaaggagcagaaactgaagaggaaaaagaaaattgcagctgaacaccatcagaaacggctcccggacaatccgacagtggacaattcgacagtggacaatccgacagtggacaatccgacagtggacaattcgacagtggacaatccgacagttggacaatccgacagtgaggacaatccgacagaagtggacaatccgacagttggacaatccgacagtgaggacaatccgacagaagtggacaatccgacagttggacaatccgacagtgaggacaatccgacagaagtggacaatccgacagtggacaatccaatcctacagtaa

SEQ ID NO: 74385 - DNA, 647 bp, Heterodera glycines
atgaatggatctgatttatgcttttctgaggccgaaagtgatcatttaaaagtgaatttttgtaaaaattaagcatatgtctaaataaaaaaaccggagaaactaattagcaactccttaaaataagaatcaactaaagcttataaaatcttttgagaaattatttttccatattataaaattggtaattttacatacaataaagaaggttgacgcaaattccgagtgaaaaatgcaaaaaaaaaatttgttcgaattcgggtccgggtttcgaaataggtcgaaatggatgtcatattcgtgttcatcgcccccgaaaacccccaagagcacctgaaaatcgctcaaaatctcttttttacctcttttttatgggaccagtgaaaccgatgattacccaacaacagcagcaaaaccaagaagttcaagcagtacaacaacaacagcaaattttgatgggaaacgagatgaagatggacaacagcaaaaatggagaaacaagggaagaggagggaaatagcattggggaaggaggagagacggaagagaaagagaggaaaaggaaaaattcggcggaaggaagaggagaaagaggaaagaatgaagcagaaaagagaaaggaacagcagcaaattgacactttttaa

SEQ ID NO: 74386 - DNA, 885 bp, Heterodera glycines
atgtcatttttgaccaattcaataaattatggagatgctttcacacaagcagcagcaaatggaggtaaaaaaagatgagaaaatggaggaaaataagaaaaatataaaacccaaatttttagaagtgaatggcgatgcaattaatttggacaatgatggacaattatttgatggaaaaaacagtgaatcgatcactgatcagcaacagcttaaggtgggcgaaagaaaaacaaacaaaaaaacagacagaaacaattgggaaaaatatttttagtattatgtgcaacccaaaagagattttgctaatttaaattcaggaatttcgtgaaaagtttgccagaatggaaatggaattggaaatggccaaattggaactcgaaactgtgagttttgctataaaaatattttattttctgttttccctatttgtcttaagaagacacttgaacaaaagttaaagcagcagcaggaactgattggagaacagaaggcattgaaggaaaaattggccaaaattgaacaggaaaaggagaaaaatggtaaaaataataaataaaggaattaataaaattattttatggaaatatttatttaaatattcgataaaattaatgaatttaaatttacagatgccaaatatttgactgttcaccatagggaaaaggaaaagggtaaaaagttacaaattaattttcttattttattaattcacatttttttcaaaaaattggtgtaaaattattttatttccagcaattattccaaatctgagcacatcggaggaaatgagtgttctgattgccagaattgctgagctgaatcgagctaacacagcggaaccatcaatcgcaagttctgctgatttgtttgggcaagacggaaacg

SEQ ID NO: 74387 - DNA, 432 bp, Heterodera glycines
atgaactacacgggtcgtcttaagcatgatggaagcagaacacgcccgcgatttgacccaaacatttggagtgtttacactcgaacactgcaaggcgatgaccgaacgaataaccattcagaagccgcaaacagacgcctgcaatgcgcatttgcctgttcacatccatcgatttggcatttcattgaccttctgcgaatggatcaaaagttatcggatgatgacttcgcgaagtgttcaactggacaagacccaccgcaaaaggcaaagaaatatcgcgaagcagaccgccgaattctcacgatggttcaaaattatttaccactcaacaatggagaccccaatgtttttccacttgagcagcgctttaatcatctatttatcattacctttttgatcggaatttctcgaaattatgaaatgagaccgtga

SEQ ID NO: 74388 - DNA, 2158 bp, Heterodera glycines
atggcgagcaaacaacctgaattcgcgacggtcgtgccgccgattgccgagagcggattctcgaacatccattggctccttttggaatggaccgccgatatggttatgaagtgagttagttggaaaagggtcaaaaatggaattttttaattttaatttatttcaaattttacagcagaattgttgggctcgttgtgcttgccggcccattcaccacccaaagcgacatcaacggcttcgacgttcggctgatttttgaccagcagaacatggaccacgaattggcaatgcatggatggcaagaatgcgtggcgcggatgaacaacatttcgccgggacaaatcgtcgaattcacgcggctgaaagttcgtgaacaagggagaaatggaaatgtgaaggggagtttccccttcacgttgctgtacaacggcgagtcgcgccaccgtgtgctcggacaggcgcctacggcggtgacaaatgcgggtgagcaaaagggttgcgattttttttggggattcttatgactcaaaaatccaattttctgtcccttttccagtgtgttctccgaatttcaacacgcccatcattgttgaagcaaatgatcaacaccaacacagcagcagcaacggcacaatcattggcggcggcgaccgggacggaaacgatttgaacaaccccagcaacaatgacagcgccgacaatgacgcactgccggcacaactgaccaatcgcccggaccaagtgaacattagcgacattggtaagttgagcggaagcccgatcacagtaaaatgattgatcaaccgcccccccctcccatttcacaggcgatgagcagcgcctgcgcatccaaagcaacaatgaggacgccgaggacgacgattttgaccgcgcagggcacagcggcggcggcagcagcacgatgtcaaacggtgcgcttttttcggccatggcagcgccgggcactgttgttgtgcgcaatgaggacagcggctcgtcatcggtgagcggccaatgaagaaaagaaaggaaaaagtgacgaaagacaagaaagaaaagcaaagacaagaaaaacaaaaaacacataaaaatcaacatacagacagacacacacacattttcatacactcgcatacgcacatgttgttttttaaattttaaatacaactcagtcaaatttttgtgctttctgttgttttttgtccttttcattattctagtgggcagggtcagaggggtgattgattgttttttgtggggttttttgcggaaagccatgcgctttttttggatttaaattttgttttgttcgaaatcatccaaactggacccgttcaggcgtggctttccgcagcacgcccaccgccacgtagtcggcccgttgcctctacgtctccgtcgccctcgccacggccaaattcgccatcgctgccgggtcgctcctcgcctccaccggttcgcgcatgctctttgactgcacagcgcactatgaccgccattgtgcagcgcatgaatgtaattgaggcggaagtggcgcgcgacgagcgcctttctcgcgagcgtgatcgccgccgccgccgccgccgtcaacttctgcaagattgcccgcgctccacaccccgctcgtcgcgcggacaacacagcggacagcagcagcaccagcagcaacggcacgaaaatgtcatcaccattgagtccgatggcgaagaagcagcactgctcggtgttcaacagcagcagccgcttgcgtccgacgacgaagtgtactacaacgacgaactcctcacgattgaggaccaagtggcgcaggggctcgtggagggggcggccaacgaggtggtgatgatgggcaaccacccgttggcagccgccgaccgcgcctggctcatctcgacggcgttcaacctgcgcgcccttccctcgtcagtgaagggcgttgtcgagctcgacgaggaggggcgccgcaacctcgcctgttgcatttgtagggaatggttggttggcggcagccaacgggtggtgcgcccatcgtgcgaccatttcctccatgtcggctgcttcgaggctgaagcgaagcttcgccgtgtgtgcccgctttgtgccggccacttcatcagcggcaagcggatgagcccttagcggctaccgatgaaaaaaa

SEQ ID NO: 74389 - DNA, 1822 bp, Heterodera glycines
  unsure (1)..(1822): unsure at all n locations
acctgcgcaaaaacggcaacttacggatcaatcgccagcaaccgatttcaattcgaagagttcagcaactgccgcgcgcccaacttcttccaagccgtaatcttcaattggctcatccggaacatgaacctcaacatttgatgtacaccccccccccccccnnccctccccgtcctatcccaatccatcataccatctaacaatgcttttacttgtaaaatgaaaaaactcccgcttttttcttttcaccgctgtttccttcaatttaaactcggcttcccatccgttttttgccttcgttgcattgtcctctttttacttgccattttcactatttggtacctgcaacttgctttttttcaaaagccaagtgacaaaagcatttcaaaagttagcaaatggagagtaatccaaaaaaatggcaaaagcacttggacaaagccgaggatgaaatgcgaaagagtgttcagtggggacaaagcactggtgcgacgaatggtgcgacgcagacggaaaatgagtgacccggctgagttggagatgaattgtgaggcgattaaagcgagacacggaggagatccagaacaagatgatcaaatgatcacaaaaatcacggagttggaacgacaaatgccaatggcattcgcccgagtgatttatacggtgagtgaccaatcgaccggcccattaagtcaaccgctcacatttcccaaggattacctcttcctggaggcggaattgctcgtcaattacgcgtccaataattggtactgttacgtgttggactcgaagtcctccactgtcttccaacttcggatgcggcaacttgcctcatgtttcgacaatgtgatcgtcgtggaccaaatgtttgacattgaaggtctcggggccaacatgaacaaggcggtgatggaatgtgtgcgtacgttgagcgacgagcgaaaacattggaaatatttggtgacgctgcaggtgaaatgagaagctgaaggaagagagacgaacgaacggctgactgtgttcagaaccacgatgtgcaggcgaagaccaacgcggaaatggcacagattttcacttggttgggcggggccaacgacgtcgaagtcgaattgcaattaccactgacgaagaagcgtttggaacactaccgaaaaaagttcaattggacttttgacgaactaatgctgtttaaggatggtgttgaccagaaacgagatggactaaatatcggaaatgcatctttcagaagcgatgaatcaccggactgacaaagaggggaaaccgttggcattggcactttccaaggggtacatggccgtgtcgttgagtcggcaatttgtggacttcgtggtcaacaagttgaacgttacgccattgttggagcaactgaacaaaggcttatttggagtggacgaacatttctggcagtctttgagctcaagcgaatcattggacgcccccgggggtttcccacacgaatgttttgtgaagggaattgatgagaaggacacgtcattcaggaagtacaagtacatcaccaggtgagcgacagggagagcgagggagaaggagttcacttataaaagtcacaatcctccactttagttcgcaattctcatcattattctgaaatttcatttaattgctgactttggacagatttgcgttgtgggccgacccgtccagcaaatgtcggagcggcaattggcgccacgccgtctgtgtgtttggcttggaagatttgatgggacccgacaacgaaatccgccgacttccccacctttttgtgaacaagctgatgcaagaattcgatttcgatgct

SEQ ID NO: 74390 - DNA, 108 bp, Heterodera glycines
atggcctttgatcaaatggactgcgacgatgaaaaacttttggacttcgaggaggagacgccggtgaacgaaagtgtgaaatcgttaacaaaagaggaggaggagaaa

SEQ ID NO: 74391 - DNA, 2300 bp, Heterodera glycines
atggagtcaaccggttttcagcaaagatataatttccgagtgcgccggccgataaattatatggaacaagaggaatcgtcgcattctcgccacagtcgacgaaatggcactgaacaaaacaatggtttgaatttggcccctcaaaacattttggacaatgtgcaaaacccaaatccatttccgcgaaatttcgaaaacagtatccctcagcaagtgggaatgcaacaaaatgtcgaagaacaaatgcagcttgcaatgttccgacctcccaaccaaaatgctgtccaaagtttcggaaatccccgggctcattcaacccctcaaaatggttcaccacacatttcatacaatgggggacaacaaaatttcgagcaaaaccaaaatcggaatcctgatgcgaaccgatttggtaatgagattcatggacaaaatatgcaatttcatcgccgccaaaaccctcgaattttcgtcaactcacaaatgacgaacaaccatcagttttccgcaataaattttgaacaaaatcgggaattaagagcacaaccggttcggcatgctcataatttcggatatgaagaaatgtttggtgagcaaaaccaaaactttccaaatccaaattatggtcgagaaattggggtgaatcacccaattcagaatacaagagattttggaaatggacccaattttcaaaattttcatccggttcggaatatcaatcaaccaaattatcaacagcgaccgaatccaaattttgaaaatttggcaccacaacccaatcactttccgaacgttcaaaatttcgagtttgtccctcagcaaaatttccaacaaaatcaaattcctgatattgtaatggaattacataaagttactctgtcaaaccaatacgcaaatacgctccgagaaattccgaacctatacggaacggaaggtcgggacaaaattaaggatttcttcctaaatgttcaaatgtgtgccggagagtggagaccagaaaagcaaaaagagttgctgcagacaaagttgaaaggaaaagctttgaaagcgtatcatattgcgctgaacaaatttggaaatgaggcgacatttggcattctaaaaaccgaaataatgtccattttgagagagacagactacaaagaggcaaacgcattttccgaattgacgcagaatggtaaaagaaaaccaaatgaagacattataaagtttggtgagcgaattcaacgtttggttaattgctcatacattggtctggacgaaaaccagttggatgaggtgtcaaaaaagcacttcatttcaaacataaacgatgtgaatttagccagatttttggaatgccagaccaaagcaaaccaaacttttgatgagcttttgatgatggccaaccgtttgagtcttattgaggatgaaaaaaccgggaaagaaacgaatcagtgggaattcctgttcaatttcaacaacccggcccacaacaaaaccgtactgtccaatttcaaaacccaaattacggacaacgttttgcaaggaattttccaaactttgggatgagagcgcaaaataatttcaggccaaaccgacagagtggtttcagaaacgaagcattccgacaggaaaaccaaaactttccttccaatcgaaattttgattttcaaaacagaaattatattcccacaagtcaaaacactcaaaatttcgaagccacgggtgcaaacagaacccctctgtttcagtcaaacaaaagagctcaaaacaaggaatcgaatatgatcatggtgaaagaagtaatacctgaaaattcggattcgaaaaccgtttcccttaatcacgtgggacacggagaaattccaacttatgaaaaattttttaattctttgattttacattcaaacgaatttccatctcaaaatcccgccaacgctgaatgttctgaaagtccaacgacggaagtgaatattgtcggaatgaaggcgatcggtctaatcgattcggcagcagaaataaatgcagcaaaccccaaatttttacacaaaatcgccaacgaaaaaggcgtggatttgctaaaatggggtttttgcccaaacaaaggaaattcaaaattgtcttttgaagttgcttcttttactggtggaaaaatcccaataattggagtgcttaatgttccaatgagaaggggaaatttcgaatgtgaaataaattgtgttgtaacgaataattcctttccttacgatttcgtttttggcccgaaagcattaaactcactaggctattacatcggaaacacactacacacttacaaatga

SEQ ID NO: 74392 - DNA, 2026 bp, Heterodera glycines
atgtacgatgaagttgaaaaatattatcgtcgagcgctggaaatttacgagtcgaaattgggaccggacgattcgaatgtggcgaagacaaagaacaatctttcgtcggcatttctgaagcaaggcaaatacaaggtaaacagtcaaaagtgggaaaagggcgagcagtctcttaattttgcaaattttggtgatttgttaaattaaggaggcggaaatgttgtacaaacaaattctgacacgggcgcacgaacgacagtacggccgagtgaccgatgagaacaaaccgatttggatgatagcggaagaccgggaggacagtaaacaagcggacagcggaatttaccacgagaatttgcaagtgtcgatgaaagttgacaagtgagtgatgcaataagacacgtgaatgttttgacgcttccctcagaattcggtcccaaaattagatcctaaaatatgttctttattgcaaaactcctttttaagtccaactgtgacgacaactttgaagaacctcggcgctctttatcggcgccaggggaaatatcaggcggcagatacgctggacgatgctgcacttcgtgcgaagaaacaggtaacgataaataattaactctgtgggtggaacagtcgtaaaaaacaaatatgattgttgtcgtcaggggctttaataatgttgttgttgcacacagcaaagacaacaacccaaagcaacacagccctatcccgaagacaatttttatttcaaattaataaggcgaagacaaaatcaatagggaaaactgccgattgcataaaactaacaactaactaacacaaaatcacaaccaaaaatgacacaaaatcaaataacaaaacgtcaaaatctattttaaatctaaatattatcacagaacaatatcctaaatagtgccgatgactcttctcaccaaaaaaaagtataattggaaaacgtttttctattcagaatgaattatcataaaatgaaaatgcaattgttgaatcctatgcataagcctgatcggtctttttgctcgattaagagttgggtacatgccttaattcttaattagcatctttttactattaaaagtcgataaaaatgctttagtcggtgggtgaaatccgacaggaagaccgattcagtaaattgttggctctgaaggagttttccgattcgtgaggtgaggacggaatgaatggattgaataatgcgctgttgtgttttgtgttgctgctttgtttttgcttttgtcggtcccttgttggtccgtgtttttctccttttttgagggtttctccgaaaggccatcggtccttccataaagcgaatgtcattaatttgccatttgtgtttgtctgtcgcttttagcctgggcctcacccgtcagtccagcaaagtggcgccgccggcgatgacgatgcccaactgctggccgggggcgatcaaatgagccagtcgctaattacttctgtgtctatgaccccgtcccaatcgtcgaacaaattgaagaatcgtctgctgaatgtgctcggtttctccggagaaggcgctggtggggcaccacaacagtgactgacgacgacggattgataaggaactgatggacggacggacggagggcgagtggagggacggagtgactgacatttgtgtaacgatggactgaggcactcttattgagcttcgattctttattttctttacatattatcgttttctttgttttacttccattttcttcccttttttgccttccaatctctcgacggggtctctctttctctctcttcatcattctctccctaccagaatttaatcaaactttctttttgatggatattgtttttcttttatgtatgactgtaaatctatttttctttttctttgtgttgtgctgttttcgttattagactttttcaaaatgactttggcattttcagttctcttctgtcttccctttcgatcgtcaacttttaaatgaagcattctgtggttatggctaagaccgcccaaattgctcga

SEQ ID NO: 74393 - DNA, 561 bp, Heterodera glycines
  unsure (1)..(561): unsure at all n locations
tctcgcgcgcnttgtcgatggaatgcgtcgtttgcttggaggcgatgtgagtgcgtgtccggcgcaagacaagtgcacaaattgtgtcccgcacgaggacagcttcgtgtcgcggtcggtcggccttctcccccggcacaaaccaatgctctttctctccaaattcacagattaaaccncacttcnggcattctcgcttgtacagtgacgtgctgttaacaggcgtggacttcaaggtgtacaagggcggtatggacggcattatggcgggtgccattcgaaaaatggtctcttttctcatcccacgcgctatttggcccaaaatccagcaaaggcttcgtttggtcgtcaattacaaaggcatgccgacaattccttttgcccaatctttgctgttctgaatgctctccgcaggtgtccaaatcccgcgtctctgctccgtcgagttcaatcacctccacttggattatattgcccacgcggcaattatcagcggggattttgacgtcgatttgcccctttttatccgttccttcaaggaatttatggacgagaagcaaa

SEQ ID NO: 74394 - DNA, 487 bp, Heterodera glycines
atgctggacgaccaggcccatctgatgcaagtgttgtggcgagagaaggagcagctgaagaaggaggtggcactgatggacgagtatttgtacatggacccggagcgggacgaacgcaacgatatgatgtgagaaggtcggggggggggcggcacaaaagccaattccaatttgctctctctgttgttcatccttttcttgttagctgatcactgatcacccatttgggtgttattttttctgatcacttctcccaattcatccgcacagtttgacacgtccaaagcgtcgctactacgaccgggtggaggacttgccgcagaatgttgttgcccggtggcgcaaggagcgcgaacagttccaaccaccgaccgacccatatgctggaaaagaggacgaagaatgagcacggagcggataggatgatgattaatgatcatgaagatggtgttgaacaacatataattaatgaatgcaaatgataaaa

SEQ ID NO: 74395 - DNA, 249 bp, Heterodera glycines
atgtcctccacaattgctcccgtttcttccgccgatggcaccgctgggagtgccgccgccgtcgccagcgctgggccctcctccgtcgagccgatgccgccggtggagcagctgatggagggcattgaggagaagtgcccgccctcgttggaccagcgactgaacgccatggacgaggtggacatgcgcatcgacgacctgctcaccgtggtggccgaagtgatggccggtctggacaaggacaagccg

SEQ ID NO: 74396 - DNA, 721 bp, Heterodera glycines
atgaccgtaataattattaaattgataaatctaattttgatttcaccgtttgtgttggcgatctgttgtcgtgccactgttccgcctgtttttgcaagcatttgtgatgatgagcagtacccgcaggtcaacggacattgcgcagccatcaaactgacccattttgggtcagtacagcgatgggcatttgtaggacagtccgatggacggcccggcacattcaaatcacggcatccggaatttactttaggtagatcaagagtaaaatcttaagcagtactggaacggactccggcgtgtttttatggatccatgatcagggctgcacgcaattgcggattgcggattgcggattacggaaattgcggggtttttggacccccgtaattgcggattgcgggttgcggatttttgggatttatccgcaattttgatccgtaatttgactattggattatttttcgagacgatttcttgtaagattattttttataaaatgaatttttttctatttttatttaaagaaaatatgtacatttgtttaaattcttatttctttagcaatttaaaaatgtcaaacttaaagaaaatcttgcaaaacttttgtttcttcatcacaatttgcttttaaccggtttctcaattgaatgattttgcttttataaatttgctttttaatatgcttttaaattgctttaaaagatttataggattttttaaa

SEQ ID NO: 74397 - DNA, 1569 bp, Heterodera glycines
atgcttcctcctaagggacttctttcaatcttgggccatgtgtgcaaacctttcaatcaccgagagtttgaattttattctcgaatggatgcgaagttggcaccattcactgcaaaactgtgcagtaagtatttaacactttaacacctaatttcttaatatgttttaaggtaaaatcaaagtgcagtgtttgaatcaaaatgttgaagatgggactttaatgatgagcacagagcaaattgtcaattgccaccgacacccaccggaaaatgtcgctgatttgcccacctcaattggctgttcatttcaaaaaagtattgctacagcctctataaatgcgaatggcaaaaggaagcattcaatgacatttcgtgtaaaaagcggtcgagtggaagcggagaaatcggtgaccgcaaataattgggcgtggcaatgtcaaagcaaagtttgtgggattttgggattagaaaaaacaatgcaacggaaaatgctttcagattgtacagaaattgctgaaaggacacgacagaagcttcatactcctcgaggatttggtcagcagatacaaccggccctgtgtgatcgacctgaaaatgggttcgccattttgccattttctgtcattttatttctgcttcaggcactcgtcagcacggcgacgacgcaagcgcacaaaaacgactaacgcaaacgcaaaaatgccgacagtcgacaagttcagaaattggcgtccgattggtcggatgcaattgtttgatcgagaagtgggagaatatatgtgagtaatgcgtggcgggggaattttaaatctttttttcgacggatgttgccttatttctaattattctaattacttatttatatcaatcattgtaactatttaagttttatgaataaatacgaagggcgacgcatggacagaatgcagttcataatgcgctctttcactttttcaaagttgctgcaagagcaaggacaatgcgtattattgaggcaagtgcataaacacacaatcgtcttttattttcgtcatttaattttaaaggaattgttgaaattgcgtaaaacactgctcaacgcggaagggtttcgcttcttctccagctcattgctaattgcctttgacggcagcgggcacaaaagcaaagccaacgaaggggttactgtcaaaatgatcgactttgctcattcgacttttaacggttttttggacgaccaaccttactcgagcactgacgatggatatttgctgggcatggacagcctgttgagaatactgaatgttttccagcagaatcgactgattgtgccaattggaggcatcaaacaaagcattgaattgttagcaattggagagaagaagaagagcggcacgaagcggaagtacagcgaggaggacgaagagtcgcggtcgagcatcacgtccagcatgtacacgtccgactcgtgcaccggcgaagaggaaacggaggactgtggcggaggatgttcaacgccagaagctccgaaaacgactgaaaacgctttgaactgtggcatcaacgacattccattggtgaagttgaaccg

SEQ ID NO: 74398 - DNA, 2022 bp, Heterodera glycines
atggacatttgcgccgctcagcaaaaatggacatttgcgccgctcagcaaagtcgacacttgcgtcgctccatttgcgccgcgacatttgctccgcctagtaaaaatggacatttgcgccgctcagcaaaaatggacatttgctccgcctagcaaaaatggacatttgctccgcctagcaaaaatggacatttgcgccgctcagcaaaaataatatttttcatttcaatttcactaatatcaataagattactaaaaacccaacgacgaaaataacgaagtgaaaaatttcaaaaaatcactacttaaagataaacattgattttttttatttataatcattaaaaatcttaacattgattaggttcatcaaagatatgaaaaatgaagaagaataacaactaaacagactgacactgtttgaattagtcctactcatggatttttgaccgcccacggctcaaaaaataattgaaattgatgagtagggtggggatttttaagtttttagttattttttctgcggcttttaattcaatgagaaaagagaaacacatttttaacacgaaaatacttcatttaatgcccccccccccctatgttttctgtatgaaaaacagactattttttgctttttattcaaaaaaagatgaaatttatgtatgctggggggacggaggacgagggaatggccaatgcttcgtcgcagccgttttcgtcgtcgatcggtaaacgccgatgaatcccccgcccccggggcccatccatcccccctgataacagcagaacagaaaatggaaagggcggaaagtaaattttaaatttaattttaaaaaattcaataattttagatctaattacttaaatactaaataaatattttacattacaaaggttctttaaaattaattggaaatattgcaaaaaccatttgtttttaaattattttttgataaaaaaaattaaaaaaacaattcaattatatttaaggtatttgttagcatatggaacggtcaaaaatgtggatcaagtgttgaataaggatcaggcaatttgaaaaattaaaatttataatataaattatttttaatttattttagtccgaagcaacaaattaccaacaggaccaatcttcatcaaattcaaatggagggtaattaatttttaagtgtcattgtgttttttaagtttattcggcgctctttggaaagtgggtattttgaattttattccttttgatttaccaaattatttttttatataaaaattcgtgaaaacctgttctagagggtttttagggtgcctgatcaggaatcttacaccaaatttgatcaattttctgatcccgaacccgaactcgaacaataaccgaaaactcaaatttttcgtttaaattttttgttaaatctaggtcaggaagtcgaaattggttaaaatagatgtcagatttataaacctcagaaacaagttttcattgctagcgtcatttatccttattttttatccgttaaataaatttaaaaaaaagtattaaaatttatatttaaaaattaattactttttaatgactcaacaaatttttatttttttttaagcggaggaactcccaataatgtggtcgcattgccccgcactggtggctcatatccggccactgcggtaatgtgcatcaattaaacccaattagtgtggctaatttcaattaacacgcaatttttgcagatccgtcaaaaacgtgagcacacgcctatggcgtcggcaccatttgttgggccacttttgccaaacgttgctgctgctgcggatgaattgtcacgtcattactcaatgtggatttgacggaaaacacaatgaaaaaatgccgaaatacaccgttgtaatattcactttttgcgtgctttttttgcaataccaaatttcacacgttttttgtagctttgtattttttgtctgtgttttttaactcaattttacaaaccacttaaagtgtgctgcttttgtttggtgtttgaacaataataaa

SEQ ID NO: 74399 - DNA, 155 bp, Heterodera glycines
tgattgcacagaattgccgaaaaaattcgagaccaatttccgaatgttgaccgactaattgccaaaacgaaagccgtctttgtcaaagcgccttaccgagtcaaaaaatttggaaatgtatctcatatgcaatttcaaccaataaatttgaagaa

SEQ ID NO: 74400 - DNA, 636 bp, Heterodera glycines
atggaattgccctccggcggacaccgtcgtactttcgggcactgctacagtttcctcctcatctgccaatgtcattaccgtcgtgctgttgctcatactgtagtggtgatgcttttgtcgtcgtccgcttttgccgccgtcgccgtcaatttcggcaaaatgttcttgacaataatgatgccccgtgatgatcgtggtcgtcccgtcatagtagtcagttttggtgccattgccatccccgccgctggtgatggcccaacatgcgaagccaccccggtggatgatggacacgtaatagaaaagggcaaagccagccaaggacagtgccaacgcgacgaacacggcacaggaggcgaccagaagctgaacgatgaacgaaattttttggtcaagaaatgtgcaacatagaacagggaagatattgcgtctatgccgatcagggatgccggtcatgacccaatgtcgaaaacccggctttttcccgaccagatcgaattttttcttggcccgcaacagccctaatgcccatgttattgggacccatccgagtcagagttgggtccacgaatgccaccggcggagaggcgcctggaagtggaggtccgcagtttcgaaatgcggcttcttttaggccaa

SEQ ID NO: 74401 - DNA, 105 bp, Heterodera glycines
atggcttgcccgaacatttgcttcaccagtggcgccattgatttggacaccaccaaaaatgagagcgtctgttccatggaattggccgtttattgttttgacgtg

SEQ ID NO: 74402 - DNA, 812 bp, Heterodera glycines
atggcaaaaatctttttgatgggcccccaaatgatttgccgttttattttggccgcaacaattttcaccggagtgctgctcaattttgttgcttttgcttctgctcgtcaccatcaccgtcatcaagttagagcagttcctgtagaacaacaatcagccgaaaagcaacaacaacggcaccagcaacaatactttttcgacattgacggcccaatgcttgaggggcaacaacggcaccaacggtggcggcacaatttgcggctgctaatgacaatgcaacagcaacaacatgaacagcagcggcacgggtagggagaaaggcacactaaatcagagtataatggacaataccggttcagatttcccatagatttttggaaatattttgggtggaaaatacgatttttttaaaacttttttttggtacttttttgttttcgattaatagaaaattatatgaacggattaacgctttctaaatgagacattgtccttataggttgccaaaatatcgtcgtgagattgatgacacgctgctcgatgatgtagaaggatcagcagaaaatgcctatgaagggctgatcggagaaaatgacggttcaattgatgaactgatcggaggacaagacaatggcaacagtgatcagagaggagggcttggcattgctgctgatgctgatcatgatgatggtggcgacgatgacttaccacagtggtggcggcgaagcgaacatttcgccaccacggcacagcagcatcggcaacaacagacgatgagccaatcattcttggtgagtgcttccgactgttga

SEQ ID NO: 74403 - DNA, 4884 bp, Heterodera glycines
  unsure (1)..(4884): unsure at all n locations
atgcttatttctggtccatcggggagtggaaaaagcagctttctagtcaagtntatgctcgagtcctcagaacttattggtcctaagcccgcttccattctttacgcattcggtgaaatgtccagcattgtgcctaccctccaaaaatgtggtattagtgtgtattcgggagtccctccggaagagttaattaaacgcttacctaaaccactgcttctaatccttgacgaccttttgctatcgattgatgaggcctatttaagtgcattattcacaaaaaaatcgcaccatcagaactttgccgttgtttttgtcacccaaaatttgtttgaaagacggattaaagttgcaagacaaaacgctcaatatttggtactaatgcgggcccccaactcagcacttgctgttaggaatattggagttcaactctttcccgggaaactggattattttctctcggcataccgtattgcgaccaataaaccctatggataccttctgatcgatatgcatgctgcctcaaaccctttgctgaggcttcgaagcgggatatttaaggaggacgaagaagatggagaaaaggtcattttcattccaaaaaatggtgtcttgtgaaattggaaatattgttcataaaaatattgattttattcgttcattggcaaaaacaaaatcgtgcaaaaacaaacaacgaattttaaaacgcgcaacagcagatcaattgctaacacttgttgaaatttgtttgaacattctttgttcgcgtttcaagatgacgacacgtcaaagaaagcgtttgttaccgtatgcaagctttgtccggactcttgctcgtagaaggaccgagaaaggagcacgcaagcttttagttcaaaccggtagcggacttggaggagtgttcgcggcgttgctcactccaattttgattgatttggcgcgcaccgctataaattcaggcttaaaatctgacaattaatcatttatcatggcgtcaaaatttattctcgtccccgatgaaatttatcatggtttaacaaacaatgattcggggaatatcaatttgggctttgcgcaacgtactttggagagaacaaaaagaaggagggaaaatgtgacggcgaagaatgttcattataaccaggaattggcacgttatctccacctgcgagatgaacagcaaaatcttccaacaaagttgagattacaagagggttaaaagcactgatcaaaagaggagatgaaagtgatgaagaacaagtttttgattttggggcagatggagtccaacgccccgcttcacaaagtcgcagacgccttcgacgccatcgccattacaatgatgatgaggaaatgccattaatgccgccttctccaccgcttcaagttgaaaatagggggcaaaaacggaaagcaaatgaattttatttctcatgggaggagggcgcaaagagacaatcgcgccacgaagatgcaccggttccttcttcatctaaaattgctaatagacaaggaagaagaaaactgcctccagtttcatggcgaagagaagaagaacaaattcccgctgacattcagcaggaagaaccatttcagccagccccacaaccgtccattcctatacatccacaacttaacagaaaacggaaggcacagcatgctttgaatgatgttcgagaatcaaaaaagagtcttattggcttggaagagttaagacctccttcgcttcaacaagaggcatccctacgtttcaaacagaaaaggacaagcaaatcccgagtaaccctaccacagcattcgaattcattggccttggcaaaactgcgtaatcctccgagggacttactggccgaggcagcctctgccccattaccggacgatgatacccatgattttgatctctcacaaaaccccggggtcgctgctcaggtcgagcctctcccacctggacctccgttgcctagtaaagccaaaaagcggaaaagcaacaaagcggaaaaagagaacgaaagaaaaagaatcaaaattggctctcgaaagagggacttactggcagaggcagcctctgcccctttgccggacgactttgaactctcacaacaacccgggacctcggatcaagtcgagcctctcccacctggacccccgttgcttagcagaaccaaaaagcggaaaaccaacaaagctgaagaagaatataccgaaagaaaaagaagcagaattggttcttgaaagagattatcttcaccaagtgttaccaaaaatctgccaaaaaggcaaaagaactcgggtagcgatgcactctccgaagagcagcgtcgtcagtttgcagaggatcaacatcttttcagcattccaaattcgcaacttaccaatgagcaaaagagaagacggcttcagttcgtatttaatagaaagcccgccaagtacggtgttcagggtgacaccattttgaacagcgcaggaaacccaataaccgacagcagtgtcgcccaagcattagactatattatcgaacgcagagagggacgaattccgcagtttagacagcctccaggaacaaaattgatccgcgatcggatcaaccaagaccttattttgcgaacatggacggctccaccagtaccaccaagaggacccaaacggaaattgatacaaacagaccaagcgccagaattaaagcaaaaatcacaaaaactcagaggaatgagacaggcgagagtcagggagcaagaaggattgatgcttccgtttccaacgaggggagtcaagcggaagtcgacggtcctgccaacagtagaaacggaaatcccaaccaaaagccagcgtctcaggccacaaaaatggaaaaatcaatagaaaatgtgttagaacgcctctacaatgacccaaaatcccctgctgcgttcgccggtgtcgacagactgtggctggaagccaaaaaagaattaggaaataaaattcgtaaaaatgatgtaaaacattacttggagggacatcgcacctacactttgatgcgcccaaggcgcgtaaattttctgcgcgctcgaacgactgcagccggttttatgaccgactgtcaggtggatttggctgattttcaagcactttcccgacacaacttcggcaatcgttatttaatggtggtaatcgatgtcctttctaaacggatttacgtaacacctcttcgtaccaagaaatccgatgacatggtagaaggctttaaacgagtgttttcaactatgccaatgaaaccacacagaattttctccgacaagggtacagaattcagaaatcaacagctgaaaaagctttttgatgaagaagtcgagaaatatgagagcgcacattctgagaagaaagcagcattagccgagcgcgcaatacgacaaatcaaaaatcgtgtatatcgctactttgcccaaacaaaaacccttaattgggtggacgtaattgaccaaattgttgatggcattaataaatcaccgagccgagtgcatgggatgcgaccgattgatgtgaactttaaaaattcacaacaaatatgggaaaagatgttcggagaagatcagcatagggccctttttggaaagcacagaaaaagggccaaatttgtgcccggccagacggtgagaatgagcatagcaaaaggacaattcgagaaaggttatataccaaactacggtgattaaattttggaaattgatgccgtaaaaggccatatgaagccaatgcgctacaagatacgtgatgcaaagggagagaagtttaaagggtttttctaccccgaagaattggctcccgtacgcagagatgcggatacaacatacagaatagaacgagtttttcggaaacggaaaatgccagacggaacaatggaagtgcttgtgaaatttgtaggatacccagagagagaatggattcatgagacacaacttgtataaatacttgtaaattagcattgacttcacattttaatttgtataaatgtctaacactttttttgtccatttgcccagtaatagcccagactatgctgataatgccccaaataaatttcgagtccgtctcccgaaaccaatttatttcaatggctcttgggtttgcggactacacagcataaattatgcatattcttggccctccacaattggaaccttggatgatcaatggattaacatccattttactgatggcctagaaaatgaaaagcttagagttgttagagtgcctgtcccaaaagcttccaacacaaccattgaacatttgagagaatttattacagcaactctaaagaatcacgcggagtctctcgaatctattataaaagataatacaccaataagaagaaaaagaggtgcagttgagcctacaactcctcctagtgcacgtattgtaccaaagtcacctccaaatgtcactaaaaaggtcatagtaccaacatctccgccacgtgttggacaagaacatcaagaaaatacagaagaaatctctgattcattaaccaatgtgacgaagccaccagaaaaacagccaaaaattgaaaaacaacccgaagtcgtaaagccaaaaaatgaacaaataaatcaaacagaaaatatttcgcaccaaaatgcacctagtccaaaacctccaccacctgcttcaattccgactacgaaaaaacatgaagaattaaaaagcaccattgaccccactccttcagtttcaaaacctccacctccattgccagtttctaatccggttaatcagaataaaaacgtgtcgatcaatcaaagtgtttcacaaaaaataactattccgaatgagaatggcattctcgtcgtcgatgacggcatatgtttgctcttctccgttcgcgtctcgacctactctttattatgctga

SEQ ID NO: 74404 - DNA, 423 bp, Heterodera glycines
atggtcttggtctttcgggaacttttcatggagggactgaacccctcaatgatcagaaagggaaaccgtctgttcgagatgaaggtataattgtccatgcgtttttatttaataattttcccatctcaggtgaaaagcagaaagaacttaaacccgaatgtgacatttcgtgattcttggaatttgattccgggaccgctcgcctcaatggggcccatgttcggcttggacgtgcaggacaagcccttctttccacacatggccaacaaacctgacaattatggatgccaaatttttccgtcgaaagcagattacctggccgacggaatgaacccagagaaacggaaacaatttgatcaatggtaccagcaaaacaaaaatattccgtttctgctggatgagtcattggcaaggtgaatatga

SEQ ID NO: 74405 - DNA, 830 bp, Heterodera glycines
atgggtgcacacgccgagcaaaaatggacaaccgaaacgattgttttgcgaagatttggaggaagaagaaagaaacgtcaattgggtcaacagtttcaaggaggtgtgtgtggtcatattttcataaaaattgactgattactatggctcggaaaaatatggacaaaaaatggcataaatatggacataagtttgccgaactgagggttaaattttttaattttcttcaattcattaaatgaaatacatctaaaatcgctgaacaaagtataataaccgttttagaagaaaaaaagcaatgtatagagaaaaccgaacaaaaactgaaaatttccattttctaccggtttttggggtaaaaacagccaatttagctgatgggggggcaccgttctaataggggtttttttttggaaaaatatggatatagaaactccattctagaagcttcagaccaagctaaaaatatgtttttcgtgcgtttcaggcctctaacagtccatgaaaaaatatggatttccatataattccgagccctactgattgcctttgaatttcgattcctttttgtttaggcatttgcccgtgccaccacttctgtcagctacaaaattctgtttgcagtgcatacatcaattgaaccatttgaagcggtgaacgaacgaaccaaggaaaagctgactcttggcaaagtgccaagtcctgctttttattggctgttaaagcgatgcccaattagtgaaaaggcggcggcggttacattggaatacgacgaattttgggacgacaatttgaacagcgtcacaattgatcacacaattggaatttga

SEQ ID NO: 74406 - DNA, 1152 bp, Heterodera glycines
atgaatacgtatgcaacgaccggcgaattcgaagggccatttgcagggcgatcattcgcttttgctgttcgaaagcgaagcccaaagaaattgtgcggggcgaagaagccgaacaaacaccttcgcaagggcgactgtggcaaaatcggagtgatcggcggttcgcccgactacaccggtggcatattgcagagaaatgaatgcatttttatggcttttccccgttaggtgcgccttatttcgcttcgatcaccccaatgaaaatcggtgccgatttggcctttgtttacgcccattccgacgctgctccggtgatcaaaagttacagtccggaactgatcgtgggttttcattatgactagttaactaattggggttgggtttgctaattgccctccttaataggtttaccccagcgccgatttcgccacgaatagacacagcattgagcggttggacgcgctggtgttcgggccggggcttggccgacagaaacacacacaaaatttgctggcggacgtcgtaaatttcgtcaggagcaaacaaaatgtaattcccctccaatctaaatccatctaattattgagatacaatcatcattttctttgctttttaagctttgtttggtcattgacgcggacggtctgttcttcgtcaaagaatgttcgcaactgttcaaagggtgcacagacaaagtgatcattacgccaaaccacagaggcaaaacgcaccccaaaagcaaagcaaacaaaatgcatatttcttaagaatttgttcggctttatacccaaatgttccctaaccagcagaagggagaggaaactgacaaattgaaaattcaatgcgaaatggcggaacaattggcaaagcatttggaagtgactgtgatgagaaagggtcggtggcacagaaacgcaaccgaaaaatatgagtttgtattcaataacaattgtcattggcactttaggagagattgacataatctccaacggttccgccgcccaaacgcgaattgtccaagcggaaacttcgatgcgccgttgcggtggccaaggcgacattctcagcggcgcgacggcacttcgtattttgggcaaggaaagcctcagatgccgacatttattcctccgagcatttgctggacggggctga

SEQ ID NO: 74407 - DNA, 1769 bp, Heterodera glycines
atgccacaaaagcaacgccgatgctcattgattgtcaaataccgtcagctaatccaggtgtgaaattaatacccccccccaaaaaaatgccgtttttttcacgcaaaaatatgcctaattttggcacacacaaatttaattgaatggtttaattaagggttgcttcaacaacccgcatgaaaacattggcgtccgcattctgaagcgctcagcagagaagcgcaaagattttggccgcttttacatcagcattggggcggaacactgtgcacgcattgcggacatactaaagcaactgttgaagaaatcagtggccaacatttacggtggtgatgaagaggtacggtagggagagagagggacaaatactctgggaacagagcaatactacggtagtgggcgaattacaggaaaatcatatggtatggattaaaatggaggtaaattattctacaatatgattacgaaaggggtacggtagggagaaagggacaaaaacgataagaaatttctctaaaattacagtatacagtgagataatcagtaatttgaaactgagctatggtaatcacaatgttgatactgtaatactaataataaaaaaaacaaattatagcttcaaagcctggcaaatgagttcggtgcccgttttgttgacttgcgcttgctgggtttcaaggcggatttctttgccgttctggccgattcgaccaccatggaatgtgtactgctcgacgccgctgtccatccagcaaacgttacactgaatgctttctcacagttcatcacaatggtcaggaaatagaatatttaatcatttttcggcttaattagggtcgtgagactgattgtaaatgctcccccgaaatttttattttttaacaataatggaagaaacattctaatcttgctgggataaaggtattagaaatagtttaaatatgttactgttttaaaattaaattccgaatgtacgattcaaaaatgaagtcgagatttagggatgggcggaataggtttatctagaaataaaaacatttttcaatttttaaattataaatatgacatttttagctgttctctgctgtccgtgacggtttctacactgaaatgcgccgactgcggcgtaccagcaacagttttaccatcaacccgaacgcaccaaacacaatgatgaagaaattgtcggttgatgacaatatgaaggtggttaattcattaattaattcttttttgattaattttattttgaagaaatattttaggtcagccgagccttgcaaggtgcccgatcaatcagtccaagtccggaactggagacatgccaaaaatgtaagtgaatgtttttatttaatgaataagacctgaaaaaagtgaggcgattagaactatgaaaaattttgaaatttaaacacaaattaattaacctatctaattctgtgattaattaaaaattaagaagaatttttttatcaaaaaagatttacctagggattgggagggttaaatattactccaatataatcaattaattcattagttacatataattgcacttcattgctttagccgcgcatagctccccaattggccatggaagtcaagaatcaattacggaccgtcaatcccagcagaataacaacaatggcacaaatagtcgcaaaatttcgcccgaatcactgcaggccaaggaggaaattcgtctgctaaccgccgaattcatgggccgtgcaatggtggtcggaggcaaagaatgccagcgggactga

SEQ ID NO: 74408 - DNA, 334 bp, Heterodera glycines
atgaacatttatttatattccattattatttccattggcattcattccgctgtggttgcagcacaatttgaagagcaatgggtgaatgcttgtaaagagattctcgtaaaaatcaagagttctgcggagaaagctgaaagtattttttttctttacattttaaattaaaaatttacattagataattgttttttttgtaatttttcaatattaacaattaattaattcttaaatttaaaaaactgctttagaatgtgatggtgaattgaagggcaatttaactgagttagaacaaaaagtcaaagaaatgcatttttttgtgccttccaaatga

SEQ ID NO: 74409 - DNA, 373 bp, Heterodera glycines
atgatattccatgcatgtttcttatttaaaaagaaattgactatgctgtataaggtaaaatgacatgtcattattgccgtttccatttatggcatatttatgaatgtattcattaatttaaaatataaaacatttgcatgaatatttatgcttcatagaattatgacgtgaaattattgtcatttccattaaaataaaaatatttgcgttaatatgtatgcttctatatttttattgcataggcttatgacgtaaatgacgtggaatcattgccatttccattaaaatataatatttgcgtgaatatgtatgcttctatatttttattgcataggcttatgacgtaaatgacgtggaatcattgccatttcca

SEQ ID NO: 74410 - DNA, 672 bp, Heterodera glycines
atggcacagcaattcgatcggaatcatggcacaaaagctattgagttcctcccaacggatcccgtcctgctcttgaattatcgtcttggaaaaagccattggcttccgggcacgattgtggaaaggctcaacaattcgcctacataccgtgtccacgttccaacactcggccgaattgtccatcggcatgccaaccagcttcggcgccgattggattttgaggacaattcaaattgggaaccccccattcaggaacaaatggccattgagccaaatcaaaggacaccgccacgccaacacgcagccatcgatcagcgaactccacctgttgttgatcaggctaggcaaaaggctaaaagcccaattggcgtccgacgttcccaacgcgtgccgaagccggtcaaacgcttcacgccaggttgaaactgaggatgtttcaatctcgagaagggaggtgttggagaagagcaaagtacattttctcatggtcacttatcgattgacatttgtccattccctcctccgttcctcccacatcacatttgttatttaaaggcgtggactcttcccccctcgttcacttcttctcctgtcttcacttttattattttattcattctccatccatccattcgccattttattattttattgttatttgactcttcgtaa

SEQ ID NO: 74411 - DNA, 1307 bp, Heterodera glycines
atgggggaagcaccggaccaacgggtcgaagcagtacaggaagaggaactcggtgcggttgctgggacagaagccgaaggtcagcccggggaggacaacaatgctccccgtggcttgagtggcagtgagggagaaaaaactgtggaggctgaagaagtcgcgcaagacgaagcagaggaagggcccattccaccgagtttcgttcaaaacgaagtcgggagcacctctcccgcgtcgcaaacaaatgagcagatacgggaaaccgtgaaccaaaagacggaagcggagaaagctgactcaccggagggatcgaacagcatgcgagaagttgaaccacgaaggtcgcggagagtccgacgaactcgagaagtatggtcaccggaccgatgtgccacgaaaaggagggggattggtggccccctggtcagcttggccatgatgatcatgttggtctacccgactctgacatcagggtgtcagccgactatccgacccgaaattgttggacaacagtcacaggaattgccaacaacgatgttgccgtgccatatgcggtgtacggaacgtggagtgaaagtgctgagcgggcagcgactcgaaaaaatggaaatttgttgccctgatggatgctgggcaattgtgcccatttcgacggagatcagctacgagctaccaactgaactgctcgtccacgattaccattgcagtggtcaatgctggagggggtctggccccccttataacatcacacagcgatgtccagcgagagcagaatgcgatctgatcaattgctccttctgttgggagcagctggccaacccgacgtgcaacccgcgatgggcatcctcgctcttcgggtttggagctgcaattttgctcgccatcatcagctgcttctgctcaatttttgggcggtttttgtcaggagccaagctgctctcaaaagccgtggcatggggagttcgttaccccatcgggctgatcaattgggcaaccggacgcgattttcggaaaccgaccacggagcaaatcgaacggaaagtgaggaaaggagcgagaaaggcacgaacggaaatacgggagctgcagcagcaactgcaattgggaagacgggctcgggcgatggccagagcgtggcaaaatcccgacgggactcgaaaagcctttcccgcaaaggcagtggcagccctcatcccattgctgctcatcatcgatccggccttcctccaattttcaccatataatccatcgacatctcgcatataatcatccaccaatttttgaccattttatcatcatcatcacca

SEQ ID NO: 74412 - DNA, 305 bp, Heterodera glycines
  unsure (1)..(305): unsure at all n locations
atgatttttgctttgaattgtggcttaatggcaatatttgtgctgcttttgatcgcctttttgctgtcatttcgccacataagtatagaaattaatttaaaaaaatgtttgatcgaattatatccacaaatactaattaactctaattaataatttgattttttagacactcctccatttttatcaaatacaaattctcctatttgctcggtctgcttttcatttgtgtaatntacggtgcattaattcaatattttgtggtcgattatgcattcgaaaatgcgggaaagtatgacgcaatttaa

SEQ ID NO: 74413 - DNA, 304 bp, Heterodera glycines
atgccctcaattaacaccagctcagacaatgcggtaaaataaatattaaaaaaagaatttaaattataaaataaatatttaagtgaatacaaaataattcattccttttaaacattattaaattttcgacttaaattaatgttttcagccttatttggcctaccgttttgtcggtccgtccgccgatttgattgtgccggccgttgcgctgtatttggttgcgtttgttggcattgtgatgcacggcacagttttggtggtcacggtcaaatcgaggcaaatgccattagcatttttattttaa

SEQ ID NO: 74414 - DNA, 778 bp, Heterodera glycines
aacatttgaaaattttagccaagtattaattggatatttggctagtggttcaactatatattacccatggagaacagtgagtataaattcgtatttttcatttgttttggatggggtaatgaggataaataaaagattcaaaataatgaccctgtatattgcttacaattctgaaaaaagggcgggaatgaatacggatattgattagaaaattttagcgatattcaagaatttttaaatgcatctggccagttttaaaatttcttacattctaattcgttttgtgcgggaagcttaaaaataatccctctttctgataattaccgttttcgtcaactggagcaaaacattgcgtgctattttttattttcgagaaatgtttcttgtgaaattctgcatttaaaaaagaaatgttatttaatttcatatgccaagaaaagggcggttaggactgtataaaactggtaataaaacagagaataaattaaaattccagaattctgaaagtatggtctgtaatgtgactctttctgagcagatgttcatgttgtttattaaaattttgaactattttaaagggtgaagttatatacctagaaaatgtaataatcgtatgttatatactgcagaaatgttaggcctagccgaaaaaagaatgaaaattttagccaagtattaattggatatttggctagtggttcaactatatattacccttggagaatagtgagtataaattcgtatttttcatttgttttggatggggtaatgaggataa

SEQ ID NO: 74415 - DNA, 475 bp, Heterodera glycines
atgtttcaagcaattttttggttggccaatgaaaaataacaaatatattggtttttaaaggtttattttattaaaaaaaattattaattcattcttgttacttcagttaaaatagatactcgagtagtaatcaaaactttcgtcagttttaatgtttactgttgcggttagttataattatttataaattattgtatttttaattgtatttagcaatttatagttacttaaattattatagaatttttataataatctagttaattaagtttttttttataatacattctttattgttgcagcttatgtgattctctttttattggaatcatttcctattaaatcaatgcgataatttatatgattcaattttttaattttataaattttttgtgcgataattccgtaaaaaatcatgttatattttcaatttgtttaggtacaactttattttcgaaaagtaatttgattaaaa

SEQ ID NO: 74416 - DNA, 1370 bp, Heterodera glycines
atggcgatcagtgcacatttttccgaagaaacagcacagtcgagtttgcacgcacttcaacgacttgaagacgctgtcgcacagtcactgcgcggggcattgtgagtaatttaatttaaaaattaaattaaattttttaaattattttatttattttttaaaacattttaacatttcatttaatatatctaagtgcatttataaattaactaaattatatttatgaaatttatatccttttttcattttataatttttaaaatttttttaattaattttttaaaaattactttaactttttaaatttataatttaatataaatgatatttataaaataatttaaatgaaatttaaatgcttttttactcaattttataattttttaatttttataattacaaataacttttttttttgtttcaataccattttatttttttattttttgagaaaattaatttcataatctttttttgtgcttttttgcaaatttttctctcttttttcatttatcttttttactctttattaattattattattattctttcatctttgcctctcccaatttttgcgttttgctcatttattttgtgattttgttttgtgcccctcattttgctatattttctcatgtcactctttcccacattttatggaccaattagtttgccattagaatagagaccgttcactactcactaattatcatcactcgctaattaataaaagcgatgttaattggctgtgtaaatgatggcagggcagggacgactctctccttaggttctgtttgttgattgttgtccagcagcaattctttcattttttttctatttattcagataaattatttacatgattttattatttttatttatttaatttaaatattttttaatttgccaacaaaaagggaaaatatccctttgataaacccacaaaatttgattttctagagcgctaaaatggcatttgacccgaactcgggtgacaataaatcctattattaaatatcctgtaaaggaacttttttgtcactattcagaaaaatgcttcagggcataattggaaaattatataaaaaagaatttttggcacttttaattattattctttactttagttttttatcatatattttgtcgctattttataagaattttgccattttaagcacttttctaaaaatttgcctgtgaaataactcaaaaaatcataatcaatttttttatcgtgattttttcgtgttttacgaaaaaattgattttataaaatttatttatatatgaaatattggaaagcaggctgtttgtttccttattatgctaatgtattttctgcaaaatttcaaaccacacttgcaata

SEQ ID NO: 74417 - DNA, 320 bp, Heterodera glycines
tttttgggccccggggtcgtttgggccccaacccaaaaatagaaaaatgtgcttttttaaaaattaagattctaaaaactaagcctgagggatccctcgccacttggcataagttaggtttaattaacattcgctcattttttacaattttacttattccaaatcctattattttttaatagttaaccaatttgctgtacattctgatttgcacatttttcagaaatgcctaacccaattgcaacaaaaaacaaaaagtaaaattgtcttacaaaggccacctttacaccttcgctaaaatgagttctgatgggatgaca

SEQ ID NO: 74418 - DNA, 313 bp, Heterodera glycines
atgtcaatcgaagccacttataagaaggtatcacagcttgagcatgtgctccttcgaccggacacctacattggttctgtggaatatacgaaaatggtttaattttaagaatttcgcttttacttcctttttacaggcgtcgtgggtttatgactcagaggatgataagctcgtctttcgcgagatttcttttgttcctggtctgtacaaaattttcgatgaaatccttgtgaatgcagcggacaataaacaaagagatccgaaaatgaacctcataaaagttgacattgacaagtaaatatttcctgaccaa

SEQ ID NO: 74419 - DNA, 416 bp, Heterodera glycines
tccttttccaatggtatgaaccgctgtctcgctttgtccatcttaagcgagtccaactggacaaactgagcagtccctacaccgacctgcaacacccacacaaacccttcaatttggtcttcagatccggcgctgccaattccgatttgcccatggtgtgcctctgttttttccctgaattgtcaatttgtttgccttaaggtgtgcattggcatttctcgggcgctcacttcgcctgtcggcactgcacaagaattgttgcgcgagttgcggaccaatctccaaaaggacaaattcgagctgcaactcgtcgactttaatggcactgacagcacagtcaacaatatgaacgacatgtactccgccgcactgttcggcgactgttcgtcggatgatgaaatcatcggaagttggca

SEQ ID NO: 74420 - DNA, 1127 bp, Heterodera glycines
aatgcttttcccctttcgtttcgtcctctctatcagaattggtgctgctttgcctcattctttttgttccttttctgatgcttttccatcgtctggtgatcgaattctcattcgaagagagaatttcaaccgaaataaaccaaggcttttgaaaaggaatgaaaagagtcttttggctgagaatcggcagggaattcccacggcgacggactgtgcaacactcgtgctgttctgtcagttgggctcaccatccgccgaagaaaggtgtgttctcttcacacaaagggcgaaaaggatgaagcatcatgccaacgaaatttcgtttcccggaggtgaaaaatgatttgtgaccaatgatcagaaagaaaagtgatcggcttaggacggatcgagcagggagaaagtgtagagactgcggcgatcagagaggcggaagaggagatcggactggaccggaacgacgtggtgatccatgccataatcggatcaaattttaagaattgcgcgttggattccgcaaaattcggcgcttgctctgtcttctcccgtaccgattcgtttttaactttcaggaactgtggggcactcttcgtccgctgttcttcggagaggcgggcgtcgtcactcccgtggtggcaaccattgggcaaaacgtggagcaacggttggcctcgctgagatgtgccgacgccgaagtgcagaatattttcatggcatccgtttcggatttgctcgcccgaattcactacaccacatttcggtgctgacagaacagacaaacgatcaacagaaacaaaaccattaattgaaccaaactccgttagattttctggaaaaccatccgatgacaaaatgccgtttttcttccgaatgcccattttccactcgaccaaaccgcgacttttgtgcaattcttcgctggtcaattgtccggaaaagttccgcatttggggactgaccgcgcgcactttgctggaggcgctcaatgcgtttttgccggaggacgcgaaggaaagggaggcgagcgaattgctaaggaaagggaagacagacaacagctgctgatcagatttatgagcagagagagagcaatcagtcggggatcagccaaattcacatttattggc

SEQ ID NO: 74421 - DNA, 1273 bp, Heterodera glycines
atgcgctcgcccattaatgagtttaagatcctgttcatcaacatcctcgtcctttacttcttccattctttgacttggttcgtctactttttgcgatatcgggtaatagttaattaattattaattaatgaattattaattaataaaaaatgatgacatcattttccaaaattaaaaaattcagttgcttctattcttttacaccagtacgtgtgatctgctgagccccgtttggatggtccccgtttttatgggcccttaccaagtgtattccgtcgcttatccgtctctccatttcgctgttactttcgaacgcattcgagcattgtttttggtgagaaacttcgcaaaatgccccaggctttctttgtttggtcccatcccaaaaaaacattcataaaaaaggcaaaaagcattcatttgagagattagggacacaatctctgagtaccaaatgagaaggatattcacatacaaaaaaggagacacttgcttggataattaattaggtgcacaattatgagcagatgggcccgaaactgatcatcgcaatcatctgcgccattgtctgttttactaattgctgttaattgtttcggttattaattaaccattttgaaatatcccaattcagtggcttgcttctttgctgtatttggcgtgcattgtcggcttggcactcgccgaccctcaaatctctggccacccccaaggcgttgtttacttgacctccgattacaatgccaacctgattttttgggccatgcttttcacgatgcttttggtcgttgcgacggcattgtgcgattggcgcatttatttgctgaacaaaaggctaaaccgggtcgggaatggcccatcgactgagtacaacctcagtctgaagtaccaaatcaacgaaaacaccctctccttgatgctgatcttcccgctggacttgctttacgcattgatttatcccatatacaatgttattgtgctggtccttcgcgcctaccggcaaatgctttcaaccgccaattacgtctcctattaccatatggcgaatacggtatggtagagacagaaataaactgacaataaagcatacggtaagtttataaaacaaattcccatttttcagttgcttttcctgcattctctggtcacccttgtggtgtatattcgatttatcaaatatgtcagccgcgttcgaaagccgagcattgtgaaaagtcaaccgaatgaagaagcaaatatacacttcaaacaattgcaagcgcaatggaaatga

SEQ ID NO: 74422 - DNA, 574 bp, Heterodera glycines
atgaatggtcagaaagaagcatttggaattgtaagcaaaaatgaattaattacctaattaaaattggaatttaatttaaatgaatcggaaaggattttcttttgtctttcgctgcgtcggggcccaattttcgctgctttctttcactgtttgcactctgctaatttatttttattctcaagcagtcagaccaacttttgggtaacttttgtcgtcgattggaccaaagtttcttcgctttcgtttgtttcatttttcagtcatcgcccgaaaatgacaaaaaaaaattggaggaaaagcaaacaaaaagcacaaaatgttatcaccaattggttaattatcatcaatcagcacaaacaatgaaagaagaagaagaagaagaagttgttcaattgtattttgaggcaaagcaatcgaaaaaaagaaaaattcaatggccaaagaacacagtgaaaaggcaacacaatttgagaaaagatcaaacaaatacaacgacacactcattaagcaattaattaattatgtcattaaaatttaacaaaaatcttttccttttgagattaaaaatgaaaaa

SEQ ID NO: 74423 - DNA, 1949 bp, Heterodera glycines
atggccatccaaacactgacttttggtgagtatttcttcgacgggctgaggcccttttggccatcgttggaacaaagtgaaacaatggcttttgtgctgaagcgactgatcggttatctggccatttggctgatctgcttcatcaatctcttctctttggtggcattttttgtttttaaatgggcaaatattttttgttcgcattaattcagcaaaaaatcgccgcccgtttccaagtgattttaacggtgcttaaactgctggtaattgcgctgattattttgacgggactttatcaggtgagatataagcaagtgaaaaggccgaggaaattcattctttggagcaaccaaaattctcacaaaattaaatttgaaatttaatttaccaaataattccaattatttgcctttccttcccttcgtttttccttttctgccatttgtccgcatttgctcataaaaatcattttattaattgcttgtttagtctttaaacagttttcccccctttccacacagaacagatcatctttcgcggcagaacggagaatttccgcgacacttttgcggggacaaagacagaagcgtgcgaaattgtgctggcattgtttgccagtcttttcgcttacaatggtgggcatgaaaataaattctatcattaactaacttttcgaactgctgatcacattatgcttaatttcaatttattttataatttatgtagataataataaagaaacaaattaacgaataattaggcaattagaagtagggttgctccccgaccccgaaccccccaacccgagacctttttgggacctattccccgacccgacccccaacatgtgcccctcgatggtttccggcccccgacattttgcccccccccccccccccgaggggtcggggagcaaacctaatttgaagaatagggggttttattgtgtcaaaaaacttcaaaaacattttcttttgaaaacggtaattaaaaaatggagtaaaaataaatgaatttttatgacgtggaagagactcgagcgtgattattaaaaacaccaagcttcataaaattctgataaatcatagattcgacagcatcttatgataattttttaacttaaaataaaaaagttaaattaaatcccccattctttagaatatttatattttaagaatgaggtttgattttaaatttaaccaaattttaccacaaaattgtaataaaatatttaattttaaatattacagcaggtaaaagccaataaaatattggatatccaggcaaaactaagattcactaaaattccaattagatttttttattatttaattttattccaaaaggttgggacgttttgaattttgccaccgaagaaattgaaaatccgcgccgcgttttgcccatcggcgctctgtgcggcattgccatctccgccttcgtctacgtgttggtcaacattgcttatttctcggttatgtcagctgacgaattccgtcactcacaagcggtggccgcggttcgtcaaattttccaattttttacttttaaattaaattattttattttatgtctttagctttttgccgaaaaaacacttggcaatttctcccgtgtcgtgccttttttggtcgccattttgctgcttggcaacctcaacagttccatcttcgcctcgtcacggtcaaaattttcaaattatgaaaaatgacaaaaattgtccgtttttcagttatttgtttgccggtgccaaaaatgccattatgccctccgcgttgagtacggtccatgccaattcgatgagtccgcgggtggccattctctacgaagtgcatttttattttgatcattttaaatatgaatgtaaattaaataataattttaagctgtttgctttaatcgttctgtcattcatctgcgacttggagaatctgatcggctatatgtga

SEQ ID NO: 74424 - DNA, 308 bp, Heterodera glycines
atgaaggaattaatagtattatatttttatggtcatccaaaaaatgtaaggtcgtttaaatgcatgaaaattgttcaaaccttcaattatcacattatttgatatgaaaagatagcttaaagatttctttatgatgcagttaaatttcgaaaaaacttattgaatttcaaaaaagttagggtcaaaattgttgagtctaaatttttcgagttttttttgcttacaactttttgtaaatttttactaattttttaaaaattacataagttgtagagaatatgtagagctacattctaataccaagatga

SEQ ID NO: 74425 - DNA, 1311 bp, Heterodera glycines
atgcccggcaactccgtccaacaattcaccactccatcagcgccggtggccaacaatcagacggtgatcaaagtggccatgttggtggcccaaaatgacacggactttggcctgccgagaaagaactcaatgctgcgcaatgcgggaggtgcaattccaatggcactggagcagttgtgggcagacgaagtgctgccaaaaagcgtcaatttctcgttagcttttgacatattaatacaaatttttaatttccaaatttcccctctttaattgtctttcacacggtccgtatttatccccgactctttggtgtcgtggggagggattgtagccgttttcggcatccctcttaaacataattaacggatccagaaaaagacgaaaaaacaatttagccttttttggtcaaggctgctaacactaaaaacaaattatttaattttttaaaaattaattttatttcattttcgatttgaaatttagaatatattatttttttaacttaaatttaggtttgagtgggtttatgaaaagtgtaatgaggcaactgcgatgggattaacctatcagtttatccacgattttggtgctgacgcaatcattccgacgacgtgcatggagggtaattggaaattttaataaagatattttgattttgatcgacaagcatttcttttataatatgattaggctaatatttagtggcgccacaagtgggtcatttggccgctaattttaatattccgatgatcgtttggggacagaatatggtctcaaagtgagttcagtttttttttttaataaaagttgtttttgtaaataacaattaacctttttttgataatgaatttaattttaaaattagttaattttcttaaaaaattgaaacaaaatcgcaaaattttgttatctgaattccagtagtcctatcccgacctgatgccaatcccgatcccgactttttcaaaaatcagggctttataaattaattaattatcctaattaagtcttgcctcctcaaacaatgccacttatccaactttgctgaacattgtgccgaactacaaatagtaaatgcatttatttaaacataattccgcattttgttcattattagcatggcatccggactgatcagtcttttacagtatttcaattggactcaatttgccgttgtgatccaaagtgatcttggcaatgtgagcggaggtgaaaagtgaaatttattttacatattttatttatttatttttctttttaaggctgtgattatctcgccaaatccattgatgttattttttttaattttta

SEQ ID NO: 74426 - DNA, 1191 bp, Heterodera glycines; identical to SEQ ID NO: 11093

SEQ ID NO: 74427 - DNA, 2153 bp, Heterodera glycines
atggtcgcaaatgcgggcattgacgcgtccgaggcggtgatgccattggaccaaactgatctgttgtttgccgaaacattgtatgaggcatggtaaggaaaacgggcattaattttaaaaaaattcattaaaaattccaattttccccaatcggcatcactggatccaaaatgccaataatttactatccaaattaggcataaatccagaaatgaccatttttgattaaaaaaaaacaattttaacaaaataatcaggcataaatctgtttacaaataacctaatttcataattttttaatgtttataactcgtggtgttttaaaggaaacaattcggtgacaaaaaagcggtcattcttttcgtgcacaaccaaccgagtcacataaagctcgactcacgaaaagtacagtatcaattggaaaaaattgcaactgaaagaataatgtgccgatttatcactctgtcggagggactcaaacggtcagtgacagaaacaaaattttaatttttggctaattttcttaaaatttttatttttttagcttaaaaattgatccgaacaattttaacctcattttggacgacaaatttgttgttggggttgtgttcgatcgacttggtgggccaataacaagggcagaagccgcacttaacttctcttttgagcgaacaacggccatcgtaaaaccaattataaataaacttttttaagataaataaactgggataaaaaattaaaatcattaataatggcaatatttaattattaattttagaaaactcctccgtatgtatttgctgtcgctcatacaaagaaaatgcaacaggtgaattgtaattttaaaaaaaaattattaataattagagattaatctagaattgaaatcaggccaggatttttcctggatcaaggtccaggctattttttttggcaacatgggttttcctggatttttgtccaggaaatccaggtccgacatggaatccatgttcagaaattttttcaaaatgcagaactctaataataactaagaatatccagttttcgaggggaggtgttagctaaaagacgagagatctttggcccaaagcaattaaaatggccaattaagattatttcggtttcaattttgattaggtgttcacaaagccgggcatggtggagcgcttctttcccgatcccaaagaagtccatactgttgaagcaattcgtagggtccaagcaaaaagttgggcactcggagatgacgaaaatgaagcggaggaaatcaaaaaggcaaattaaaatattaaaagtaattaattcaaaaatttaaaatttcgcagaaagtgtatgaaaacccacaagactatgtgctgaagacgaatgaatgtggttcgcctaatcaaaggatgttcttcaacgacgacatccccaaaaagttggcacgaatgacacccgccgagcacaattacttttacatcatggaaaaactgcgcccgatggtcgttaaggtgtgaattttttttccaatttaataatattaaaaagcgaataattcaataaaatgaagtattcaaataggaaaatttgtcaacctggatttttcatgggctgggttttccttggtttttgtccaggaaatcaaggtccaacatggaatacaggtccaggctttttcactaataccgatctctaataattatagacaaaatgctgtatagatttagcaaaaaaagaaaaatgcatttaaatacatatataaactggtcccgtattttacaaagaatcattttgtgcgcccaaaaattgggctcactgcgaatcttgacgtcacaccggagcttggcatctatggctgtctgatcggcaacatggtcaccggcgaagtgtcatatgtctcccgatttgggcatacgatgaaaaccaaaacggcggatgaggacgagggcggcattatgagagggaacagtgtggccgacacgccttaccttgtctagaagacaattagagcaccctaccgtatccaacacaattagcacactaccgtatccaacatattttcaagtgaatactgtattttgtaatttatagctttttgcactccttttctcattcatgtgatcatttaaaattttcgagcctatctattctattgcaatatgcaaata

SEQ ID NO: 74428 - DNA, 1347 bp, Heterodera glycines
atgcgcagaataatcgacgcaaaacgaaatttgggcgaggatttgcagaaatgtcgcgagttaaaggggaagcggaaaacggagggcgaagaatcgtccgccgacgaaggggacgacgattcggattttgtcgatgttgaggagaaagagggtccgagtaaaggacaattgtccttaaaacccattatttaaggatatgaacccgacttttcacataatgattgcaacaaaagcagcgacaaaaaagcgaagtgcgcaataattctcgatgaacggcctggtccgagtggattaaaagtgcaaaaggaaaagccaaaagaggacgaggaaaagggacggaaaagcgacgaaatcaatgggaagaaacgcattccaaaattggcgatgggactcgatctgaaatattggggagaggagcacataaagccggcagagagggtcagagttcaggcggaaggccatcacttttggagaccaatggacgagtgagtaaataatctaatttaatttaattaatggtcaattaagaaattttctttcccattcaagagacgctgacaatgtgcccactgaaaatgctgaagcgtatcgttcccgacagatcactttcgttggccaaatgcttccgaccaaaaaacgctgtcgagcgcccctccccagcggaaaattatgcccacgaatggaaagagagcgatgcgcacttcacggaccaatcattgacagagacgaaatgggatttccacagaaagagcaaaagtggggaaaacaaaaccaactaaaaaacatcgaacaatttaaatttcagagatgaggacgaaaacctgcaaaatagcacagacgaagcggacgaacagcgggaagaaagcgaggcggaatttttacaagatttacaagaagcgacaggggtaaaactaaccgaaaacagcaaaaaagtgaaaaagaaaacaacgaaaaggaggaaaaagaagacaaccacaaagaagaaaaagggaaaaaggaagaaaaagaaaacggcgagggaacggccaaaaccgaagagcgaaaagtcgcgggagagattagtggtgagaaaggggggggggcgggtagtttttgcgaaaagttaaatcccaaggccaaactgttcgacaaaaaaacactgaaaagggtggccaaaacactcgaacagatgcaaaaggcacgcgcaagtcgcaaattttctagccaatttaattatgcactggaaagacgatgataagacaaaaaaatttttacctttttatcattattgtaaatatattcaagttaaaaattttcgtcagaatcatattctccttcaatcgagagtataatcagagtactaaataa

SEQ ID NO: 74429 - DNA, 617 bp, Heterodera glycines
ataaattttagttaattaaacaataattatttaggtgagaactgaattgtcccggaatccctaccctaaccttcattcacataatacaatattatatattttaataatatttatttattttcttttgattcgcttattttgatgaaacacactcactcatttccgtaattttattaattatttttcaacaattttaatttaatttattatttttaaatttatttttattatttcttttttaaaccttcaattggtcttgtgatggaactggtaaacactcattaaacatcagcactcattcatcatttccgatcaaattgaagaaaaccaaaaattacaattttttccccaatttcccgcgtccccccataaaaaaatatttgaaggccattcattcgttctttcgtcgttcgttcattcgacgccaaaaattcatttaatttgcgcccattttaccgaagaaacatttgtgcccaaaaattgccttctcatctcacaaatcagcaacaaatgaattgaataaataatttttcaaaattcattgataatgatgaaaatttgtttattttttattttttgtaatttttttaaattgcaaaatgttgcatattttttac

SEQ ID NO: 74430 - DNA, 293 bp, Heterodera glycines
atggatcaggaattgacggaattggccaagataggacaggacggaactggaatggatttcgcattgtgtataatatgcattttgtgagtgtggaaaaaaattttttatttgaatttttcatactaattgagggtaattagggctaccaaattatgccaagaaaatcttaatttggttgtttctaagaaaggatatgaccaatcaatggaataatctttttaagtgatcaggttcacataacaaacgaaaaatgcttgagttttggtcagaatatatttaaatttaaaaataaa

SEQ ID NO: 74431 - DNA, 415 bp, Heterodera glycines
atggattttttcttccaaagccctcccaagccacttcaggttatacaaagctatttttataaacaaattaattaattgcattattaatttttttaattaaaactaacatttaaaatatttacaatttttcaatttttatttttatttattaaactaatacatattgacatttaattgttaaattaaaatattttttgccatgtaaaattcagttttggccaaaccctccgcccgtgccggccaattttgcaaggccccaaacatttcgtgaaaaacattttggacaatggtgccgaaatttgacgctggataggtcattggaaatccaaatttttttaaaaaatccattaatttttattttaggcacattcaatgcccaagggcgtcgccatttcattggttcaccaataaataa

SEQ ID NO: 74432 - DNA, 283 bp, Heterodera glycines
attgtggcccacccccaaagtggacctaagtgccgttgagccgagcttccgtgcccaattggagtccctttcctggtattcgtgcgtctccgattgggccaccgataagccgtcgccctttggtgccgctcgcagtacgcgcgtgtgccgttgctgctgctttccgttcaggccgaacccaaaaacattgaaatgcgaacacatccccggggcacccgaagcgccgggagaggagcaattggaggaggacgaaacggagagaaggagcagagaatggaaatga

SEQ ID NO: 74433 - DNA, 1331 bp, Heterodera glycines
atggttgagcgaaaaatggctttggtgagtgaattttggtcaacgaataaatgattccgaaaaagttatcgcgaacgcatcaaatcaaaaacggaattgccaccgacgaaagacgaaagagcgatggaagagggcaaaggaggggagagaggggcagaagaggggagggggacgaaggaggaggaagagccgatggagagcaggtgatcagacgaacgggggaaagggcatgagggatcagagagataatcactggatgggtgggagagggggtcaacgagggggataaaaggggaaataaaagagggggaataaaaaggggggaataaaaaggggggaataaaaagggggggggggaaatctgtggatgaaccgtcctaaagaaggccaattgatcagctgatccatgacatagtccgaaggccaagaaaacagcaatgaccagtggtcaatcgcttctaatctccctccgctcaaaggaccattccggtgtggatggcactgtccattgtcagcggttacgtgtgcacaattgcggcaattttcctcatttgggagagtcggtcagtgtcccccccccctacgggggaatttagttttgccattggcaattccatttgccccttggccatatttgccatgtaaattgtgcccctgatcagttggtcctacttcacctccttctacttcatttgcatctcctgccttaccattggcctcggtgacgttgtgcccgaccatccgcacatgctcattctcatgtccgttccattttctgctgctgtttttacaattttttctattttctctttgccaggttcgttttcgtcatcttcggactgtcctttgtgtcaatgcttttgtcggtgattcaaatcaaaatggaggaatggctgtacaaaatgatgatccaaatgcaggcactgctccccctcctctgatcagatcactctgatcacccccccctttcattttttggtcatttgtttgttgtccagaaggaatatcaaaaagcgctccgtgaagtgaccgatccgacagaacgcgaccaaatcattgcccaaatgttcgccagggagccgtggtatatgcgccaattggccccattgtgcgtcagtgaaacgcagaaggctaaattggaaaatttggtgggattaagggaaatgaggcacattttagtaaatttaaagacgcaatgctatgagaaagtgacgaaatcggagaacacgaggggaacacaaacagaacaatcggaggaggaagaggaggaggacgaagcggaggagcaaacgaaactgacgcacacagaacaaaaggaagacggacaaaaa

SEQ ID NO: 74434 - DNA, 1591 bp, Heterodera glycines
tttgctgctttacttttgttggttcgtttgggacttcgctaccccttcgcgcggctcccatttctggccgtttttttacaattcgcccgtttggcgccatttggccacttattttccgatttcggtgattaaaacggctgatctttccgcggatcgtaattatttgttcaggcaattaattaacccctaatggcacttaattgccctacccccctccctttttacagtgcccacccccacggcatcgtcggctcaagtagtttcattttcttcgctacaaatggtgcaaatttcgcctctcttttccccggcctccgaatgcattccgtcactttggacctcaacttttggtttcctttgcgcagagaaatgataatggcctcgggtgatttgacaaatttggaaataattcaaaattacaatcgaaaggaatgattccgagtgacagcaaatccatcgaatgggttttgagtcgccccgggggcggatttgccgttggcattgtgcctggaggggcggccgaagcgttggaatcattccccggcacgaatcggctgattacgtcacggagaaaggcaaaaggacttttaaaggcaaaattttaaaaaagaaagcaaatttaggggttcgtaaaattggccatcaaacacgggtaattaattaattaataattcaaattttaaataatttccgttttggtgtcgcaattgtgccggtgtttcattttggagaaaccgacgtttatgagcaaaaagaaagcagagaggggagcacattgaagaaaacgcaggtccatcggaggaaattccatcaaaaaaatgaatgccattccccaaaaaataaatgccattccctcaaaatgaatgccattccccaaaaaataaatgccattccctcaaaatgaatgccattccccaaaaaataaatgccattccctcaaaatgaatgccattccccaaaaaataaatgccattccctcaaaatgaatgccattccccaaaaaataaatgccattccctcaaaatgaatgccatttcctccctcccctgcagaatttgttgaaacgattaacccgcgtcagttttccgttggcctatggccaaagtttcatcgctgcccttttgccggaagaaacggcacaaaaattgccgcgatggcttcgcgtcggaatctttccgtaccggcggaaaattgtaacaatcggtgagaaaattaacagcaaaaaaatgaaaagtaagatgctgcgctaaagggagttgcgcatataggatatgagcagggtagccagatctgaggatttatcctcattttgtggctttttgataggtcaatgaggattttgaaaattttaatctggctaccctggatatgagggagtaggcactatagaattcctggtggataagaaccagaatttttatttaaaaatttagtgggcgagccaatggaaattgaagaaaatgcaaattgtgaggacgaacaaacggtggacagaatacacgcggaatattgccaaagactgcggaaattattcgacgaaaataaagtgaaattgggaggactttcggaggacagcgaaatcgaatttgtg

SEQ ID NO: 74435 - DNA, 366 bp, Heterodera glycines
atggccatctctacacacttgacaagacaagtgccgatggaacgactaaattttggcgatgtgagttcaagaacagtggtgtgaacaagtgcaaaggacggatttggactcaggttgccatcagtttttaaattcaatgatctcaattttttttgattttaagcgttttaatacggagccaatttttgctgagtcagcaaaaatgctgatatcgattgcttttattcctattgccgatctcactgaagcagtcaatgtattggacgttgcgttccgaaattttcggacatgcaaccgatgttggattttatgttaatcgaagtcataaacagccagcatttaccaccgttcaggttgaatgaacaa

SEQ ID NO: 74436 - DNA, 2854 bp, Heterodera glycines
  unsure (1)..(2854): unsure at all n locations
agaatatgggtattgaaaaagtaagaaaaaagttatgccctaagaaactgaggatggtcattcatgggacgcataatatgtcatgggacacataaaaccgactagaaccaataaaaccgactagaacccagtctttttggttttatgatgaaaaaactcaaataaacaggatattgtacagttttatgggcgaccaaaaacaaatattcaaagttgttctcaccggaggtccgtgtgctggcaagacaacgggacaggtactactaacctactattttaccatatgtcatacctaacagcaattttttatactttaggctcgcctttcaagtttctttgaaagcattgggtggaaggtgtacaccgttcctgagactgcatcaattctgctgagtcctggacgcattcgttttcctgacctgagtagagaccaggctgctcaattccagatagatttgctcaaaacattgatacaaattgagaatgtactgcgttttctaatgcacaactcatttctttacatttttaggtatttttcaaccaggccgaactcagtgaagcggaaaaaattatgatcattttagaccggggtaggtaacataaattagaaattagagtaatactaccgattgtatcacaccttttgaaaaaaaattttgttttcaaaaatcatgaaaatgtgtttccacaggatcttgatgctgctgaacacgaatcttgccttcctagtactgatgctttcagtttatttccaagtgtttaaactaattatgacccaaaaattagaagatcttaactctatcttttgtgcgaatttgggtccgggttaagcaattagttgaaatggcccaatcgtgatcagcgaccctgaagacttctagaaacaagctttgattaattttgaaaacaaaaaattgttttcaaaagtgtgtgataccaccggtagagtattacctaaattagcatcagtaatgagcattttcgataaacaaatattgagtttaggtgcgatggatggaagtgcttatatcgacatggaatcttggtcagatgtattgtcagcatgtaaggtgaccaacgaacaattgcgtgaaagataccaccaagtgagacattttcgctcattatttacaaataatatccatttctaacaataagatttgtcatctcgtcaccgcagcggatggtgcacaatcattttatcaacttgcgaataaccaagcccgaaccgaatcaatggatgaagcaattcagcttgacaaaaagaccaaagaagtatttttattattttattagcatccaatgccgaaattaaggcatgggttgggcatgaatatctatcaatagttgataattcaagtggttcgtttgacgaaaagatctccaaacttattgctgatgtttgtgaacgttttggcatttcgatttcggatcgtttggctccaaatagcaagtaaatttttataaatttggtttccataaatctaaaattccaaggaaacggaaatggttggtcagcagtatcgatgacagcgccttcttgaaaatgaagaaggaggtatttgtaattgaggatgcttacctccatatggagggttcgagtcaggtaaattttacttattacagcgtgaaatttatgtcaccattttctttgacaattttcatttctggaatcgttttacgtttctcattatcgtttanatttttcgcgcatttttaccagaaaacatggaaactgtagttccccatccctttgtgctacacctagggctacaagtttatctttgcaggttcgacttcgctcgcgtagccaaaatggaaagtacacgtacacacatacgacccgaaccattgaagacgctgatggcaagaagtaattttcgcctttaaaaaaaattctcttttgcaaatatagacttccccaaccggttgaaacacggaagcagttggactggcatgagtatcagatctacttgaaacttcttgacaaagactatcaagcaattcgcaagaaacgtgtgtgttttctcttcggaaatgtggtaaatcgaataccttcaaaagtcactagattgctaaaagaatatgcttttcctttcccagtattttaacctggacatttacattgcacctcttcctccagctttgatgtacaatgaagaacagctgatgatcctcgaggcaattaaatatttgccatattttatagacaaaaaacattgttaaaaatgtctttttatagctcgattaactttccagacatacaccacgcgccctattggtgatcctgagccgcgtttgcccgattttctcgaaattgatcgtgagataactatggagtcagcctactcaatgtaacagcagcaattctttccttcaataccattgttgtgcatgtcactgtttaaggcttaacttggctcgcaacaacccggggaacgtgacttagcataaatggagcagtgcactgaattaaagaaacgggcacaagaaaagcgataattttatcagatcgattttggtagttctatgtgcatgttccatgcgaggcttaagaagccacgactaaattttataaatctggtgtcatgaagatgtattttaaatttgttgttttatgctaaatattttactttgaaatctttgcgcctacttacaattgacctttagtctgttactaaaatgaaggaacgaacagcaaaaaagaagcaaattgacgttgaagatgatagtcgttttatggatttggcgaaaaatccaatgttccgcgagatgcgcaagaagaagcacaaagttcaaatcgatgacaaacacaaagttatcttttgattaagcccgtttatacaattcaaaa

SEQ ID NO: 74437 - DNA, 529 bp, Heterodera glycines
atgcaaatgaataaatatttgcttatgcctaaattaaatccaaatctgaatggatgcgtgagtgggtcaacagtgagcttcactgccgaaaaccttgagaaatttttgatttgcaattacaaaaacaacagataaaatttatgaagaataaaattttttaaattaatttgcaccccttgctaatattgatatttaattcttttattttactccttcaatcttcgtaaactttttcgtatacttttcattttaattaaaatttttatgtaatactgatccgctaaaaaatccattttttaaatttgtaattttaaggttatatatattaataatttcagctcaatgactttatttttttgccaaaatttaattttttattaaatattacaactatataactctttttatataaaatttatatttaattataaattatttgtatttcattttgctcaaattttgtatcattctctcatagcattatttttcttgaacatgagtgtttcttataattttaaggcctaataaa

SEQ ID NO: 74438 - DNA, 685 bp, Heterodera glycines
atgacactggttagtttgttaacattgttgttggtctttctcattattatagtcttatttgttagctatttttcttttttatgttccataggtaattaaatattttagatttatttaatagtttctgactatttaaggcaattgttttattatttctaatataataatgctttaatattcctattttttgaatattataataaaaaaataaataattagttaaattaattagtattttttaatttattgaaaaaaatataaaattctattcttggtcttttggagtgcttttttaaatgtggcttttttggcaaatattttaattaataaagtttatttaactaattgtgttttttctaaatttaaaattactttaattaaacattattcttttttttaatttttgatctattcaattttttaatgttttttcagctttttattatttttttaaaattattaactccacaaattaattttttaattgaattgctaatataaaataataataataataataataataatataaacacgtttttaattataatatatgtttatcataatttattattgagatttgattgttttttcctatggttttatttttataaaataattatttaaatgacggtcgagaatatcttaaaatttattgtttctcattaattctcgcataaatgca

SEQ ID NO: 74439 - DNA, 3710 bp, Heterodera glycines
atgcaacgactcgaattcgaggacgggagcgaaagcaacatggacccagcaaatgagggccatcgcaatggcgcacagcacgacgaaaatgtgcaggacggggatggtcccgtcgcttcaacgaacgaagagcaacaaaaagttgccagagtaaacgaagcaacgagaggaagcaacatggcgacaggcttggcgacaaatcagcaagggatgctacccttcccatcacgcaatttgcggagtgtatccataccggtacggacagcgcgggacagaatcgagagagcatccgggactctcgtcgctcgaattgcggaggctcgagaagtgatcgaccaagaccttaccgaaggggaggcaggctaccaagcagcgcgacttttggccatggagagaggactcaaggaggcaactcaaatcttccaaggacatttcgagattggaatggcagcagcgggagcagaacccgcaggtcaccaggacttcttctacgacatactgacagcgccactgccggcggcaacgaaagagttgcagttgcgaaaccatccaacaccagctgaactgcttcaaattgcggacgagcacatcggagacttaaggacgatgcgactggcactcgaggatgaagaagaagcaatcgcgcggtcccgattgagcgggtcattcgggaccaacaacagccatccggtgggggacgacccacctccactggaaaatcggaacatggaagaatgggagagatccttccaagtggcggccaaacgatggcaaaacgacggacaaggtgtactgcaacacaaccgaagaccaatgggacgagtcgcgacacccgtcatgtcgaatttggacgggatttttcagcggcgtgccaaagtaccatccgtcgccagcatgagagtgacgaacccagcgcgagaatggatcaatcgaaatcgagacgagatgggggcgtttcccccagcaacagcccatcggccggcactgatgcaaccaaaaatcgaaaagcagcaggctcacgtgaacgacgactatcgggagcgtcagacatacccgattcgacggcatgctcgagacgagggagaacatgatcggaagcacgggagggacgaaatcacgggaatgacaacattcgagactgttcggctgcaaccgccgactttttccggaaagcccgaggattggacgacattttgggcctatttcaagcgagctgtggacgacaaacccattcccgggtttgaaaaacaattgcatcttctgcgctgcttaaaggagggatcaccagcccggcgggctgtcgaagtctaccctccctccgacggcaactacccggtggtcgtgcaacttttgaaagaacgattcggcgacacggacgatttacagcgggcaattcgggcccggcttcttcatttggcaccggcaaaggacaatgtgaacagcttgacaacgatgatcgacgaatttgagcgatgcgtttgccaactcgagcagctcggagcgaacgtggacgacgactcatttggcccattgctggaggcaaaattgccggtgcgagtgctcacggaattgcggatcagagaaagcatgatgggatcgaaatggtcagtgcgcgagttcaggagagcggtggcggcgcaagtacggtgcatgcggtcagcagagtcagcattggcagcaatgaaagacccggaagtacgcactgatcacaaaacagaacgtgatcagacgggactggatgttcaagcaggtcgggaaccgtttcaaagagcatttatggtacgggacagccaaccaacccgtgcacaatccaacggaacacgaagcgaggagcggtacgggacgaacgcccgtttcgccagacgatcgatcacacatgccaacgagaacgagagctcaggcgggaattggccccgtgtcgcatcaaacggaccaattgccacaacggagatatggaactgttcactatgcctaagaagtggacatcgaccaagcaaatgccaagcctatccgacagcacaggcacggaggaagagactcattgagcagaaacgatgcttgcgctgtatgagctccgatcacttatttaaacaatgccaacgagtaaaccggtgcaacgcattccgaaaagacgaccatcattggcttctgtgctggaagagcatatcgggtggccaatcccgatccttcactgagcacgaacgaagggcaaagaaccatgcgacgctgatcagtgggatggatcgaccaactcacttcactgaagtgcgagacgagcagaacgttcgagacggaatcgagacgaacgccggggaacaacgggctttcaccactttcggaagccgactcccggcccagcaaatgatatgcagagtgatcgcagctgcagaggaaggcgaagacgagtgccaaacaactttgttgcttgacccgggaagccatgtcgacggcgcagatacggagctaattcaacaactcggaccgcaacccatcgacaagcggccgcttacagttcaagtgttcggaggaaagaagcagcggattcggtcagcaacttatcgcctacgactcaaacggaccgacggcaaatgggagagcattgaggtgtccgaagtacctcagatctgtacgccaatcagaacagaactcatcgagtcgggagcaacacccgatagcgacccgcgaaccatcacacagacaacgcaacctcaaataatgatcggcattcgaaagttctgggattacgtgatcggatttcggaaaattgagagtggcgcgcatgtgattgacaccgtgtttggacaagttttgtgcggcgaaggcacacaagcgagcagcggggcaactcccgcggcatcaatcctaacaaccatgccatgcggaaatatccaccaaactcgaacaaataaacgacaacaaatcggagaagtacgtcgaaattggaagcgaaaacgaaagagtcggaaaaacaattcgcgagggattgttagccgagaccgccacaactcacctgcagagcttggtcccgatcggtcgggtgcgaacgaagttattacgtctcgagaggagccaattggggaaatggaccctaaacagcgaaagtggcccatcggacggatagtcgagacaaaaggagcgagcgaacataacagaaatgccatgatcagaatggccaacggacgaactcggagacgaccgatcaagaaaatttggccgctgaaagaagcgcggccaaaaacgggcgaaacggacgaccgagctgacgaagcagtacatgaacgactcgaagaacagcgagcaaccgagactcagagcaaaatgagggatcggaacgcaccctcggcagcaacggagaacgagaaaaaggaagccaagcgaaaaaatatcgaaaagcgaggacgagaagttaaagctgtacagcctgacgaaaaggcaaatcgacaaattcggaacgacaattctcgagggaatggccctcacgactcggacgagaaatacggcagcgcaacgacgacggagaaatcggcagttttcgaaaaagcggcagaagtgccttcggcaacacaggaagaagcgggaaattcggcaaacccgcattcggttcagagacacgagaaaaaatatttgggagatagttcgatggctcccagtctcctcaatgatcgtgccaagttacaaacgaattcgacggaatctcaaggaggagatag

SEQ ID NO: 74440 - DNA, 594 bp, Heterodera glycines
aaggggtaaacatcccccgtggcccttcttttgtttgatgggcacaaatttttgtccaaatcggagttgttgatgaatggaaaggccgtcttttgttgttggccggtcgtttttggaccaacaatttttgaataaattagtgaagtaaaaaaatgtgaaaattttggcgaaaatgttggccgaagtgaggaaatggtggggtgaattgacgaaatgtccgaatttgtgatgagacgggaattaaaacccgttccgactgcttctccttttccgatcagtgccacaaatgcgagagctgccagtgatcggtagagccgaaagtgggggttgaatttgatgaagacgaaaagcgcggccaaggcgatgattcccgaggccacggcgataagcagccattgtcccgtcgagagcaatcgaagaagtggaaaggggtcaaatccccaatttggcattgtcagggtgaacgtgctgcccggctcgatgtgaccgctcgctgagtctcgctggctaaagccgaattgctgctgtttagggatgaaagcaagccccccttttaagtttaaattttgttgtccccgccgggcatttcacttg

SEQ ID NO: 74441 - DNA, 9237 bp, Heterodera glycines
atgcaacgactcgaattcgaggacgggagcgaaagcaacatggacccagcgaatgagggccatcgcaacggcgcacagcacgacgaaaatgtgcaggacggggatggtcccgtcgcttcaacgaacgaagagcaacaaaaaattgccagagtaaacgaagcaacgagaggaagcaacatggcgacaggcgtggcgacaaatcagcaagggatgctacccttcccatcacgcaatttgcggagtgtatccatcccggtacggacagcgcgggacagaatcgagagagcatccgggactctcgccgctcgaattgcggaggctcgagaagtgatcgaccaagaccttaccgaaggggaggcaggctaccaagcagcgcgacttttggccatggagagaggactcaaggaggcaactcaaatcttccaaggacatttcgagattggaatggcagcagcgggagcagaacccgcaggtcaccaggacttcttctacgacttactgacagcgccactgccggcagcaacgaaagagttgcagttgcgaaaccatccaacaccagctgaactgcttcaaattgcggacgagcacatcggagacttaaggacgatgcgacaggcactcgaggatgaagaagaagcaatcgcgcggtctcgattgagcgggtcattcgggaccaacaacagccatccggtgggggacgacccacctccactggaaaatcggaacatggaagaatgggagagatccttccaagtggcggccaaacgatggcaaaacgacggacaaggtgtaccgcaacacaaccgaagaccaatgggacgagtcgcgacacccgtcatgtcgaatttggacgggatttttcagcggcgtgccaaagtaccatccgtcgccagcatgagagtgacgaacccagcgcgagaatggatcaatcgaaatcgagacgagatgggggcgtttcccccagcaacagcccatcggccggcactgatgcaaccaaaaatcgaaaagcatcaggctcacgtgaacgacgactatcgggagcgtcagacatacccgattcgacggcatgctcgagacgagggagaacatgatcggaagcacgggagggacgaaatcacgggaatgacaacattcgagactgttcggctgcaaccgccgactttttccggaaagcccgaggattggacgacattttgggcctatttcaagcgagctgtggacgacaaacccattcccgggtttgaaaaacaattgcatcttctgcgctgcttaaaggagggatcaccagcccggcgggctgtcgaagtctaccctccctccgacggcaactacccggtggtcgtgcaacttttgaaagaacgattcggcgacacggacgatttacagcgggcaattcgggcccggcttcttcatttggcaccggcaaaggacaatgtgaacagcttgacgacgatgatcgacgagtttgagcgatgcgtttgccaactcgagcagctcggagcgaacgtggacgacgactcatttgggccattgctggaagccaagttgccagtgcgagtgctcacggaattgcggatcagagaaagcatgatgggatcgaaatggtcagtgcgcgagttcaggagagcggtggcagcgcaagtgcggtgcatgcgatcagctgagtcagcattagcagcaatgaaagacccggaagtacgcactgatcaccgaaccgagcgtgatcagacgggacgaggaggcaaagcaggtcgggagccatttcaaagagcatttatggtacgggacaaccaacaaacgcgtgcgcagcccaacggaacacgaaaagaagagcagtacgggatgaatgcccgtatcaccggacgaacagtggcacgcggcaacgagaacggacacaaaggcgggaatggaccccgcttcacgccaaatgggcctcctccaagctgcgggagggggaattgttcgctttgtctgaaaagcggacatcggccgagtgagtgccgcgcctactcgacgcctcaggcacggaggaagcgattgattgagcagaagagatgtctgcgctgcctgggctctgatcactcatttgaacagtgccaacgaccggttcgatgtgacacgtgccgaagcgacgatcatcattggcttatgtgctggaagaaccaaccgggaaaccaatcccggcccgtcggagaacccgaacgaaaggagaacaaccacgcgatgctgatcagtgggattaatcaacccacccgcttcactgcagcacgagaagagcaggtcaatcgagaagtggccgagatgaatgccggggaacaacgggctttcaccgccttcgggagccgagtcccggcccaacaaatgatacgcaaagtgaccgcagcagcagaagagggcgatgacgaatgcctaacaacattgctgttcgatccgggaagccatctcgactgtgcagagactgagctaattcaacatctgggaccgaagccgaccgaaaggcggccgctgacagtgcaagtttttggggggaaaaagcagcggatccgatccgcaacttatcgcctgcgactcaagcggatcgatggcggatgggagagcattgaggtggcggaagtgcctctgatctgcacaccgatcagaacagagctcatcgagtcgggagcagtacccgaaagcgacctgagaacagtcacacaaacaacacaaccacagctgctgatcggaattcgaaaattctgggatttcgtgaccggctttcggaaaacggaaagcggcacgtacattgtcgacacggtgtttgggccaattttgtgcggcgaacggttccaagtgagcagcggggcaactcccgcttcgtccgtgttcatgaccttgccatgcggagaagatgaacgtgatcaaatgccgccgatcagagcagttgagcaattttggtcattggaagcaatcgggatcagagacgacccgacagacgacgcggatgcacaagcagtgatccaattcgagcgatcagtgcgccaactcaacgacgggcgctactcccttcgactgccatggcgggagtgccaccccgctttacctaacaatttcagcatggcctatcgacggctaacgacaatgcttcaacggctgcaaaggactcccgaggtgctcaagcagtacaccacagtgatcactgatcagctcaatgccgcaataatcgaggaaacgacgatcggagccggtaaacgcgaacacttcatccctcaccaagcagtgatcacgcccaaaaagctgcgggtcgtctacgatgcgagcgcacacacacgaggggcaccttccctcaacgactgcctactcagaggcccagtttggttgccggatttggccggtatgctcattcggttccgagcatgccgagtgcctgtgatcgccgatgtcgagaaagcatttctcatggtcgggattgaggaggacgacagagatgtgtgcaaatttttgtgggtgcgcgacccatttcggccagtgacaacggacaatttggtgacataccgatttcgacgcctcgcatttggactcacgccaagccccttttgtctcgccgccgttgtacgacaccacctgcgcaaatacgactccaacttcgcggaggaactcattcgggacacatacgtggataatgtgctcatcccggcggacactgcggaagaagcagccattaaaggacgagaagcgaaacgaatgtttgcggacgcgcggatgaaccttcgggaattcttgagcaatgacgagacactcaacagcagcttttcggacgccgaattcctcggcaagacgacggccaaagtcttgggactcgaatggaatgcggagacggacaaaatacgaatgaagtaccccgggagcgaacccggcactccgatcagcaccacacgcagaacggtgctgagcagcgtcgccagcctgttcgacccgctcggcttggtctgcccggcgaccctcaaggcgaagctgttcttccaaaagctgtgggacgacaaccacgaatgggacactcctttgtcccgggaggaagctcgagaatgggagcacattttggcaagttgggagggggaaagtaatgtgattcctcgaggcgtaacggcgggcaggggtcacccgcttcaactgcatgtgttcacggatgcatcggaaatcgcatatgcagcagcagcttacatacgaacgggaggagaaagcgggtgcaactcccgcctcatcatggccaaatcacgcctcaagccgaagaaagcggctaccacgttcacaataccaagaatggagctgatgggcattctgttgggggtccggctggcagcattcatcgaaaagcaactccaccatccaatcgcggggcaacacatttggagcgactcaatgatcgctctccactgggtcagaacggcttcagcgcaaccacaattcgtggccaatcgactcttcgagatcagaaaagcgacagcaacgacgtttcactacattcgaaccaacgaaaacccagcggatttggcaactcgaggggaagtgcccaccctcttacaacacaatgatcagtggtggaatggtcctcaatggttgcgcgggccgagaacggaatggccaagcgaattggagtttcagcctgatcaagagggactaccctctccggcggggcaggaagaaggacaatcagcattcattgtccgaaatgaagcatccacaggcctcgagagtgaacaattcccgagttcgttgcttacgaggtgcagcaaatggtccagagtgcagcgcgccacagcatggatgcaacgcttcatcggaatcgtaaaaaagcggatcaagaaaaggcggggaagcgaaattggaggcccgccgatcatcgagactgaaaaggcagtaactcgaggatcgaaaggaaatttagaaatcgagtccagaaggattgtaggtcaaggcctccacaatgtgcctgcgaaatttgagcccgatcggtcgggtacgaacgaagttattacgcccgaagcggagcgaattggggaaatggacccaaaccagcgaatgatcaaaatcgaagggaagcatttggcatcgctgcgggcctgtgaactccgagaagctacctgggctctaattcgtgccgttcaagggcaggggtcaatgacgggatccgtgaaaaccgagccggatcaccgagggattcagagactgatcagtcgtatcggacagtgtgacgagccagggctgagcagcccgatcattctgccgagaaagtcacgggcaggagcacttatcatcgacgggattcacgagcgcctccaccattcgggagtggacggaaccttggctgagtttttgagggggtggtggtcccccagcgcccgacaacaagtgcgcaaagtgatcggacagtgccgaacgtgccgacgaatgcaaatgggagcatattcccttccgccaatgccgccgctgccagccgatcgagtgcaacgacgactgccattcgaatcagtagggctcgattaccttggccccacagcaatttcggacgagaacggacagcggagaaaatcatgggtgttgctgatcacctgcctgacgactcgtgccatttacatcgaggcgactcgcgatttgacggctcaaagcttcatcatggtcctccgccgcttcatcgcaaggcgcggggcaccctcccgcatcatcagcgacaatgccccgacattcacaattgtgggcaagactctcgcggatttcgggatcacaaatgccgacccgatcagcttcgccgactcaaaaggcatccaatggcgcttcacccctcagcatacgccatgggcagggggagtgttcgaacgagccgtccaattggtcaagagggcattgcaaaagaccctctccggcacagtactcaattacgacgcactttcaacaattttagccgagattgaggcgacaatcaattctcgacccctcacttacgtcaacagcaccgcgggtgatccactcccgcttcggccgatcgatttaattcaggaaaacacacgattggcgatcgaaccaccgcccgagcctcaaattcaagccgttcagagggagccccctcatcttcagttggcgcgtcagtggcgagactcccagcagcggcttgagcatttttggaaacgatggcatcgagagtatttgttggtgttgagagataaagcaggctgggcacacccagcgcgacgagtgaatgctcacggcacaccgcagatcggcgacgttgtgctaatcgaggacaaattccatccaaggaatttatggcccatcggacggattgtcgagatcaaagggtcgaacgagcacatccgaagtgtgatgatcaaaatggccaatggaaggatctggggacggccaatcaacaaaatttgcccattggaagaagcacccccaaaaatggccgaaatggacgaccaagcagatcaagcagtacaagaacgacaccgagatgacgcacgggcagccgagactcggagggaaatgagggatcgggatgcaccctcggcagcaacaaaagacgaaggagatgaaagcgaagaaagtgacgaaaaacgaggacaagaagttggagccgtacagcccgacggaagggcaaatcgagaaatccgggaagacagttctcgagaagagggccccaacgattcggacggaaaaaatggcggcgaaatggcgccgcagaagtcggcagtttttgaaaaagcagcagaagtgccgtcggcagcacaaggaaaagcgggaactttggcacacctgcattcggctcagagacatgagaaaaaatatttgggagatagttcgatggccccaagtctcctcaaggttcctaccaagtttcagccgaattcgacgagatctgaaggaggagataggtttggcgcagacggacctcaagcagttcgggcaggcgaaatcgggggcgaatttcccgaagcaccagcggtcgaacagcaccaaaatgaactcgaacaaactcccaacaagcccgtggaggaagtacacgacggaaaagacgtccgagaagttcaagcagtacctggagctgaacaaaggaagtcggccaggactcggagaaaccgggagatttggtccccggagcgtcatgttccacgaaagcgaggcgtaattaagcccaaaacaggaatggcactactgatcatgctcatcagcattgtcggaacgttcggctgccagccgtcaattcgatcatcgggaatggacccgaacctgccatttcaagaaggcccaaaaatgccatgtaccatggaatgtgcaaaacgaggggtcataattatgagtgggcgggaattaaataaactcgagatttgctgcgccgacggatgttgggcgaccatgcccaagtcgacggatgtgaactacgaattgccggcggaagagctgatacatggctatcattgccatggcaaatgctggtgggggaacaatgcccctttcaacacaacgaggcggtgccccgcaaaatcagaatgtgatctgatccaatgcgcaatttgctgggagcaattcgctaatccacgctgcttcccccggtggacgatgacgatggtcgggatcgggatggcattccttctcgccataatgggatgcatatgcccaattctcggacgattttggtcgggagcagcagctcttggcaaagcaattgcatggggagcaaagtaccccattcgtctcttcaattgggcgaccggaagacaaatttcgccgccaacagcagcacaagtcgagattaagctgaagagaggagcgagaaaagcgcgcacgagagttcgagagctacagcaacagcttcaattgtcacgacgggcccgagcagccgcgcacgcatggagacaaccggaacggaaccaattgacagtccgaggaacggtcgcggcggggctcctcccgcttcttctcctaattggcaccacattcgcctcaaagccgctctcggtcactgtccgatcggaggactgtgcccgaacggccaaaggacttcaatgtgccggaactgccgccacaatcatcaccttactgccagccgatcaggtcaattcgtttgtgatcagaacgcagcaggacgagctcttggggacggttcgactcaggttggcctcgatcacaatggtttgtgtccccaaaacggagagttggctccgatcatacacaatctcgactgtggcagtgaaaaggtgcccatcagctgggtcgtgccgcgacaacaactgcagcacaatgaacagtcgagtgatggtccccgaactcaacgaactcaatcaccggcctggccattcaatgtgcatgagcagcacaagcttctggcacaattcctgtgggcttccatcagcttcgtgcctgttctaccggtgggcggctgtccccacctcgaccacggttttcgaggagttcagctgcatcgaatgggacctacagctcagcgcatggatcgaaatcgagacaaacaatggcaaaatcgagactcaacggcttatacttcacccgggggtgccggaaaagtgggggaacatgaccatcgcggtcatacccacctcactcccgccaatgccaatcctctcggcatacttcatctcggacggacgagccatggcgatgggaaaacccatttcttcggatttgcactgctcggacgaagaagcagcgcgaggcttcgacaaatgccaattggcgatcgggtcatgccaaaaatgcgcgccgaatcacgagaacggaactgttcactgccattgccgcaacctcgagattgagcgggtgctgaacaacccggaacaccgcctccctctcgacgttggacggctgcacgttcacaacaaagggccaacagttcaagcggagttccaatacaccccagtgcaggttcaaatccaactcaacgagctggagctggtcagcgaatacagcaacacgaagtgctgggtcggctcgccccagctcagcggatgttaccggtgcatttccggcgcaactttcgaagcaatgtgccggacggattacggcactgcgctcgccaaaatcaaatgcgcagatggcacaatgtttggcttacactgcggggggaatggcactacgacgactgagtccatccccttcgatcgatcggaaattttcactgagtgccaagtgaaatgcccggcggggacaacaaaatttaaacttaaaaggggggcttgctttcatccctaa

SEQ ID NO: 74442 - DNA, 657 bp, Heterodera glycines
aatgggttttcccatcgccatggctcgtccgtccgagatgaagtatgccgagaggattggcattggcgggagtgaggtgggtatgaccgcgatggtcatgttcccccacttttccggcacccccgggtgaagtataagccgttgagtctcgattttgccattgtttgtctcgatttcgatccatgcgctgagctgtaggtcccattcgatgcagctgaactcctcgaaaaccgtggtcgaggtggggacagccgcccaccggtagaacaggcacgaagctgatggaagcccacaggaattgtgccagaagcttgtgctgctcatgcacattgaatggccaggccggtgattgagttcgttgagttcggggaccatcactcgactgttcattgtgctgcagttgttgtcgcggcacgacccagctgatgggcaccttttcactgccacagtcgagattgtgtatgatcggagccaactctccgttttggggacacaaaccattgtgatcgaggccaacctgagtcgaaccgtccccaagagctcgtcctgctgcgttctgatcacaaacgaattgacctgatcggctggcagtaaggtgatgattgtggcggcagttccggcacattgaagtcctttggccgttcgggcacagtcctc

SEQ ID NO: 74443 - DNA, 1874 bp, Heterodera glycines
atgcttcgatttcgcaaaagtgcattgaatttcactaaggcctttgccattgtggaccaattcattcgcgctcaaatggcattgccacgcggcgctggcgtgtcctttgttcgccttgaccgggacgactttcacccgctgtaccaggtgtactgtaaaaattcaaaaatgcatgcattactgtagccaaaaaataaagcaaacagtacagtagtcgattgattgcacattaatcgctttttgccatttaaacatgaacagatttccgtgttgtcaaaccatccggcaaactttgacgagtccgagtactgctccattatgtggtccgtatttcgcaaaatccagcaacggacaatcaatggtcagaaaggcatacatttgtataatttttaattataatatcatccatttctgattatattactataacttccatttttagggtcttgataaatcgctaattatttcttaattagacattagacaccaatgaatttagttttgatcaatttatatcattcatttctttttaattttatatgatataataaatagaccttttaccatcaccggaaaccgaaaaaatgaatatttttttttgccgaacctaatcagttttcaggattttctgtctatttaattacaggcctattacgcaatttccttaaatttcttctcaattacccatatgggtggagataaaaaataaatcatggatataatcctataaatccctttgcagatcatctgccaattgagtaccagccaacggacagtgccgaattcttcgatatccgtccaaaatgttcaattcagctcggcattttgcactggaaaaccgtgttcaaagcaattggcttcattgtattggttggcattgtgctcggcttaatgacctattcatattatcggcatagtccaaggtaaagcaaaagcttttgatctgtaaaaagcaaagtgatcgaatcgggcgaaatcatttggccatttgaaaattctgccaatatttgatcactctttaatttttctgatcattaaatcaactgatcggtcgatccttttgccaacagatcaattgattttcgtgtcgataattgatcactctttaatttttcggatcattaaatttaagctttcgtctttttgttcacgatttactgtcaagagagcaccatgcaatacaagtcagttggcgaaggacacatgaacatgttgaagtgatcagagaagaaatcgtaagtcgtctaattttgacactttcaaaaataaacgaattttggcagaggttgcctaaaatttatatgaaattaatcataaagaattcatattcaaaagaaatgggttgttttaggatttatggttaaatttttggcaaatattggaaaaaaactttaaaaatttgaaataagataaaggcatacattcataattggcagagctttatacgagttagatgaattttgccaaagttggtcttaaaatttatatgaaaataaagaaattaaatgtcttaaaatagatattattatagcatttacgattaaaatagaatttggcaagtattggaaaagccttgaaaaatttgtaattcgtgatcgatcaaacagttttgtgatgccatctttggcatttttttttgttttgtttaggaagaacaaaaagttgatggaaatggtggcggcggtggtgcttcatttttggctgagtttgcaaaccgagcattctcatggaagatggaaaggaaggataatgatgatgataatgatgatgaagccaaagaagaagccgccgatgtcaactcacagaaagaagcattagctgctgatgaaaaagggcaacaggaaaaatagaaattttatgatttgttaaaatta

SEQ ID NO: 74444 - DNA, 810 bp, Heterodera glycines
atgaacaaccacacaggtgtccgtgtaatttgcaaatgggtaatagaatggggtcgacttaacggcaccttgcccgttgctccaaaaacacgcaattccgctacgttatggaattcattcgtaagtggaaaatttcgatttttaggggtgtatctttcttttttaagtcgatttttagggatgtatctttcttttttaagtcgatttttagggggtgtatttttggtttttttgaaattccgaattatggggtgtattttacaaaatttttcgccaaaaaattaatattttacgcccttggttccaaccgctctaacaaagtagccactttgttgatgttttagttgtcgttgagcatttctttaaaattcttaaccatcgattatcgggagtttcactaacgctttgtattcttccgactttggccaaaaacaaaaatttcaaaagcaaaaaaaaaaaaacaactaattttttatttttgccggcgttttcaacaaagtaaattacagggcaagaagtaataaattctgggcattttttttaatatgctaaatacatgaaggaattttattactatgtattaatgcttttttatttaaattaaaagctttaaatattataaataaatttaattaaagggaacattgttttaaaaaaataaataaaagagtttcttgctttttgtatgaaatgcattaaataatatgaattaaaattgaacaaatatatcataaaaattaattagcattatcttatgcattgattaacgagtacaaaaaaatattttttcagctcctctcaaaacggtaa

SEQ ID NO: 74445 - DNA, 1109 bp, Heterodera glycines
  unsure (1)..(1109): unsure at all n locations
atgtttaaaattttcattttgttaaacgcttttttgctgatcaaattcgcaataactgatgaggaacaagaagttcacggtccaccggatgtacattatgcggatagcgagaagattgaggtaaaaaaaaagtaattaaacgcgatgctcgagaatctcagttttgagtcgagaaattcggaatctttaaaaaagcggtccgagtcgttgatttagatggccgagtcccttcgcaaaaattttggttgacccccccccctcgctttttccatgtataatctttggagctttgatctagttgtctcgtatctaatctcacgctcatctctcgagtctcgagagcttttcggtctcgagcataattagtaattaaaaataatttgacaaaattccttaattaattattttgtttaattaaggaactcgcctctcgtgccgtggaccaaatcaatcaagagaccaacaatacgttcctgtttttcccggtgaaggtgctttgtgccaaatcatctagagtagctggaataaattttgaactgcgagttttggtcggacaatcaaattgtgcgaaaaatgtaagtgcaaaacggggagaaattggcacaaaatggtgaggtcggcatatgttttacaagggggaagggctgtaatttttgggaaaatcgggagcacagaagtggaataagccgagatcaacagaccctggactgacatgttgaaaatcgggtttgtatcggagatttgcttttttaactcggatcgggaattattgggattagattctcaaaaaaaatttaaaattaccatttaaagcaaagttaaattacaataatggtagtttttaaagcagccaaaggcaaagcacacaaactgtacaacggaaactgacctgacagcacgaaaggcgcggactaattaattatttaattacatgctaattagcctaattatctattcttcaggtatatgaangtgagtgtgttgcagcaatcttcgaagaatttggagttgattaaattcaaacaagaaaaagtgggaaatgcgacagaatgttagggacaaagcgaccctaattaccaaattagccatttaaagcaaccatgtattta

SEQ ID NO: 74446 - DNA, 1225 bp, Heterodera glycines
atgtcatcgtcctcgaagcaggagaatccgattgaacggatgaagcatttgttgagctcgggcgaggacgcggacattcactttttggtgggggacggagacaaaaaagaggcgcgatttttttaaatgaaaatttcttttttttcaacgtcctattttattcagattctatcagctcacaaactgattttgaagcatgcttccgatgtttttgaggcaatgtttcgtttcgactcacagaaagaaaaaacagaaaatggtgaaaaaaaattttttgatttaattttttttttttgaatttagcctctgccgtcagtcccgtggaagtgccagatgttgagccagcagcattcaaaatcatgctcagcttcatttactcggaagatttgagtgaattgaacggagacaacgcaatggcagtgctttacacaggtgaaaattggcagcaaaaatttttttgaaaaaaaaattcctaggaggctggtaaattttttcggggaaaatgaatagcgccattcgaaacaatccgtttttttcttccaactcatttataaaagcgatgaatgtttactgaaatacctcatgtcaggcccattggcgtcattttagttaccattaattcgaaaaaacaatttttcgttccagccctatggaattagtaaaaaaaaaaaaaaaattttttttttaatcttttcgggagggagggaacgatgcgggggactgatccaggggtggggatagtgtaaccctttgacacccccccccccccccccactttcctgcgccggtctccatttttaaaattttgatatttttgaaaaaattttcgactcaaattttaggaaaatttcgatttcaaccaataagatgtttagattatttccgattgttttttagcaaaaaagtacgtcattgatcggttggtcagtccagctgtggaaattccaattgcacagctgcgcagtgttttcgaggcctttgctctgactcgtctttatgacttggaggtgacgacaacaaaaaaaaaaattttttttaacttcaaaaattaacacatttttagcatttttctcatcaatgtttgcgttacatttgtcaaaatgcagccaaattgttcaaatccgagggatttttacaaattgatcagaatttgctgtgtgaattattcgaccgtgatcagttgatgatcagcagcgaatttgaaatttggaaagctgtaatttga

SEQ ID NO: 74447 - DNA, 400 bp, Heterodera glycines
atgcccctggctatgcccttggtcaaattcttaaatttatgcccacctttgcacgaaaggtaaaattgcagccatttctcattgctttcttcatcaattccaatttttgccgatattttccacgagagtccatttattgacagttccatttcactgttccgttcatttcccacttcctctcgtgcaaattcagaaaatttctcaatttccatcgccaatgtgcctctgctgctgtttcctttggctgtgttccaatcagaaatccgagtttaggaaatttcaacgggtaaagccccccgggcacaccacgaaaaatttttggataaaaattgaattgataaacgccgacaaactcatcattggacagaatgccggaaggaactgcaaaaagggaaataaa

SEQ ID NO: 74448 - DNA, 656 bp, Heterodera glycines
  unsure (1)..(656): unsure at all n locations
atgaacccagaagttcaagcgggattggcccatttcagcctggtgggccaaattcgaaaaaataacaaaaagtttaattttatttttgcccaatcggaattccaacataatcgggaggatttgaatctcccgtaatcaaatcgcggcataatgccaatccagatcccgaactttttcaaaattgcgcccgaaaaacatgatttttgactattttttcattaatttaagcgctaaattttctttcttttggcattttcacaaaaattcattaaaactcggtttttctctgtcaaaattttttagtctttaaatttccaccattttccccaaattgtttcagctgacgcacggatttggtggtccatcggtgcaaacggtgcttgaaacaatggtcagcgtgatcaacgagtgtaacggtgtgctcactcggaattgccaatcgccgattaatgccgccgccgccactgttggccaacaaaatgccgttccttccgttggcatttggtcgccctttaattcttaattcagacggaccatcacattttaaacaagcataattagntaaatattttatttgacggatgatgagtgattgattgaaatgatgaatattgnagacatattattcacttttttgtatttcatttttgaataaa

SEQ ID NO: 74449 - DNA, 1033 bp, Heterodera glycines
atgcacggatacatcgtcggcttcaccagctcagtggaaactgatcagaaagagttaatgtgccaaaatgtgatttccgatgtcaaatacattaaacaacaattggccacaatgaacaaatgtgtggcgggcggtggtgccaaaattgtgcgcgaaattgacgtgcaattgacattaatgggtaggttaatcaataggaagcaaatttataaacgaaaattgattaaaaaaagctaaaatatggataaaaattgccaaaatattagaaaaaaaaatcaaaaaacggagttcaaattttcgaaaaatcataaaccattttgtctttgagactaaaaacgaaaaaaatcagtttaattttaaaagaaaagaatgtataattagagtctcaattgaaattctatgaaaataaattttatttcattgagaaaaaaacttgtcagttctcattttttcactttaaaaaattaaaaatttttggaaaatatggaaatattgacaaaaaaatgaaatatttaaaaataaagaatgcaacaaaaaagcttcaaaaagttaatgactttttttattttttggcgaaaaagtgtaaaaaaacgagaaatccattatacctaaatccgctccaacgctaatcaaaagccacttaaccatgatcaaattttgttttttctaaaattttgtatttttttgtaaaaaataaattccaatctataaatgacttaaaaattaatatgtaatgtccaatgaatgagaaaattcttgttgtattattaattggaaaatatttttctttttgaaatattttttttcattacttttaaattaattatttaaattgaagatccgtgtgcctatgcgctcagttttgtccgtgctttgtttgagttagccgcaaaagcgacggggcacctgaaaagcgcaaaatgggaaacattgagcaacaatttcacgaatcaaattgatgtggttgacggagttggacacagttttaatgtcaacatcaacaaaaatgtgcacttcaccagcccggcaaatg

SEQ ID NO: 74450 - DNA, 53 bp, Heterodera glycines
atggtgagcttggcatggcatagatcatctgatcagaatggcaattctcgaga

SEQ ID NO: 74451 - DNA, 1557 bp, Heterodera glycines
atgccctacacacagctgttcaacgtgctcggcttcccggccctggtgtgccctgtcggattgaatggggacggtgagggcaattcaacaaattgttaaaagaaatattttgggtaaaaaataataaatcgaatttttttcggaatcaaaaaacaccaactttatcgaatttgaaaggtttcgaacaattcggactataacactcaaatttgtttgaccatgctgataagtgtcgacatggaaattttaaaaaattttacatgctataagatcttttaaaaagtaagcgaattataaatttaaaaagaaatatttctataagattattgcaacatgcaaaatttcttggaaaaaggagatgttattatttcgaaaaataaaattatttttaattgttaacaaatcaattttttaatgtaaatttattttgagtttgctttttgcattaaaaatttgatttgatggagcctaattgttcaacagatgtgccattgtccgtccaattagtcgcgccgttccatgccgaagctttgctgatggctgccgcgcaggaaatggagagcgcatttggcggatggatcaaagcatgaaacgcagatgatatattaaacttttctaaatgaacattcatgattttttgttgtggttatcactgttatttacaccactctcacttttacacataatatgcaatttgactgatataattattttacttcattttttttttgaattttgaaaataaaattgctttctcatttttataattccgtggcctgctctaaccaactgagctacgggcgctcccttgggtgtcctcccatgtcctttatcccacactcccttccttctggcatcacatcggcaaatccagtaagatggacaaaaaagtattgtgttttaagagtgccctaacagattaagaacttccaggtccccttatcctggtcctttttttgagaagctcaagaacagaatcccgacaattcagtggttttaatcctttaaatcctattctggaatgattctcgagacctaattctggtctctcttgttgtggatgtcaagaactctattcatgatccaaaaagaatttgtttttttatataaatgaacgaattttgaatttaaaataaataaaatatttaatcaaaaaaaattaatagtcaatttcaatctattttattattcacaagatttcgttctgttactgaacggtgctcctaaatttacagaagcaatttggaccagaaatgtgtgccgacgctctcaaaaaaatttggcttttggaagtctcaaatccgagcacaaaaatgtcagtaagcggaaatcagcattccaatacatcgctgatttggacagttaaattatcaaaaatttgtaattttttttatttaagaagccatagaaacagggcttccaacccgactctgctgatttatcatcattttgatgcatttcaaggggtcaatgatgatttatttgtactgatgagttgctgatttttgctgcttaatttgagaaagtttgctgattttgctgaatgccgcaaataaa

SEQ ID NO: 74452 - DNA, 515 bp, Heterodera glycines
tccctcctatctctccttcttccctctctctctctctttctctccttctcccttctctctccttctcccttctctctctctctctttcctctctctcgttccctcctatctctccttcttccctctctctctctctttctctccttctcccttctctctccttctcccttctctctctctctcttccctctctctctctctttctctccttctcccttctctctccttctcccctctctctctctctctttcctctctctcgttccctatctctccttcttccctctctctctttcctctcctgtctcactttctctatcacatgctcgctcactctctgattatctcacactgactgattcagtttctctccctttcattaaaatatttgcgatacgaaaaggccaaattcaagaccactaaatgtctcagaatttttgacaaagtaataaagactgccgattttttaaacacacccgaaagtgtggaccggtgccaaaacaaataattcgaga

SEQ ID NO: 74453 - DNA, 1491 bp, Heterodera glycines
atgggttcgtgcttttccggcgacaaaactgatcagtctgatagtaaacattatgtgaaaaaacgtggcactgatcagcagcaccagcaaaagcaggcactttctgcgtaagtctgagcagtttactattattttttatttttaaattcattcgtaattgcatcaatttatcataaattatggtcacaaaattaaaaaaaattattttttttaactaaataaattttttgaattttcatgttaaaagccaacagaaataaataaaatacaatgaaaattaaaaaaacattatttatttttgttttttcaacaaaagattttctttgctataaaataattaatttaaaaaatcgctattcaaaattttttttcaaaaatacacattttttaaataaaaatctgctttaattcaaatcgctattttgacgcaataaatgcaaagacctctgaaaaactttctcagctataaaaaaatgaaaaaaaaatcactgtccaaaagtttagggcagtttttctggaaaaaatgtgcatgcattcaatccacagtacaaatgccagtgaatcggcgccttttccttccagaatgtccagcttcaacagcagcaaaggtgtcgggcttggcatctcgatgatgatgtaccaggccggcatgttggccgggtgcgcggcgccctcatcaatgggcggaggcgatttgggcagtttgcgtgaccaaatcagaaaggcaaaagcagaggggaggacggtacaaaatttgaattttttaaacgtaccgtaattgtacagagtacagtaattattggttagcaaaagcggaggggaggacggtacaccaaattcaactacatatttatatcataatagtcaatcctgtagccagaaaaaaatttgggaggggggaacacgaagaccttttcttttttttgcttttcaggccaaaataatcagcgcctagaaaaaaaaagaagtttttcgccaaaaaaaaggacaaatttttgccattttgggtctaaattttaaaatcaaagaaaaatggagatccgccgggaaaacatttttatttttaattttaaggcattttgttaagaaaaattgttttgaaaattgccaattttttcttgaaaattttttatttagggtgggctggctacgggcctgttaatagtacatattagagtgccacgggaccggaaattttgggcaaacccgggaccgggaacttttcaggttgaaaacccgggaatttttggctgggaaacccgggaaaaaaccgggactagtcccggtcaaaaccgggaccttggtactcagttgtactcagttgtccgctaccaggtcccggtcccgtggcactctagtacatattgtagcacagtaattattggttattcaaaaatcattgcctactggaggtatatttccggaaattcaattaaaaaatgcatttgtaaatttgtcatcccaaattgaatttaacaaattttcaggtga

SEQ ID NO: 74454 - DNA, 387 bp, Heterodera glycines
cggtagggtcaactccgtctggccaactccgtctcagcaatgttcaaaaagctataacttttttctttgttggccaaacttcacaatcatggtatcattcgaaagccctagatgtttagaagatatttataagctatttcgcagtgattaatcagctctcaaaaaagttgtcagttgaaaaccgcaaaaaaggcagaattttcgaagttttttatttctatctttttttatagttcgaaattttctgtaatttttagtaggctaatagagcctgtgaagagctttcgaatgatatcaagattgtttgattcggtcaataacttcaagagttatattgactcaaagttggctcagacggagttggccagacggagttggcccgttccg

SEQ ID NO: 74455 - DNA, 1619 bp, Heterodera glycines
atgatcgcaaaactaaatataccccgtattaagccaggacaaccaggtaaagttgggcctgctggtgacaggggccgcttgctgaacggcgcggcgccaggacgggccggccaaatgggtccgtatgggccacgcggaacgcctgggccaccgggcaaggacggacaggtgtgtgaaactggcacaaatgccaacatcttttatgccaccaaaatttgcgttaatttagccgggcggtgatggtgcgcgaggaatgcgcgggccgaccggggaccgcggcgacgatggctctcagggcccgcagggccctgccggcatgcccggcttgctcggcgaacctggcgggtgcggacactgtcagaggggcagtactactgctggcggtgccattcaagccggtcagcagcgtaacaacgtggcaccagtgccggtgccacaatcttccgctacaaacaatgaaggccgtcctgtcaatgctgcagttcaaatgacaaatcagcaacaacaaccgcaacaagtacaacaacaacagaaacaagaattgcaagaaccacaaccattccgacaacatgctgaacagtcgtcgtctgctgccttagggtgtgaaacagaatgccaaaaaaaaaaaaaatttgtggcaccagaatttaaaaaaaaaatgaaattacatcaacaatgaatcagttttccgggggatttcccaaccaaaagcaactaaatttttaattcttgatatcgccctattctctattagcctaaaaaattgcaaaaaatttcgttaaatctgaacaataatgtggtcaaaagtacacagttaccaagttttcaaatttgatcataactttgttcaagcttaatgaaattatttgaaattttgcaggctgatggagaactgataaattttaaagttttcaaaattttcaattttagacagcaaggctcagatgtccaagcaacacaagtgtataaggcacaggcacatgcggcacctatttcatcaaatatgccaaaagcagcggcacaaattggccgaccagcaattccgttgccaatggcaccgcctggccaactgccgccgtccaccgtaatgccaacggtaactgttagtggcaaatttgtcgggaccggctacagtaacaacaacaacaatggcggtggttatggtgccgcggtgatggcagccaatcaaaatgaggaaatgatggaatatttggaggaagtgcaacaggcaagtttgacattgaatgacatcattttatatacgaattagtgccgtaattttccgagggcagatgaattcgcgcacctcggatttcacaaaaaaacatatataccgtatattctctaattatcccccatggggagttatttttcgatctcctcataaaagggggggggggggaggaattcaaaaaaaaatcactagttttttggtgcccataaaattgaaaagatgccaaaaaaaattataaattcattttgtatatgtatttaggattatggacaaaaggcaaatgaagcaacaaagggaaagaaatgaatggcatttggcatttaaaaaaaattaattgttgtttaaaaagatttttaatttgtttgaattaatttaatttaataaa

SEQ ID NO: 74456 - DNA, 471 bp, Heterodera glycines
atgtccatgatgctgtccaatgtccagcaatgtcaggtgagattgaaatgccaagaatttttatgccaaaacaaaaaatgccatttaaatttcgcttaaacatcattagaatttaaaatgatcattttgctcaagcatcaatctgccaaattatggcaccaattgatcacgcccgatgatgcgcaattgttgtccggcacaacggaaaggcaaaagcgtcgcaacggcatgccattcgaagaagaaagcagaagcacgggaggcttccgaggctcatgttgtgcatgcacacaatgtgtcattttgtagctgaccttggtcgaaattcgtagcttttttttattactttttataaaatctattatgcttccgaacgccatcaaaattttctcctcgagaaaactatttattcaaatttttttaattttcaatttaattcctatttttaaaaattatctacactatattaaa

SEQ ID NO: 74457 - DNA, 467 bp, Heterodera glycines
atgccgtttacatttaaagatggcagtttttatattaaaaaagcatctgcgtggtaaaaagcataatgttcttaaataataaaaaattaaaatatttttataattaaaatattaatttatttaaaatttaattttctggagagtaaaaataaagatttagcaattgtttaatattatggtgagaatctttataattggttttctcatttaagcacttttaatttaatttttatgaactcctaattaatttgtccatttataaattatatgtatttactaaataagatattaatttacaggataacagagaatttttatggcttcctatattctattattgtttatacaacctttttggttaatcaaaactaacaatttatatgtttaaaattaaactcattgacttcagtaatactattaatgattacagcattatcaattgctatttagattaaatatattatata

SEQ ID NO: 74458 - DNA, 3522 bp, Heterodera glycines
atgaaaacgtcaaccggtgtcgaactcctaacaagaaatactgttagtattgaagcactaaccactaaaccacaaatatattggaaattaacagcaaaatttactttatttcataaaaaatttgtcaaagatggttaaaaattcaaatttgtataaattttttgccttttatcccacgaatatgccattcttaggggtgtattttcacccccgtgcccccgcgggggcgaacgtcgcggggattgctaaggtcagagtcgcgggcgcggggacgggggagaggccaaaaaacctgctcccgcccccggcgggggcgggggtgacgggggcggcgtccgaaccctactatatattgtggaaaaatctgaaaatatatttataaaataggatataacccaaaaattttcccgtacattccgaaaaagcgtaatttcctatgatgataaatacattttgatgaaagaaaattattaacatttattttattcaatataacaaaaaggttaacataaacaaaatagattttcttagacacgaagttggaattaggtttatttttaggtccaaaaaaatatagaacaattcgcatgaatacattttatatttatgattgggcgacatataactagggaattgtttttaagcattaaaaaacattgtttaatcgcattgttaaaaaacaaaaaataaaaaacacacttacttcaaaataaaaaagccaaataaatcattaaaatgcaaaaaaaaaaaacaaaaaatacatccctaaggatcctaaggatcaactttttgagaattttcaaaaaatacaccccttagaatcgacccataatttttcaaaaacacacccctaataaatgaaaaattgctcaaaaattcattctccaaaataatttattttattttcttgacaaaatttagtttttccaaattatttagctcaatactgattttgcttaatttttttacttttttgaataaattttgtcattttacacccctaaatttttaagtttttagaaactattttcccatttttagcacctatggggttttttagaaactaaaaattaattcttttggcagtttttagcatcgataaattgcatctctatttatcactaatttttggatttatttctttaatttttaaatatttcttcatccttcttaattcgtcattatttgtctttggtgctgaaacaaacgtaattaatgaaaaataattaaaatggaatttacttttatgatgactggcattaaatcttttttccagtctttttttcatttgtatattttttcacaactttagcaaattgttaagtaatttcttgtcattttcttcatttggtccttttgctcaatttttagtttgtttatatccatttcttatgccccgaagatttcaaaatttatttaagttttgccgaattagctcaagcttagtcaaattaaataatgttggtattgagcaatagctctaggtgtcccgcaacatgaaactttcttccaatgccaaaaaaattatcaaataacattctatttttcaataaacgtatcaatttctgactttaattgcaaagggtaaagaataatttatgaaattgttgtggtttgtctaataattcgtataaaaattaatgaaacaaagttaattaaacgaacacatcaattctgacttttttttcttttacggggcggcgaatgttaaaatgttgtggaattatttgaaatttgtcaaaaattcagacaaattttagttgaaattaaatctgatcaaacaaattggtttacaataaagattcactcggttcattccttgacatataaaagggtgcaattatcaatggaaatgtcataagataattcgaaaaatcaaaataaatttaaaatttatattactcttaaatgctgcctttaatttcattgtgcataatttttacccaaatttcacaactcaatgccggcttatgcaaattcccaaccccgaaaatgggactagagtttcgtcgtgactttgccggggcttccacttccggcttttggggcaaacaccgggcaaaacgggaattcttttaatcattttccacccatttccagtaaaactataaaaaaagaattcaaatttaaatataaaaatataagaattcaacagaatttttagaataccgactatcagaacactttgtttgttagcggttccggccttttgaacggagcttgtgatgtgaaaaacgccaaactgaagaacttaatgattctgaccgatggtgtcaccattgaaaatgccattttcgacacgcccggttatggcatttactgcaagggcagttgcaccttaaagaacatttagtaaaaaattttaagtttaaatttaatcatttaattttaaaaaatgttgaagctacaaaaaactgtgttatcatgctgttggattagcatacacagacacaagcaaatcgtacacatacaaagtgattggtggcgctggccaaggcactgcagacaaagtaaacaattaactaatttatctcataatcccagagatccacataacgttctcgatataaactcatatacctctaacttcattaaatttaatatttacacgaatttttcatttttagtatttcacccaatcgggcaaaggcacaacaatcattcaaaatttctgtggcgaaggtatgattaaattaatttttatttaaaaatgcaaaatgcttttaataaatacaaatttattcatctttaataaccaaggcaaatacggcaaattgtggtgttcatgcggaaattgtccttttcaaccgaagcgtagcgtcgaagtttataacacggtcatgaagggccccggacaatcggttgtctgttagttaatttttgtaaaaaaataaagtttactaaattaacaaaaattgaacaatttttcatcaaagaataaaaataattttattaaaaaaatatgttagaaattaaaaaaaataaattgtattcaaatcagcataattaatcacaaggataataatcgaattttacaatttttaaataaaacaaccttttaaaaatttaaaagaaatttgtcaataaaatcagcataatttaagtcataaaaaatataaatgtttgaatcacgcagaaacatgtaaatatttcattcttttaaaacatatgtgaatttattttcagcggttaatttaaattacggtgacactgtgctcttttctggactgactttatacggccaaagctcgtcaagcaccgcaactaaatacgcttgccaagtaaattgtttgtttaattctgtcaaataaaattgaaataattttttaattattatttctttaagaatgttaacgcattgacttatgttgctcaattgtttgctgctagcagttttaagccgaccgaatcgggcactggttcttgcacatacaaagcttcgtccattaaaattgcgaattgatcgatgttcaacaaaagaacgaagtttcactgacaaactaaacaagaaatttaattaaa

SEQ ID NO: 74459 - DNA, 80 bp, Heterodera glycines
atggcgccgagaatccgaaatttcgttcaggaattcgtaattgagggcgagaatttttctaaatttgaatggactgccgg

SEQ ID NO: 74460 - DNA, 783 bp, Heterodera glycines
atggccaccactgtcgcctcaatcggtctccaactgcttattcttggcacggttgtgcagctgtcgtacggtaattttggctttattatacaaacactggggaagcacattttctaatggtactcgagaatctcgttttcttgagcgacacgacaaaagttttgggtcttttggttttttgtaccgaattttgcgtgagaagtctcatgtatacggtatttggttcaaaaataaaaataattataaaattttggggtgaatgtttttgttttttcttcagctaagccagtttaatcaactgacaaacccaatgagctaaaaatgggtcctttcgaaattgactgatttatttgaaaataattttttttaaatattttttctatttttttgttgttgcttatttctgttgttgttgttgttgttgttgtagtaaaagcacagcagagctttttcaataaatgatgatgatacctaatcactaccagaatttggctgcatgcattccttacgggctgtcggtcacacgaaaggccaaccgttgccagcggagtacaaaccacttttggagttcgtgagtggtaataacatatcaattaaaaatgtaatgaattttatggtacagcaaatttcgatttttgaaaatgttttttttatttttacttttttttttttttgcttagaaactataaacatttccccatttgaattcagctgatatagtaaatgagagattgcgcggttgttttgacgggaatagttgtgtgacagcgagctgtgtcagag

SEQ ID NO: 74461 - DNA, 443 bp, Heterodera glycines
atggtggtgtaagtgttaatctatttagaagagttttttaactaaacaatttaagtgctttttaacagtattgaaaatattagaaaacacattgaaattgctgttgcgccagcaacaggagcacatgaaactgagaaatggatgaacaatttagacatagcatcagccagcaaattgtttcgaattaatataattgtttgcgaacgtttacaggaaaggattttccgttggcaactttattcaccagatttggaaacatcggttagaacgttttgattgtgtaaattcattttgaaactttagctttcgaacctgagtcaaaaagaatcaacagcatcaatctttttgtattttaatgatggacattttgaactgattaaacagccaatgaagataaattaaattttttgttaaattattgtgtgataacctttctaaataaa

SEQ ID NO: 74462 - DNA, 2142 bp, Heterodera glycines
ttggaatgggcccaattcccggccgaagctgaactgctcgaaattgaggcgaacggaaacgaaatgcgaagcattggcacggaggacgaggcgaggaggggccgaaaactgcgcaaactcgaggcatttgacattcttctgacaaaaaggggaggaccatctccaaatttcaaatttaagttgcgacgaaatcacttggccaatttggccatggattcgcttccgccgtccttggaggaattggacgtgcgcgagaatcggctaaccgaagtgacctttggtaccgcctacgaattggcagacacggcaatggcacagctgaaaaaagtgccgaatgatttggcatttaatgccaaaagacaaaattaaaacaattggtggaatttcttaggtcgacttacgctccaacaaattgagcacaattccgcgcgaactttacgaacgatttgttgtcgcaaatgcaccatttggcgaactttgggtcggaggttagagtcaattaaagcaaaaccaaatcagtcattaattaattccaaaacctaaattccgtttaagataatccgttggaatgttcttgcgagatgaattggctgctgaacgcctcggcctccgcagttggcacggccatttcgcgcaagcaaatcaatgccgcaaagggcggagtaatggacatagaaagtgccaaatgtgtggtgccattggatgggcagcggaaaaggatcattgagacaacggtggggggagggcgtaattaggaatttacatgctgattatcggggggtaattaggaattgatgctaattatgcgggtataaataggaaggatttgctaattgtcgtaattttccttttcaggcctttgattttctgtgcacctattcccttttctgtgccatcggctgtcagtgctgccaattcaacggatgcgactgcaaagtgcgttctcccaaatttcgcttaattgctagttgccttcttaattggccctaattaccccttttgtttagtcccgctgtccccccggctgtcactgtttccgcgatcggagttccgccacaaatgtcgtcaaatgttccggcgattccgtcggctccgattttagtcttcggttcacaatttgcctttgttattttttctttgtcattgtcattttcctcttttcagggctttgccaatgcatgcttctcatgttttcctctcgggactgaatcttcccgtgctgagcagcagcgaatttttcggccggaaaaggctgcgcgagttgcacctcaaccgatcggacattcggaggatagagccaagcgcattcgaatcgctggccaatttaatggtaagagaacgaagcgacgcctgatcggaactcaaccactgttcagtgggtaaatgaatcaatcaacggatcaatcgataacgagtcaattaatcgataagtgatcgctgatcagtgccggccaacaacaaaaaacagaaattggaaaatgacaaataaattagacataatgttgacccattaaattatattttaaatattccgcttccttttcagtccctccatttgtcgaacaaccgactgacgcatttcaatggcagcgaatgcacagaaacagaaaacattcgtttgttggacctcagcggaaacgcattgaccgaaatgggcacagaattgggcgaagtgctgcccaatttggagacacttcttttagcggacaacgcaatggaggaagtgccagaatacctccaggcaaacaacccatattaattaattattcgctaattactctttaattaattagttgctaattattctttaattatttatttgctaattacccttcagagtccctcctctgccaatttgcgtcgcgtttcgcttgcgggcaatccgttccgctgcgactgcgccagcgtcgaaccgtcggcggcggagcggcggaagcgccggccgatggacgcggcccattggctggagggcaacagagggcgcgtgacagacgcgccggggatgcgatgcgtggaaaatgtgacgcgggcgaaggaacgcaacgaaagcacagtgttggccaaagtgttcgcgttgcccaaccacgcggacgaccacctcttctcaatgccaatgctcgagtttctgcgcgaggagaacag

SEQ ID NO: 74463 - DNA, 847 bp, Heterodera glycines
atgcgtcagtgccgtgccggtcaaagtgagccgttccaacgcgtgaagaccgtcaaagaaatgggcactcaaacggaggagagacggcatttgggagagatgaagcagccgaagacggggcgtggaaaggaaaagccgacgcggcggggagagaagccaacggaggagaatgggagaagaggagcaattctgaacaagcacaccgtaacacgggctatcacataacgcatcattccgaccaacagcataccgtaacccatcgtatcccttgcctttttgcccaatttttgtttacagtactctgtcgttttcccaatttattgcttgcacatttttagtttattgtactctgcatccccaattctctaccgtaatcctcaactcctgtagctcgtcgaacccgtcaaacggtgcttcgtcctccccgtccccgctttgctcccccgcgtcgtttggctttgtccccgtgcattgaatgctcagtgattttgtgccgccgcgcggaaattggccaaacgaacgcaattttggccaagcacagatgacaatgagcagttcatgcttcacatcgtcgggcatacagctgcaactgaaaacggaaagggaagtcaattgcattaattaatttttaagtgccaaatttggccaatgaattggcactttccgtcaaattttaattgcctttttctcggccaatgttcggggaatggcattcgtttggcacacattcatcaaaatgtctctctccctttcacatataaacaaaaatttgtttatcgttcgttgacaatggagaaaaatttaaaattaaaaaattttccgtctcataaaattaggcgaaccaaaa

SEQ ID NO: 74464 - DNA, 1791 bp, Heterodera glycines
  unsure (1)..(1791): unsure at all n locations
atggaaggaggagggagattactcggcggaaaatttcagattagcattttcaagactttctgcacttatacggagactgaaggaatcgccacaactttttagcggttgtaacgacattatacaggaatatttagagaaaggaataattgaaaaggcccatcgcgctaaaagaccacaacatttcttgcccatcatacagtgatgggcaaaaagcttcgaatcgtttttgatgcttcatcccacgaaaagggtgcccaatcattaaacgaaatgttattttcggggccaaatctctatcctgatttagccggaaaactcattcagtttagggccacaaaatgccctatttgggccgacatagaaaaggcttttctgatggtaagtctgaaagaatcggaccgtgaattttcaaaatttttgtgggtaaaaaatatatttgcaccactttctggggaaaatcttctcgttttccgctttcggaggataacatttggaatagtgtcttgcccttttctattggcagcgaaactccaacatcatttggaagcatttcccagtgagttagcagaggaaatccgggaaaaatctctgctttacgttgataaccttctgcttttggctgattcgcctgaggaagcacgcagaaaggcagccgaagcacagaaattttcgccgcggctaaaatgcgtctgtgcgaattcattgtggctgatccgtcaagtttggacgaaatacctgaaaatgatcgcctccaaaatgaggcaccaacggttctcggagtaaaatggactatttgtgaggacaatttgtctttgacttttcctacagttcttagtccggatggtttaactcggagaacggtcctaaaaacagttgcgtcatttttcgaccccttggggttatgttcgccctgtttggttggggcgaaattgtttttccaaaaattatgggatggttcaaaaagctgggacgatccaatcccagtagaagagaccaaagaatgggatgaaattaaagccctctgggcagcaaaaatgatgcgcatagcgcgcttcacgcctcgaattaacactggcgaaattcaattgcatgttttcaccgatgcatcacctaatgcttttgcctgcacgatctatttgagagctgaaatgccgcagggaattctctcgtcgttggcttacgctcgttctcgtctccgcccgaagaaaatggcggtggaccaggcggatggtctaactatcccacgattagagttacttggaatcctaatcggatctcgggcagtaaaatttgtgcataaacatttaaattatgagatcggacaaattaatctttggtcagattcgcgcattgcgctttcgtggctagcatccaccgataaaatgccgattttcatagcaaatcgtgttcgagagattcgcgccaatcggcacataatcttccgctatgttcgatccgcggacaatcccgcggacctcgccacacggccagtgacacctgatgtgttaaaattatcagaattatggtggagagggccaaattggctcggcaaacacctgaaaattggccggacgaactcaccgtcagcctcccaccggaggaaagcgccatttcagagccaattgtctgcgctccgttgaccactccgccggcagtgttcgatattgaccggtttagttcatgacaaaaactgattagaacggctatgtacgcgttgaaatttctgtcagaaacgggaaaaaagagaaagggaagccccgnaatttagagggactgaaaatttagcccaga

SEQ ID NO: 74465 - DNA, 260 bp, Heterodera glycines
atggcaacttcaatggcaaccgcaatcgccgatcaaattcgactactatgtaagtgtaccaaaatagcagataaccatgggtggcagtttgcacttctcacaaaatcataatctaaatataacaaaaatacgattttcagggttatggctgcgcccgtttgacgctgtacaacaaaagcaaagggatgatgtggtaattgcgttctgaaatgagagaggccagaatagaagtgaacttctgattattgttgacaaataaa

SEQ ID NO: 74466 - DNA, 1273 bp, Heterodera glycines
atgccgaggctgccaaaatattcatcatctgtttgtcgtacattcagcgaacccaaagtttgcagcaacaaatgcaaccgcagcaaaggaacaaagcgagcaaatacgacgtggtcagtcaacggaacgaatgattcgcttcgtctttttcattttgtttgcctcgacagattggcaaaacgaatgagcagctcttccacctgctgaccatctgtttgagtctgcagccgcaacgcatcgacgagtccatccaatcgcaacttcaggataaatacggggaaagaatgctgcgtatggccaacggcgacatcgacgagttccgaaacgccttccagcagggatgtcccaagttcttgtcccccaccactgttgtctacgaagggagcagtgtggccaaagtccgacagacccaaacaacttgaaaatgccactttttctttaggagcctttgcttcgccaatgcaatgcgtttttggaaggcatcgaaagtcaaattagtctgccaattttacgtggctatcttaaactgtagatgaactaaaaactgcattgaattcatacactaatttcagctacacaactcttcccgtccaaaagttggccagtttcatggatattcccgactcggagttggactctttcatcggcaagctcctaacctacaaaatgattgtcaccgaattgggcaaggaaaccattgacaaaaccgaaggggtaagcaactacaaacagaaacaaatcccttcaaaggatttaatctgtctgacttaaggccgatgagaccaccgatttggatttctacgttgataaggtccatacggaatgtttttcttattttcatttttagaatattatatttaggacatgattctgatcgctgacactaaagtggctcgtcgcgtcagcgaatatttcatcaaacaaatcggaaaacttcgtgaggtgaatttggagggggaaagaatccttagagttctcctattctattttcgtttctttctcttttcagatttctcgaaaaatcaaatcatctgtcactcccgttggtcaaatacacaagaattgatgttttgtcactgtaattgttaattattttagacattcattcgttttcgcttggcatgatttgttcttacacattttctgttgtaaaatgttaattcaatcatatcatttggcaccattttatctgctagtacaatgacaatcactgtcaccataaaggtaaagccattgttcccttttctgattttgagggtccaaattagacaaa

SEQ ID NO: 74467 - DNA, 407 bp, Heterodera glycines
  unsure (1)..(407): unsure at all n locations
atgtcctcccaaaatggcactgattcttcccttttggacgatggtcaatggttggacgggcatttccccctgcaccacgcagtgtttgacaacgatgtgccaaggctgggacaattgctcaaagaggcagcagcagcagcaggtttggacattggaaaatgggaaatacgcttaaaactccgtttttattggccaatccttttcagctgaatcttcggtcatcgacagagaagacacccacgggaatacgtcagttttccatagataacatttaaaatttgtttgtccttcctttatatttttaaaaatttaatttttttgtatttttgtttattttagggccatgcacatcggctgtatgcttggccacagaggttcctctgacaatcatttggttgatttngtag

SEQ ID NO: 74468 - DNA, 385 bp, Heterodera glycines
atgagcaccaaacccatccattttgtgcaggcgaaaaattttctcaatttcccaaaatgggtgggcaaaacttaaattttatttcgcgctctttaaattttcattatttaattttttaggacaagatcgacaattataaagcatttctctatcacataaagggaatgcagctaattacaatgaaaaggtgcattcataattgtaaagtaatttaatccgttttgatttcagacgcgagcatttgtcccgtgaggatttggaaaggaacaaaaaaatgcaacttttcttttcgagcggtaaaatgccgaaaggagatgacaacactttggaggatataaatacggaaatccctgagcatgacccggtcaaattcagtgaaatataa

SEQ ID NO: 74469 - DNA, 361 bp, Heterodera glycines
ctcttctctcgcggattctcccctccgacactttcaaaatttacaaaaaagggcatcgccttcgctttgacttttcgcttgtcgattttaacaacaatggcccattgccaaaatggtatgtcggaaaaatgattacttttaccacttttttatatattttttgtttgttttctaagggaacgtggcgatgtgtctttgcttttggacattttgtcaaccgatggacgaaaggcggtgctaatggacaatcggaagagggtcagcagttggatagtgattttcagcataaccaaatgggactttgaatgattacaggtttaccaagtgttgcgggaaaagaaccaaaatctgagcgatgaat

SEQ ID NO: 74470 - DNA, 724 bp, Heterodera glycines
gtagtatatttcatagcggtacaacaacaatttgtcaacggttgcatgagaactgcaacgacaacaattagccgaactacgacaatagcatcaatatcaacaactacaatacccatacaaactacagcaactactactccaagtacagtaacattgactccgactacaacgtctacaacaactacgattccaactacaacaactacgactccaactacaacaactacgactccaactacaacaactaccactccaactacaacaacaacgaccccaacgacaaccagtacaacaacaacgactacaacaacaacaaccacaacaacaacaacaacaactcgtatgtttaaaatgataattttatatataatatagctccggagttatattttggatatcttccggatatttaaagcgatagaaatgcggattttaattgtagtgtgtacggcatgcactgccacattggtctttgaccgtcagcaaggcggaattgctgcaccaactcagcccgcgtgcccagtgaccgcttgcccgggcggcacaaacgcggaaccgttgccgcgcgggacgacaccgtttgatgttcagcaaaacgcacaatgcgcgaatccgtgcgtttgcgacgcggccaatgtgtgctatcagccgtccggggagcgcaacggggacattttggtccgactgaccactcagtgtccggatagctgtgccacgactgacg

SEQ ID NO: 74471 - DNA, 1218 bp, Heterodera glycines
tacagcaatattggctccaactactacttctacaacgactacgactgcgactccaactacaacgactccaactacaataactacgactccaactacaacaactaccactccgactataacaactacgactccaactacaacaactacgactccaactacaacaactacgactccaactacaactacaactccaactactactagtacaacaacaacaaccactactaccactactacaacaaccacaacaacaacaacttgtacattaaaaattattattaatatagttccgggcttggaattcggggaatttgcatgttagttttgtttggacaactgaacaattgcttgagtagtgcgggtaacttggatttcctaatatttatatttagcaaaataatattaaattatttgtaaatgcgcaaattttctaaatgaccaagcgccggtgggtacttcatttctaaaaagtttaatgttgactagaactcaaattaacatttaaatattctcgaccattcctattaaaagagcgatatgaaaaaatgaaattaggattttaattgtagtgtgtacggcatgcactgccacattggtctttgaccgtcaccaaggcggaattgctgcaccaactcagcccgcgtgcccagtgaccgcttgccctggcggcactaacgcggaaccgttgccgcgcggagcggcagcgtttgatgttcagcaaaacgcacaatgcgcgagtccgtgcgtttgcgacacggctaatgtgtgctatcagccgtccggggtactcaacgggaacattttggtccgactgaccactcaatgtccggatgactgtgcaacgactgacggtaatttggcatgaggggcccacccatatagggaatagacctgtgtcttaaaccgagactctcgaattatatccttaattatatgaattaaggttgcacaatccaagcgctggtccgtggcacaagcccaaacacacggggctgtttggcacggcaaggcactaccgtatgcgcttaccaaattggttcaacattcaatgttaaatctgtgtcttgtaatggctgccccaatctggacacattgacttgcggtggcttgattccttaatgcgctaatttttttttgtcaatgacctatttattgttaattaccaaaaataattctttaatcttattcatggcacataaactttcacatgaaaataaa

SEQ ID NO: 74472 - DNA, 1171 bp, Heterodera glycines
atgcgaaaaatgggtgatactgtgaaatgccaacagtttgttaacgtatttttagtgaaaggactgatctataacaaaatttgtggtcagttggctggaggattttaatctcgttgctgcggttattttctttggcaaaatatccggtgaaaatgtgcaatatttctgtgtttggttgaattgcgtggaccatccatcgattagtgtgtggattttgcagtgggtacttttgagagatcgccgcgctatattcacattggaatgggaaagaaatgctgcggttgactaacaacgcgccattgctggggggcgggtggcgagtgaacttaccgctcccccccctccctttcctctcgactttttcaaatgcttttgtttgcctaactgttttcctgctcctatttaatttgactttgttttgccgtatgcattgttaacagaagaagaaatgtgatggtatgtgagaagtgccccccccccctcatctccttcatcccctttatccattttgcattggaatgtttgtcagccgacgattagtgggaagattgatatcttttcactatttaggtcattgatgggcatttcgttaaaaaatgatacaaatcaaagaaataataaaaacaaaaaattgttttaggagcaagcagaacaaagcggcgatgtcgcgagggtgcgcgacttgcagcagcaagtcaacgaattggaagagaaggccaagaaaattgtgattggaaggaattcccgtgttaatacacaaatggttatttttgaggaacaccaaagaacgaagaacttaagtgccatcagtgccatcaaccagcggaatagggaccatatgaaacaaacattccttggtgccggaatggtgcgggaagagcaggagaaggacgacgacccattcacacggaagtcggcgcggatgaaagtggtctcgggatccgtgaagtccaaaaccgccggcgaaggaagtggcggtagtgttgggatatcccttttccttctttacaatacctttggctctagccaatgccgagttatccgttatggacacgatggtttcttcgttgggttcgttgtcgtcttcgtcggagtcctctccaaacaaaaaagtgcaacttccctcaactcacgatttattcaacgcacatggaatcgacataaatattga

SEQ ID NO: 74473 - DNA, 756 bp, Heterodera glycines
atgaacgccaaagtgaaatttattcccgagtcacgaaaggggcagctcaacacacaatatctggccactctcccaggacttctcaaaatcgtggaattggttgacgaaatggccctaaatgtattcttgtcccatttttcagattctgggcttcgtcgcgtttattcttgcaatttgtgccagacgctcaacaaactccgcctgggtagaacacatcacttttgagacgacaattgttgtctccgttttgatcattctctacgtggtttttccacatttgacttttgctgacgaacgcacgcgcgaaggactcattgtcgtggtacgctccgaatgtgttagtgttctaatagaacacaaatttggcaggaaatgttcttttatggaataaacacactcttctttttcattggggttggtcagctaaaacctattttattaacattttgtattcagatttggctaatggttcatttgagtgcgagttttacggctgaaggacgaggagcggccattttgggatcggttggttgagcaaaaacatttgagcaaattctgattttccagattttatgcttggcactctgtgttatttatgcgggagaagcctatataaaattcaaagtgtggacaaatcccgcgggaaaagtgcaacaatcaaaaagccaagcgcagggacacaaccaagtgccaccagcaccgacgcattacgaagagaaaacaatccgacgaaatgaaatggaggaaagggcagtc

SEQ ID NO: 74474 - DNA, 611 bp, Heterodera glycines
atgaagacaaataaaaggcaaaaagtttcttcatcagaagaagaattcgacccgaatcagaaggtgattcttttcaattaataataatcatatatttaaaccattaacaggatgaggattatgacctgctcatggatgacgaagagcgagaaaaattcgacaaaatgactgaaaaggagcgagaaattgaaatttacaagcgactcgagcagcgtgaaatcatgaagacgaggttgggaaagggggaataattccacacaagttttaagaaacaatttttaaaaatataaatcatcgccaatgcttttcagagagaaaataaaaaagaaactcgaaatggctgctgggaaaaaggcagacggagaagttgccgcaaggcaaaaaaagcgaaaacgaaaaatgtccgacgaatcaaacggagacgatgaaagcgacgagaaggactcggcatccgaagcagaggaaggttggtgcgccgaacgagcagatattgggcaatcatggagtttactggtcccgttttttttttctttaaaaataattgaaaaatttttctagggctattttactgtgctgagcacgaatccgaccttatttttgaccgattctga

SEQ ID NO: 74475 - DNA, 338 bp, Heterodera glycines
atgaaaaaatttctttttttgacaattataattctgttgctaccaaatactcatagttcgaacaaacagagacatcggaaacaaagggcagtttcggctttagctcgtttgacagtggctttatcacgtataggcacctacattaaagcccacccgtacattaccgcctcgacaattttgatggaaatgggctcagtttccctcaacatttatttgctaatacaagaaataaaaggttaaaaatctttattttttgaaaagatataattattttagcttgcgaagagaaacagatcttaaaggactttttcccatttgtgctcactctgaatttttag

SEQ ID NO: 74476 - DNA, 218 bp, Heterodera glycines
atgaatcaaattaaagtagatcaggaagaaagcaccaaactttgggattggccattgcaagtaaaataataattaaaatatttaaattaaacgcagaaaaataatttttaaaaatttagtcccatgacgaacttgtgtcaatctacgatggtcgtgacagatgggaagttggcttggacaccggatttttcacgcccaacgaaatcgaagcatgctaa

SEQ ID NO: 74477 - DNA, 886 bp, Heterodera glycines
atgcaattcggaactggcgctgatccggtgcttgaagaatgcgcattttgtggtgaaaaagtgacattgactgatcgattgatggtcgaccgggagacaagtcataatttatcataattatttgaattaattaatcattaattactcaaaatttcaaagcaattaaatttggcatattttttaagtccacaaaaactgcttcaactgttgcttttgtggcgcaaaattgcagccaggagctgctgcaatggaactgtcattctacaaccgttatgggccacgatggtattggcaattaaaaaatatatttaaaattaattaaataaatttataaattattttaggtattgttcgggccatgccggaagttgtgcaatgactccggtggcacaaaaagatgcaaaactgaaggagaaagggctcaacgtcaagaagttcaagaaggccaaaaaatgatcggatggaatctgcaaaaactatgtgatcattcattgatcggcaaatcaatgtgatcattggtcaaactttttgatcagataaattgtcggcaaaattttaattggagtaaaaatggaagtatccgttctaaaaatgtccaacactattcagaaaaaaacttttaaaaaaatacaacttaaaaatttttaagataaatattttgccattaggtctgtgacattgcttgccactgaaaagtggggttgattagcttatcatcatttcccattctaccaagaaactacaatatttcgagaatttcgtttttttttttttttgaaattttagtcgatttttaaaaatttagactaaccataactctactaaaagtggtcaaaagcgcaacaaattttaaaaagaaaatatggggccaaggaaattaaataaa

SEQ ID NO: 74478 - DNA, 647 bp, Heterodera glycines
atggaactgtcgttctacaaccgttatggtccacgatggtatattttgagcgaaaattaattaaaaaatggattttattaatttttgacgaataatttcatcatcgactactaaatctacgattatttggtccttatttggaaaataatttaaaaaccgtattagaaaaggttttttttccattttagtcagcaaagttcaatgttgaatatttgtcttcgagtttttcataaaatttgttgaaattttaaatagaatacataaatttcatatttttcattttttaaaacttccattttgaaaaacacatttctaacaatcatatttatactgttcatctccaggtactgctcgggttcggcgggcggttgtgcgttgacgcccgtttctgaaaaagatgccaaacttaaggagaaagggatgaacacgaagaagttcaaaaaggcgaagaaatgagatacgtcacgtacatacaaacagcagtattcccagactgtaatatttaaaattggttacggtagtgatgatactatatttttcgaaatcggactttgcctagaatttagttggttctctttcatttatgaatatactttggctattgtaatttgatgataaattaaatccgagtttttataattaataaa

SEQ ID NO: 74479 - DNA, 173 bp, Heterodera glycines
atggcctctgtcaacggtcaaacggcacttttcgctgatcatggtcgccattttctccatcgttttggtggtgaacaccgctggacatctgctcgaattaccattggacatcgacgctggtatggtattataacaaatgcaaaaatacttggaccctatgagtttgagatacg

SEQ ID NO: 74480 - DNA, 1652 bp, Heterodera glycines
accgtggcttcgccgctgtctgttcattggcatcggtgtggcaatgtgcaatcagctggccggggtcaactccatcatgtactacggcaccaacattctaattgagcaaggactgatgacaaatgtggcactgactgccaacattgctaatggagtaaaattcataattcaaattaataaaaaattgttaattaaattattttttaaatttaatttaataagaatttaatcaatttcgttgtatttcgcaaaattgtacaccatatttttaaaacaagattgcaattttttctgaaaaataatcaaaaaatttagaaatttatttttatctttttttgaaaaatcaaaatgaatgatattttttaaatcttttcactcgttttttctatcatttcatcaaaaaaaatattgttagttttttcttttaaaaaaatcctctctaggcaatttcggtgttggcgactgggcttggcattatgttgattggaaaaattgggcgtcgtccaatgctgttatctggccaaattggcactgttttggcacatttggcgattggcacctgctcattgttaatggccaagggaatggcaaggcaaaattttatttatattttaaataataatttttctgtacgattttgttttccattcattaaaattgatgaacgaattgaaaaaaaaatttccatttcccagggcttttgtggtcctttctctcaccgtcactttcctcctgttccaacagtgcggcatttccccaatcacttggctgatgcaatccgaaatgtttccgttgcgcattcgcgggctcgccatgggcttgtccacctccatactttggctggtctgaaacttttatatcaataattttttaagtaattttaaaagaccttttaaaaatcaatatattgatgttacttatattaaatgattttaaaaaattcattaatttaaataaatataatgagttttttttcaaattttatgtttttaactaattttaaattaattccataatatttaaaaagcaaaaataatttttatgaaatttataactaaaattatttctcatgattcaaataaactcatttaaactgaggtttgtccgaacccgtagatcaggaagaaaattcacgacaaatttgtcggggatggctgagaaattaaaaaaatgtcggggagcaaccacctcataagggagcaaatttttataaaaagccaaaaatataacagaacttttctaaaagaaataagtcttcaaaactcatttaaagaaactttcatactctttgggcgtgcaactgacaacattcgaaattccccaaattaagtcggagaagaaccctaaaaaaaattttaaaaaaatttaattaattatttttattatctgatgatactgtgtcatagaatatttgtgttactttttgtcccaaggtcaactgtctgctcacgttcggctttcccattctgatcagttgggttggcatgaccgccaccttttacgcgtttgccgtgatcggatgctgcgcgatgcttttcgttttccattttatgccggagacgagacgcaaaacattggaggaattggaacggcaatttcaaacgaaggacatcaaagctttgaagaagcatgggccggtagagggtgctgat

SEQ ID NO: 74481 - DNA, 480 bp, Heterodera glycines
atggataacagcacaatagcaacagatcctcagaccgtactgaactcgcccgttctgcaattgcccgactatttgccctacttggagttgtgcctgaattggattgcgctgatttcgcacggcattaccgcattgaccatgggtttcctggttttggtgagccaattttacttaaaaccgattaagacataattgggtcgggtcaacattattccaacccttcagtttgttcacaacctgatcaaactccagatcagattaatatattcagatcaaaatcaataagcaagacaaactttgtctattcagggaatttgtgacaaatattatgtactatttcagtctcaaacattataaatccgatcaaattatcgaacgccaaagatatgattcgaaaaaatccgacgagttgtgatcaagtcttttttatcaggcacaaaatcatagactcgattaatggtttaatataaaaatattaaa

SEQ ID NO: 74482 - DNA, 1006 bp, Heterodera glycines
atgtcattcaattttaaatctgctgaagttcatgaaagtttgtaaaatgggaaaaaggcattcatgtaattttttttaaattatacttttttaaaagatttaatttaatataattcttttgttttaatattaaaaaatgatttttttttataaaaatggagaattatgtacaaaaaaaaattttaaataataatcaaaaatgaaaaattgctgattaaagtaagaatatttatgttttattctatgtatgaatataaaaaaataataataacatctactgaacaaacaatagcaataaaagaaattttaattaaattaaaattatttttttccactaattaatgaactaaaaaatttttggcttttgtccgtgccaataaaataatatattttttcctgattgtgcttacatcgtctatcatggttaaaaaattcagaaaaaaattataaaaccctcgatagaatttttgcaagatcaaaaaagaggcaacgattgaatttattaaaccttttttgtaaattcatttatttccattttgtaatttttctcgattttctaaaaatgctcatttgtcatcgattattttgtcaatcatttttggattttgtcgttttgtttttcaattcacttttttcaatttttctgttttaatcattttttacggcttaaatcaattgtttcttccatttcgaaattttattttttgatttgatgagaaaaaataaagggatttttgttttttaggattaattccaaaaacaaaatcagatatagccaatatgaaattctacactgatccatatattttcaaacgtgtccttatttttatttcatgtttgtcctgggaataggaattttagagcattttttaaaattattgtttttgttgtaaattaatgtatatatatttttaaatttgtcctgttttggagaaaattatcaaaggcatttattatataaaagatttatttaaatatgataatattaaattaagttatgctttta

SEQ ID NO: 74483 - DNA, 918 bp, Heterodera glycines
atggaggtggacaagcccatggcgagcccgcgaatgcgcaacggaaacatttcggattgcatcagccaagtgattggggaaatgccgcactgttggaacaggaggaaagtgacggtgagagaaaggaccacaaaagccctgggaaatggaaatttttttttcaattcgttcatcaattttaatgaatggaaaacaaaatcgtacagaaaaattattatttaaaatataaataaaattttgccttgccattcccttggccattaacaatgagcaggtgccaatcgccaaatgtgccaaaacagtgccaatttggccagataacagcattggacgacgcccaatttttccaatcaacataatgccaagcccagtcgccaacaccgaaattgcctagagaggatttttttaaaagaaaaaactaacaatattttttttgatgaaatgatagaaaaaacgagtgaaaagatttaaaaaatatcattcattttgatttttcaaaaaaagataaaaataaatttctaaattttttgattatttttcagaaaaaattgcaatcttgttttaaaaatatggtgtacaattttgcgaaatacaacgaaattgattaaattcttattaaattaaatttaaaaaataatttaattaacaattttttattaatttgaattatgaattttactccattagcaatgttggcagtcagtgccacatttgtcatcagtccttgctcaattagaatgttggtgccgtagtacatgatggagttgaccccggccagctgattgcacattgccacaccgatgccaatgaacagacagcggcgaagccacggttcacgcatcacatcccttcattgataggggtaattatgattaattccaacaaaattagtaagaatatttttattatggtagtata

SEQ ID NO: 74484 - DNA, 2253 bp, Heterodera glycines
atgaacaaggaagaatggaataatgaatggaaagttcaaaaaatctttcgtgaaaaacacgactaccttaaaaccattaaagaaatagatgaaattctcgatacattaaaagacgtaaatttggaggtaaaaaggagattaaaattacttaaagcaaaatcatcttcagactcagacctggaagatgaatcaaatgattatgaacatgaaaatgaagacgaagtagaagaacaagaagaagaaaaagaatatgaaagtgacaatgaagacgaatcgccagaactctccttgaatgaccaaatacaccatgatcgtacaccatttgtcaattaccgatcaagaataaagcttccaccccaaacgcttacgcattttaatggcaaattctcccaatggcccagtttctgggatgatttcaaatcctcagtggacaatgacccaaatttagaaaatatacaaaaactcaaataccttcgagggctcttacatgatgaaccgtacagaatagtgtcaccgtatcctcttacgaataaaaattacactatcgtaataaaattactaaaatcaaggtacggaaacccccaattaatcagagaaaatcttcatagcgaattacgcaacctcaaaagacccactgaatccacaattgaattaagacgatttattttgttaattgaccgaatcattttacaaatgaaatcccaaggggaagacataaatcaccctcaaatcaaacaatcaatcgaaacgaaactcccctataacattagacttaaattgaaggaaaaattcaaaatctattcaacaaaagaaataatggaatttttgaatgatcatacccaagcacgtgaagacatagaaagaatggaagaatcgaatcgccaaatccggaatttcccctctaatagaccaccccaaaacggagtacagagacaattctatccaaatttcccacacaatcaaatgaaaccaaacccacggaatcaacagaacacatcttcctctccttttccatatacttctgcatttacaacgaaatcaaacccagtacgcctggcacagtttaaatcaaatccaacacaaactagaacacaaaataaaatattttgtcgcttttgcgaaagagaaaaccatgcaagtaaagaatgcaaaatttattcaactcccgaaaaacgaaatgaacgtgtacgtgaactcaaactttgcctaaattgtctaaacaagggacatatggtcaatgattgcaaatccacttatttatgttttaattgcaaatacaaacataatactctcctttgtacccgcaaacaaactcagtacaaaccgaaagagcaaaaaaccagagtgaatatggctaaaaattacgaaaatcatgaagagacacaaacattcatgacaatggattatgataaaaatttatctaattatgaggaagaagaattacttatgactgctgaagtaaactgcataaatcccgacaaacataaagtaaaaaaggaaataattttatttgataatgggtcacaaaagagctatataaccgaagaatgtgcccaatctcttcaattaactacgattgaggaaaaattattagtaatttccactttcaatcaaaataagccaaaaatcattaaatcgagactagtcaaagttggcattaaaacattaaaaggtgaagtggagtacataatactacaaacagtggaaaaaattactgatgttacaaaaatggttaataaagaaaatgttgatgtactcggagtaaaaatcccaatcagtcacgcatctcctcaaattctaattggaatcgaccattattggcatttcatgttaccaaattcacaaattcaattacttccatcaggattttactcgataaatacaaaattaggaaaaatattatcaggaaaaggaactattgaggacacaaattgtaactcagtgaccgaaaaaagaaaaaaggatgaaacaaaccaaatacttcagaaattttgggaattagaaaacattggaattatcgactcaccacatatgacggatgaagatgcagcaatgatacactttgataaaaatgttacatttaaaaataatagataccatgttcgatggccttataaaagagagaacccgaatttactaacaaattttggattatgcatgggaagactaagaaatgttgttaaacaactaattaaaaacaaacaattggacaaaaaagacagaatatgcaagaacaaatggatactgatgtaa

SEQ ID NO: 74485 - DNA, 601 bp, Heterodera glycines
atggacacattggacggatgggcaaaagacgcggccaaattgggacttggccaagccgaactcggagcatttaacgcacttagggaagtgctgagcagcagcgactccaagcaaattttgggaatggcggcgaacgaacgcggaatagacggggcggacgaagcggcgcggagacggctgagcacgatcaaaggcggagtggacagcccacgggtgcggacattgaccgaactgcccaaaatcacattgagggccaaaaagagtgagttgccaggagagggcattctgatctgtgatcggacaactcaaacgagcagaattatggtcggagggatatgacaaagagacgagcagtgcggaggaggaccaggacaacgcgaagcgaagggtgaaaacggttttggccaaattggaggagggcgaagagagcgaactgttcgagaagatcacgccgacagactacaaacggttggcgcggctggacgacaccttcaccaccgaacgattcgaggatattttgacggatttgaacgggaaaagcgtcgtcgaattgcccggggggcttagcttggctttgaaagatgctgctggatgtgagtga

SEQ ID NO: 74486 - DNA, 350 bp, Heterodera glycines
atgcgctttttagaatgtgcagcacatgttcaaccatatgaacaaggcgaaggcgcaattattcgtcgccgaagggatcgtcgacgtcgtcgcggaaacggtcagcggcgattcaaatatgctttttggatacttataacaattaagtccgaatatgttgccaactcggtcattttgttgtgccaacgccacggactcttttcggatgtgactttgccaacaattaatcaacggagagacgtggaaagtgccacatcgccataggataaacgttgtgctgaagaaagcgaaaaagccatcgtgggtcggattatccagtctctgatttgatttttaaagcttacaatcga

SEQ ID NO: 74487 - DNA, 529 bp, Heterodera glycines
atgagcccacagctgcaaaaagcgtcgattgtacggcatattgagagggaccacccggggaggagcagcgaagagttcgactacaattacccggcattttcaaggaaaatccatcacaaattggccgaatgtttcccgatgcgaaatgccgaagtggtaaatgaatgggaatttagtggaatggaacaaattgtcatttttcagagccaacaattttgatttctgttgaaccaaaagctaaggaggatgaaacaaacataaaattgatgatgatattgataatgtgacagatgattcttcatttcttatccaactattctaattccattttttcctttcgtggcaatggttttaatcaacataagggggggggggggggcttacctggcaaatctccgaaattttgtaagaaattttcgtatttaccccccacaccccttggatttaaaaccacgaatcacaacctttaatatacacttaattcacaatctcatgtataaagaaatcctttgatttatctaataataaa

SEQ ID NO: 74488 - DNA, 1412 bp, Heterodera glycines
atgaataaaagattaaaattgtaagcacgtaaatcgaccattttataaaggcttttattatttttttaaaatttttttttgatgagtttaagccgatttttattttcttgcagtttcatctttacgagcccgtccacaggcacttgccgtgtccggcacgaaatgaccaatttgtggccaaagcggaactgttggccagaatacgaaggtacatatattctttgttttttttattccggagagatttcgaaaagaatttggaatttggaattttaattttttttttttttttaattttcagcgcggacgaattggcacaaaatcgaatggcacgggcggcgtacgacacgctgtgcagcttctacaaactggcggagagcaagatcaaccaggcctatgttgaggaggtgggtcgaccgagagccgggttaccctaaagcgcagatgccggtccgggccgtagtttgaaaaaacataccctccacccctcggatttttttttgagcgattgaaaaaaatttttgacaaaaacttagtattcctcataaacatgaaaaaatcgttaattttttaaatttcttatataaactactaaagatttttgtttaaaaaataaaagttataaaatttaaaaaaaaaaaatttttccgaggtgaaatgatgcggaaggaggtgggagaactatttttctactggaaaaaactaagaaaatttaaaattgaaattcaattttttttttaaattccggaggtgtggggaaatacggcaaatctttgttcatgaaatatttctttgtatttgtatcggcacagattgtcgacgagcgcaagtggcgcttggaattgcgctggaacggcttcatcaacgtgtacgaggggccgcgcacggcgcgcgagttggagctgaagcttgtggccaggcaaaagacggagaggggcccattcgacgaggtcaaaggggccgacccgttgagcagaggtaacggcagaaagtgcaaatttaaaattcggaaatcctttttctctcgtcgcacacactatctttttcttactctcttaatctcaactcctctctctgtctccttcacttactctctctctctctctatttctctttgtctccgctcctctcgcttactctctcactcactttctctgtctctctctccatctctaacactctctctctctttctctctcgcactctctctccccttctctctctaccgcacgctttatttccgctcccctctctctctctcgctccctctctttttactcttcgtccattttgtcctaatcgtctctaatattttatccgttttttcagcggatcggtcccgtttggatgaacttgcctctttgttgcgtacggaagtgaacaaatcggtgagttccgctgccgaccgatca

SEQ ID NO: 74489 - DNA, 533 bp, Heterodera glycines
atggctggtggcaaaggaaaagcgggcaaggacagcggaaaagcaaagtctaaggttgtgatgggtaaaaattttaaagcgcgccaaaaaaacttttcaaaaatgttcgcataattttttttttttttttgcagaaaatcatctctcgcagtgccagggctggcctccaattcccggtgggacgcatccatcgcttcttgaagaaacgcacaacaagcaccggacgagtcggtaatgtttggcgaattttcggtgaaaaaaaattttaaaaaaaaaataggcgccaccgccgccgtgtacagcgcagccattctggagtatctgacggccgaggtgttggagctggccggcaacgcgtccaaggacctcaaagtgaagcgggtgacaccgcggcacctgcacttggccatccgtggcgacgaggaggtgagcgagagggtgcgccatcccggcattggggccggaaaaaattcctgaatcgccttggcacttttgctgttgggggcccacgaaaaaatgccaaaggggggacc

SEQ ID NO: 74490 - DNA, 753 bp, Heterodera glycines
atgtcacgtgttttggcaattacggaattttctgaatcacacacagggaaaaatattgcgctcaaaattgaggatttattgctcaaatggggtattcctaaggaacgtgtgcatgcaattatctcggattcagcagccaatatgaaaagagtgataatctaattaattttctttacacttgctcttatttgcaggcatttgttgagagggatgaaaatgaaaatcgaattttgccgatgccaaacgggccttgcgctgctcatttattgaatttggctgtacaggaggcattgaaaaaggatgaatcaatcagcagtttattggccaaaagtcgtcatattgttggacgtttcaaacatagtaacacagccttcagcgaattgaaaaaaattcaaaaattactcgatgccccctctcacaccttttgcaggttaaagttaattacaatacacttaattttatttatttctaatgtcattcagatggtatgtgtccggtggaatagtgtgcttacaattaattaaattcctcaagaggagaggtcatatatccccaagcgaagcggaaaccatgattgaagaaatgaaaaatattcaaagacaaccaccaatattttttcaatcaaagtagtgtaacttacttttttttatgcattatttttttcttataagaatttggtataattttaattgttattggaaactttttgttaaagacaaatttttaattatttaactgtttaaaaataataaa

SEQ ID NO: 74491 - DNA, 1591 bp, Heterodera glycines
atgaataacacgacgaaagaaggaattgaggtgttacgttcatcagatgagactaatgacactctttttcatcttttgctcctttcacattatgcatttgccttccctgtttttctactctgttggttcataataattaaattcctcaagaggagaggtcatatatccccaagcgaagcggaaaccatgattgaagaaatgaaaaatattcaaagacaaccaccaatattttttcaatcaaagtagtgtaacttactttttttatgcattatttttttcttataagaatttggtataattttaattgttattggaaactttttgttaaagacaaatttttaattatttaactgtttaaaaataataaattattgtttataataaaacttaattcctgttattaaaaaaaaagtttagtctctcgccgccacacgtccgcctccgcagcgcttgtggtgaagcaaagggaaaatttttcaccatttagtcaacaattatcccattcctttcaactcaccctgtggccaagtggttaagttcctcgcttccactctcaacggttcgagtccactaccatgtttttgatttttcacaatttttcggaattttcatcataaagtcaacaattatcccatacctttcaactgcccctgtggccaagtggttaagctcctcgcttccactctcaacggttcgagaccgcgaccatgtttttgattttccacaatttatcagaaaaagtccgcgcagctctcgcgcatttaaattaattaatttaaatttaaattaatttaaattaattaaattctcgcgcacaagtccatccaataggtttcggctgaagggatcaaagatcatccaataggtatggggcgggggggggggtccgaaaatatggataaaattgaaaaaaatcgataatcaaagtactcgtacattgtagtttcaagttgaattttttaattctaatgtttgcttctttataattattaaataatgtcttttttgtttagattttatgcaaatgagtcttatttggcaaattggcctatttaaaaaaacgtccaagactacagcaatttgtctcgagtgccaatcaaatgaaaagccgaaatatgaattcaagctcaccaaaggaacggtcaaaagcttgcacacccatcttcactgctttcacgaaaactccgaattctctgaaaagctgaatgctcttgaatcgaaagctgaaaaggagaaacaaaaacagaagccaatctcagactttcagtcgtcctgcggaccgactttttcggactgtaattcagccaaatttttttaaattatttaatttttgtttcagcacaactctcctcgtttgataagaaaattcttcattttttggtgacaaaaaacatttccttcggcgctgtggatcaccaaacttttcattctttatttccccatcaaaaagtgaaaagtgaaagtttctataggtgatgagttacattaaaagttatgagaaaattacatttttgaaattttcagaaaaactgccttgccaattgtttaccaacgtgtcagacataaaatcaaagatgaattaaaagaataa

SEQ ID NO: 74492 - DNA, 533 bp, Heterodera glycines
gaaaagccgaaagggaaggaaaagcgaaggaaaagccaaaggaaaagaaaaggaaaagaaaagcgaagaaaagccaaagtaaaagaaaaggaaaagccaaaagggaaggaaaagcgaaggaaaagccaaaggaaaagaaaaggaaaagaaaagcgaagaaaagccaaagtaaaagaaaaggaaaagccaaaggggaaggaaaagccgaaggaaaagccaaaggaaaagaaaagcgaagaaaagccaaagtaaaagaaaaggaaaagccaaaagggaaggaaaagcgaaggaaaagcggaaggaaaagccgaaagggaaggaaaagcgaaggaaaaggcaaaggaaaagaaaaggaaaagccaaaagggaaggaaaagcggaaggaaaagccaaaggaaaagaaaaggaaaagaaaagcgaagaaaagccaaagtaaaagaaaaggaaaagccaaaagggaaggaaaagccaaaagggaaggaaaagcgaaggaaaagccaaaggaaaagaaaagcgaagaaaagccaaagtaa

SEQ ID NO: 74493 - DNA, 686 bp, Heterodera glycines
atgcatttggaagtccgatactgcgcgataggccaaatcttcatgaatgggcgatgcaagcacccgcaaagtcgctacaaaagacagggagtggccggatcaggtcattaaggaacgaggcaattagggggcaagacaattagcggaatgggggattaaaggcgaaaaacatcggaggtcattaattaacgttagcatttaatgaaactcttacataaaaactaattaaggtcgtgtcggtgatttctgttcttttaacaccgattgtcttacggtactctgttactgtaattgctttttcaactcaattgctcagggcatgttctgttctgtcggcacctgcatttgtctgtccaattttgtggccattcagggatactgttacctgagtataacccatttctgaggataattcttcggtttaattgaaatttcagaaaaaaacccgggcgaatcaggctgccaatatgctggttaatttcgacccatttttggtttgttgggtgaatttgtctttctttctcatttcagaacaatgtgccgcggtttggccggaaagtcgctgtgagaagagccgttgtgagtgtccagaggatgtgaatggcattccgtacgttcagtccaagacacgggacggcgtcgtgtgcattttgcactcgggagaagacggggacccggtaagataa

SEQ ID NO: 74494 - DNA, 1856 bp, Heterodera glycines
  unsure (1)..(1856): unsure at all n locations
ggggaatggcacgggagcagaggagggttaaatgggggacaaggggaatggcacgggagcagaggagggttaaatgggggacaaggggaatggcacgggagcagaggagggttaaatgggggacaaccaatggggaatggcacgggagcagaggagggttaaatgggggacaaccaatggggaatggcacgggagcagaggagggttaaatgggggacaaggggaatggcacgggagcagaggagggttaaatgggggacaaccaatggggaatggcacgggagcagaggagggttaaatgggggacaaccaatggggaatggcacgggaacagaggagggttaaatgggggacaaggggaatggcacgggagcagaggagggttaaatgggggacaaccaatggggaatggcacgggaacagaggagggttaaatgggggacaaggggaatggcacgggagcagaggagggttaaatgggggacaaccaatggggaatggcacgggaacagaggagggttaaatgggggacaaccaatggggaatggcacgggaacagaggagggttaaatgggggacaaccaatggggaatggcacgggagcagaggagggttaaatgggggacaaggggaatggcacgggagcagaggagggttaaatgggggacaaccaatggggaatggcacgggaacagaggagggttaaatgggggacaaggggaatggcacgggagcagaggagggttaaatgggggacaaccaatggggaatggcacgggaacagaggagggttaaatgggggacaaccaatggggaatggcacgggaacagaggagggttaaatgggggacaaccaatggggaatggcacgggagcagaggagggttaaatgggggacaaccaatgggagaacgggggaaagggtcaaatgccaacattattatgactggcgttgccaacaacttttacttcctatttcattaaggttacgtcaatttggcgatttctgctccgtctctgaagactgtccacccgccttcgaatgcattgacaataaatgcgaatgcgaaagagagaagaagccaattggggagcaaaagcaatgcgaattggcgggggaaagacacaaagagggaaaacgacgaggagcggaaaagcaaaaacagaaagccggggaaaaactgcggaggagggcgatcggagagacatgccgcaacaacggacagtgccaatggaacggggcaaaatgtgtgcggagaaagtgccaatgcattggcggaagggcggcattcagaaaccgatgccgaagtgagcaatcaaagcataatttagtctatttatttggctcttggttattatttgctgattccactttccgcaataggaaatgtctgtgatcgcttccattcgccccaatttggcccttttggcaccgtcgtcccatgtgccgttcccgtctcgcgttccaatcgctgtctgtggccccaccgctgcgttttctcgcctttgcttcatttttacatttgttgccgtttggcggacgttcgagtcggctcttcggcggtcataggaacaattgtaataaaatcgccgacagaacggcgaacggagaccaaagcgaatgcgcaacaacattttgttgggtcgaggaaaagtgagtatccattgccaagggccttaccaaatcccccccaccgggggacaggcgggggaaaggnncgggggctaatctaatccccctcccctctccctacgccctttccgttgcgacgactggtcgcgggtttttctgccattgtcagcctattagcangtgctttgtccgctccccgtctcacttttccattgaatcctcc

SEQ ID NO: 74495 - DNA, 757 bp, Heterodera glycines
atgacccactttcagcatttgcaacagcaagtccatctgttgacacaaaaattagaagacgaagagaaacgagcaaacattttggccaaaacttatggagacacccagaagaaattagcccgttcggaagttagacttcgccacgttcagcggactgttcaggaattggaagcggtccaaatgcaatttcgaattgccgtcccttcctttttgtaatgatagattttcaggataattttgagcttaacaacgaattggaaagatggcgcaacatgaagcagtcgtcggtgacattggacgatggccttgaagtgtgggataatgacgaagagaacaagacggaggacgaagaagaaatgagagagttggaggagcagggcaaaggcaagacggagcaggaggacgaacacatggaattgcttcaacgtgaaattgacaaccttttggtagcaattggaaatgcatctctattttcgcaaattcaaatgaaccatttcctcaagacggactcgggcactttctcttcgcgcagttgcgataccaacggtgtcaactactgcgatcaaaacaacggcaccactgtcgaggaaagtggatcggcgataggccctttcgacatctttggcggcttttctccttttatcaaagcgtcactgtcgcgcagccaaagcgaatcgaagccgacgaattcttttggcagtctcgctattaaacctccgactttggcaaacactcattgtcagttcaactacaacaa

SEQ ID NO: 74496 - DNA, 702 bp, Heterodera glycines
gcaacttcgcatgataatgccacaaccttcggtggtgtccaaaaagaattcaccgacttcacagaatgatgtaaaacttaacatttaagcagtgtgtttggcaacccaaaatttgatttgcttgcagaaacgaatggataaattggaaaatggtgagacgaacacatcatcattgtgtggggatgaagaggagaaacctgcaaagaattaccttcacaagacccaaatttgtcttttttggaaggcatatgtaagtggaaaaagtcggactaaatgtcgtaacggcgtcaactgcaactttgcgcatggggagaaggagctgaagaaattggaccccttctactttaagactgaactttgcgaggtcggtggtcaaacgttcggctaaaatattttttccattttccagttttggaatttggacgaaccgtgcccttacggcgacgggtgcaatttcgcacatggaccagatgagttgcgtcagatgggagtcaaaggtccctttccattgcgcttttccaaatttgatttattcgacccgtcaaatttccaaaaggtccgaagtctgttgctaaagcgccgtctttctacaataatcgtcaacgtctgcgtaagacgcgcaccaaaactcagactattcagccactcgcgagctatgggaaaccggtagaacagaaagtcacaattattaatggacattga

SEQ ID NO: 74497 - DNA, 121 bp, Heterodera glycines
ttcttctcacacttctccaggcgcacaatgctcaaattcttgaagaacaaaaacagcgacgatcagccgagtggcggggggagcagcgcggggggcaaggaaaagtcatcggctggcaatt

SEQ ID NO: 74498 - DNA, 396 bp, Heterodera glycines
atgtcaatcgatgcaaattttgtccttaacattcactctccgacgacgacaacaaataaacgggaaaaagccggcggtagcaacagcagcagaagcgcatcggatggcacaaattcgcttaattcggccgctttcactgtcattaggaccccaacgcctgcggagcagcaacgccatcaacaaaaagacgaaaagcagcatcaacaacagcgagactctcgcgactcagcgaagaacggagacgacgacggcggaacattcatggagagaagcgaatcggacaattcgaccgcttctgttgttgtcgaacactttcctcatcagcaacaaaatgccaaaagccgtcagcagccgccaaacattggggaggggtcaaaggtgaaaaagcatttttaa

SEQ ID NO: 74499 - DNA, 432 bp, Heterodera glycines
atgtttgtggtgatgtaaaagttttagcatttctcgcttttcttgttatttaaatttttttgattattgacacgataacattttccttttggcattgtgtctttatttgaaaaaataaaaaaagcagaggcagaagatatagagactggagcgagacgggatcacgcgcgggattttagcgggatcccattacgaggcgggacaccgtcccaaaaaaaatattccaaaagtttgaatttttgttctatagcagccgaagtagaggagcgccaagtcaaatcaaatcaaggcgactcagatttttccctcatcaaaatttcatgtttttgattttttccactccgattttcctaatttacagatttgtttttgtcgtattattatttattgttttggcaaaggtgtagaattgtggtcccgacggaaaataaa

SEQ ID NO: 74500 - DNA, 1646 bp, Heterodera glycines
atgggttccctcaaaggtttcaaaacatgataacaaaaatgcgaaaaaatcgggtttttgaattctttcgtttttcctgtccaattttttccggtgaatttttacggtcgggaaaactgcaatagaaccgccctcaaattctgttttccgaattttctggttttcccattttttcagctcaaaccacatacaatttcacttcacacactcaacactgctcccatctgcttcaccaaaaacgcaacgccatggtgctcttcgcattgctccctgtccagctgatgctcgacaaatgaatatatttgaaaatttaattattaaaacgaatgcttcagtttattattttctgttaacatattacactcaaaattgcataatggaaaaattcttcgaatttctccccacaaatgagaattaaaaaattttatgggtacatttttgaatataggcaatttttcgtaacaaagtgcactcaaattttcaaattttttttttaaatttcacgggaaaattcccggttggtcccagtctcggacgaaaatcgaggtcccggtcccgacttttctggtcccggtaagtcccggtcccggtttttgtcaaaattcccggtcccgtgcaactctaataattaccttttttgctaacttgctatagcctaatatgcacgaaaacgagtttttaacttggtttgaagcttttatcttgaactttttggtgcattttttttgccttttttgcgatttatttttttgaaaaaacggtaaattttttgaaaattttgcaacttttcctaccatattttattacaatttccaaaaaattttccggcggcgcttatcggcaccgccggaccttcattttaccttaatttttgaaattttaaccacaaaatgagtagaatttgtcattttctatctgagaaaaagatcgaaccggaaaatgcagattttttttttgcatcacaacctcaagctattggcaaaatttttaaaaaaaatttcgcttttcgcattttcgcatattttggcttttcgcatttccctttttttcatttcgcatttttcggtttcgcaaatttcgcatttcgctttttatttttcaatttggcccatccctgggaggtagcgatgtttcacccatgaactgatttttttaaacatcattcccctctttttgcaggaggaggagccgcaaaagccgacggaactaattgggcgatgaccgggaaacatcaacaatggcacgaccgcccagatatagtgtgtcgtctttttattggcaagcgtgatgaactgctcaatgctctgaacaaaaagatgattcttggttacatcacagcctggttcttctcgctcgagttccagcttcggtagtattacattggattgggaatgcatccgacttcatggcgtaatccagagtccagaagattacatgagtgagtacatttgtgcggacgtcccttctatgccggaaacgcgacttcagtcagcagaagaggcaaagaggatgcgtgaactctacaaaacaatcaccacaaagcatacccattcatactcagcccaacgttatcttgttgatggaaaatgcaaaaaacattttccggctggaaatccttctttgggtaaaagataatattctgtata

SEQ ID NO: 74501 - DNA, 396 bp, Heterodera glycines
atgcttcttactccactgttcctgctggtgatggctttcatggcattgctcgtcgtccaatgttcttctgctgcagccggtgatgtttcaccggctttagataatcaggaggaaaagcgagtactttccgccgatgaatcgggaccactacaaaactttcgtactgtgctggaaggacgtcacaaacgaagtttaatgggacgctaccgaaactcgacgggtcgaaaacgaaattcgaatggacgcaaccgaaattcgacgggtcgaaggcgaaattcgacgggtcgaaaacgaaattcttacggacgtaatcgaaattcgaatggacgcaatcgaaactcatttggtcgtggcaaacgaagtcctatggcctttcctcctgctgctgacaaatga

SEQ ID NO: 74502 - DNA, 705 bp, Heterodera glycines
atggcatacttaaaatggaaagtgaaaaaaagtttaatgattattaaaaaagaaataaaatggttaagcttcggacaatatgccaaacatcgagcggtgattgatagccagcccattacactgtcatacgcttcgatggaggacatcttccgcggcatgggcggacttgacacatataacctgtgcaaattcaattgtcaggactggtcgagagaatttatggccaacggttatttttattagtcgtcaaataatacgtacatatcatcatcaattcaagaaatttcggcaccgtgccgttcgtgtgactgttgtatgtactgtgtgcggaacatcagcgccacgtacttacgacttcaattcgactgggaaatatacaagtttgttctttggctttgaaaatgtctcatttttgaaaattaaaagtaaggcaaaaatgccttaagtactaagcattttcaaaattagagccgaaaaggaaaaaagtaaagccaaaaatcagggcctaatagacattttggtttcaaggatactaaatttctaggaaaaattcttagttgttccttttagcgtattacgaaaaatcgaagtcaattaaaacctccgattatgctatttgtctatcatttcgccagcacacaattagaagtcttttcagcgcaattctcgaatgccacgatcacgctcaaattcatcgtcctctga

SEQ ID NO: 74503 - DNA, 521 bp, Heterodera glycines
tgtgggcgttccacaaaaagctcagtgtgggcgttccacaaaaagctcagtgtgggcgttccacaaaaagctcagtgtgggcgttccacaaaaagctcagtgtgggcgttccacaaaaaaagctcagtgtgggcgttccacaaaaagttcagtgtgggcgttccacaaaaagctcagtgtgggcgttccacaaaaagctcagtgtgggcgttccacaaaaaaagctcagtgtgggcgttccacaaaaagctcagtgtgggcgttccacaaaaagctcagtgtgggcgttccacaaaaagttcagtgtgggcgttccacaaaaagctcagtgtgggcgttccacaaaaaaagctcagtgtgggcgttccacaaaaagctcagtgtgggcgttccacaaaaagctcagtgtgggcgttccacaaaaagctcagtgtgggcgttccacaaaaaaagctcagtgtgggcgttccacaaaaagctcagtgtgggcgttccacaaaaaatgctcagtgattgataaa

SEQ ID NO: 74504 - DNA, 810 bp, Heterodera glycines
atgaataagacttttatttttatttttttgttatttcgatttgagtattcgacctctaccaattccggttttgaagaatttataaaaaatcacaaagctatagaacttgtcaaaagctatcaaaataaagaaattaaaacattaaaaaaactccatgaacaaatgcaactaaaaggtattgacttaagtttttgtaccttaagacgctacgtgtcaagactaactattgtttctgcgcatacaaataaaaatgatgcttcaaactcgaatgcttcaagccatgaaatgccaaaacatgaacttagatttgaaaagtgcttttcaaaaactttaagaaaaaatgtttttataattggaaatgaatctgcttggagaaaatatgttcaaacaaatgagaataatgaagacatatatatttcttgttcaaaatgtcgttattttcgcgaacaagaaaaaaatgttaatgtcaaatcgatcgtcgcatcagctgttctgcgacagggaacacaacttgttatgttgcagtcaaaccataatgctaactgtaagcccgaaaaattagagaaactggaagcagaacaggttgatagagaacaaagaagagaaaattataaatgtgagtcagaaggcaagattatttggccaaagaaaattagcaccttatcaattgtcttcaattaatttgtgaatttttcctttttttagttttgtaataaaattataaattctttacatgaaatgcaaagaaaattagcaccttatcaattgtcttcaattaatttgtttttccttttttagttttgtaataaa

SEQ ID NO: 74505 - DNA, 1047 bp, Heterodera glycines
atgccgaaagttgaattcttaattggtcatttgattttgaactgctctgctggatctttcaatttattaaaaaatttatcggaaaaaaggtaaattttactttcgaacactgaaatgtatatggtttgcgattgtgcggtcgaaaatgataaagaatgagaatttttgggtttttatgcaaaaatccaatttttaacacatattttattttgggatttttatccatatttcagcattttttagaacatattattacatatttggcggtcagggtcgttttcgcgtggccattttcgcgtggggacgttttcgcgtgagtacctgtttaggactgaaattggtcggatttgtgcaaaacatccatgtttccaatcccgaacccgaattcggacaaatttcttaacttttttatttcttgcggctagtatcttctacaataattggtcagtttggtcggatgtgcgtcaaacggaaaaaaataattaaaattttataaaaacacatagatagtataacaaaaaatatcaaatttcagaacaaactaaggtcgcatttcatagtttcgggaaacaccagtgagaaaattgttaatttttagaacatattattacatatttgggatttttagcacatgaaaatcccagctttaattattacttagaatttcaatttacaaatattcagagcacatttatccaaaaagtttaatttcgaatgttaacatgttcatgtacaatcataatattaaacatttttgattgatatttcaaattttactaaaaattaaaatttttaatgaaaattgttaaaaaattggcatttttattcattttttggtactttgctaaatccttccaaaatagagtgtttctattcagctaagacaggacatttttcgacaacaaattgttaatttttttttcttttactaattatgttgcttctaagaaattatgaaatttttccagtaagtgcttattttggcggatttataattcccattaccacacacattttccagtttttaagatttaaattagcaataaa

SEQ ID NO: 74506 - DNA, 91 bp, Heterodera glycines
atgaaaattttccccaaagattcgtttccaaaatttttgttcttgataagttgcaattgtaagggcgaaatgaataatgaatgggacttag

SEQ ID NO: 74507 - DNA, 3143 bp, Heterodera glycines
  unsure (1)..(3143): unsure at all n locations
atggtactggctgaacctgcccgtgttggacccggagatggacgagctgtactgctccgcgtcgctgaacggcacatcggcgggcacggtgagcatttcggtgggtgggggtgccattggtttcagggcggcggttggcggtgccgttggcacaccgcgacggcagagccgaagcggcggaggtgcgggcattgcatacggcggatgccggtgccgcattacaattggaactttgcggcggcggtgccgacttcaacaaccgggactcggcactgggcagcgatgtgagtaatttcatttttttgtgccgttttttgttttgttttggaaattgagtgtttctggcggtgccgagggcatccacaggacaattttttgaaaatttcttactcagtttgtctgatgtgctctcactcacaatcagcacttgtgagtcaacaaaatatatcattcattttttactttttttttttgtaaatttttttaattttgaagaaatttcgtcaaaaaattattcatttttttagaacccaaccagcagaagtggcaccatccgttgtcggcatccccaaattgacccggacaccggacgatgtcggacatgctcataccggtgagcagaatgaacagagggtcatctggggaacagtacgtcctcccctcccgaaatttttttttcaaacaggaatttaaggaaaattaaagaaaaggcatcttgaaaatatcagcgatttcttctttcaaaactttatgatgaatttaatttttttttttttaattttctaaaatattaaaattttccttgtgatttattggttttccaacttcgttagaaacaaatttcaactgatctttttcaaaagacaaacatttgtgatttaaataaataaaaataatatttctctccattccagcccaacaagttcaacccgtacagcaacagcaactgccactctgatggactcgggtcgtccggtggcggtggtggcctcaacgcgtgcgctccaacctcattctgttcgttttgaggtaggtgtatatgtatgtggtggttggtgctgcacaccaatgttttaattttaaaaaattaatccattttcatggaaaattttcaataagattttttaaatttttttttggcggattgttggtgggcgattttcatctttcccagctgaaatgaaaaataatattttgagtcaattggcgtcgaccgtttttcttcccttttttgcatttgccttttcatttgcatttatttgtccattttttacatatttttcatccattcgtttattttcatatatattgtttattcattctttcatttgtttgtcttaaacagatgggttcatcaacaaattgtgctgataaaatcattttttgtcatttacccctcctccgtcgaatgatttctctttaattgaatcaaaatttacaaatatatatacctaatcctattttattttccttattatttgcactctctctccccaaaatgctttataaaaatcccttttcattcaattttaggtaattagggtaaaagccggggggatcgccgccagtcaaacggtgataaaaaaatcacaatttcaccgataaaattttaataaaattgtaaattaattccctattactttgaatattgtacagaaaacagctcgacatttccatacagtatgcaaaaagcaataaagtactgtaaaatcaatgattgagaaagaagcgagagggggggggggagaagtgacaaactgaaaaaaacattgtgagaaaagagacagacagggcgagaaaaggagaaagacggtggaaaaaggagaggcagagagagagggagagagagagagaaaaggggagaaaacaggagacactgagagagagaaaagagagaaagagtgcactatttaaataacggcagtgcaaaaaaggaataaaaaatgatagacgattggctgataatggcggaccgatggggcgggggggggggagaggggaagggcgactgacgcgtaaacaatcccattgccccccccctttcatcattctttttttccccccgcaatttcttcatcgatttgactctttcgtttcattcattttgcttaaacgtgtgccaatatttgttattgacattaatttgcaattaaattaaattttaatttatttaaatgtaaaataatcattttttgtgacctcctttaatttttttcgaccaatttttagtgaacattgtcggcgcgggtcgtctcttcaagcgtcaaatgtgcaaagcgttggggcaagcgccgggcattgtcacgcgggagggaatcgcaaaaggcgtgcgcggatcattgacaacggcggacagtccaaagcggcaattggtggcggacggtgagtgggggggggggggacggacgaaacttgcctggtccaaaaacaatcgtttgggatgggttcgagtcgacttggcctaaagggtttttcgggcatcccgtggcactctgttgtgccctcatcaattcataactgtttggaccatttaaagcgtaatatgcgtgattttttaattgccaaccaattaaaaattgggttattgatttatttttttgtgccaaaaatgattgtctttctgattttttttgtttatttttattttttgtcattttacagtgcatctttcgtcgtcctgctgctgctactgcttcaacttctgctgctgttctcccattggctggtgccctcgttgctgctgctggggaccatcgccacaacaatttgtgtgtgattttggagaaaacgcgcaaaactgctgacaccaccgtggagtgtgttgcggaactgtggcgcatcgccggtggccttaaaaattccattgaatcttttttttcaaaaaaaaattttttttttgaagggcatatctaatcattctcccaattttcttgcagtttcgtctttacgagcccgtccacaggcacttgccatgtccggcacgaaatgaccaattggtggccaaagcggaactattggacagaatacgaaggtatatagtgttttttttgtctgatgaaaaattgaatggaattttaatatttttttttcaaaatttcagcgcagacgaattggcacaaaatcagatggcancggcggcgggc

SEQ ID NO: 74508 - DNA, 976 bp, Heterodera glycines
cccttggccaacaacagttagcgctgactgatggttctgccgtggcgatggaccacctccaatgggagaccatccgggagtgggtgatcaaagcggacactgtgccaaggctggtggacagtctgatcgacgcggacggacaaatggactcaaaacaggtttttttggaaatgcgggggaattttgggttttacaaaaaaaaaaaattggaaaaatttggcccagctttaaaattgggtagccattttttaatattagaaaaatgcgcttgaaattgtattcccgtggctttttgagatggcataacccgaattcgaacaaagagtcgacaaatgacttttcgaactatcgaatttggtttcgaaatttgattaagaatccagaattggctgaaattgatcatttgaagccgttttttgccaaaaaatgaccatttttgccattaaattttcaaatatggtaaaatgggggcacggaaatgccgagaatttttttattttaatgtattttgtcaagataaagacggcactattttttatttccaatttattaaaaataaattttcaaatttttgtcggcgcctaaattcaaaaaaatccctcccccccccctcttttttttatttcaacgttttctttgccacttatcgcgccttttccaccgcggccgaagataaatttttttgaaaattattaattttttagaaaaaataataattttttgaatttttttaggcaatcgaatccaacaaaaataacaacagttgcagcagcagtacctggacttggagtgcatttggaacaatgtgtggtcaaagaatgagtcggtccgtgccctttaccctccggcagtgtacgtctcgctcaagtcgttcatggtcggactgttgtgccgggaggacaaccgaatcatgttggacggtcagtctccggcccaaccccgaaatgtgtggataaaccaaaactttttaaactga

SEQ ID NO: 74509 - DNA, 159 bp, Heterodera glycines
atgtatgtggtgtgtagtcatgacaatgagtttttccacagcaaattaaaattgaaattagatttttaggtaaatattagagttcggcattttgcaaaaagtctggacaacatggattctatgttggatctggatttcgaatacgggttggacccgtaa

SEQ ID NO: 74510 - DNA, 964 bp, Heterodera glycines
atgcgtcagtttgccccgtcgatgctcatcgattgtccaccacttcgctgtgtctctttcgaaggcgacattctcccggaatttccgcccgatgacagtgccaatgcgacggatggccaagcggtggcaaaatggctgttctcgcctcgtccggacggtgtaccaaatttgttacattgtcatgacttttcggttccgcaatggtcgtcaagaatggaacaaatcaaaacggtgattttcacgccatttttaattacattttttatgattttaccccatttttaggcattttccgatgcatcttctcatgtttgcttcatcatttactttgaattttcgacgttcccttcgcttgacttcgtcgtgccatttgagttgaccaacgcattgactggggagcaattgacactgtcacaatattatgattttgatcaatgttttgtgctcatccgttgcccaattgggcagaaggagatggcattggaacagtttaagaaagcagggactagccgagggagccgaattttcattggcattggagcggacggattgaaaatgggtgaacaattccaaaagattttcggtttcaattttttgtccttttttcagacttctcaacgctttccctgggccgagtggtcagcatcagaaagaagtgaatgaataattaattgatgcgaagtgtttgtgatcccgaaatgttgtcatttgactattatttatgtatatgtatatgcagttgtatattttgctcacaaattcatccatttcaattatggtaattggagtgaatgctttgataaaacgattaacagtcagcatggtattctttttcggaattccttagggcttacgattattaaaaacaaaaaatagtatttattatgtggctgtcaaaaagtgggaaaaagtgaatttcaagattttttaaaatcctgaatatgtattcattgtactgaataaa

SEQ ID NO: 74511 - DNA, 405 bp, Heterodera glycines
atggccgaatggcaaaaggcactcggaattgtggaaaagttgcgggcccaactcagccaacgccaatatgtgacggtgcgagtgcttttgctggaggaacgcttcaaagagctgatcgaacggggcgaggtaaaaaacgaaaagcaaagggacactttggaaagggcgaagaaaaaaagggaaaaacatcggaaagcgaaattgaattagcagaagaataacacggtgttatcagatgatcagattaaaaagggcgctccaaaattgcgccgccgaaattttcttaaaaattttcaaaaaaaaaaaaatttttatatgaaaattccaagaaaaaaacatttgaaaaattttcagcgattttgagttaaaggcaactaactgtacacaggcaactcttacaataaa

SEQ ID NO: 74512 - DNA, 1598 bp, Heterodera glycines
atgtattttcttgtagtgttccttgcaactgacgccgagttgcagcatttcgctttgcattttcaggatttgctgctgctcttggaacgccaaaggcatccgcgagtcgagcgactcgaccgcctaaaagagttacggaaaagtaagtgccaagagctgaggagtcaaacctcgatcaaattgttgacgaccgctggagtcgaagtgacggtcgggtcgatgtcgggcaaaggcaatatttgaaaggcatcgtcggccaatttcctgcaaagaaacaaaatcagaatccgaaccaaatttctcattttgccggacttgaatatttctggcacttcggcacactctttaacgctgaactcagactccgctaccgacgatacattggtggaatggacatcgtctccgatactcggagtgaacgtgacgtgttttttcatttttaaaaatcaaattgcaaacttaaatggttaaaaattcataggttatattgtaatttgcaataagagcgaaatactaaaaagttataaaaatacgtcgcactgaaatgtaccgcactaaatgaccctaaccgtaatcttttgattgactaccgtaagaaaagaaatttaattttggcagcgccaaatagataatttgagtaggtggtatgcacgtctaatgctactgctactacgactgttacatttatttcttagtgtttaaatccgaacagggggggggggggggtgggggcaaaaaaagaacccaaaaacggggtcggttacataaaagctgcatttagcggtttcttgtttcttaatatcagtactagctcatttcttaaattataaattacagagaaaagtcagtattaccgaatgtctgatttgaccacaccatctccggaagtgacaactgatgatggcaccacgccacaatcatcgaaggtagcaggtttaaacttcacgcaacgggctgacttgtcctgtttaggctgctgagaagaccggacaagatggatgcaactccgccgccgcctctgttgatgatgatttggcatgtgcacagatggtaagaaaaggcatttaatataaacgtttgcccccccctccctctcgcatgtaactgcatatagccacgaaatggggactccttcgaatcaggtgtagaggtgggggtaatttttcataaaaattgtaattttttctaaccaagctaggtaacaaaaattttgatttaaaaaaaaaatgatgcggcgacgttttgtctacccacgcctctccctctaccccgctagccttaattcataaacggccagaccgaccccccccccccccccaccccatttaatccgttatccattcaactgccaaacccaaatcccttttcgattcgcattcatattccatttccttttataggttctgtcgccagcattcgagaacatttccgaagattcatcaagtcctacaactgattctgcacacattgtcgacgcgcatgctcagaaggttgttttttgcgattctgagaagtactcgggggtatcgagggcgctgatcacgaatctgacaccaccttgtcataaaaataatctaatctatgatttctcatcgtga

SEQ ID NO: 74513 - DNA, 467 bp, Heterodera glycines
atgaaaaaacacgtcacgttcactccgagtatcggagacgatgtccattccaccaatgtatcgtcggtagcggagtctgagttcagcgttaaagagtgtgccgaagtgccagaaatattcaagtccggcaaaatgagaaatttggttcggattctgattttgtttctttgcaggaaattggccgacgatgcctttcaaatattgcctttgcccgacatcgacccgaccgtcacttcgactccagcggtcgtcaacaatttgatcgaggtttgactcctcagctcttggcacttacttttccgtaactcttttaggcggtcgagtcgctcgactcgcggatgcctttggcgttccaagagcagcagcaaatcctgaaaatgcaaagcgaaatgctgcaactcggcgtcagttgcaaggaacactacaagaaaatacatgagcagtccgtgatgcgttacaatctcgag

SEQ ID NO: 74514 - DNA, 272 bp, Heterodera glycines
atgaatgaccgtcagttcttcgggcgcaaacatggcacagttcatgttgacggacagactgtcgtccgacgagtggaaagagcccaaaagggcggtgccgaattggtagttgtggggctggacgaaggtggtgccggtgcccgtgccgagtccgcccaagtcggaggggaagccggagccaagagtggtctgaaaagggcatggggaagaactaggtaatttacgacaattaatgctaatgaagccataattgataatgtgatggtaataaa

SEQ ID NO: 74515 - DNA, 2207 bp, Heterodera glycines
atttccattcggtacgtaaagcgatcgacagaatggcagcaaaggttggcaaatctcagatattcaggattctcgcccatggctcccctagttgtttcatttgttttccattttctcgtgtttaggtcgcaggggccttaattagaaattgaaaaaaatgttttattaccatcacattatcaattatggcttcattagcattaattgtcgtaaattacctagttcttccccatgcccttttcagaccactcttggctccggcttcccctccgacttgggcggactcggcacgggcaccggcaccaccttcgtccagccccacaactaccaattcggcaccgcccttttgggctctttccactcgtcggacgacagtctgtccgtcaacatgaactgtgccatgtttgcgcccgaagaactgacggtcattcatttgttgccgttggcattatcaatgaaattttctattttaggtgtctgttgtgggcaaccaaattgttgtggtgggaaatcacggcgaaaagcaggactcacttgggtcgatgtgagtgtcaaattgaaattagccaattaaaaccatttaaatttaattcgtcggattagtgagcgccgatttgtacacaaattttccatgccgcgcaacgccaccgccgactcagtgaaaagcaatttgaccagcgacggcgtgctgacggtgaccgccagcgcaccaatcgcaccaaaaacaaaggcaacaaactgggcgagatgggatggggggaatggaatgaaaataggaacaatacatctgttatatttagagttgctcggtaccggtaccggtactggccggtaattaccggttttttagcaattaccgattaccgagcaactctagttatattatttaaaaaacaaatcttttgatggtttatttggcattagcaatttgtatgggttggtgctaatttataagctaatccgcagcaaaaagtgggctaactcggtaattacggccatttttaagatttaatattggcaaaataatgttaatattgagcatgtttgaaatgtttttttcatttagaaatccgtgtttcttcaatcactcgaatcgctctccaattctgccaaacttttgccagaggaaattttcgagcaaaatgaagagctcttcaactaccgtattcagtgtatgctgacatttattttgacaattgttattttcttctaacaataactcttattttaaccattttcagatttccattcggtacgtaaagcgatcgacagaatggcagcaaaggttggcaaatctcagatattcaggattctcgcccatggctcccctagttgtttcatttgttgcatttttcaattttcccgtgtttaggtcgcaggggcccagcacatcggtggagacggcgccggaggaagtgggatcggccccaccgcaccgaagcagacacgcttggccagtgacgaatcgatttaagcaacgattatgttgagaattttcgggaacggctttccataccaattctcgatgtcctatttcaatgacttatttggttttttacgatttctttaaattttttaagtaattgtctcttctcataatcagacgatgcattagagacggataaattatttcggtctctgtccatttaatttgcttcggtaattaatctattttttttactattttttattgtttttttaaattgttttttcaattttgatgccattgaaaattgttacaattgccgtttcgccctctttcaactttctgcgtcgtccgttgccttcgttggactttcgtcgttccctttttaaaccgccattggactcgccgttctgtggcatttacaggacaaatggcgaaatttgccggacggatgacattttggtgtgccaacgcaagatgaactatcaccctggagcaaatgtacccaggatttttgatggattgaacacaaaaattccacattaacctcaatgttcccgtgtttcaggtccgccatcaacgggaccggaaccagcacttgttgaaagcggtctgtgacggaacggttgtgatcacacgcgagcactgcgaagtgaacccgaagaacgagtggatgtacgcgcagtacgcgtaccgcgactttgagaacatttacaagctgaccttcaacgtgataccacgacggatgtccaacacatttaaactgatcagcgaagaatga

SEQ ID NO: 74516 - DNA, 655 bp, Heterodera glycines
atggaagcgcctaattcgccgatggcatcggcacagaacaggggccatggcgttgacccgtccactgtcagtgccgatttaaacgacatttgtggggacaccgacggaatggcaaatgaagaagaggcggacgactctattgtgaaggaaattgtgacggcattgttgtcgggcggaccgttcccagcagcggaagagaacgacgagcaaagccaagccatggagcagcaacagaccaatgggacagcgatggatggtcagagtttgttggcacaccaaaatggtgtcaaatgaaatttgtttttttttaaatagaatttggttggtcggcttgcctaagtttatgtgttcagatgcttctttttcatctgggctctctcctcttgcgtccgatgctcatcaaccagtgctatttgcctcatttttcgagttaatttttttttgcaattcgttttacaccgaattagccgacaattaccgagtgatttggtcaattttcaggtcccaacttggtggaaaaaagttggagtgcggtggccatttgtatcgacggagtcggcaccggggcgacagcatttattggcgctgtgaccaaaaccggcgctaccgctgtgccggttcggcgcggacagtgggcgaaacggagggaaccgag

SEQ ID NO: 74517 - DNA, 925 bp, Heterodera glycines
cgacgtgagttgccttcgttcgttgggtgcttctctctgctgatcagttctgtcaggaatcagttggaatgggctcctccgatgcgaattatcgccgtgatcactttgctcgcctccactttggatctgatggcggactttctgctctgcagcagattggccgagtaccttcacaacttccaggtttctgtttccctttgtgccctttgcccatttcgactttctttgccctttccgacggaattcgcccgttattgcgccctcggctatttctttttcaccggtgtttccattctcgtgtacgtcttcgaaatggtcgacgtgtgtctgacgcttaaatacgacgaggagaatgttttcttcgcgcgaatggccaagtcaatggttttggtgctggaagaggttagctttggttggtggacagggcagcgcatttctggccaatttccaaccgattggtctctttttgccggtttttggtgccactgttttcaaatggttgctgatcaatcgcttgttcggtttcattttgcttccctcggcaggtgccgttgcccgccctgctttaccttctgttcacttccgagccgcgtctgtccctggctaatccgatgcatatcgcctcgtggatcaaactgatcactctcagctgggccatagtcaaatttgccaagctccgtttcttctggccactgctccctttcaatccgaaggtgcttcttccaaccccccccccttttctgttttcccttttttttagcatgacaaacgcgaaaacattcggcgatgtttccatctgaacctttacagaatgacaatgatcgtcgtcaacgctttccatctgttggccattttcattgtgattaacaatttggtggtgtcgcggaggggcggaaggtcaatccaagcgcaaagttcgctttga

SEQ ID NO: 74518 - DNA, 1016 bp, Heterodera glycines
atgtctcgtggaacaagccgttcaaggagcgaattcggcatttctacaacacttggatgtccaatgatgcagaaaaagagttcacaccggcaggcaacccgaaggcaccagcgcttcacatggcacttgactggatccaccgatcgtggcaggaaatttcgtgatcatcaaatcattcgagggtcagtttaaaaaataaaaatgcctacgaaagacgcagaaacttttaagtctgtgggttgactacgccattggacggaacaggagacgaaaaaattgcttgtttcaagccggaaggagcaattggactgattgggatcaaatttttgcgcgactttagagcaaatgagacgatgaaagatggacgaaatgatcaggaggacgccggcctatctgttgatgatgatgtagagttgtatgcagtcggagatgatgatgaatttttcgtttgttaagtttttttatttactgttgatttggttttgttttttgaaaaaaattggtgccaaacaatttcttaaaattctatttatatcccatgggggataaatagagactgggggattatttttcgaactcctcagaaaggggggggataattggagactgcgaaattaatagagactgggctataattagagcaaatacggtaagtctgtttgacaaaaccaacctgaacaatttaaaaatttcctatacatattaacattataataattctcttggaagcgtgtttttccaacaaaaactttttggaacgtgaaaaaaagaaattttgggggtttgggtggtgcttatcactgtcggtggtggaaaattggtaatttttgacatttaacagatttttactaaaagtttgcaatttttaggtcaagttttgaaaagtttaaggaaattttgggctgattgtgccaataagctaaaaatggccattttgaggatttttccaaaaaatcagcaaattttcacaaaaaaatatcccgaatgcaaatttaaatataatttttttcttataa

SEQ ID NO: 74519 - DNA, 139 bp, Heterodera glycines
cggtgcaaattaataaggcaaaggaattcaggggtttactaaaagcaatgagttctgagtaggattttccatgttgccatatttacactatattttaatcacctgtgaatttttaacatttgatttatttttattcatt

SEQ ID NO: 74520 - DNA, 638 bp, Heterodera glycines
atgagtgagttattggcatcagagtcaaagatgctcaaaaatgcaaaaaaattcttgcctcaaacctcaaaaaccatcttaaagttggtttaaaaatctgaaataattcatgtttgcttatcttttggtgttgaacaaaaattaggaaaattttattggaaattttaatagtctcattgaaaagagcacaaaattctctaccgaattatctttagaagggaggggctacgacttgttcacaaaaagttatacttagttgaaaaattggagaactcaaaaatgatcagtttttgatcatttaggaatttttttcgaaaattacccaaattttcagtgtgttttagggtgttcagatcaccatgaaggagtgatcggatcaagtattttgaggtttgaggcaagactttttccactcatttttgggcatctttgaaccaatttttgcctctttgaggcaagacttttttggggcattgtaactagtgctgcgatttttaggcagaaaaaattcgcaaaataagcattaaataggcacaaaaaaaggcaaattaatttttttaaattaacgcttttaggtagaaaacacataaaaattaatcaatacttactttggttatatttaaatttaaatgaaatta

SEQ ID NO: 74521 - DNA, 250 bp, Heterodera glycines
atggcgcccccacaaagtgtccaagccacgaaatgtccaaaagagtaaaaatccaggcaatgttcaaaatttttcaatatttataaacacaaaatgagtctaatttaggatttctagggttttcggggtcgttgaatatgaatataccctttatattaccccttgcctaaccttaggcccatctgaataataaaaaactcaaattcgagacttggacatttcgtgggctggacattttgtgggccagcgg

SEQ ID NO: 74522 - DNA, 453 bp, Heterodera glycines
atgattatgattgattataatcgacacattgtctccgactcgaagcttgggtaaatttataaataaagctcaaaattatatttgagaaaaatgaataacacgacgaaagaaggaattgaggtgttacgttcatcagatgagactaatgacactcttttgctcctttcacattatgcatttgccttccctgtttttctactctgttggttcataataattaaattcctcaagaggagaggtcatatatccccaagcgaagcggaaaccatgattgaagaaatgaaaaatattcaaagacaaccaccaatattttttcaatcaaagtagtgtaacttactttttttacaatgcattatttttttcttataagaatttggtataattttaattgttattggaattttttttgttaaagacaaatttttaaacatttaactgtttaaaaataataaa

SEQ ID NO: 74523 - DNA, 1017 bp, Heterodera glycines
atggcaattcgccagcacaaggatctcctcttcggagggaaaacagtcattttcagcggtgacttcaaacagtcgctgccggtcgtgcctcatgaaggcttaaccgctcaggtgacagcctgttttcaaacatctccattgtttggtcaattcaccacgatgaaattgaccatcaaccagagattgggcaaaggtcagcaagcgtacttgcaaatgtgccgccaaattgggctcggagaaaccggagagcacttctggattcctcggcagttcctcgttaagagcaaggaagagctgatagactatgtctatcctaacttccaacaactccttggcaatgacaaggagctgctcaatcgtttgattctcgctccgcacattgacacgtgcgacgaagtcaacgacatcatgatggcgaatgtgccaggtcatatgcgggaatacttgtccacggataagccccttgacgaccgcccactggacatcgatgagatcgagtccgaagtggctgcgttgaaccggcgcacagactcgggcatgcccccacacagtctccggcttaaagtcggatgcgtcgtcgtccttcttatcaataaaagtgataaggaaggactgatcaatggcacccgcatagttctggaagaacttggcgatgatcgcctcattggtcgtgttatcaatagcaatgctattggcggccaagtgaagttctttcttgaaagaacacgaaatgtctatgaagacaaatcgcctggcggcataaaatatgagcgtttgcagttcccaataaagcctgcattcgctatgaccattcaaaaaggtcagggccaaacaatccacactgtcggcattgatcttgaaagggaagtattttcccacggtcaattgtacacggccttttcacgggctacggacggaaacaatgtccgtgttcatgctcccaaccgggatgttgacgcccaaggccaggccaaagtgcttaatattgtagctactaatatgctcaagttacaataa

SEQ ID NO: 74524 - DNA, 1423 bp, Heterodera glycines
atgtttgtgctgttgtcctgcgtgttgccgatcagttcatcgctgctggtcagctgttatttgcttcgattgatgtgctataagcggggccaacagttgcggacagattccattcagtcaaattcttcatcacagaggacagtgaaaaatgccaattttgtaccattggcaccagcattttcacacaaagtaaacttttaaaaaatatttttcaaaaagatttctttaaaagttttttaatgaagattttgtaaatattttttttattaaattgttttagttaggcaattaaaatttcttttttcgataataacacaaataaaaattccatattttaaattaaaaatttttttaaatgaatatggacaacataaattattaaaactttaatgtagcatttataataaaataaataagaaaaatagtaataaacagactaattgataaaatacaaatttaaaatatttacaattttaaatttaattttttacagctccgatctctggttttcattttcacaacaactgtttggacagcgattagtctgcttccattccgaattttgatcataatccgactcaattttattgatgcaatttcactgttgtccaactgtgagctgttaagatttatggtgattgctgcttggattctgcactatattttgatgctttctccggtaataatttatatttttaaaatacaacaatttagtttttttaattaaatttttatacattggtcagtaattattagatacaaaaaatttaaaaaaccgagataattgggtttgaaaatggattaagatatctgggattaacgtagaaattcgaaatctttgataattttattttttctcaataaaattgcaaatgattaaattcattttattaaaaaatctcataaaatattttgaaatattaaataaaaataaaaaattgttttaggtgatcaatccgttcatcactgctatcatttatcatccttatcgggtgacatttgtgaaacaattgtcattcagtggcagcagcatcagaagcacacaattatgagaaagtgaactgattgattgatgttttaattttatttaatttttttatagtacaaaaaaattatatttaatttagtcaattctttttctaccaaatggaaaattatcattaattattgtctcatattaaattcgttaaataatacccaaaatattatggccatataattttttgaaaattttgctgctaaattggcaatggtcggacaaaagtgaaagataagaaaaaaaggttgggaaaaaagccaaaaattgaacaaaaagaccaaaataacaaataatagaaactaagcagtggataaatggattaagaaatgttgggaaaatgcatacgatcaaagtttctatcattgatttattacataaaataaa

SEQ ID NO: 74525 - DNA, 587 bp, Heterodera glycines
atgttaaacggcacttaccatttgtggtcgcgaccatttgcaagtgcattctgtcgtttgacgagctgagaattttttaaatgccaaaatttcaaaaacttaattttgctaatgataaaatggcactaaaatttggggcaaaatatattgattaactgatccatacagtgataattctttaactgtttggaaatgggagaactgagaagcagcgccactacatcataattaaatctttttaaatttgggcattaaaaataaaacaataagaatgatttagtaaaataatattgcattttttttaatataatattttaaaatattttcacttaattctgatcaatcacaaatcctcccccctccccccggaatactcactttatttgaagaaatgagtgcctcataaaggggtgagttcgttttatgtcgatcagcatcaatttgattatttaattgtataaaatcagttcttgacgatgacgaaggaatttggccaatctcagggccaaatgattgcacaattgaaaagctaaaagtgcgcaaaatgagaatgcatttttaaacataattttcaatttaattggtaa

SEQ ID NO: 74526 - DNA, 2357 bp, Heterodera glycines
gtcgaagtgaacattgggccaattgggggcaatgtaagtgcgcaagcagttcgccaagtgcacggacgcgtgttttccaaattgggactgtccgaggacaatttgcccgagaatcgtgcaagcactgccattggcgaggcattggtcaaggcgtggtcagtcagtgccaaattggccgaccaatttggcgtcaattaactttatgtaataaattattagcatttccgttgtttcagggaactgttcgaagatcccagcgccgtcgttgtgataatgtccatcaaaaataaccatggccacttcgcacttcggcacatccaatacgaaattgagcaggcatcggcctacaaaatcaaagtgattcggctcacattagcagaatgtgatgaaaagttcgttagtttacacagttttattgttaattggtctgaaaataaaatcattcgagagtctcgacgtaatttaatttatttatcaaaaaaaacattttatttttagacttattttggatcccaacgattcttcgctgcgtttcaatggcagaaaagtggcggttgtctaccaaaggacctatctgtccgagaaggattggccaactgagaagcactgggacattcgacgcaaaattgaacggtcgactgccattgtgaggaaattgttaaattaaatttgaattaaattagaattatgttgttttttactttaattaattttagttcttttgaaagaatggaggaggaaattaattaatggatttgaaattattaatggattgaaatttttaaaattaaggattaaaattcattaatagatttgaaattaattaatggatttgaaattaattaatggatttgaaattaattgatggatttgtgccaatggcaattttcatttaggtgacattcaatgtgaacattcatctcgcgggttccaagaaagtccaacaggtaatttattataacaaattaagcgccaaatcccctccgttcgacttttcagactttggcattgcccggaatgttggaacaattcttgccggacgtcgacgaaggaatgatcagttcaatccgaaagacattcgccgaccttttggcattggacaaagaggacgaagcgacagaagcagtgattagggtaaaagcaaagtgaaagttaaggacacgcacttgagaaatggggaagaaattcaccaaattcaataaaatcgaccattttggacaaaatgacaaaagtctttagaaatcacataaaaatatctatgtttagggtagttttttgagagattttaattgcgaagtaattagaaattactaaaaatgaaaaatttaagaaagccattgaaaaccctgaaaattacgtgttgaaaacgaaccgagacggaggcggaaacaatttctttggagaagaaattgccaaaaaactgagcggtttgccgctggacgaacgctcgtcgatgattttgatggaaaaattgaaaccgatggaagtgaaggtaattgggaggcaatggctaactcaacaatggcatttcgacatttgctataataaaggcaattttcacatattttcagaatttcccaatacgacggttaagggaccacaccgtgcgaaatatggtcagttgccaacaattatcaatggtttgggaccggggctgggctagcccaaacttcggcttctaaaacttcggggttttgagcttcggcttctgatatagtataaatttcagggaaaaacataactcctaaagattgagttttcagtgttaaatacaccccccccccctaatgatgggctcaagaactgagaaagatagtttttaatttttttttcaaaaattattccctttttgaggaaagtttcaaaggaaaattaaccttttttcctctaaaaatctaaagaaaaggaaattcaaaaaaatgaagaacattttataatgttaaaaaaaattaacggtgcgggaggaaacggcgtaagaaatttgggggggggggatgtattgcacccttttggagcaatgaagctcctgctctcccggtcaaattttaattgatactttcgaatgttcatccgggtgcaggattttgtaagtgagttaaatgcttatcaatccaaaaatataaaacataaaattcaatttaaaactgtacattttgcaggagaggggggggggagtaaataggtttaattcttaccaaatttatttaatttctttgttttcccgctttttagagcagtgaattgggcatcgtcggttactttttgggcaatggccaaacgatggcaacgattgccaatgttcagcaggggcatttgctgcgcacgaaattcgccgagtccaacgaaggcggcgttgg

SEQ ID NO: 74527 - DNA, 451 bp, Heterodera glycines
atgcccccgggggagaacattggcggcattcatccgcccgccaaatatcagctgccgaaggattatggccgagatgaatgggtggcattggcatggcatttcactttctttttggcaattccaaagggaattttgtcattgaacattttggtcaatcagccggtaaaattacggtaattttgcggaaattcactttttcaaacaaaatatttcacccgaataaatgaaaaaggcacaacaaatgcatttttaaaccaggtaaaaattctcattttaaaacccatattaaaggtttaattttcttacttattccttttgtacaggacaaaacgtcggagtgatcagacaggacgaaacttatcaaagtaattaaatatcgtaattaggcagacaaaaaaaaatcctcatttgattgagaaccattatttacaatattcaaaattaagtgtta

SEQ ID NO: 74528 - DNA, 764 bp, Heterodera glycines
atgccattggtgtcgaccggccatggcaaccaccgatttcgttggtgccaaaccctccccccagcctatttcgtgatccctgcaaatgtgccattggagcggcccatttacgatcaaaatgatagtgccattgaggacgaattggcggaggaagcgaaggcgaagcgagcgcaaacgttcgtccgattcggcaaaagggcacaaacatttgtgcggttcggaaagcgggcacaaacattcgttcgcttcggaaggggtcagtgggaaaattggggaggcggggggaatggccaagcgaagggaaatggccctaattaagggaattagtggcgcaagggaaaataatgaccaaaaataaataaaaatgtccggcattttcagatgcgcaaaggcagcaagaaatggcaaatgagcaggcgcagaaaaaggagtgaaagggacggcggcgaagtgggagaagcaaaagaataatcattttaagaaagaaaggatgtaaagtgacatgacccttttgatcagagaatgttgcacctttacccaaccgaattgataaaatgtaaatgaaaatacggcaaatgactaaagttcgacctgaatacaggtctggatttttggccaggaaatcgaggtccaacaattggggagtggttttgtgtgtaccagctttaattgaaaaaaggacgaatgcatttagaacatttttatgtgtctacgaattacatacgttgaagcttgtcaaaacttacgcgaaagagaggaataaa

SEQ ID NO: 74529 - DNA, 1389 bp, Heterodera glycines
gtctttcgccctcccgtcgttgcggtggcttccgcggctgcgtcctttccgtcccttccgccggcctttgtccctacgagtcggcccatctcgcccaaacgtacacttccctctgcattttgctcattctcggcgatgacttttcccgtttggatcgtcgcgccattctccgcgcagtcgccgattcgcaaggggcggatggaaggtggcatttttggaaggggcgggggtttggtatggacaaaaaaaagcaacggaacttcgaaagaataatttttaaataaaaatgtttggtttcaaattccattttccgttttcagcttttttgacggcgatcgaagcaatgaaaacgatatgcgctttctatattgtgcctgtgctatttgttaccttctcgacgatttctcgccaattagtccgtcccaaattaccctttggaattttctcatccaatttcccgatttgttcagacattccctctctgttggactttgtccgtcgttccgtcagttacgacggtggcattgcccaagggccgtccctcgaaagccatggcgggtccactttctgtgccgtctccgccctgttgctgaccggccacctttgggacggctccgtgttggacagtgccaaaatggaacggctgaaaaagtgggcactgatgaagcaggaggagggcttccacggccgaaccaataaattggacgactcgtgctacgctttttgggtgggcgctacactttcggttcgttcgaactcattcattatcatcaaattaaattacatacattttgaaggagcgctgctggccatcccaccttttccccctttccctgaaataccgaaatttgaatttagctatggatacatccttaacttaattaaatttaaaaaaaaccctggtgggtctaaaaatgtcttcgtctgttgcgtgggtggaggcgttacaaataaataaaaatttgcatgattctgctgctactatacttttatgtttattgtgcattttcagatgctcaacgccctccccttggtggattggcccgttttgcgttcttttctgctccgtgttcaggacgcgaccatcggcggctttcgccgggacgacgactcggcccactccgaccttttgcacacgtatttctcattggctgcgctcggaattttcggcgaaccgcccattcgtccgctgttcgttccgctgaacatttccgcacggacctacgaacattggcaacggattcgacgccaatggcacgacggaacggcgacgggggaggaaaagcaggaaagaagaaaatgaacgggggaaaagcggcgccaaagaccgaccgattgactgctttgttttcacccgaatgtcttaagattgagtccaatttctactga

SEQ ID NO: 74530 - DNA, 787 bp, Heterodera glycines
atgccattggtgttcgaccggccatggcaaccaccgatttcgttggtgccaaaccctcccccagcctatttcgtgatccctgcaaatgtgccattggagcggcccatttacgatcaaaatgatagtgccattgaggacgaattggcggaggaagcgaaggcgaagcgagcgcaaacgttcgtccgattcggcaaaagggcacaaacatttgtgcggttcggaaagcgggcacaaacattcgttcgcttcggaaggggtcagtgggaaaattggggaggcaaagggaggcggggggaatggccaagcgaagggaagggaaatggccctaattaagggaattagtggcgcaagggaaaatgatgaccaaaaatacaaaaataaataaaaatgtccggcattttcagatgcgcaaaggcagcaagaaatggcaaatgagcaggcgcagaaaaaggagtgaaagggacggcggcgaagtgggagaagcaaaagaataatcatttgaaagaagaaaggatgaaaagtgacatgacccttttgatcagagaatgttgcacctttacccaaccgaattgataaaatgtaaatgaaaatacggcaaatgactaaagttcgacctgaatacaggtctggatttttggccaggaaatcgaggtccaacaattggggagtggttttgtgtgtaccagctttaattgaaaaaaggacgaatgcatttagaacatttttatgtgtctacgaattacatacattgaagctggtcaaaacttacgcgaaagagaggaataaa

SEQ ID NO: 74531 - DNA, 57 bp, Heterodera glycines; identical to SEQ ID NO: 56798

SEQ ID NO: 74532 - DNA, 664 bp, Heterodera glycines
atgaacaaaagctacaattatagtagttatttacaaaagtctttcatcttttttttgcttaatttttcaatatttctttatgtaagtatttttaaaattaatttaaaaatatttttattcaaattcattatcagtaaatttttccagctaaatttacttttcttcctttattgtttttcttattttttaagaatttggtgtaaaataatttaaaatttcaatataagtccctatttttctcttgcgttgcctaacgacagaccaacaccgctggcctatgatttttcataatttttaaattaaagacaaaaaattagttatttttttgttaatctgttcacaaattcccccccggaggtgtctgtcagcaccactagatcacaacattcctttaaaaatttcaggatctagtcaaaaaaaaagaaacgacaaaataccagaagaacgtgaatgcagatttattccgcccattggtggacattcgtgacaaaattttgtatttggcaatcaaatattttgggatcgacaaaacggaaaatgaaggaaattgttcaatggtgcagaagtcgaacagcttgaatcttaagaaacgcatcaatgatgaattcaaaaaattaattcgaaccacaagcgacaaagtttaatatatataaatagtcaatca

SEQ ID NO: 74533 - DNA, 1358 bp, Heterodera glycines
atgaagaagcttgtacagaaagcaatgtgtgtgtatgcttcaattgagggcgcaatgcaaaaaagtgagaaggaaaaattgaacaaaatgctaaacaaagaaaaagaagcgaacaaaaacaaagaaaatattcaacgaattggtgaagaagtggaccaagaagttgaagcgagaagaaaggcactgatcaaacaggaaaatgtgagagaatatcacattgatcagctgctgcttgatcaacaacacgctgtagctgatcaccagccgcaacagcaaccgttggcggtgatggagcaaggcgaatcatcggcaattaaagaaattgttgctgttggagaagacggagcagggaaaaaggtaaaagaattcaacaacttgttcagttgagctatagaagcgcgtcgttgagcagcggaagtgttggctaaaggacctttttgggcgtaggagccaattggagttggggacaaattactgaagcttcggggttctccatatattcattcccgaaggaaaggccccaaggggtgattaggcccagggatcccatccaactcttgatggataaatagggaagactaaactgataacagcttgaatggcgaacattaaatgcatgtgtgaaatgaaatgtgatcgataatgattggtcgcaaaaggagcggataaacaaagatatgaaattctaaataagtaaaaattctagggcttcggcaagtataaaacaagaattgaggccctcacttaaacgttcaaaacttttaattttgaaaagattaaaattaaatattcttctgcttatttttaattccatgaagccaaattaagacttttgcgagtttttaagggtatttttgtgaattttccagtcagattgaaagaattgtaaggaaaaaaccaaatgctagcatgagtgattataaacgagagattaagcgcagacaatgccaataaacacatgtgcttcggggtgtaatctttaaaattcgaaaaactgtgattttttaaatacggacttcaaataaataaattgttctgaaaaatgattgaagaattattattaggctaatcaagcactgatcactgaacaacagcaaactgaaaatgttcaggcccaagccgaacaaaattcaaatggaaagaagaaattacatcgtcggaatacgttaaaagatatttttgaggaaacgaaaagtgatgaacacattgttgatcagaatttgagcagtaaacgatcggactcaatcaaaagcgaagcgattagccaagaattgaccaaggaaacgaacaagccagaaaatgagagatccaattcattgcgtatgaaattagtagaaaccgtggacacaaaatgctaa

SEQ ID NO: 74534 - DNA, 353 bp, Heterodera glycines
  unsure (1)..(353): unsure at all n locations
attgagtgggcagtttggtcagaaagtcactgtcttcagagtcgaaatgngcagagnnnggnatnagnattggccatgtgcccataaacggncccaagggnaaagncaattaagaaaggaataatcaaatccatttaatctcttaaggtgtccatgttcaaaatgtgcccaactcggaaagtgtgatttctatgcctggattggccggctcacacacccaatgaatgctgaaccgaaataacattgcttgaaattagatgatgaattgagaagattattattatttttgatatttatttgtagttggacatgaagtagttagtgaacactctttttataaataaattaaagca

SEQ ID NO: 74535 - DNA, 344 bp, Heterodera glycines
atgaacaagatcctttttttatttattgctctttttgttgtgcaaattattgccgcttatgagccaagttgcaaagtttgtgatcaaaaaaataataaattaacaaattttagtgccccgaaaatgaggagccgggccaaaagagttgcaacggatatgagccaagttgtgacaatccgaagccggagatttgcactgcgcgcttttgtgactgttcatgcgactgtgtgaaggaattgttccgcgacaaaacgaaaaaatgtgtgcccaaatgtccgtattgaggaaggaaattgatactaacgatgtaatgatatcaaattatttaatcattcattaatcta

SEQ ID NO: 74536 - DNA, 1200 bp, Heterodera glycines
atgcgccagagaaagccagaaagtacaccacggccaaataagctgccaaacgccccggataaatacagacctgtgaatgcagccccggacaaccatgatcagataaaactttccgctggacagctcggcccgacaaaatggattcccaagcaaactaaaaagaaaactctcggcaaaccgttagcaaataatgcgcattgaaaacctgtcaaatttcgagcctaaaaaattatgccccttaaaaatgcagataaagtcaacatcatttcgactatgtgaattaattagtcccatgattatttttaaaggtgttaataaataaaatggaatttaatgaaagccaaaacaacaacaacggaaacgcaagggaaggacatgtcgatctggcattggcagaagcaaatgaaggccaagcggaggaggaagtgaatgaagtggaagaagaagaagaggaagaacagcagattggatattagtgtatttaaagcattccccataagagtgtctaaggggatgggaccatccccataagagtgtttaaggggatgggaccatccctataagagtgtttaaggggatgggatccatccccataagagtgtctaaggggatgggaccatccccataagagtgtttaaggggatgggagccatccccataagagtgtttaaagggatgggagccatccccataagagtgtttaaagggatgggatccatccccataagagtgtttaaggggacgaccaccatccccataagagtgtttaaggggatgtgatccatccccataagagtgtctatggggatgggattggttatggtaccatccacctaaacagtattatgtggattgtttggccatccctctagcaaacggtatggggatggtggccatccctctagcaaacggtatggggatggtggcaatccctctagcaaacggtatggggatggtgtccatcataggattcatcactatacgcagggattctgaggctttcccgaagaagtaaacgaaatctgatttcagattcgtgatcagcgtcctaaataacctctaaagacatatttctggaagtttttgggcgaaaaaatgtccccactcgaaaaccatgtgcacccccctttggtcccgaattcaaaaatcacttttatttttataactttttactaaaaaatgataaaaacatgaaataaa

SEQ ID NO: 74537 - DNA, 1059 bp, Heterodera glycines
atgcgtttggtgattttgatgggccaaatgcaacggctggccaagttttgtccaaatggttgcacattccgaggaaagatggggtgccgaagcaattgcgttgcaaagattttaacgaacaagcggactttggttgggtcaacattttaaaggaggtggccaccagggatgggctttcgcgtttcgcattttattttccgatttggggaaaaattgccgattgattttttaatttccattgcttttaagaatttacccgtgccaccatttcttccgtcatctaccaattcattttactgttcatgcgccgtcaatgccaattatgccatttgaatttgtcatgactagggcctgtattatatggaaatccatatttttttcctggactgtgggaagcctgaaacgcacgaaaaacatgtttttagctcggttgaagcttcttggattggtttctatatccatatttttccatatttggcgatttatgtccatatttccatattttggcatttaagtccatattttatgtccatattttggcatttttccaaaaaacctctattagaacggcccccatcaactaaattgggattttgacctcaaatcggaaaatttttcgaaaaaggcattttttatcaaaattttgtcgaaaatattgattaatgtatcgtgtttttttcttcaaaaataatttttaataatatatttagcaattcttgaaagttttactttgcatttagcgaatttgaagaaattttgagaaattatacccctaattttgaaaaatttatatccatattttttccattttatgtccatattttgagatttttgctattttatgtccatatttcgcgatttgttgtccatattttatggccatattttgcgattttatgtccatataattacaggccctagtcatgacggcgcttggtcttcaagtcgagggatatgcaggaaaattgatgaaaacatggaaaattcaaccgcagatttcaattagaatttatttactttaatgttttatttttgttgttatttgcacaattaaataaa

SEQ ID NO: 74538 - DNA, 492 bp, Heterodera glycines
aattcaaatggcataattggcattgacggcgcatgaacagtaaaatgaattggtagatgacggaagaaatggtggcacgggtaaattcttaaaagcaatggaaattaaaaaatcaatcggcaatttttccccaaatcggaaaataaaatgcgaaacgcgaaagcccatccctggtggccacctcctttaaaatgttgacccaaccaaagtccgcttgttcgttaaaatctttgcaacgcaattgcttcggcaccccatctttcctcggaatgtgcaaccatttggacaaaacttggccagccgttgcatttggcccatcaaaatcaccaaacgcatagggcaacagaccaaatgaatcgattgaactcaactgattgagatcagtagaattgtcggtgaaatgagacaaagtccactcttgtagtagttttgttcacggtgttcagaatttgcttcgttttcactgttgttgttgcacataaacccgcgttt

SEQ ID NO: 74539 - DNA, 673 bp, Heterodera glycines
  unsure (1)..(673): unsure at all n locations
atgattctacacgaggaagaaggcgaattggaggtcttacgtgacgaagaacaaatgtacaaaaggatggcccggggacgcaatgacaggggaatggtggcatgggaaatgcatctgtgcactccggatgcccccctcggacgaaaggtgatgatctgactccgtagtactatgtatgggcatcattcattaatttgggtagaccaaaattttcgcgatggcttccggggggggggaagtctgaggctgaatttgcaaggtgtaaactttgttatcacttgtttattcaatctcgtttgttatattcctctcagtttcaactttgcagttttctattttttattccatcccatcttttccagattgttttgattgccaatgacattaccttccaaatgggctctttctcaatgcgcgagcatcggttataccaaaaagttcgtgtcttttccctttgcttattacggtgcccactttaaggcaagtgaatacagtcggaagcatcaaatgccacgcatttatgtcgcagcaaattcgggcgctcgaattggttttgcatcggacgttanaaatcgcttgaaaattgtgtggaacgacgaagaaaggcccgaggacggcttcaatacctntcgatggattgtgggggagggaggaagcgacattctctccncca

SEQ ID NO: 74540 - DNA, 1628 bp, Heterodera glycines
atgattaatctttccccattgaccaaagacgactatgcaagacttgtaaatactcacccaaccaaaagtgcctacgacccgaggacaattttggactctgacgacgaaggattgtttgaccgggggacttttgacgaaataatgagcggttgggcgaaaacgatcattgcgggaagagcccgtctacgtggcatttccgttggagtgattgctgttgagacaaggaccgtggagtgtgaattgccagccgacccagcaacacaggactcacaagcaagattggtccaacaagctggccaagtttggtaccccgactccgctttcaaggtcggtttggtgacagccgttaaacttattgttagtttcattgtcacattttgaagacatctgaggcgataaatgactttaaccgtgaggggcttccgctgattattcttgcaaacattcgtggattcagtggcggacaaaagggtatgcacagtgttggttgcatgcagtattatttttatattttacactttagacatgttcgaaatggtgcttaagttcggtgccaacattgtcgatgcacttcagacgtacactcaaccgattgtcgtttatttgcctccgtttggcgaacttcgtggcggtgcctgggcagttcttgataccaagatcaacccaacatgcattaccatgttggccgatccgaattgtcgtggcggtgttttggaggccagcggtattgtggagatcaaatttcgcgaaaaagacctgctcattctgctgagaaaatgcgacccgaaaattaaccaattggaagaatcactcgccactgcttcggacccaacagccaaaggacaacttcaagacgaatacaaaagacgtatagaaaaacttcttccgatttgccgcgcggccgctgtcaaattcgccgacttacacgacacaacggcgagaatgctccagaaaggagcaattcatgtgagcattgggtgtcacccaatcagctttaaaggtattgcgcttttaggacgaagtgccttggcaaaatgcgcgaaattacatgcacggattgatcagtgtccattcgaccaaacttcaaatggcacgccgttatttggatgcaattggtcgcggaacaacaaacgtttcggtggatgagctcgctattggcctgcaatgggtggatgaacacctccaaaaaaccgatgtgcaagtcaggcgagaagtgaaaccagaagaacgtggcacgaataactcgtcgaagaggacgcggttcatctattttgacgagcagatttccaagtacgctgatggagatgggttccgaaaggcactggctgccattcggcaaaaatcgctgcttgagcgactcactgcgttaagcaaagaggagcgtgaccaacttatattagtcttgtccgaaaaataatttttctttaattcccgcatatataattttccgttccaattttgtacctttgtattagttattactgtttttaaaattttattgtgacttaagaattctaagacattcccttttggtgtaatcctcctaacatatcttgcctttgacttaagcccaatgagtttatattttttgtcccaatggctgctataaatatttctgattgtggtga

SEQ ID NO: 74541 - DNA, 114 bp, Heterodera glycines
atgcgaggaatcgctagtaaattcctgtctaaattttccggtgccatcccccgtctcgacgaatttgctgactgtcgcttggccgacataattccaatcaccgaccaacacttc

SEQ ID NO: 74542 - DNA, 374 bp, Heterodera glycines
atggtaaaaacattgtggattgtcagacacgccgaaagagaagacaacataaactcgaattggcaaaaaaatgcgaaccctcaaaaattgaaatcggataacagtccattatcgtcgagaggcataaaacaggccacagaattggcagaaaggtaacaaatattctaattcattttatgaatagaaaaaacaggttttcgaatgtccaaatcgatcatatttttgcgtctccttttgagcggactgtgcaaacagcgacttttcttatctcacagaggaaaattccgatcaaagttgagcccggacttgcagaggtcaatcccttgtaggctttcaggtaatgcttcggaattggtgtcccgacgaaaaataaa

SEQ ID NO: 74543 - DNA, 1353 bp, Heterodera glycines
atgggtctgagggcaccgacgcagttcgacgatttttcaaggaattttgatgtttatacggcggaatggcctgagaaaaagcgcatcagtgcgctggagagcaaagtgtatgggcgtgcagaacgtgcatttgaagccgcaaaagcgacccagccgtttcagtacgcgcttattcgtcgcgatatgcttaaccaactagaggaaaccgacgcaacacaactaaatgcgttcgacgaattgatgattggagtaaagcggggggcaaatgaaacgattgacgcattggcgaatcggatttctggcctagtacgcagagcttatgtgggattgggccaacatttgtgtgatgaatacgcgatcaaatttttgatccgcgcaatggcaagccctgagctggcattaaacctcgaacttgctcgcacgcaaggcatgaatctcaatcatttcgtctcacttgcagcgcgtgcggagtctacccaaaaagcagcaaagcgttttacgaaccccaacccgagaaatgttgatcgaatggacagctatgacagccatggcgtaccaaaccagcaaactcgaaatttttcgtcacgcccggccaacacttttcagcgtcagtacccaaattctttgaagtgctataattgtgatcagcctggacacatttcgcgtaactgtccgcgtaaccgacaaccattttcgccaccgcaaaatttcgaaaggcaaattgtgtcaaatttttcggcgactggtgctaaccgagttcctttaaaccatccatttggcaacaaccaaaaccaagatgttaagcaccataacccatcaagaaattttctccgtcaaaattgtgtgattgtacaagaagaagtgcctcatttgaatgtgcgcctcggaaaagtcgaccttgaccccgaagtcactgacttctttgacaaactcggtactgagtgcagtaaaaaggaagctgtggcatataccatcggaaaagttatggtaacgcgcctttttgtcagtgattttgagaccaatgccatgatggatggtggagcgcagacttcactaatcagtgcaacgttttttatcagttggtcatcgaaaagcatctgaatttgtgggaggcaggattttgcaattcgtgcccgaaaatctcggatgtaaacggcaaattgttggagtgccttggaacagtttcaattcccgtccaccgaaagggattgactgaaccaaaactgtgcactttcaacataacaaaagccccgattggtttcaatttgctgttgggaacggtacctttcgagacggttaagcccgaacggaaggacttttcgaagcacattgaatccgttttccaccgaataa

SEQ ID NO: 74544 - DNA, 1131 bp, Heterodera glycines
atgccaaatattccatcacataaaatcagcttcagcatactaattgttgataatgaatttgctaatggaacaaaatattttttccattttcaatgtgctagccgtctaacaaacaatttttatttggaaaaaaaaatgggcgaaaaaaatgggcaaattgaatttatggacgaaatttgtgaggacaatttgtacagaattggcgtgatggtcactcaaaacacatcacttccgttacagtttcaaataaaagtaatttttgattacttaacatttggtaactgaaataaaaaataataaataaaaattgttgttttttttaattaccaaaagcaacagttcaataaatttccaattttgtcataaattttggaaaaataaaattttttaaaatttaccaatgtcattatttcattttaaatgatgctccaaataggaaaaaagcatgcttttcgaatttcgttgtcagggtacaattctggttgaaaaagttaaaaaaatattatttttttgaaaatttataagtaaaaacgaaattataattaaaaaaatgaaaatttatttaagaaaagaaaatatatcgccctacgaaaatgccctaatccgagaaacgaacgaaccgaagcgaatttgaaaataaactatgaattggtcgatttttaacgaatttcttcggtcgaattgccgagatattgacttgtgatggaaaatgcctacacaaaaagcaatgccaaaaagtgtcaaaatatttaaatctaattaatttttattttcattaatgaattaggacgtcgaattaatgagaaatccgatggggcaggaccaagcttgaaaagagaattaccacaaaatgaacaaaacgagataaaagttcccataataacgcaggatttgttagcaaacttcggcgggggtgaacaacaaaatgagcagcaaccgaatggagtaataaaaaaatatcgatttttaaaaaataattaaaattaattatttattaattatttataaaaaatttagccacgaagaaattttgttgaggctttaaatttgttgggcaattttgcgagtggtcatcaccagcaacatacagaagaagtgctgaactaaacttttaaaaaatgaattaaaaaa

SEQ ID NO: 74545 - DNA, 697 bp, Heterodera glycines
atgaaagcaaatggacaaaatgggaggatgaagcgaacgattggcgaattcgtgatcagtggaatcaaattggcctttatatttatgatggtaggtaacatcgtggacgggtctcgattttcaaaaaattcaaatttatttatttatttttaggcttcgaataactcccggcccaagtgatcaatagaagtgaatgattgttgagaattgttcgaaatttatggaatattgacgtgatcataaaaattgttgttgtttattttcgttggaacgaccaatttggatttgtgttatgatgccgttaggatattttatggttttctgaagtgtaaaaattgttagcaaatatcagctcaattttaaaaattttcttggcgctaactattgtcatcacctgatttctgcgttaaaattttttcatttgaacggtcatttttcgtcactagaaattagggttcgagccccgcccccgtcacccccgcccccgccgggggcgggacaggttttttggcctcacccccgcccccgcccccgcgactcagacccccgcaacccccgcccccgtgaccttcacccccgcgggggggcgcgggggtgaaaatacacccctaagaatgtcatattcgtgggataaaggcaaaaaatttatacaattttgaatttttttaaccatcttgagtaatttttatgaaataaa

SEQ ID NO: 74546 - DNA, 389 bp, Heterodera glycines
atgtcagaccgcagaaaagaagcggaggaaaaaatggaaaaagcaatgtaaaattaaaatgctacatttcacaaatttaaattttaaaatttgttttcctttttttcagcttcatctctgctgactgttggctttgtgtcttcgatttgcttccgacttctcaacttggccttggaattgcgctgatcagtcaccgatttgacctttacatcgatgaacacttcaaaacgcgcaaatggacattgaaatctattcaaattgatcgaaaatttggaaagaatggcaccaagcaaatggaaattatcaatcactattggaaaccattgccaattccgcaaaatccgctgccaaagaaaatcgtcggattcaaagacatttcaatagagtaa

SEQ ID NO: 74547 - DNA, 738 bp, Heterodera glycines
atgtcagacaacggaaaagaagcggaaaaagagatggaaaaagcaatgtaaaattaaaatgccaatttttaattttgttttccctttttttcagcttcatctccgccgattgttggctttgtgttttcgatttgcttccggcttatcacttggcctcggaattgcattgatcagccaccgtttcgacttttacgtcgatgaacacttcaaaactgatcactttggatttgtgttatgccccttatgataaattcagtgatttcctgaaacttgaacatttccgaccaaacaaaaatgcactactttccagcagaatttgtttggggccaatattttggttttgcaaaaatgttataattttgggttggatgtctctgaacagacctaaaaatgtatttttgaaaatttgggattttcgaatccgggggttgggaatcgtcggatgtcagattggtggtcaaggcaatattttaggccccattttttcttcaaaaattcatataaaagacggagaaaaatggcattgactgtcactttttttttgtacaaatgttggttaatcagcaggcggcggcgccgtgcaaatgtttattttctttgcttttttagctcctccattttgtttctaaattatccaatcacttttttgtttaatttaaatagactaaaattagtttttttggttcacacaaaaagacgaaattgaccaactgaataattgtgtccgttttaaataaa

SEQ ID NO: 74548 - DNA, 863 bp, Heterodera glycines
atgattcataaccagcattgtaacggtgttcctcttgaacagcttactgctgaacaaattgatagaagccaaagaagagatttagcgcaatgttctacggatcctaaatctatatggcgagaagtattgtaaaattttaataaatcccaaatagaacattttagggatcagaccggtccagagaacatgatattgctgaggatattggggttgaagatacgactggaataccatttaattacccgaattggcagacagtacggagtgcatataaccgtagaagaaaaaatcatttaggggattcgttagacccctttaatgttcccgaaagtattttcaagtgaaagcactgaaaacagcatttctagccaagaaaatcaagggggtttaatttacttaaaaggaaatataaaatataactaataaataaatattaaattttaaaaccaaaataaattttaaaatcaaaatattaaaaattaatgaactcataatagttcaacatgttgctaccatgatgcgttctgttattaaatttgtttttaatcctataaatgaagatcaaagacaagaactatgtgaaacgtggttttacagatttagtaagatttatttctgatcaaaagtaatagcaaatataggtgatgcaccgattgaatatccagtaccgtttgattttgtttcttctgagtacggacccggtgaagttatcagtatattaggagatggtaattgcggttggcgagctgtctctgttgctatgactggaacagaatcaaatcacgccgaaatccgaagagatgtcattgagtatttgcaagagaccattaaccaaaattcttatacagaaaattcttggtggt

SEQ ID NO: 74549 - DNA, 861 bp, Heterodera glycines
atgctgaagaattacgtcaacaagtacatgcaattcgactttgtgctgtatgcctatttctacgaagttcgtgtgaacagaagaaagtacgtccacttcttcccgtggcatgccaattggtggatgcacgagagcgaaacggcggacatcgcaacggtggaggtggcctaattaaattattgccaattttgggtgggccaaattgaatagtgccaatttagggctgggcccaatacattattgccaattcaggggtgagcctaattgaattattgccaatttagggctgggcccaataaattattgccaattcaggggtgagcctaattgaattattgccaatttaggggtgggcccaattaattgccaattttgggtgggccaaattaattgagaattttgggtgggccaaattaaactattgccaatttaggggtggcctcaattaattgacaattttgggtgggccaagttaaattagtgccaatttggtgcatcattgtgaaaattgctttgatgtagatccattaatcacccttttcagcttaacggcagtctttttccggagagtgggaccgctgaaataattgaggagacggtaaaaaataatgaaaaattacactaataagcagtggcttctaaatatttttgccgatttgggcattaattacacctttttgaaatacttaaatgcgcacatttttctttgcttagtccgaacagtatcgggatgaaaagtcatttctgaatctcggcacgccgctgttagtcggggaaagcgttgtgattcagggccaaatcgaccaaaatgcgacatccgtgcacttttatttgttgcacaatacctttgacaagaataaa

SEQ ID NO: 74550 - DNA, 585 bp, Heterodera glycines
atgtcggctaattgtccgtggttcccacctcaattagtctcaattagtccccctttgtctctgcccctgctcgccgactctcaccaaatcatcggggctaaatttggtgccattctccgtcatggaaatttccatgacaaattcgccctttttgttgagcaaccgaaccgaaaattcctttgcttcttcgccaattcggaattgcactcgcaacattttgccaatttcaggtgttccttcaatggtaagctgcgaattgttagctgcaatccgacaatgcttgggaattcgtggcaaaacgtcggcgaaactcgctttggtcgctttatccggattttcagtgggatggaggaactttaaatggacggaaaagtggaaaaattattggaaaaatgccatccccagactcattcttattttggtgactcagaaattattttttaattttttttaaagcatttagttgaaaaattgttgattttaattagagccttatattttaggctctagcaatttccaaaataggtatgttataggctctaaaaaatccataaaagaggcactaaaattggaaaataggcacta

SEQ ID NO: 74551 - DNA, 523 bp, Heterodera glycines
atgaaccacaaaagcttgatcatctttgtatttttgactgcattttgcagtttttcttatcaaattgaacccgaaaagtaatttttgaaaaatatttttgtgaaattttattttgcaaatttagggtggtttatttgagtgatgcgactaaaaattatttcaatacggaatacaatgccatggaccaatgctttaagaaagaatcaaaacaaaagaaaattaattcatttttgttaaaattcaaaataatcggaaaatgcaataaagggtttgttttttaaggtttttaattaaaattataattaataatttaacctaattaacaatttagtatgctcatttgctaccccggagcattggacgccgaacaatcaaaattttcctttggaatggtcccagaaaagcaattccgaatccaaaatatagcgggggtaattcggacaaattgcacacaaaaatttgatcatttaaccaattaattaattaattaattgatttttaatgatgattaaaaaccaataaa

SEQ ID NO: 74552 - DNA, 1471 bp, Heterodera glycines
gtgtttccatcccgtgccatcttcccgcttctcgtcgtgacacttcgcttggcatttcggaaccgctcaacggcactttttcccccgcagaagtgtcaaatcgtgtcggattgtgcaaaagcgcacgcactcccaaactttcatctcaaatgaagtccttctcattggactgtgccgactttatgccggcatcgccgcccgtacagccgaaaaacggaggaatacggcacaaccattacagtaagttagcatgtaatactgtaccacacatcggcaaaattaatccaaaaaactcccaacgatgctttgggacttcaatttatgccacggcattttttaaaattttctacccaatgaataaatttttaaattaacaaatttgtttttaagtgcataagccgcccattcgttctgcacgggcggcgtttgtgagcagcggcggcgcacaaatggcaacaattgtccccggccaatttgagaggagggaaaagcggactgagtccgcttgcggcgccggtgccaatggttcggctgttgttgttggcactgtgagacggcagcgccgtcttccgcccgtccccacgcaaaaaaaggaaaacgcgcaaacggcgcccagcgaacagccgccgattcagcacacggcaaaatgtgaatttcaaatcaaagctgcaaattgaacagtttggtgtcgttttagtactcatcagcaggccgcaactgttgcacattgtcacccacgagtacgcttcgtccgaatgcgcacttcgcccgggcgaccgtttggtggtggtgtacaacggggacccggactggaagcacgggttcaaggtggtcaaacaaccaaaatgggcggcaacagtggtgtaaatgcccaattttatacagctcaatgatcggttggagcagctgatcacttttcccagcagttgtgtcgcttcgtataaagccgaggaacagccgatgcgattgttgcaaagctgcaatttgtccgatcaaaaattgcgcttgtacagggatcaggtgggaaaacgcctttttgaagattatttcaacatttaattaatgtaattaattgtccattagtcggctatttctttgacaataaaagtcaagttcaaaccttcgaataagtcatgacaactcgtacaaaaggtaactcgtacaattgcttaggttaggcctatgcttttggtttacgcttaagcctaagctttaggctaggcctaggcttagtgcttgagctaggctttattttgtaaaatataagttggtttttgtacgagttgactctgtaaaacagtgtacgagttgccttaaattcaagcgagaatctcgaaacattccatcatttgcccattttcaggttgtttttgcccagcccgactcattaagcaaagacggcaaagtgatggtcagaaatgaacacgacaaatttgccaaatgtcccctccaattcctttcattggcttga

SEQ ID NO: 74553 - DNA, 405 bp, Heterodera glycines
atgacaatgttcaaggaactgaccaatcgacaattggtcgccattgttatgttggcaatttcaaatctgtgcagcactgtggtggtcagttgcataggaccaatttacccgggcgaagctaaacgaagagggtcacttgagaattcacatgcaaaaagctaagaattacggcttcagaatgtcagaggctcaaatcggattggtctttggtttgttccaattggtgatgttcatttctgcacctcttcttggcaaatacgtaaatatttttttgtttttatttattgttattttactaattgaaaacaaattcagatgcatgtgattggctctaaatggatgtgcatcgctggccttcagatagccagtttggctgcaattgcatttgggtacgttgtttcttga

SEQ ID NO: 74554 - DNA, 356 bp, Heterodera glycines
atgtgtgcaccacacgtctatttttttctggatggttattgcgctcggcggtaatttgaattttactctaaattttttttactaattttcagttgttatttccgttttgcatggcgtcattttgtcggctcccatttgaatgccttctgtaatggaggaagaaaaaaaaacaatgaactgagagattgtttgcttaaaaaagatgcactaatgtgataatcttaattttttattcatcataatatataatttaaaaaaccctaaaaaattcacttgccgtatgtacattgtgacagaataggcatgttaaatggaataattcagttataaaaaggtccatgtgcaattttatcgga

SEQ ID NO: 74555 - DNA, 327 bp, Heterodera glycines
gcaataagtatttcaaaactgaatggggttgcgctgttagtcaagaccgtgttagcattaaccaacaaattggggaagctgtcaaggctgaggtggactgtgaagcaatgtttggccaaaaggacgtggatttctcaaatgaaaacttcacaattgatatgttggaagtggaaacgaccactacgaccacgacgacgacgaccagcagacaattggaagttattaccacggcacaaccaaccacaactaccagcagcagcaccaccaccaccaccaccactaccacgaagccaacaattgaggaatcaacaaactcaacgaatgggg

SEQ ID NO: 74556 - DNA, 2015 bp, Heterodera glycines
atgccgaaacaaaaaactgtctatgaaggaggttttcatgtaatattataatttatatatttagaattacttaaagattataattaaaatatctaaattacttttttttttgcaactccattatctagttgcctatttataaaattaagtgcctacaaatccggtctctatttataaaaaagttattctataaattgataaaaataggattttttcatttattctatttttcatgactttggtattttttgtgactttttggcgattttttatgaagctctgaacttgctatttttaacagattttctattgatttttttaaaatataaattataaagatttaaaaataaattaaaattacagatcacggattacggaaaataccttgttttcgactcccccgtaattacgattaagaatttgcgtaattgaaaatccattttcatgcagccctgatttataagcataaaaataatttgcaaggtcaatttaggttttgtggaataaatcttgttttataatctatttccattttcttccatttagaatagattgttttatgtgtctggttgtccgaataactgtgtttgcggagagctaaccgaatttataacacttggggcgtgctgcgaccactcaaatgattgtgcttgttgttcaaccgtaataaatgctaatattatttttccacaaattttggcaaaatgttattgtcaacaatttttagatttttttacaaattaactagctgctaccttttatgatttttaatatataaatattttcagaattttagcacaaataaataaaaccatctgttatttaacaaattccggcaaaaagttattcaaaaagttgaaaaactttctgataataatgttacacccctgaacttggaagccttttatcttttttagccatttttattacttttttcttgttgaactaatttttagagattgaataaaaccctctatatgtaacatttacatacataatattcattttagcttcggagcacagagcgtccacctcaaaaacgttctgaaaataatattacacccatgaacttggaatcatttagtcttttttaggcatttttattgtcttttttgtttttgagcctaaacactaatgatttattattttttaggaactgaagaaaaccctctttatctaacatttacatatataactttcattttagtttcggagcaaacagcgtccatctcttccaaacgtacgtaattgatttaattttgctaattaaattacgttttattaaaaaaaagataatcacggagacaaaagaccacggagaagtcaaaggcacttgcagtaccagctacttcggtttagtatttgtggtttgaatatttaaattttttaaaacaattcttagatcttaaactaagtgagcaaatgaccaatttctacaaaaattttaaactcttgtttaggacgtacgcattgttcggatcaaagcaggaagactgcatgctatttacaaatcttgtctgcctaccgttacgaaaaaactgaaatcgaacaagatattctttcgagctactcaaactctggggttgatgagcgcaacaaatattggaataattggctaaacgcttttaaatgccattggatggaagggaagccggaatccgggtgttgtgcagaaaactataacttaattcgtcatactaaggtgctggctgtaatgatctcaaattttaaaatcgattcaagaataaaaaaatgtcttccaaaaagacagccggatacattgttaattgaaaatgaaaattttaaaatagattttataaagacattttttaattctttagttagctcatagtccggtacaacatcctcattgcgcgaagggaaaatgtttttattccggtgtttattgggtagtatatagcatgtttatttttgaatcacttaattggtttagatcatgcatcctatctcagaggctacatcaaaatcggtaagtacattaatatttcagttaa

SEQ ID NO: 74557 - DNA, 762 bp, Heterodera glycines
  unsure (1)..(762): unsure at all n locations
atggtcaattatttgaaatataaagtaactataaattttaagaactaaaaaaaattatatttatttaatttaacaataattttcgcaaggtttttgatcattgctttaaaaaaatttgctgacgaattgtccactgacggattatccactgacggattgtccatttactggacggattttcccttaactgacggattgntccattactgacggattttccttaactgacggattgtccatactgacggattgtccgctgacggatttttttacataatgttattcataacttggccccaaatgaaccaaatattgaaagccctatatgctttcttttatcctgcaaacaatttactgaaacttaacgaaactttttgaaattttgcagggtgatagaaaacacttagagcttgtaaaattatatcaagaattaagattattaaaatcaccaattctccgttcctaccgtatattgtttttcccaagtcatgcgcctattctccaattggctcagctattaacggaatgttttatttaatcttcttataacggggagtcaaacgattgattttttgtaaaaattaaaagtaaaatacataattcttctcaaaaagaaacctaagaaacaaaaaagaatactcttagaactgttttaaaatcgttaagctatcgtatgaaaaatactaaattatatagttatcaaaaagtttttcagttcataaaaaaggaatgaaacgtcattttttaaaagaagataataaa

SEQ ID NO: 74558 - DNA, 3722 bp, Heterodera glycines
atgcaaaatcagcctcccaagcatccctctttgttttccattgaccaaattctatcggccccaagcaaaaagccgcgtcgcggcttcctcatcaatgaattgcttggagaggtgcttcaagagggcggcggcagcagcagctcatcatcatcaaagtctacaaaggaatacgtcaaaaagctggacagcaccattgagcatgtgccccgcttccaatacagcaaaattaagtcgcgattcagcattgaggatgtgccagcagcaaatcctgagggactcctggccggcatcttccagtactgccttgacgcagcgatggaggagagtcgtggacgtggaattgaacccacgcatctcggctgcatgatcagcagtccgttgctcaccggcggggacattcccatccccgttcgacaaatcacagacaacaccgtcaacaccatcctcaaccaattcaccaaagtggcacagagcaagcagcagcaaaacgtcacactgtggggcgagccattcactgtggtggtgaccacagttgaccgtactggactgcccggccgaagggtgctgaagggcggtgctcgacgaagcctagcaccagtgcatcatcgggtgacggaaacttgtttgattaaggtccaacatcacaacgcaagtataattttagtgacaattttgttaagatttgcaatccggacgggcattgcctcttctacgccttgcaggcgacaatggtggccaaaactagtggttggccccgttggaagttccatcgctatgtgcacagcctgcatggtcaacagggatgtctgaggcgggatgctttacaactgatgcagcaaattggtgtacggaccggtcggaacacctatgatgctgagatttgtgtgccgcgtgtggtcgatcactggaacaacacgcaacagcagcatcggtttgcagtgttcatctttggctcatcgggacaatacaagcccttgtacaaatacatcaacgatcattacgacactcccattgtgctctatttgaacaaccagcattttgatggtgtgcagaaattacatggcttgtttggacaaccctactgcctcgactgcgaaaagccttatgagcgtccgtcaaggcacctcaattcctgtaaggcgcgctgtttgctttgctcacgtgtcgggcctgcattcccttgtgttccattgggcggctttttccatcaatgtgcgggttgcaataaaaagtttcgcaataacgggtgcctccaacaccatttggcatccaacttttgcgcccagtcaaagcaatgcaaggactgcggcgttatatgggacacacgagtacataacagagatgggagaaaagtaaacattaaaaataaaataaaattttgtatttcttgctggatttagggtcacaaatgccacgagagctattgtcagctatgcaacacgtttcacaatcccgagcgggggtgcttcattcagcccattgagccaaaagagcaggacccgtaccacattgtggctttcgacttggaaaccatgcagcatcaaccagtggacccccagcagccagagaagagagagcaccagcccaacttcattgctgcccgagtcgcgtgccctgagtgcattgagagcggaaattggcggagggcaacagcgggctgccgattttgtggtccacatcgaactgtcgctttctgccagcgaccctttgaggacactcgtgtggacaaacgagtggtggcggacaacccactgcaggcgtttgtggattggctcatcttccaactaccagccaaatacgacacatacgcttactcacactttggcggacggttcgacatggttggttctggtctttcgcgagctattccggattgggttcaacccggagatgcttcgacgggtacacacaattatgaattgtgtccaaaaatttttcaaaatttcagggcaacaaaatgtatgagatgaaggtgcgcaagcagaagaggcgcaacccgaacattgtcttccgggactctttcaatttgatgccgtgcgcgctggctgcgctcatcccctcctacggcctggacgtcgaggacaagcccttctttccccatttggccaaccgacccgagaactacggccgtgagattcacccgacgcccgaagactacttggctaatggaatgatgcccagcaaaagacagaaatttgacgagtggtacgccgcgcatcgccatgagccctttaaattggatgaggcgttagcgaggtactgtaaaaatattttgctataacaataattttgttctcgattttcagttattgcaccaacgatgtggaaatattgatggcagctctggtcgcctttcgccgggaattcttcgaaatttcacggcgccaagactacgttgatgggattgacgacaaggagaaccacgacgggattgatgtgctgcgtgagtgcatgaccatcgcgggggcatgcatgcggcacttccgcaccaaccacctgcccgacgagcacttggccattgtgcccgagcgcggctatgacaacgcgcagaaccaaagcctgctcgccttgcgcttcttccactggtacgccaaggagcatggagtgcaagtgcagacagcccacgcggctgaaggagagaagcgcattgggccctactccttggatgagtggattgaggcggaacgacgcgcaattgaagtcaatggtaattgagttaattatttttcaccattattataaaatgggcaattttaaggctgcacgtggcacgggtgcaaaaagtgctacccaaacgacaacatgctgctccccagtgggaagactgcggggcaagtgcgcgaacgggattccaagcggatggaatttctgagagagaaggtcaaccgagtggacgtctacttggaatgcgaaatccatcggatgctggagaggagcaaggaaatgcgcaaggcatttgaagactatgtcgatgatggcccgctggtgatccgcgacgcgtttatgggagggcgaactggaccgctgaagctgctgcgcaaggctggaccgggagagaaaatctcctattatgacttcacatcgctctacccgtatataaagtgagcactgttaaatttgtaacaacttttaacattgttttctttacagcttcacaacccgttaccccattggcactcccaaagtgcatgtgttgaaccaggaagtggattggcgcagtgcagcggacaacccctaccctttggcattgctcaaagtgtgggttgtgcctccccgacgcgtcgacgtccccgttctgcctgtgaaagttggaaagcggctttgcttccccctgtgcatcacttgcgccaaagagcacccgacaggaggagtggacaacgactaccactgcgagcacaatgacagacagcgggggtgggtgatcacatgcacctccattgagctcaacgagacgcttgacgagggctacaccgtcacgagggtgttccgtgtcctcgagtatgagcaaagtgacgacaagctcttccgcccgtacatcgctgagtttatggcccagaagatccaggccagtgggtttgacaacagcatcagaggcgatgcggagaaggaacaacagtttgtgcgggagtgcgcagagcagttcgacatcaccatcgacccgaccaaaatggcggtcaacaaagggaagcggtccctggccaagctctgcttgaacaacttat

SEQ ID NO: 74559 - DNA, 747 bp, Heterodera glycines
atggaaaatgagttgaaggagtcaagacacttaaacaagatcagcaaattggaacaacaaaatgtgcgtttcaattggcaaaaagttgttcaaaatttaaaactgttggcgaacttaagatagtgattttaaaattatttaaaaacaggggtggagattggtcggattgtcatatggcttgttgtttcgatattagtcctttctagtgcccagataagcacattttggcatttttccaggaatttcatagaaaaagtgaataaaaacgaaaaatacactcctaagaatcgtcccaaaattttcaaatatacccctaagaaatgaaaaaaaaagttttttttaaaaatcatttccaaaatttattattgtatttattttcttggcaagttgcaattgtgcgggcgaaattgggaattttgtgcataaagacactggatttttcatttttaacacctatttttgcacctattatgtaaataaatatgattttgagtgaaaaaaaacaaatttttatgacaaaaatatttagaaggaacttcgagaaaagataaagcactgtggattggtggcagagcttaatgtactacaggagaaagtggccaaaattggagaggaaaagcaaagggaaaaagaattgacaaaatacggtagaaattaccaaacattgctttagctgtattttttattgaatcgatttaaatttatattttttttaatgacccagtttcagtccatgctaatattaaa

SEQ ID NO: 74560 - DNA, 278 bp, Heterodera glycines
atgttgcgttcttaacgcaacaaaaaattgagcaacttcgatgggcggttcttcctcatccaccatacagcccagacatcagcccgtgtgaccactatctgtttcgatctatggagcacttcttgagagggaaataatttgctgatcaaaacgaggtcgaaaatgcattggatgacttttttgtatcgaaaaatgatcagttttataaaaaggggattgaaatgttgcccgaacgatgggagaggatcattgatcaaaatggtgagtacatcattgat

SEQ ID NO: 74561 - DNA, 1804 bp, Heterodera glycines
atgtattcgattttgttgaacaacaattcctctcgtattttttactatgaaatttcgctcaaacatttgaaagggtgagagaatgtatagatttttaaatatataaagtgataaatacattaaaattatatttttaaaattagatttattgatttttcagttgggccttcttcggatttgccctaaggcagcagcaaacatcaaaagatgaaacaattcgatatagcacgggcacatatgcttatgaaaagaatggcgagctgtggattaacggaaaacgaaaggaaggaagtgatggatattcttacggtgtcggagatactgtcggaattggcgttaatttgtcgagtcgaaggatcattttcacgaagaatggacgacaattgggttggtaataaaaaaaaaaaagtttttttaatcatcatgccaaggattttttggtacaagataacggcgtgggaagagatcccacgcgggattaactggggtcccagtccgcaattcccgcagttccccgacgccatggggtgcctaattagtaattactgcattttaatttacaaaagagtccccctttgattttataaaatttaaaacccatttgattttaaggtcacgcctaatttccttctagcttctttctattgggttgatgaaaaagttctgaccctttaagcacttcaacattaaacaattttttatttcacaaaaaacaaatgttcaatcaatgatgtactcaccattttgatcaatgatcctctcccatcgttcgggcaacatttcaatcccctttttataaaactgatcatttttcgatacaaaaaagtcatccaatgcattttcgacctcgttttgatcagcaaattatttccctctcaagaagtgctccatagatcgaaacagatagtggtcacacgggctgatgtctgggctgtatggtggatgaggaagaaccgcccatcgaagttgctcaattttttgttgcgttaagaacgcaacatttaggcgaattttttccattttttgaaaatcgttcgattttgcaaaagtaatgactatacaacgaatgcaaatggccaaaagatggccaaccgtccgctgattcatcccccaattgcctgcctccctttttcaatctctttagaattaaatatcatttttttgcataatttgttttttcagagggtcagaactttttcatcaacccaataggaagaaaaacttggagcctggcttgtcggcaccgtctatcccttctttcccaaaaaacccaaaataattttcatttccttcaaatttcccgtgcttttttatttagataattctgagttgatggctacatcctcctgtgctgattgtttctttttccctttcgtcactttgagtttgaatggcgctggtgataaaattgaggccaactttggccccaacttcagatttgatttggtcactctttgaaggaagaaaatatcacttttgatcagctttattgattttttcctttttcttttcctcagtattttcataaaattattttacttaaatatttgatgaattatctcaaaatttggcattttgtcagtaggatttcgtatttgtctcaccaatccctaaacttatgggactgggaatcagggaaccggaattcaatccgattcggtcagattctcgatcccggcccggaaagcagttaatatgtgcattttgaccttttaatgaaagaaatgtataaaaaaaaatcaaaagaaagcggagcgaaaagataaggccaaattggacgacgaaatattggggaaagaataaa

SEQ ID NO: 74562 - DNA, 3010 bp, Heterodera glycines
atggaaaatgagttgaaggagtcaagacacttaaacaagatcagcaaattggaacaacaaaatgtgagtttcaattgccaaaaagttgttcaaaatttaaaactgttggcgaacttaagatagtgatttttgttgtgtccccgggtttaaggcttaaatacatttcaaatcatcattttaagagagaggaatttattataaggaaaagcattgacaaataattatgtgttaaaaaccgggaatatgtttaggtcaacaacaacctcagagcattttgggtgggtcagtgcaattggttatttgggaaggcataacacaaagggaataagagaaatggatggcatattcaacagaggggaaaaggaagaaatggcacgataacattggaaatgagagggataggattggcttgggatgggacgaacagagggacaagtttatgacggtattgggtcggggaaagtagggcaatttacattatgtacaaaatatgaaattttgaatgctgcggatacagcaattttaaaattatttaaaaacaggggtggaggagattggtcggattgtcatatggctacatgttgtttcgatattagtcatttctagtgaccagataagcacattttggcatttttccaggaatttcatagaaaaagtgaataacgaaaaatacactcctaaaaatcgtcccaatattttcaaatatactgaaatgaaaaaaaagcttttttaaaaatcatttccaaaatttattatttattttcttggcaagtttcaattgtgcgggcgaaattgggaattttgtgcataaagacactggatttttcattttttttgacacttattttcgcacctattatgtaaataaatatgattttgagtgaaaaaaaaaacaaatttttatgacaaaaatatttagaaggaacttcgagaaaagataaagcactgtggattggtggcagagcttaatgtactacatgagaaagtggccaaaattggagaggaaaagcaaagggaaaaagaattgacaaaatacggtagaaattaccaaacattgctttagctgtattttttattgaatcgatttaaatttttttaatgacccagtttcagtccatgctaatattaaaacaatttagaaaaaatcagcgaaatgattaagcatcagaagcaaagttcatcaaaaacaaaaacggaaaaaagtgatgagaaaaacaaatttattaaaatatagttttcatttataaaagttaaaaaatagaaaattaaaaatataaatattaatttatcatctttaagccccaatcgatgctttcgaggcaatttttggacgaatcggtgaagttgagaaaaagccggcgacaaaggggaaatatggaaaaagaatatacagtaggaaattaatttgccaaaaaatttacagtaggaaggaaattgctcaaaagtcccgttgctcgataaaaaattttttcttaagcacaagacacttggatgttcgagtcgacttcagcttttttccaaattctttccgattgggtcggtagggaaaaggcagcatcgtccgacaccaccgcgcaagtggaaattgaactcactgagcaaacattcgctgattgtcgggaagcaattaagggttttgtgcatcatttgatgtgtacaattagcataataatttgcttaattaaagcgctcggaattttttcgaacaccgaccccaaagtgctcctccgtcgttggcgctccggttaccgcaaacggcaccccgaagcaaccgcccaagtccaatgcggtgtgtttgtgatcgatggtgaacagatggacgagcaggaaaaacggacgtgtggtcagcgtcgggaggcacctgcaagattgggtctgccgggcgcttggattggaagggaatttgtgatcataagcagttcaattgcaattttggcattataatttggaaatttcacgcctaatagacacaaaatgccaaaatagtatgaaatgggctcaaagagcgaaaattctcctgcttttacgtacattatgaataggactgactgtcaattatattaaatatatttttttcctgtattctttcgggattttaacatatttggtagataattttatactttttagcactttttcttaaataaccatttaaaaaattttatttacttatttgatacatatttcgggatttttttttacatatttatgtttttgaccattttttgtacatatttttgacagcccgaattatgaacaataaatttttttgaacctaaaacgtcttatttttcaaatattcaaagaaaatatttttgctttctttaaacagttggtcaacggaaggaccaaaagacacttttggacagaatcgatgaattggaaggtcaactgaaatcactccagcggcaacaggaggacgagacgagcaaatacggtaaaggaatactgtaaatacaatatgcaacaaaacaaaaaaattacaaatttttagtttctgtcgaattattcaatgagatgcaaaaggatcataatgaacttttggagaaattcaatgcattggaaaagcaaatgaatgaactgcagcagaacaagacgaatgaatgttgttgggaaagtgttgggaccagcggcggatgtgcacggacgcagggacatttcacacggaagggggacttggtgaagggcaaggaacatctacagccacaggtcgaacgtggcgataatttgatttcagatagaatttaaaaagaaaattaaaaaacccaagaatttatttccggtataaatttgtttattattaggttataattttatgattttgcacatttttctgcgcatatgctttgaagaaagggactcaaaatagcatttctacattaaaattttttgatttaatgaaagttttctttaaaattgaaaaattttgaactttttataaaaaaaatttttttaatttaaatttattatataaaatataaaaattcggaaatgcatataaaaaaataaa

SEQ ID NO: 74563 - DNA, 881 bp, Heterodera glycines
atggcattgctttccgaccgtttcgatgttttggtggacaaacatttcgatggaaaaagcgaattgacaatttggagagcaatcgcaattcgcaaggacaaaggaccaaaagcgaaactgtctgttctgatcgatgacaaatgcgtggcatttccatttcccgaccatccgttgcccaacaaaatccgttttaaggaccttcagatttagtaaatcaaaaaatatacagaaaaccaatcttcatttttccccttttcagttacgttgaccattctgtgctcgcatttcttcgttccaacaagcaaatttgggacagaagtggcatcaaattggatttgtttctgcctttatatatgaccgacgtcaagctcatttgggatgtttttacccgcgaaatttggccactttttgcgaaaagcattcggcatttgagctttcatgccgataatttggaaaatttgcgtcgccgcatttcaccgacacttctcactgatcttgatcaattgtattcaattgattctggtgctctattccccgatggaattgctgatgatgggccaaatgcaactgctggccaagcgttgtccaaatggttgcacactccgagcaaaaatggccaaccgaagcaattgcatcgcaataattattttggtccaccaaagctggaatgggtcaacaacttcaaagaggtgtgtctagccatattttctataaattcagtttaagggtagtatgcaatacgttccatgtaaaaaaacaaattgtttagtttttttccattttttatttagacatttcgccgtgccaccacttctgtcagttacacaattcaactttatattattgtggaaccaatgccaattgaccatttgaattggtga

SEQ ID NO: 74564 - DNA, 415 bp, Heterodera glycines
atgtccaactgctataagtgggaagactgcgaaaattcgggtgccaatgccaatttgaaccatatccgatttgatctgtggagtttcgataaatccattgggtgagcagcaaaaacagcaatttttgattttgtcgaaaataaaaagaattaattaattttaggccattgtcgccaccagcggaagaagaaaaagaagaagaagcggatcaaagcaacaatgaaatgttctcgacgactcccgggccaagtggatcagcggaatgaataatttattgtatttgtgaagatgtcgtctaattgcgtggaaatgaattaattatttttgagaaatgatcgatctcgccaataggaaacggattttatgccatcatttctctttgaaatgcttttgttgattctttcgttcgaataaa

SEQ ID NO: 74565 - DNA, 960 bp, Heterodera glycines
atggttgcacacgccgagcaaagatggacaaccaaagcgattgcgtttccgtgcttatgtgggcccacgaaatctcgaatggctcaacaatttccgagaggtgatcactgatcagccatattttcattaaacgacgactaattgatttaattgtccttgattttgacgagcagacaacggaaaatccacaaaattgccaccaatcgatacattgccatcgattagtaaagacattttctgttctggtccattatcgtttgcttttggtacttcgtccttgccaattctgatcatcctccaaattaccaaattggatttgtatgtgcctttatatatgaccgaaacttgggatgtttttgcccgtcacatttggccaatttttgcgacaagcattcgccatttgagctttgccgatggcgatgatttggataatttgcgtcgtttggtttcccctacaattctcactgattgcgaccaattcaaaatcaaacttctggccaggcattgtccaaatggttgcacactccgacaactgatggtcaaccgaagagattgtttgcagtggttatttggatccaccaaaaattgattggatcaacaacttcaaagaggtgtctcgccatttttctcaaattttgtttttcccaattttgtttagacatttctccgtgccacctcttcggcagttacactgttcgaattatttttcgtgtgaaaccaatgccaattgcgccatttgaattgatgaacgaagtgacaaatgagaagctgacactgattaagggtggagcttttcgttggctgttgaaacggtgcccaattgttggggagacggcggcggtggttcagaaacagcagaagaaagacgagaaattggaccgtttgaacggagtctacttctgtctttacgatgccattttctcgactcccgggcacattgatcagcggaagaaaaagtga

SEQ ID NO: 74566 - DNA, 880 bp, Heterodera glycines
atgtcacaacaaaagagcttttcctccaccgatgtgtgcttaaaacgaacagcgactcaaaacaaagaaacagaaaacaatgatgaagaagatgaaaaggagtcatcaggtcagttttaaaaggaggcgccataaattaatattttcaatttttgcatttttatttaaatttcagccagcaatttttgtgtccaattaataaaaaataataataatttcgaatatattttgaaatttgaagtagaacctgcgcttttttgaattggtttaatcttcaattagtttaggcattttattataattggttttaaattcgttttgccacattacttacccttttgagttgcatcatttttaaataaaagtttaactttgaatttctttcaatattaatttttaattctttttttttttttgcaatttacccacccattttttattaagtatttttcttaattttcgtttttttttttaattttacatcttttgaattgtgaaaaatgattcttttaaatagataaattttccgcataattttcttctttttttttttgcacttttgttattttattataattcattttcaaattctttgtgccaattcaggcccgaacactccgccgttgccccccgggctctccgcattctccttatccggcttttacgggcagcataggctgggctggagcaacaccagcagtttggccagcgtttggtcaccgcccgcaacgacggaacagcaggcagtgccaacatttagcttctttgaggccaatagtccgattggtggcggaacgccaagcatagaaaggggccaacaattgttgagggccgggaagagaagccccgactttgagggcattttaatgggtcgtaggag

SEQ ID NO: 74567 - DNA, 585 bp, Heterodera glycines
atgcaaagaaaaattgacaataattccattcaaaattatgagcagagtaaggaagcggcggccactgctgctttaatgtaatggcattttcattttcacactttgttaaaatgccaaaaaacaattgttttctgttttttcagaaaaaaatacaacgaatcattcccggaggcaaactttcccgaaatggtaattactacctaattaattaattacccttttgtttgtagtttccgctctcgacgcctcaggcgcaaccattttccatggccaaacgttcgcttttggccaagaacgcgtcaaccaatgacctcacccaatacatcaatcctgtcctcgcaaagtaagttaaaacctaattaatcttaattaattaattaattaattcggtttgccacatttagtcgtcgtcgttcttctctgttctgcaccgctgtcgacccggcaatgaaacggctgcggcagcgcgaggcgtacaaaacggcaatgtgccaagtgggggctttcactgctttaggaaagaagcattggcttcgtttattttaatttaccttatttgtttaattatttggaataattaataaa

SEQ ID NO: 74568 - DNA, 1476 bp, Heterodera glycines
atgctgcgcttcagtgagccaaaattggctttggattcattttgtcattggattgtgccaattgaagcagaggacaaagggtcggcggatggaatatccaaatctgacgaaatgtccgaggaaatgcggcaaattgtcaaattttggatggcaattttaagcgcaaaaatgttttctcattgtagcaactggacagaaaatgagttaattatgctgagagacattggtgaatttcgaattaaaaattaattaatagggcttccttttttatgtaagaaaaatcgcgaaatatgtaaataaaagatgtataaatgctgacatatgtatgatatatgtataaaaaaaacccaaatatgtactaaaatacttagaatcaccttttagtatttaaataattaatttttggtccattttttttttgaaaaaacctatgttttagggtactttttcaaaaaaaaaaaattatattttttcacaaaatattttttttaattttcaaaaattctcaaaataagtacgaaaaatataagaaaaaatatgcaagaaaaaatgcgaaaaagtccaaaatatgtataaaaatatgtacatatgtaatatatgtagaaaaatcaccaaatatgtaaataaaagtcccaacttttgttcgcaaacacaaaaaaagaaagtgtttttcctactattcaaagcatggagaatccaggaaaaaatatgtatttacataaaaaaaggaagccatactaattaaattcaataaagctttgggctagaaaattaaaccataacatctatgatcaaaattttatttttattttttggttttaggtgtttttaattgaagttcaattttgtatttttttcttacaatttatagtctctatatttattttgtttaaaaatgtccaaaattatttgtaaaatttcatttagtaaccaacaaaatattttcactgaaaatatttttgtcggaaaataataaatttaggtgaaatgatccaaattgttgtgattagggctggaaatagaagcaaggaaaaaatcgacgttttgatgaaaaccgtccaatctgagtccgaatttgagaatatttacgcaaaattttccaactttttggtggcctgtcagcccgaacatcaacttatgctctccccgtgggacaaaattgtgcagaaatttccagtaaattttgaatttaaaaagataattttaaaaaatctttaatttaaagggcaaccaaaatgaatttggtaatcttttcgatgtacaaccatttgagcgaaaagcatccttcgaaatacccaaaagctctgaagcgtcggcatcgaattgtgccccaaaaaatagcaaaagaaaagtgtcgccaaaacgaaaagagcgaaaagggaccgaaggacattggtccggcatttgttcgttttgtcataaggcggaggtgctaattgccggcttttattgctctaatagggttgctatgacgaa

SEQ ID NO: 74569 - DNA, 409 bp, Heterodera glycines
atgaaaaatgtgcttccgtttctcattttgcttcttgcccaattttcttcttctgtatgccaaatcattcggaaatatgaccaaaacgtagaaacaattaacgaagcgacgcatcatttagcacaagttagcgacgaaaactttgcaattaaaaaatttaaatttttaattgttaaatttcgtaaagatttcaccgccgggcaattaccgaattataatttgggccaattttaaacaacaaaaatttgaatgtgaggaaaactcaattttctttaatgttcgacgattggaaaagcatgggaacgatgaaaacaataaaagtttgtatttccgctggacgacccttatttggcaattagagcaattgccaaaatggttttgggggtttttacactgttacaacggatga

SEQ ID NO: 74570 - DNA, 734 bp, Heterodera glycines
atgaacattggcagtgtggggagctcggcgatgggctctcggacagccgaaatgcaccgtcgaatgctgcaaaggatgcgcatggacgcgtcgaatgtgccggaaaatcgagcatttaatacactggcacggggacttttccaagcctggtaagtgcaaaagagagcacagaaaagtgtcacttttatagaaatttcttagaattttcattaaaatcgatacaattttttcttcgttggtgccaatcagcacttccgacccatcaaatattcagaaacttacttaaaatccaaagattcaaatcaatcatgcatgatggaaaaaagaatcctaattaacacaagctgaacgtaactgcattttatcacagacaatccctgatcacggacaaccaaaaacgttgtgattcgcttgatccgtgatcatgtccactccgccctgaaattaattattttcacttgatttttctaactttaaaaccctatttaattgacccctttttgctaagagaaaagtccaaggcgattttttttctcttataatttattacacagatttaaaaagcatttatttttaaggctccgattcggcaatccgaatgccgtggtcgtttttgccgttctccaagggtcaatgcgccgtttcgatgagcgcgccgtcgaatatgagctgcagcgaatttctgattggcaagtgaaagttgtgcgcttatcgtcgaaagaggcctattcaaa

SEQ ID NO: 74571 - DNA, 537 bp, Heterodera glycines
atggacaaagttttattaaaaatttattacggcctcaaatccccagcaagttatgcaggggtacaaaaaatattagctgaggcaaagaaagtaaatccaaaaattacacccgaagatgttaataaatttctcgaaaaacagagaacatacacgattcacaagcccataaggaaaagattaccaagactgaagacaatacccagttccaattctgatcacgttcatcagtgtcagcttttcttgggtccgttcattcaccaattcatatggcacaattggcgttgtaggagccaatggaaattgaacaatgtaagcggcggccaaagtggtggcacggagaaatgcccaaacaaaaagccaagttgatcaaatcaaacgagcgctggactcaaaggcaagcacggtcttgttcgattcccctcaatggaacggacatctcggctgcttggcaaaacattgtgacttttgaacagttgaacagttcatactcgtaaaattggtatgaacaaaaaaaaagtccaacattttagtataaaa

SEQ ID NO: 74572 - DNA, 293 bp, Heterodera glycines
atggtggatttaatttcaatattcctatacggtattatactgctatcaaaaatgggagagcgatttggtaactttaaatttataaaaaaataattctctaatatatcagctcaaaattttagaaaatgccgaatcaacataggcggcgtagcgcagttggtaaagggttggcttttgagccttgggccttatgagttcaattccccttgccttctgttagccgagactagaccgagctgtgccgcccaatttcttttttatttgttttaaaaaaatttcaacttcaaaataaa

SEQ ID NO: 74573 - DNA, 526 bp, Heterodera glycines
atggcgatagatttggaaaagtttttgttgttatccccctattcagatgtgttgtggttcagcaagatggtgattttcagtgggcagacttaagcatcttcggcgttggcacagtgatttaaaaagccgctttcttaattctttatcaaattattgcattctctcatataaagtttgccattataaaaaaaatattgaaagcgcagcagacaaagtttttattttgaagcgccatatgatttcagcgatcgttgattagaaatgaaaattctcaacagggtcaagtcgccttcaatcgtccacatgaaaattcattttaatttatcaacaataagaaatgattgacacagaaattaacgaatgttattttgacaaaattttcaacaaattttatgataaaatcaccgtgaatgctgttgaatattcgacttttttctttcatttgattattcattaaattaaatcattttaaattattaacggaattatatataatttcatataaaaattaaatcacttcaataaa

SEQ ID NO: 74574 - DNA, 91 bp, Heterodera glycines
atggatgccggattcgtaatcagcgaagatcattcatggcgtcgatcagccagaattgctccgatcgagttgcggaaatgccaaaaaaccg

SEQ ID NO: 74575 - DNA, 843 bp, Heterodera glycines
atggcacttcgcaaagcacatcttccatcggcatctgctaggactcagttagcaagcaaatactttggcaattatcttgtggtttttcaggaccacaaccgcagcatctccagcgccggtatctgccaggactcagttagcaatcaaataatttggcaaaattatcttttggtttttcaggaccaaaaccgcagcatctccagcatctgcatctaaggggtcaaacaacaagcccaagcagcaaaagaattcggcctcggcatctgcttcaatgacatctgtgatgacgctgactcagttagcaatcaaataatttggcaaaattatcttttggtttttcaggaccaaaaccgcagcatctccagcatctgcatccaaggggtcaaacaacaagcccaagcagcaaaagaactcggcatctgcttcaatgacatctgtgatgaagcggactcagttagcaagcaaatactttggcaattatcttgtggtttttcaggaccacaaccgcagcatctccagcgccggtatctggtacgatggcatctgcgatgacgtttactgagttagcaatcaaataatttggcaaaattatcttttggtttttcaggaccaaaaccgcagcatctccagcatctgcatccaaggggtcaaacaacaagcccaagcagcaaaagaactcggcatctgcttcaatgacatctgtgatgaagcggactcagttagcaagcaaatactttggcaattatcttgtggtttttcaggaccacaaccgcagcatctccagcgccggtatctggtacgatggcatctgcgatgacgtttactgagttagcaatcaaataa

SEQ ID NO: 74576 - DNA, 1223 bp, Heterodera glycines
aaaatgacaaaaaaaaatattattaattaatgtcattttggctgaaggaatgtggcagaaccaaaaatctcatggagaaggaacggtgcaacgttcactcgtgtcggcgtttgctgagtgcccattcggagggtaattagcaaattaatgattccgttttaattttcatcgtttgttcctttttgagagatttgcgaggaggagaaagagacgggccagtgccaaggccaattcccgcgctattggttcaacaccaagcagcagaagtgcgagcggttcgtttactcgggctgcaaagggaatcgaaaccaattcgaatcggaggaggagtgcaagcagttctgcatccccaattatcggcccgtcatcagtccgttttggcattctttttttaaattggccaaattgttttcacagcgtccggtgctgatttgatcagtccttttgcggaagacattggcggcgacgaacggtggcaaaacgacggcgaagagggggaggaagggacggacggagacggcggcacagcgacggactgcgaaatgagcgaatggtcgccgtggagcgaatgctcagtttcatgcggcagaggcaaacggagtcggcatcggagtgtaaaggtaaagcggcagagaaagagcggagagagatgacgagagacagagagagagagagagagagggaatagggagtcagagagaataggatgaggagcagggaaataagagtgtatatggataatagagaataggaagaggggaattatgtggattaggagagagagaaggaaaaaagaaaaagattggacctcatttaagtcgttgcctcaaaacggtggcaacaaatgtcccccgcgggaacaccgagtgcaggaaaggcactgcgaaatgcgcccgtgcggtaagtggattctttgctcgataatttctttggtattcctttgccttttagcgccgagcacatgccgagtgagtcgttggtcgatttggtcgccatgttcggtcagttgcggcattgggtaccaaacgcggaggcgacgagtgcatcgatacggactggtgagaggggagggggggagtgatcagaccgacaaactgatcaaaagggagaagagacctgctggtcaatttcgatctgacaagcaaacgtccattcagatcgaccccgatgatccgaattgccatgcccaagaactcgaacaacggcagtgccgaatgccatgt

SEQ ID NO: 74577 - DNA, 1423 bp, Heterodera glycines
ttaacccatttcaccgatgttcttggcgcttctcattccaaacactaccgtttgtggcgttttggagacattgcgaggtgatactgtaggaagaggcaattaattaccattattaaaatggatgaattttctttgcttttagcgacggtttaaaagaaattgccgaatggggaaacacttacaaaggcgaggcggagatgaaagcgaatgcaagcgaagtgcggacaatcgtcaaaatgaagggcctttggtaccccggtgagtgggggaggggcacccgggggagggggaaaagccccccccccccggaggagcggcgcccggggggaggggagggccccgccgccagccttttcattgctttggcattttgttgcactttcttttgccgtctaagaagtacagggccgtaccaatggacactttcgcgtcaacaaataccaccacttggcctcgttggccgcgatgtttggtccaagccccgattggtgtgtcggcatctccgaggtcaacttgtgcttgcctgactgcagttgggtgcaggaacgcgcgtttgacttgcgtccgttcgacgcgggcactgacaacggatacacgtacatggtacggtagaagaatggggtggggatacggtgggaggggtgcactacgtctccccccccccccccgttttttttaatttcccaggggacgatgcggtgggggggggggtgaactgcccccagcatgtgggcaggggatgaagcacggaacagcaagtcaatcgaagggtttcagtcgccaaatgagccggcagagccgcgagtgccaatcgctgcgattaccactcgtgacgacccgcgctcgccgttctttgacgagcacagcgaagagattgcgccgctcgcccgattggtgctgagacggaagaatgttctcacggcacaatgccaatcggaagaagcctatcggcgcgaggcgttcaattcgacgaacacttcggaggacgaggaataccgggacagaagttggttggccagcggaggattcgacggtttttaagcgatcgatgcttttccatttgaggggagtgcgcggtcagccaatggggctcatggtcactgtgttctgcgacttgcggcaaaggcattcgaatgcgatccaggcacaaattagcaattaattgggcacttagagagagagacaattagcaaatgaatgagagagagagagagaggagagagagagagtgcgataatgacccaatggtggagaatctcgaattcagagtgttcgttttcccggtgaaggcgcaaatgttccattgccatcgacagaccaccgaacgtcaattttgcaatgcgaaacaaagcgaatgcggcgccgactcggacgcatttaattcgcgttgtttggtcagcggatgggacgactggacggaatg

SEQ ID NO: 74578 - DNA, 351 bp, Heterodera glycines
atgaacggtggttgttgggattatggtgattatgatgattctggtggtgattgtgtgtggggctttgaattaattgcatttgctgagcaaaaatttccaaaaaaaaacgctaaaattaaaaaattattttttaattaaattccatttttagattaattttaaaaatttacaaaaaaaaataattagaaataggcaattaataattttctaaaatttttatgagctagattaatgagtataattatttggtactttcggtgagaaatttataatttctccaaaattagtcaatgtgaatttggcgtaccgttcggttttatgacaaaaaaaaattgagtattatacaataaa

SEQ ID NO: 74579 - DNA, 1933 bp, Heterodera glycines
atgacgtcaccgtcgacattcagtgcggcacggctttttgccaaactgtccggcaacagcaaccaacaacagcagtccattgagcacaaaatggcggaacttcgagcagcatacgcaatacaaccagcacagacgccgacggtggcaaaaaggtggagtcaaaatgggagggaaattttcattaaattttaattagtttaattatagaatattaaaaaaattatttatttaaaaatttttgttatttgtaatatatgaaaatttgaattttcaactttcgaatttattaaaatatgaatttttaagttttaaattttttcattcatatggtcaaccatttttcatagatagattatttttaattattaaaaaaaaatttttgtcgatttatatggaaatttgaattttgaaaattttcgtattcctcaaaatgattgggaattttcattatcagcataccttattatatgaattttaatttcaattttttgttctaaatgcggcaaccatttttataaaagattaaagtttaattttttgaataaaaaattaatgatctgtttcctaaatatgccattgatgccattttaaaattccacaatattaacggatttaaattttaagtgctctcaaaaagaaatgttgggatgtagcgaatcggcggaatagaaaatggttgcttaatgaggagcaaatggattttgaaaaaaattgtgatccataaatgtaaagatagttaactgagaaaaaccagagtttatatactaattgcgtatcttaaaacagattttattccattccaattttcaaatcctttaaaattcttttaatttaaattgtttaagactcaataatttttaaacctttaaaactcaacaatttcaaatcttttaaaactcaattaatttcaaattcttttaaccctcaaattatttaaaatttgtttaattttcaaattctttaaaattttcatccttttataccattttcaagtgcatttaaagatattgaaaacaaagcatttcatcccatttactataagctttttgggaaactaaagtgtgcttaagcaaattgtttaaaatttttgtaattttatttgaattaaatatttttacaatgtaatttttatataattttttggaaaataaaaaattttaatggttacattgtcagattaaatgaaataaaaccaattaattcatttttagaaaactttccataataattttaataataaaaataaaattgtctctaattgaattgataccttattttagttctatgctcatatacaatttattttctatcaatcctaaattaaattaagaatatttatacatacaaaaatttaattaaagaaacattttttcagtggtgccaattccacccaaaataaatcgtcggcaccaccacctcgtcgacctggacgaacctcattgccaactccgtcactaggcgacatgcttgaactaccacaattgagtcagtttaaataaataattttcatttatttttattttttatattaaataggcacaagaaattgtaatatttagaaatttaatgaaaaataattaaattgtttaaatcaaaaaaattttaagtttaatttagtggggggagggcgtctgtattttaggaaatacggtaatattttattacctaaattatttaaattatagttttttaataaataaattttatttaaaggctctcgcagttgtgtaccgtcgagaagagcaagcacagtgactgcctgtttttcaccagccccatccctaatggatttggcatcgtctgccggacttttgtcgctgtcgccaagcggtactatttttaattttggaattcgtcattttaataaattctagatcctggatcctgagttttctggaaaaccccagaaaaaaattataccctaaaaaaacaa

SEQ ID NO: 74580 - DNA, 1226 bp, Heterodera glycines
atgcggcgactgatgcgacgggcgagcgaagtaagcacatcaattttgtatcatctaaatatttgtatgtttatattaatattaatttatttaattattttcaaaatattctaaaccaaaaaacatatttttaattatcactatttttaaaataaagtttattcatgtgaatatttgtatattttgtatgaattcttaaaacaatttgaatttcaaaaaattacaaaccaaaaaaaatttaatttaattctcattattcttaatttaaaaaaatatttgttttattcgtgtaaataatttagttctttgtatgaattttttgaaataattttatttcaaaaattttaaaatgatttttaaatcaattttatttcgatatattttaataattattcatttctcagtatttttaataaaaaaatatttaattacatatttaattgattgcaatatttataattatttttgattgaaaaatattattttttttaaagttttaaaagatttaaaaattttttcatatatttttagaggcttcattggttgaaaatatcgctcagttggctgaaatttgtgaggccgtcactgacactcgtttggatggttcggaccatagtttggctgtctaccgactacttttggccaaattggaccaaaaaacgaatgtggaatggttcgagagtgttctggtgccagcggtgagcaaaaaataaaaataatttaattttgtaaaaataaatttaattattttttgcgaaataatttaatttaaaataaatgaattattttttttgggaataattgtttaattaatttaatttttttagatacataaatttaatttttttgagaaataatttaatttaacttatttcttagaattaacggctttaaataaaattgttatttatttgaatttttttatttaaaaattacaaatttaaggcattgcttgagcgcaatggcatcccagtcagcgagttgtccctgctgaccatgggcattttggtgtggcgctgcacgctgaacaacgcgcgcctgctatgcctcgttaacagcatgccacagcaacaaatgcatgaggatgggaacgcaactgccgcctcgtttgaggcgctaaagcgcgcagcaaacaaatataagtgtatgcaccatgtgttgaccattggccaacgacgaccgtccgctggcagcacgcacagctcatgctcaagctcaagtcgcag

SEQ ID NO: 74581 - DNA, 394 bp, Heterodera glycines
atgtccggaattccaggtggaatgcgaaaccgccgatcccggtacaaaaaattgctatggtcgcattttggaccttatcttattttagaaattaatgactcatcagcatttttggttccaatcgataaccggaacactgagccgagagccgaaagaaagagtggggaagccctttacgcaattagggacaattgcataaataggcggtgaaggagggataatgaaatctgatatcccgggaattttggctccggaaatcaataaaatggagaaacataaaaattgcttcttttcagtgatggaagtcgatgaggaagacgacgataaaacgtttgactgggacgtcctgtgtgctgaggacctggatgaccacgaattttgtgccgtgttccgc

SEQ ID NO: 74582 - DNA, 385 bp, Heterodera glycines
atgagcaaatatttcatgtttaaacaaactttccaattaattaaatataaaggtaagtagtaaacaattaatactgaataagattttttttgctttcagagtcattttaattgtcgtcgaacaaatcatgaaacaacaaaacaagatggaataacaaaacagtgataagcttgcaaatttttaatcaaataagtaacttttccacatcttctttaatcttctgaatctgagacttcaactgagatccttcattttgaatgatcgaagttgcgatcacctaaaggaataagcgaacaagtaaattccctgtttacaagggagttcttcaaagtttaggattcgcagcgagtcttataaaaccctagatacataggtatttaataaa

SEQ ID NO: 74583 - DNA, 1210 bp, Heterodera glycines
atgaacaataaaatcgcttcctcctcatacccggcaaattcggcagcaccgcaaaacgattgtaagtccataagctggccaaaatgcaaacactgcaggtattggcgctcgcgcataaagccgggcaacggagaagcccaaccctcggcaagaacctaaggaaaagcgaaaagaaaatggaaaaacggagcaaagccaacccaaacgaattgacctggagccattggagatcaaccaaagaaagatgaactgctggacaaagaccgatcccattgagtaaacgacgccgagaaatgtcgtcgggaacgaaaagctggcggacggactgaccgcaaaattggaacatcgcctgtggaaatgggaattgtcggtggttagaatttgacagcggatttacattttctggcaaaacgtttcgctcgaagagaaactgtagcatttgctggaggcatttcgtctccgagtcgacgcccgagctcagcacgaggtcggcttgcagcggcacttcgtagtcgctgtccacgccggtaaagccgcgaattttgccggcgcgtgcttttttgtagagctctgaagtcaatgagaaatgaatacagacagacagtgagcgatgaattccgcacttttggggtcgcgtgcttcgcacacttcgattggcgtgtcaacaaatatttcgaaaaagggaatattttcctgaacaatctctgttttcagccttttacaaattcccactttgctgtgaattcggcgcgcctcttcgcgacccgcgcggaaaggcgaaatgaaagaggcgagcaccaccattcccaagtcgctgaacagtttggccacttcggccaccctccgaatgttctccgctcgttcttctgccgagaatcccaagttcttacacaatccgtgccgaatattgtccccgtccaatgcgtaagcgggaacgcccaacttaaactgaactcaatcatttctatttgaaaatgcgaacctgcacaagggccttctcaagtgcgaatgcaattgtcgttttgcctgcccccgaaaggccggtgaaccacaaagtgcagccgcgaaagcccgggaaacggcccaacgcattggcacgctcctcccgcgtcactttgtgctgttggaaggtcacatttgttgcaccactggcaatggcctaatggacagataataatcagtttcaaaacagagggaaattggaaataaa

SEQ ID NO: 74584 - DNA, 1290 bp, Heterodera glycines
atggacaaatgctttaaggaaatgcttgcaatttccccagtgagttttattaaaatgtcttttgagccctcgttttatttccaatttccctctgttttgaaactgattattatctgtccattaggccattgccagtggtgcaacaaatgtgaccttccaacagcacaaagtgacgcgggaggagcgtgccaatgcgttgggccgtttcccgggctttcgcggctgcactttgtggttcaccggcctttcgggggcaggcaaaacgacaattgcattcgcacttgagaaggcccttgtgcaggttcgcattttcaaatagaaatgattgagttcagtttaagttgggcgttcccgcttacgcattggacggggacaatattcggcacggattgtgtaagaacttgggattctcggcagaagaacgagcggagaacattcggagggtggccgaagtggccaaactgttcagcgacttgggaatggtggtgctcgcctctttcatttcgcctttccgcgcgggtcgcgaagaggcgcgccgaattcacagcaaagtgggaatttgtaaaaggctgaaaacagagattgttcaggaaaatattccctttttcgaaatatttgttgacacgccaatcgaagtgtgcgaagcacgcgaccccaaaagtgcggaattcatcgctcactgtctgtctgtattcatttctcattgacttcagagctctacaaaaaagcacgcgccggcaaaattcgcggctttaccggcgtggacagcgactacgaagtgccgctgcaagccgacctcgtgctgagctcgggcgtcgactcggagacgaaatgcctccagcaaatgctacagtttctcttcgagcgaaacgttttgccagaaaatgtaaatccgctgtcaaattctaaccaccgacaattcccatttccacaggcgatgttccaattttgcggtcagtccgtccgccagcttttcgttcccgacgacatttctcggcgtcgtttactcaatgggatcggtctttgtccagcagttcatctttctttggttgatctccaatggctccaggtcaattcgtttgggttggctttgctccgtttttccattttcttttcgcttttccttaggttcttgccgagggttgggcttctccgttgcccggctttatgcgcgagcgccaatacctgcagtgtttgcattttggccagcttatggacttacaatcgttttgcggtgctgccgaatttgccgggtatgaggaggaagcgattttattgttcatgcgttag

SEQ ID NO: 74585 - DNA, 349 bp, Heterodera glycines
taaaggtattgactttgggaaattttgccctaaataaattatatcattgtccttcactttcacaagttcaagtgggtagaaacgttcattgccattcttgtgtttttcgatcacgcaaggattgcttgaatagcgaagacaaatgcggtgccgtacataaaaatgctggtcgacggtcacattcttgaaaccattgtaagccatttgcttacgggcactttctcttgtaattccaccgtactcaaaatctttgtattcatctagttgatttttgtatgttgtctgtagagtttttcctttgaggtatttttcaactttttgaatctcatccgggtgatttaagcagtcg

SEQ ID NO: 74586 - DNA, 1754 bp, Heterodera glycines
ttcatttttcaaatgcttttttaacgcaaaacaaaacaaaaacatttatatttttcaaatgcatttttaacgcaaaacaaatacaaaacgccatacaagtagttactccccccctttttggcccttaattttcagccccgccatttcagtcccagtggaaagggacatttcagtaccagatttaaaccttaaaaaacacctataataaatatatccaatcccagaagaggtaaataagtgaaaaaacatctgaaggataaaacccaaggctaaatcctattagagaaggaaagggaggcagaggataggcgtcagctgtcatgccttataaggaagggaagggacgcatgccacctgagcgcccgcgtgtgtgccatttaaacgctcgcgtatgccatttgagccccagagttattttttacagtgcaaccatttgagccccagagttatttttacagtgcagccatttgagtcccagagttattttttaagtttagccatttcactcccagtgcccacgggacacttcagtcccgagacccaaagcctattgagtagccaaagtctacggagggtcattaacattccttttaagtgcattttgaccaacgcagggccgacggagggtcattaatcattcttttgagtgcatttttgccgaagcctaagcctacggagggtcattaatcattcctttgagtgcatttctaactaatgcctccgaaagtgtcataaatatccccttaggaaatgtggagtctgttgtactaaaagccaactgagcgccattaaccattcttttgtgaacatgtctgtccaatcgaagctagtggtcattaattatcccttgggaattctttttgtgcatttctgaccgagtcaaaaccaatggaatggtcattaataaccccttggacgcattttgactgtataatgcccacggaagtgtcggtaatataccactggaaatagaggtcaagctgtgagtcaatgattaattgtgacagttgtgcctatgcaaaacccaacatcagatattctgtgcttgagacagctgctcaattgccggttgactttcagctgtgagtcaatgattaaataaagaatttaaaattaaaaatgaattataataaagttaaagttaaaatataactaaattcaatttattttagtataaatacctaaaaattttctcccattattcatttaaaatgttttttccaacgattaaaaattgcgttgctgttgtagacctcaaaataccccttgatattgaaaaaatttatttaatagcgccatccacaaaatataatccacgtaaaattcatgctgtaattatgaaagtgtataatccaaatgctaccgccataattttctcaactggaaaattcgtatgtacaggagcagctaatgagaaagaatgtaggcaagctgcggagcaagtcaccgaacgaataaggcaatgtgggtactacgaggcacgaatccacgaatttgcggtgaagaatttgattgcgacagcagacgttggttttcatatacgcttaggacctctgtccgactttctaggcgccaaatattgttccttcactcctgaactattccccggtctcgtgtacagaaaccaaaaccctaaaatatcgatcatagtgttctctagtggaaagcttaatctaacaggctctagatcaaaagaagaaattgattttgtatttaatcaattttatcaaattatctgcaatttcaaatattca

SEQ ID NO: 74587 - DNA, 965 bp, Heterodera glycines
atggacacaacgacgataaatcggattctagcgggaaacacaaagaccagagaacactacttgggatgcttcccttgcgacaaactcccaaataaaatcaacaagtacccttcagcattggtggcgaacaatgacccatccaataaagagggaacgcattggatagcaatgttcatcgttgatgacaagaccgtctactattttgatagttttggtaggaaaccgaacagatgtatcagccagtttttacggaattatgaaagcgtgatctcgaataagccagctattcagtcagtctttagtgagaattgcggctactattgcatttattttgttcattgtatgtgctcattaggaggaagaaattatgagagtaattttgaaaaaatgacaaaaaagttgataggagaagataatccagatttgtttgtcgtgaattttgttaagaaactgataaaaagtatttaaaggaatttatcattaactcatttataaaaatggatcgattagacacagtaattgcttctcttctgaactgtcccgcacgtaacttgtgcgactgcttaaatcacccggatgagattcaaaaagttgaaaaatacctcaaaggaaaaactctacagacaacatacaaaaatcaactagatgaatacaaagattttgagtacggtggaattacaagagaaagtgcccgtaagcaaatggcttacaatggtttcaagaatgtgaccgtcgaccagcatttttatgtacggcaccgcatttgtcttcgctattcaagcaatccttgcgtgatcgaaaaacacaagaatggcaatgaacgtttctacccacttgaacttgtgaaagtgaaggacaatgatataatttatttagggcaaaatttcccaaagtcaatacctttacttgacgaaaataattcaaaatataatgacaattattatgattcttatcgcttatggtga

SEQ ID NO: 74588 - DNA, 1033 bp, Heterodera glycines
atgtctccaaatgaatgttctgaccgtccctttcaacaacccgacaatgttcaaactgttcaactgccgcatcaacaaccagatgaagacgccgagttgcgcgcacaaattgaagacgcggaggaggatttgctcttgaactggtggcgtgaagacccgacaatcgtaagcttgtttttcaatttatcattttttaaaatttcatcacattttttcagattcgttttctttttggacaccgtcgagcacctaccatcgaagccgcgcttcttcaacgcgccgaacgtgaggcagaaattttgcgccaatatgccgagaaccatcaatgaaaagggaggaccaatcagttatcattttcgtatgttatttttcttatttttttttattatgatgataaaaaattttaaaatgcagaactgcggaggagaatggaaatggatgatggggggggggactaaaactcgcgcacccttgaccgattgacttcaaattttacgagccgtcaactcacacccccttaagctgaacggcgaaagaatttcgcctctagcacaattttgagcagtatttcccgacgccccgcccctcccccatcccgagacttgcgcagcaaaactgtggtggtaagaggaagttcacgccgttgaagaggaggtccgcggcgatggcgagagggggtccacgccgacggactgcaaaatgatgggggaggggtccgcggcagtggaaagagggggtccgcgccgacggacgacggaatggtggggaggggtccgtgccttttgcgagagaggctcggcggcaacggggggggggggagacgtgattgagaagatttataacacaccaatgtacattaaggtggtagtaaaggaaattactgagattgaaattgaaattaggactagggagggaaggcttattccattccaatggggtacaacattacttgtattagcatttaaaaaatctattgtattttagtatttaaatattcattttcacatatagtatatattaataattgaataaa

SEQ ID NO: 74589 - DNA, 119 bp, Heterodera glycines
ttctttttgtccacacttcgctgtctctgaaaattccttgcgattcgttcggaccaatggacggccaatggcccttttcattggtcgcaaaattggggtgactaaataaaaagaaattg

SEQ ID NO: 74590 - DNA, 63 bp, Heterodera glycines
tcccggttggtcccgggttttttcgcggtcccggtcgaaaaacttggtcccggtcccgacttt

SEQ ID NO: 74591 - DNA, 398 bp, Heterodera glycines
atggcagaaaaaagaattgccaagcgtcgagaaggacaagcgcaggtcggtgggggcacggcgccttttgccaggcaatggcactctccgtttggcccatccctcgcccacccatttgacctctcactttatctctgtctctaattccgttttgactgctcattgctcggcttcatttggccaattattgctctgctactcctcccccccccccatattaattcgtcttttgctcctttccccccccccccctaatcccacaaatttgcttctccagctgtgctcttcctctgttgcttctcctttcttttgattgatcggttgggtcaatcggaaagatggccaaagcgatggacaatggtcgtaagaaaataattactcaatgggtcaaaaataaa

SEQ ID NO: 74592 - DNA, 320 bp, Heterodera glycines
atgatcagtttagctcaccctcaccacgaagtgcgaaacctgacaagttggagtaatacgagagagataaagaagaaggaaaagaagaaaaaagaaagaaaagaagcgaagagaaaagaagagaatggagtcagtggaggatgggacgaactttcacttcagttgacccctcccaaactcacaaatcagccgattaattaatcgttttcactcgaggggaaacaattgccattgttgagaatagtgcaattgcttctgcttgccattgatcaaagctttggaatgaatcagttcaaaaagattaatgaaaacgaagagaa

SEQ ID NO: 74593 - DNA, 267 bp, Heterodera glycines
atgcgcggcgagttggtcgcgcgcaactcggtcgccgagcgagcggagaaggcgtccagcgtttatgagaatgtggcgaccggcgagcgtcgtgaagctgctgaaccagcagctccacgagaagctaattatgatgctaatgatggtgctaatgaccataattatgagcagcagcagcagcaacatggcccgccacaaaatggccagggcggtgaacggagggaaggcccaaagggggagatttggtacgaatttggatgcgtctga

SEQ ID NO: 74594 - DNA, 101 bp, Heterodera glycines
atggcaaagttaccaccatttttcgctgacccacaaaatgtccagcccacgaaatgtccaagtctcgaatttgagttttttattattcagatgggcctaag

SEQ ID NO: 74595 - DNA, 589 bp, Heterodera glycines
atgaataattttctgtcaacaattattcatttgatggttttttgactaacgcccattttgatggtttttgactaacgtcccagcaccgttttttaataatctaacttctttttttattcggtatatattctttattctatttgtgtaaatattcttaacaagttgcacctaaaatttgcaaaaattttcccctaggcaccgtcggacgacttaatccccatttaaaaaaaaattttgctgccgcaggaacaactcggcaaccgctgaatgtattgaagtattaagtattcagttacattattactagagttttcacgaccgtttattaaccgatacccccggtttcggtttttggtccaaaaaagccgccggtctttggtttcagttcggttaaacgaccgtgaacaaccccaattattaccgtatttactgaacttacatttttattatacatttcatatttttcggtacgccagaatttttttcagcttccaaattacccagtagaaattggtcaataaatttaataatagcatcccaacataaagaacatatatcaaaaccacatttaatttaataaggaaataaa

SEQ ID NO: 74596 - DNA, 585 bp, Heterodera glycines
agtgccagccagccttcaactcaacgcaacatcaacaccagtgcgcgccaagctcgtctacacatttcgtcgcgacaactcatcacttcatcatgagcgacatgagcgcctacatgggatccggccccgccgagcctgcaccgtcgtccggcgccgcggaagcctctccatcgtcaggagtcgcgagcgcctacatgggatccggccccgccgagcctgcaccgtcgtccggcgccgcggaagcctctccatcgtcaggagtcgcgagcgcctacatgggagcctcgcccgcgtacgagccaccagcggttggtttaagggggacacgggagcaaacgcatcactaatcttttgtttttgcagcaggagaagtccccggatcagagcgcctacatgtgagaagatgcaacaacgaccggcggatggatggacgaaacctgaagagcgagcgacctgtcagaagatgcaaagataaagaagatgtctcataatcgtgatctgtatttattgatgtattgtacatttgtatgcatatatcatttgctgtgtattatcactttatttccatctgtgttccgaaataaa

SEQ ID NO: 74597 - DNA, 831 bp, Heterodera glycines
atgtctgcttttattaccggagacttattttattccggatatcatttttgcgaattggtgaccaattttagtttgacggcggctatttattgtccattagaggagctaatgtcggaccaccaaaatttaataaaagttttgcctcatttcagagaatgcccttccaactggccggaacaacggcacggactgttcggtgtggcacagcgaatttgaggcggacgatgcgaacattgcgctgccgctgagttcgttggacggtggtgccaaacagaaaacgcagcccaaccatttggcacgccgaaggcggacgaagaaagcgacggcaccgtcgtcaacgaaaggacttttggcactcggaagggaacgaatggccgcaatcagtccggtggcagaagaggatgaggaggaagaagaagaaactgatcgggaagacgaggacgaagacaccgatcagcgggaggaggacgaccggcgggagaaggggcgacggaaggagacgaagcggaggagagagtcgagccggggcgtgacggagctttgactggagcggggactccgatggcaccgaacaaagggtgccatgcttttcgacattaagctaattcgcttttctctcactcacttcgttggcattccaattcttttttgttttacattttcattttcacatttaaatttgtctttttgtcgctctttatgtttttgtttggttgggtcacagttgagaagcaaaggctcaaaaattgtgatttttttttttttgaaaaaattgctttgctcacttcccaattaaatattttgatcataaattacagaatgttgttccaa

SEQ ID NO: 74598 - DNA, 75 bp, Heterodera glycines; identical to SEQ ID NO: 54636

SEQ ID NO: 74599 - DNA, 1038 bp, Heterodera glycines
atggtcaccaaaaagggacgaattgtcatcaaagtgggacaaatggccaccaaattgggtcgaattgtcatcaaagtgggacaaatggtcaccaaaaagggacgaatggtcatcaaaatgggactaatggtcaccaaattgggacgaattgtcatcaaagtgggacaaatggtcaccaaaaagggacgaatggtcatcaaaatgggactaatggtcaccaaattgggacgaattgtcatcaaaatgggattaatggtcaccaaaaaagagagaaaatgactgtttgagaaaggggagacgagcaatgccaaaagggacgagaaacagcaaccgcaactgttttgaagctgttcgagatgaattttgtgcatctaatcgacctaaattcgatcgttttaacatgtctacagtcttagtcatactgtattcgctgaattataagcccccgcccctctgtattagaagcccctccccctaacataagaacttttcacacaaatggaccaagttgtatttttttctaagcttttccgtttggtagtggcccattccaatttttgcaggcggtggccttttgaatgtgctgctgtactgctccaaaatgatgcacatctccgagcccaagcatttggtgattttcggcaattcgaatttgctggggggagaaaatggcggggcttttgctgaacagcggaaaaagacgacggccgttgtcgagctgggcaacttggacgaactgcagcagtgttggaatgccgtgttcatttacgtggagcgtggcgagacggacggaggcgcaaaagcgaaaaaggcaaataaatgggcaaaaaaattaatattaaaaatgaatttgaattaaataaataatatttaagatatatttttaaattaaacaattaaatacattttaatattaattattaaaaatgtattttaaattaaacaattatcatttttcaggtgacaaaacaactccaattgagcatcttgacgcgggggaaatcattgttcgtatttgaggaactgaacaaaacataa

SEQ ID NO: 74600 - DNA, 319 bp, Heterodera glycines
atggcgcttcggcaaatgtttttcatccccggaaatcagcaggaggtggcgatggaaaacaggaattacgatgaatttcgtgtcggaattgaggtccgtcccatttcaaatctcttcgttttctctaatacattttcaggcgaccgaagagaatgtgagccgattttacgaagagaaggagaaattttcaaatttgcctacacttacactcgaattacatgccgaaacgcgggtcaaagctgagaatcttaacaccgaagtaaaaacgaaatggcaagcattgattggactggtggacttgcggaaaaaactgctctag

SEQ ID NO: 74601 - DNA, 848 bp, Heterodera glycines
atgaattggtattttcgcatggaaaataggtaatttggaaacaaaatcggatagaaaaacacttttttcagaattgatttcatccaaaaggtgcccgaatcagtggagctttgcgagcagaacaaagagaaatttcagtcggaaaatgacgggacagtgcaagcatacgaacgcgtgatggtcgagtcgcagcaactgctacagtcactcaaacagcagagggaactgctcgaagttgataactcagaggcagcttgccatgttcataggctgaccagagacatcggtgagttggacggcacacaatttgaattgcttttcaatctttaatgtgaccatttcccaataattaatgcctttgcaccctttcctaaagaaatgcgccatcagcaagagaaggaacgatggcacaagcaacgattttaccttaacgcagcactgaacatttcagtgtttctgcgcgactgtgaagttattagcattcaattggaggttatacattctttgagataatttaaatggaatgagaaatatttaaattcagaactggcggcaggacctcgaaggattgcgacactccgtggccagggatgtcgaagtgttcaagcagtttcacaccgacaacactgtcagggtgcaacagaccgtgtccgatgcaatgaaaaaacaaagagaactgttacaggtaaacgcacaaaaccaacacaaaaaacgtggaattataacaggtgataaatatttttaaataatttgttttgcagtccattcgcggaaagaatttgcaacttgtctttaaatctgcgccaaaaacgccgttgaacgacatagtcaacgcagcagcaaataaa

SEQ ID NO: 74602 - DNA, 78 bp, Heterodera glycines
tacgcgtcccatgacattttacgcgtcccatgacattttacgcgtcccaacaacactttacgcgtcccatggcatttt

SEQ ID NO: 74603 - DNA, 917 bp, Heterodera glycines
atgatgctgcacaaattatcctttccatttttgcctataattatgatggattttgcgatcggacgcattgctttaaacgacgagtgccaaaaaggtgtgaacacagtttgttttaaaaatgttaataaactctcaaaacattttaaagacttttttggaacggctgatcaattggaagaaatggcattggaaatttttgcagcggcggacaaacaaacggaaaatggaaaattttttgaaaagggatttgacattttctgttgtattgcatttgaaattgaaaaagatgctttaaacaaagatgagttggcattaattgatgaatttgaagcaaatcagcgcaatttttgccaccaattgaaaaagggccaaaatatttgggaagcggtggaaagtccggcagggaatgccattgtaacagcggcgagaaatgcgaaagttaactctctaatacatgaagaaggacttcgaaaattggagaaaatgcaaaattcgagccctgaaaatcaagcagaaattggaatgtttgccaaacattgcattgccgcgttgaaattgtttcaacaattcatcaccggtatttctttaatgcaaaataattaagtttcagtcagaagcaaaaatattcatcaaaattgctaaaaacgcttattctgggctctattgcactttatgaatataaagttacaaaagaaattactcaacaattacttaattaatctaatcttttttggcaattgcctaacactgagattttatatatatttgcttcttaaggcttttactttgaatgataccaaaaagataggggtttgttcgaataggacattacggtggataatcgatcaaatgatgttagaccgcggcaaaagtatgcattcaaaactgctaaaaagtagaatcagaatcccgcggca

SEQ ID NO: 74604 - DNA, 1447 bp, Heterodera glycines
atgatgctgcacaaattatcctttccatttttgcctataattatgatggattttgcgatcggacgcatagctttaaacgacgagtgccaaaaaggtgggaacacagttttaaaaatctttaaactctcaaaaatttttcaggcttttttggaacggctgatcaattgcaagaaatggcatcggaaatttttgctgtggcggacaaacaaacggaaaatggaaaatttatggaaaaagcatttgttggcattttgtgttgtattacaattaaagctgaaaatgattccatgaaaaaggaagagttggcaatgattgaagattttgaagcaaatcagcgcaatttttgccaccaaatgaaaaagggccaaaacatttgggaagcggtggaaagtccggcagggaatgccattgtaacagcggcgagaaatgcgaaagttaacctccaaacatacgaagaaggacttcgaaaattggagaaaatgcaaaatttgagccctgaaaatcaaacagaaattgaaacatttgccaaacattgctttgccgcgttgaaattgtttcaacaattcatcaccggtatttctttaatgcaaaataattaagtttcagtcagaagcaaaaatattcatcaaaattgcaaaaaacgcttattctgggctctattgcactttatgaatataaagttacaaaagaaattactcaacaattacttaattaatctaatcttttttggcaattgcctaacactgagattttatatatatttgcttcttaaggcttttactttgaatgataccaaaaagataggggtttgttcgaataggacattacggtggataatcgatcaaatgatgttagaccgcggcaaaaatatgcattcaaaactgctaaaaagtagaatcagaatcccgcggcattaaatttcccgccccggggtccctctcgaccgttttcccaaaacctagggattgaccgggatcggtaatccggctgggatccaatttgtttgcttattaattgctacagtagctgagtgttttatacaacgacaaattaagatgagcgattggctcagactttgctcgctggtggaggacagactgtgtctgatcaaagttcagccttatcagctcaaccggcgcccactcgatctgatcagctgcagaaggagaagtcgtcacggcgaaggaaaagatcgagtaaatggccaaaatgccttggtgcttttgcattggccggcttttccggctatgtgtgcagtatatttgctaggctcttgaaaatcaatcatgttaacattttcacatctcatcatcctgttgttcagccccatcctcgtatatcgttagtaatggaggtgttagtttcaatgtacatgttctttgttctttctttggtcagcatctttttaggcatttatcattgctttgtcaagcgtgattactattga

SEQ ID NO: 74605 - DNA, 764 bp, Heterodera glycines
atgatagtaattgtgattccttttttagtaattccgcaacaattgtcggccttcgatgggtcaaatcgttcgttttttcctccgttgtccatcggaattcaaacgccaaatcaatgccaaaaaggggaggagggcccattggcaaagccaacggcgaattgccaaaatggtgaagaaagcgaatggtcgacaaaatcagcgccaacaccaaacgaaatgagcggaaacaaaagagcaaaaaagcggaagagagagaaagttgccaaaaatggacaaaatggggagggagagggggagcaacggaacgccaagaaatgcaacaccaacgccaaagacaacaacaacccaattgtgcaaatggtgatgagtgccgtcgccgaaggcaccgccgcaacgacagccatcaatttgaacacgtgcggtcagttcagaggagagggagggagggatacggtgctgtggggatgaccaatgaaaagcccactttctttgtttgtccgttggacccatcccccgagggaattccgtcatgaaattgcccttttagccatttgcggggaccaattccgcctcatcagtgaccttgtccaacatgcgcgaacgaatcaccgccaaacgagcagatacgatcggaatgggccgagggcatcgattgcggaagaagtgcagagactaagcaaagagtgaagcggagagaaagagagacaaagagagattggaggggttagagaaggagagactgtcagactcacaacaagacaaaa

SEQ ID NO: 74606 - DNA, 2881 bp, Heterodera glycines
ttttttgtgtttgcacttttcgctttgtgcgtttgctgtgcgattatttgtgcggctgttaaacgaaaggttcagcacgaacatcagaacggtgagcaaagcaatgaatgagcgatggtcggacaaacaaatacaaattaatgaccgattaattaattatcgttaattgacacctaattaacaacacttaaaatgggacggtcccttcggttgcctttcccccgccccatgaaatatttgtttattcaatcgatccctttccaaccgtaaaaagcaaagcattcaaatgaaaaagcggggggcccataaaattaagcggaggcccacggaaaagagcggcggaaaaccaacggacgaaggtaaggaaacagaaaacggaaggagagggaggagaggacattttgccgaaaagggcgtccgtcgacggaaagggactgaatttgcccgtgtccaattggccatgactcatttcaatttaatatcccgaaatgtctgaccccctccgtcttagatggccactttctcagcttccaacgcatttacttggctgtttactgtttagccgtggcgggcgattggcttcaggtccttcatccccccctccccctctttgcctaattaagcacatttttgccactgctaatctcggcttttccccagggcccccatgtgtacgcactttacgagtcctattggatgaccaaacatcagatcggtcggtctttgggtggcgttccccggggcgtttattcgttcgttttccacaattcgcagaacttctgttcatcgccggcttcggctccagtctcttttttggcactttcattgggtccatcgccgacaaattgtgagtcgctttttcagagtccctaaagccccttaggcgcggtaaataggcaatttgaacaaattggagcgggtaaaatgtctcttcctcctttcccccgcttcgctcgtccctttccccgatgggttacggtaattctgttaagtggccgcaaggccaattgtctactgtacgccctgttgtacggtgtcagctgtgtgaccaaacattttgcggactttaacattttactgatcggccgattgatgggcggcatcgccaccagcattttgttcagtgcctttgagtcttggcttgtgtttgagcatcggaaggtcactcactcactttttgggatgtcatcaaagtgccctttttccagcgcggcttcagcgatcagtcgctgaagcaaatctttgcaaatgccactttggccaactctctgatcgccattttggccggcatcacggcacaggcggcggccaacgcattcggatttgtgtgggttaaaaccgcggcattttcaaaactcaattggatcactgtttcgatgtcagtgccccattcgattgcgcctttgtggtactcattgtgatggcactgctaatggcattcacttggactgaaaattacggcgacgaaagggcgaatttggcacaaacgtttggcgaagcttttaacacaattcgaaatggtcagaaaaggcgacgaaaaatgaaatgtgtatgaaacactttgcagaccaacgcattttgtgcctcggattggcccaaagtcttttcgaagggtaaattcggataaatatttaaattcggataaatatttaaattcggataaatattccctccgtccaattatcctccccttccccctcatttgctcttttgtcagttccatgtacgttttcgtcttggaatggacacccgcgttgagccgcgcctcggagaccggcacaatccctcacggctttatttttgtgcgtaataaacattcaaaagaaaatggaaaacgcagtaaacgttgcccttctttttttccataggcctccttcatgttgtcagtgatgatgggctcggccgtgttcaatttgctcagtcagtacaaccgacccgagtcatttatgcggtaagaaaacaaagccaaaacaacggcaaaccaaagctaatcataattgcaaatcaaaactaattaggctagttaaactgagaccagatcaatcggctgatcgttcttacctttctctgattatttgttaattgcacctccccgcgtctctctatctttctctctctcccctctctttttctctctccctctctctctttgtctctctctctctctttttctctctctcttggtcttttcatttcaacactaattagtgctaattaagcttcgtcttcctcgtcgcctcccttttgatgtgtgccccggtgcttttcccttcatcttccaccattattttcatctcatttgctctcttcgaagtttgcgttggcattttttggcctgccatgggtttcctgcgctcccagtacattcccgaaaaggtcggacattggcaaattgcgacaaacgaaaatcattttcaattgaaaattgtcctcctcagactcgttcaacgacaatgaatttcttccgtgtgccattgaatttgcttgtcattggcatcctttggaacaatttccacttggacaccattttcaaggtgggtatttgctcttattatgattaataattgcctctcggcattcgctaattgttgctaattgcctgactaattaataataattagctgtgccattaagttctgcttctgtttcctcctttcggctgctttcatccaacatgccattgctcggagactttgcattttgtggataaaaatggccaaaactgacctaatttaggatgacatgttcgcaacctctgttgatagaacatccggtggatgttttggaagagatggaaaaactatgccccgaggggggagtcagagaaaaaatagacaaagagcagagagaggacagtacggaagagactgcggagagacga

SEQ ID NO: 74607 - DNA, 2939 bp, Heterodera glycines
atgttaacttctgcccctgttttacaatcaccaagatttggcagattatttataattgagtgtgatgcctcgaagaaggcaatcggagcagtactgttacaggaaaagggaccagtggcttttatttcacgagctctgaacagacatgagactaactatccgtccattgagagagaaacgttagctcttgtttatgcagtgaaagaattttcaccatacatagtcggctcagggattacaaaagtgataacggactgtagcgcgcttacctccatgattaaagccaatgaattaaagggaaggctagagaaatatcaaataagcctacaaagctttgacttagaaataatttaccgtccgggaaacaaaaataaagcggcagattttttatcccgctacaatatcccaaaaattgatataattgaggagtcggacaataatcctaaagagtcaaaagaagaaaaggtgaaaatacttagtgcacagagtttggaaaattcaagtgaaaaaagtggaaaagaaattttttgtgaaaaaggacaaataactttggaagaaattattaaagcacagaggcaagtaaaagaaggggcacaaatattttacattttaaagacagggaaaatcccagaaaaaacatcaaaatggtcacaaataaatcatgattactgtcttataaatggagccatttactataagaaaggaaaatcaaacgcagaaagaccaaaattattaattccttatttatacaggaaagaaatttttcatttaattcatgatgagggacattttgggttcgacaaaacttggccagaaatcaaaaatcgattttattgggttggaatgaaggatgacgtaaatatgttaattgatagttgtgtggggtgccaaaaaagaaaagttcaaccaggccaagctaaggcatcaccaggtgtacccataatacctacagattatcctttccagagggttcactgtgatataatgggaccgctgaaaaaaacggagaagggaaatgtgtacgtattccttgcaattgacagcttttcgaaatgggtaatggctgtaggaataccggaccaaaaagcagaaacggtttctgaatcatttgtggaaatggtaattcaccaacatggggtacccgaaacagttgtgactgaccaaggcagacagtttatgtcacaaatttttgagaatctgtcaaagtgtacggatttatacataatacatcaacgccctatcaccaacagtcaaacggagcagcagagggtgcgatcagaattttagcaaacattatttcccaaatcattaacgaagaagggaataattgggatcaaattttgtcaaaatcagtgtttgcatacaatgtttcgatccattcatctacaaaaaatacaccattttttgttaattttttacgaaacccgcgtctgccaactgatcagttacttaagctaccaaaaacagatgagttaacatcagatatttcggtttataccagaaaacatggtgaaaaagcagcaaaagcgtgggagtttgttagagatgaaattttaaaagcacaacaaaggactaaagaggaaaatgatttgtgtaggaaagcgaaagaaagagaatttgaggtcggggacttagtacttctaaaaaaggaagtattgaaacataaattcgataaaaaatggagtggtcctttccgatgtgttggaattgaaaaggataagatgaatgtactcttacaatccttagaaggaaaagggaaattaagaaaagtacaccaagaaaaggtaaaaattttctatggacccgcagttttaccattgagaccttgtgatgaacccctttgctgggaaaagtatgttaatgacccaaatttggaacaagaagaagcagaagatgaaagtgagactagcgaaatagaatatgatgaattgaaagtggaagaaaaaaataaagaagagaaggaaggtggaaatccgacaaaaacggggaaacaaatgtcaaagtacggctttgaaagcagtgatgaggaaactcattcaaaaattattgctttcatacgagaaaaccaaaattttgaagaagatgaggaaaatgagggtccaggaattttaatgggcgatagaaatcccgaaatcgaagccataccgacctttactgagcttgaaattttgctcgagggctcatttacgagagtatacacagggtggataaatcccgtaacaatcgcattaatttcaagtatacccgaaaatttagtcagagaaaattgggaaatttacataaatgaacatggctcaagatttgtattgggttggatttttggtgaaagttttgaaatttatattattaatgaatttgatgaaataatgctaggaatcgatgcgcaaatgttattaggtgaaagatggaggctaaaaaacgaagaactaaccgaatcatactgggaaatttatgttgacgaaagtggggaagaagttgaaataccgagaatcccggaaattctgatttctgaaaaagaccatgtggaaaatgaggaaaacggaataatcagaataagcataaatttggttaaaaatgaaattgagagagatttatacgactttacactaaatacaaatccaaaagaatttatagaaatggaaaagaaaaaaattcaggataattcgaccatggattctcttacaggtatggaatcgacgtccaatttatttgattcactcacaaccgacgaggaggaatcattgaaacgactcaaaagaagtctaatggctcaattggaaagagtcaataaaacgctgaccaattcggaacaaatgagcgaaaagcctgaagaaatggccgacaaaggaatgccagatgaagggataaaaggtcatgcggtggaggataaaatgggcgaaaaggccaaaagaagtggccgaagttacaaagccatttga

SEQ ID NO: 74608 - DNA, 1191 bp, Heterodera glycines
atggaaaaggaaaaaattcaggataattcgaccatggactctcttacaggtatggaatcgacgtccaatttatttgattcactcacaaccgacgaggaggaatcattgaaacgacttaaaagaagtctaatggctcaattggaaagagtcaataaaacgctgaccaattcggaacaaatgagcgaaaagcctgaagaaatggccgacaaaggaatgccagatgaagggataaaaggtcatgcggtggaggataaaatgggcgaaaggccaaaagaagtgccgaagttacaaagccatttgaagagacggaagcgaaaaacgaaagctcattacctgtcaaaaaagcagaaggaaaggtcataccagaggattgcatttcgttggatctcgaggaggaagagagaattctcgaatttccaaagactttcgagaccggagcattgggattttacgaatcatgcgtcaacaaaagcaaatcaaagtcggaatacgaagcaaccttaaaaaaagtggagaaaaagccaacgaatccatggaaaattgcttatcacgaaataaaggcggctgagacaaacattttgtcaaaaaaggatgaagcaattccgcccgaaggaaaaaagaagaatccttttgcagagagtacactggataaaaaggaatgtgaaaacaatagtcgaaaaagattcgctgttggagacccatggcttgcacctcccaattcaatttggcgtgaaatgaagacgaacgagccgaaggaagtgcaaaatgtgatggcaatgcttctgagcatacggaacaaagcattggacgtccacgatgaagcacagaatgcttggaacgaattaatgaaaatgaaaggaaaaggggagaagaaagaggaggaaggcatggattccggacttccagggttttcaactgctgattggcaatccgatcatgaccgttggcgtggacaaaatcgttggcgcggcgaaagaggagcaagacgttggggacaaccatggcgagggcgtgaatggaaccaaccaaatcaaggagcgggcccatcgacatcagcggcatcacaagaaggacaatggaatttctcaaagatggcgggatatggatagaaaattggattttgagttggaattggttgcattttagattttttttttgggccaaaatacaacaaaaacaaacaaaaaaaca

SEQ ID NO: 74609 - DNA, 2016 bp, Heterodera glycines
  unsure (1)..(2016): unsure at all n locations
atgtccattgggatgagcgtcgattttacggcacatacggcttactctttccaagtgagcagcaaaatgctattttttaaaatttatttaaaaacataaatcgcattcgagagtcttagtgtcagaagtttcaaattttcctcttttcacattttattcctccttgtttcagctgtcccaccgacgcgaaacgcgcgacggtcgcgttgtgctcgtgccgttgcgaacaccgcgcgacaagttgcagcacgcgttacgctccatcgcgtggccaatgagtcaggcggggctcagcacggtgatctgcgtgctgccgcttgtcttcctgcaagtgattgcttgactgattgatgagcttacattatacatattcgagatccaaatctcggccagtttgggagtctctcgagtgattgttattcgatttcaacggtccctgtttcgcaaatttatctcgactctcgaaaaaagcatttctcgtgcaacgctaggccatacgaatttctaatttccaatttctggcatcttaaacaaatagggtacattacgtagtgattgaatttggcacaaaatcccacaaaaacgaaaattgctttgttcccaaaatcagaggttgcttgtttcgataaatctcgaaaagcggaaatttgcttcagaattacatcccgctcgtgttcgtcaaaaccatctcactggttgccatctggggactcttccacggcctggtaaggaccatcagccctcattttcagaattttcggttttctttggggaaattaattgaatttttcaaaattttgcgcccttcacaggtgctgatgccggcctttctcgcctcgctgccgccacggtggttggaggtgaactgttaccggatggccgttcagaggattcaggtagataaatagagtaggaggaacagttatcattgaatttaatgtatcaacatttttccaaaaaattctggacttgaataataacggctgcggcttttcaaagacctctctaattaggaaccaattacggattggccctaattggaatccccaattccgtcttgtcctggttctcgtgctactttttgtttgtttgagtagtccattcaacaaagcaagcagaaagaaaattcatcactgttacgacatttttttggacgagctactgtaatatgtgggattggtagaggggggggggggaatacagtaagtatacagtatgcttacccattccgcttttcaaagtttgatcccgatttttccaaattttaagcaaatgagcgaccagcaacagcaacaaaattgtgttggtggtggcgatgatccaaacaatgattgggactgtgtggtgatcagcggcggtggttgctccaaaatgttgctatcatcagcagcggacaactgccatcaaaagcagaaaattggcgaaaatcaaaatgatgaagcaaaacggagggggcaaaggtgagggaaaaacaacgtcgtttatttaaaaaaaaaattcaattccgatactgtgagatgaatgatcggaaaattacgaatcggatcactggccaactcatacaaataacaaataaatagaaaatttcagaaataaaaataatgtggaaaaattttccgagacccgaggcaaaaaaaaatgtttaaattccaactcaagacttaaaaattgagaagtttctcaagtcgaggctaactttaaggggggagatggggtcaaaaaaaaactaaagcctcttattttgtggagaggngtttaaaattagagcaacgaaagcttggttttttggatcactctcactatgttccccgtcgtttagccgcggattatttcttaaagaagagttcattactaacgcttttttttcctaaatacttattaaacttttaaaattgtgtgttaatttttaaaatatttatttgctgttaaatttgaatgcctttcagtcgattggaaccgttccgactcagccatttgctgaggagcactgaacgccacacaaaagcagaagcatga

SEQ ID NO: 74610 - DNA, 3131 bp, Heterodera glycines
atgccggacgcagaccaaattttgcagcaattggagcaccattttgtcaacaattggctcctcgacacgggcaaaattgatgaaatgaagcaggtctgtatgtttggagggggtgattgcgttaaacttgttttattttaaaatttatatataataattcagagacaaagtgatcggagggaagagcatgatgagttcgatcaatctgaagaggaaactgacgaaatttcgcttatcaatgtcatttattgatggtgatttagaaaaagaaattggtgatcgacgggagacggacgaagaaaacaatggagaagagcaattcgattttgaatagacacagttcgataaaaggttcttcttcgtttttacaggaaataaaatttttttaaatttttgagcttcattaaaaactgtgttatcatttcacttgtattatttgctttaaaaacctcaaaatacagttacagcatgcatgggattcgaacctgagacccccccttttggtgactaactcacagaccactaagacgaaaaatccaacttaattgtacttggagcccaaaattgggccgctgtgtgcaagaaatgatgacaaaacgatgtcacacaaatattttcacgttttagttgaatctaatatctaaggctggtaattatatgcgtgccaggtgatttcgacagtggttgatttcgacagtgagtgaattcgacgatgattgatttcgacagtatcagaaaaattgtgaattcgacagagattgatttcgacagtaccggtaaattttaaaaaaatacgagtatatgaaaaattggaacctaaaatgaagtgatatagtggtggaaaaaagttgacttaagatgaaaaaccatctcatagttcatataaaaatctgagataattcatgcttgcttatcttttggtcttcatcaaaaaattcttttaccccaacttgatcagatcattccttcatggtgatcgggacaccacaaaatacgttgaaaatcgctgaaatttaaaaaaaaaatcatagggagttgggaaaatttccaggtaaatttttaataagctccttttaaagaacacaaaatttactaccgaattttcttttgaatggtagagctacgacttgtatataaaaagttatacttggtattgaaataattgtgaaaaattataaatgaatggtgacatggagagcaaaatcacgatccacaagccccttcgaagattttgaaaatcgtaatcctaaattttctttgaacgtgctcataccactttattttaggttccaatttttcatatactcgtttttttttaaatttaccggtactgtcgaaatcactcactgtcgaaatcacatagcaccagcacatgcatatttttttcctagactgtgggaggcctgaaacgcacgaaaaacatgtttttagcttcttttgaagcttctagactgtatttccatatgcatattttgcatatttgtgcatatttcgcgatttatgtgcatattttggaatttcgtgcatattttatgtgcatattttggcatttttccaaaaaacctctaataaaacggccccaaaagtttgaaaaggattggtagcattaaaaaaaagatattagcatcagattaatttctcttttttacataattaaaatgaagagatagtatgccaaagtaagagaaattacaaagaaaaagagaaacgacgagatagtactaggcttttctctgcacagtggagttgacccatagtgaagttattgtgtcgatttggaagagaaaatgtgtatataaagaggggaattttcgtttacagtcattcattcacattatttgttattatgtccgccgacagagcgcccgacaacgcgcgacaacgccaacgccaaaatgaggcgcgttcaactaactctccatttcattatttgtttcttaccttattaatttcagcgtcgtctgacagtttcgccttcagttcgctcggatgtggagtcgaatgatcatcatattgttggggcttcaacccgtcatacgccgtctcaaacgcatcgtccgccggcttcaacccgtcgtcgggcgacttcagcgaatggtgtggtacttttcaaatgctgactttaccaaaacactcattcccttttccttcagtgaaacatcgggctcagcgtcgtacgtggtctcaatcgcgtcgtccatcggattatccttcctttttgcgagtgccgacatcgaccgaaccaccgcgatgcacatcgaccgaaccaccgcaaagcccaaggaatgttcatgtgccacaactcccttcaaacggaccaccgcaaaacccatggaatgttcatgtgccgcaattcccttcaaacggaccaccgcaaagcccatggaatgttcatgtgccgcaattcccttcaaacggaccaccgcaaagcccatggaatgttcatgtgccacaactcccttcaaacggaccaccgcaaagcccatggaatgttcatgtgccgcaattcccttcaaccggaccaccgcaaagcccaaggaatgttcatgtgccacaactcccttcaaacggaccaccgcaaaacccatggaatgttcatgtgccgcaattcccttcaaccggaccaccgcaaagcccaaggaatgttcatgtgccacaactcccttcaaacggaccaccgcaaaacccatggaatgttcatgtgccgcaattcccttcaaccggaccaccgcaaagcccaaggaatgttcatgtgccacaactcccttcaaacggaccaccgcaaagcccatggaatgttcatgtgccgcaattcccttcaaacggaccaccgcaaagcccaaggaatgttcatgtgccacaactcccttcaaacggaccaccgcaaagcccatggaatgttcatgtgccacaactcccttcaaacggaccaccgcaaagcccatggaatgttcatgtgccgcaattcccttcaaacggaccaccgcaaagcccaaggaatgttcatgtgccgcgacgctcatcaaccggaccaccgcaaagcccatggactgtgtctcgtcctgaccatttgattgaacatgcgcatcaactaaatgtggtgccttcagcgtctcttccgtcagatcaag

SEQ ID NO: 74611 - DNA, 419 bp, Heterodera glycines
atgcatgtgctggtgctatgtgatttcgacagtgagtgatttcgacagtaccggtaaatttaaaaaaaaacgagtatatgaaaaattggaacctaaaataaagtggtatgagcacgttcaaagaaaatttaggattacgattttcaaaatcttcgaaggggcttgtggatcgtgattttgctctccatgtcaccattcatttataatttttcacaattatttcaataccaagtataactttttatatacaagtcgtagctctaccattcaaaagaaaattcggtagtaaattttgtgttctttaaaaggagcttattaaaaatttacctggaaattttcccaactccctatgattttttttttaaatttcagcgattttcaacgtattttgtggtgtcccgatcaccatgaaggaatga

SEQ ID NO: 74612 - DNA, 181 bp, Heterodera glycines
atgaatctgtgcgatatcgtttgccatcatttcttgcataataccaaacatttcacactgtttttttcagtactggaaaacctcccgtgccggtgacaatgaggcggtcaacgaagtgcggacggcacttgatgcgggaatggaatgtcatgcagtggttgggcacccgtacctcaacgcg

SEQ ID NO: 74613 - DNA, 865 bp, Heterodera glycines
atggtcccgaacaagggaaagagatcattggcaaaattggctgtgaataatttatgtatgttttttcgttgtcctatgaaaatattataaacaaaaaatttaggggggccgattttcacttcgaaattatggtctttcgcagacgctcatcacagatgacccatctgagcttggaaattacctggacaacaaaaagattgaaatcagcagccttgacatgctgacgccggaaagaattctgatcagttatcaattgaaaaaagactggatcaaagagcatccttgttcaaatgttgtgatttcactgttcacaacatcagcagcccgactacatttactgaaatcaatgcagaaagtggtcagaagtcccggctgcactcttttatacacgggtaaacatacaataattttctttattattctaaattttagacaccgattcattgtttcttgtacacccggaagactcaaacctccttcagacgggggtgcacttgggacaactcactgacgagttcccaaaggtaaaagaccaatataaatcgcgctgcatttttttaaatttagcacgatattttggaattcgtaagcggcggcgcaaagcagtacgggctgaagctgcgaaagaagggagccgcagacgactttgagtacgtcctcaaactccgagggattacgctcaattatgacgtgacagaaaatcaaggacttcgttatgacacattcaaacagcgtgtcctggaatttgcccgctccggaaagacagacccaattaaagtgttgtacccaaatttcctccgtcccaccgtaattcaaggcaatgtcacctccgctcccctccaaaaaatttataaaccttacgttg

SEQ ID NO: 74614 - DNA, 136 bp, Heterodera glycines
tcgtaatcggaatcgcaattaatcggattttgggccataatcgtaatcggttttaaaaccgtatcggatttttggccataatcggaatcggcgatttaatcggaatcggattttgtctggctcggcacatccctgg

SEQ ID NO: 74615 - DNA, 364 bp, Heterodera glycines
gctgtaaaaaaaatttggggcgatttgaaagagaatagaaagaaccaggttcgatgaagttttggtaagccaaaaaaaatccaaacatttaaaaatctataaaaaatttaaaaatgagaattcatgcgagattttctggaaataagcttaattgggcctagttaagctgtaaaaaaaatttggggcgatttgaaagagaatagaaagaaccaggttcgatgaagttttgttaagccaaaaaaaatccaaacatttaaaaatctataaaaaatttaaaaatgagaattcatgcgagattttctggaaataagcttaattgggcctagttaagctgtaaaaaaaatttggggcgatttgaaagaga

SEQ ID NO: 74616 - DNA, 151 bp, Heterodera glycines; identical to SEQ ID NO: 59122

SEQ ID NO: 74617 - DNA, 284 bp, Heterodera glycines; identical to SEQ ID NO: 62736

SEQ ID NO: 74618 - DNA, 347 bp, Heterodera glycines
agttaagcttgtaaaaaaaatttgggggcgatttgaaagagaatagaaagaaccaggttcgatgaagttttgttaagccaaaaaaaaatccaaacatttaaaaatctataaaaaatttaaaaatgagaattcatgcgagattttctggaaataagcttaattgggcctagttaagctgtaaaaaaaatttggagcgatttgaatgagaatagaaagagccaggttcgatgaagttttggtaagccaaaaaaatatccaaatatttaaaaatctataaaaaatttaaaaatgacaattcatgcgagattttctggaaataagcttaattgggcctagttaagctgtaa

SEQ ID NO: 74619 - DNA, 364 bp, Heterodera glycines; identical to SEQ ID NO: 62360

SEQ ID NO: 74620 - DNA, 1656 bp, Heterodera glycines
atgtgttttacccaaggtgcgtatcaaaaattattcaaattcaggacatcgggcccaaaaattcagattttggggtcgaaaatcaggacattttggaaaatagctaaaaattgtttgtttatcaatttaatagattaaatatagaatcatatttcgtattccctccaatgactatttttaacttttttagggaggaaataagcaaatattacattaaattgttatcgttctcaaaaaaacagatttttaagaatatttttgcggcgcatttttcaatgacttttgaggaacaagcggggcggaaccgccgggaaaatttttgaaaatttgggtataattgttaacagattttgtccaaaaattgtccaaattttgtgattttgagccaatttttaataaaacaaaggattcttagggtcaggcgttgccgttaagcaccgccgttgaaaaattttgaactctgagtgacttacgccataaaattacaaattttctgaagaattttaagaaatcaggacaaattttgatcgttccctccatatcaggacaaatcttctatgtttaatataataattaatggatataatcattatctttatataaattatgaaaatataatataaaatttcataacaaatcagaatagctgatatgaaagaaataataaaattaaaatttcgaaattactgaattatggacattcaaaaatttagtaaataaatctattaattcgaaagaaactaccaaagaaaaaagtttgaattaacaatcaaaaaattttattgtcatattatgtctttatatatgattaaaaattaaagaaaaaaattaataaattgttcgtaattgatgttaaatatagtaataattaaaataaaaaatagagaaaagttataaatatattgtagcgaataaatttgaataaacaagtcccaaaactattaccgataacataaaacaaaattaaacaaatcaatacaaaatttattttccacatctaaagggctaatgttggcttaattatatttgggtggacgagcacgcgtgctcaaacatcggcaagagatcaatcgaaaccatgagatgtgtataaaatttcaatttttagacaccgatagcctgatccttgtccatcccgatggtcggtgtcatcttaaaactggcccgcacctgggacagtttacggacgagtacccggaccacaaaatcatcgaattttgcagtggaggagcaaaacaagtaaaaatcatttgttttgttttttttcaatgttgcatttaaagtatggtttgtgtctgcaacgcaaaggggctgagcccggtgcccaaatggagcatgtgctcaaagtgaggggaatgacgctgaaccacgatgtgttaaacaatcagggtctccgatacgagacgttcaagaacgaagtgatcaattacgcaacgaccggggactatgagccgataaatgtcatttatcccaattttctaaggcaaaacattagggaggggggacgtctgacttcaatgccaatgcagaaatgctaccgtccctttgttggtaagggaattgttggtcagggttttcaattgatgaattttggtcacacattgtaaattttacgcaacacatttaaaaatgattaatgcaaaaaaaaagaataaa

SEQ ID NO: 74621 - DNA, 957 bp, Heterodera glycines
atgactttatgtgaagtgtttgttgagtgagttacaaagtgacaaaacattagtattcttaattctttctcattaaaacattgctttgaggagtttttcggttttgaggcagaaattcctcatgaaatattgcatgattgtctttaatattaagatgttagttttttttttatagcattaagcgaaacattaattttttgtttaatttgcttatcatgaagaaattcggtaaaaaaactatttcgttttgtgttttctgtacatgatatttataccttttcataaacaagaccgagtattaaaatacttaatgaataattatcatttgaaaatattttaattcattatcaggtttgattggtttataacttttttaaattaattttatttattttttattttcaagagatattaggttttctttttcttttaaattttgatttttattttacttgaaaattttttattttttatttatctcattaaaaaattctattatgaagtttcattattgcatgcattatttttggtagaaccatataaatgacagaatagtaataattatttttgattcattaattgaccaagtcaatggtggttatataccttcaaagcaaaaaattatttatgcaatttaaattttttaaatttgatttgctataattttgagaaagaattaagaatactaatgttttgtcactttgtaactcactcaacaaacacttcacataaagtcatatcacaagtaaaataaagataaaaattttactaaaaaaaattaactaaaaaattcaaacaaacatctaaaatattttcagagatttctcttacgaaatttatttaattaaagtaaaaaaagtgttaaaaaggtgcagatggtaaatacaaactataatataaaaaacataaaaaccaaaatatacaaaattttaattatatgcagaaaaagcattatta

SEQ ID NO: 74622 - DNA, 641 bp, Heterodera glycines
atgtggatggatgtggaggtaaagcgttggcatagtgttggtgtgttgggtgagtgagtggtgggatgatgatgatgggggattgccatcaaaaatgcgcctttttggcaaattttgtaaaacaaaataaatgaaatttgaaatatgtaaaatcatttttgggattttaaattaaaataaaatcattctagcgctatttttccattttttgaaaaaaattattattaaaaatgcaaaaagtaaataaataaaataaaatgcagcaatgagggatcatcagagagctctcctctctctatccaccgatataaaaatgctcatttattaatctagttttcttttttgggttctattgcactttacgagtttatgagtccaatcggaatttatgagtccgatcaaatattataattgcattttttgaatccaatcaggtttatgagttatttaattaattaaatcaaattttgagtccaattattttttattgtcgtaaaccatttttaagcgtaaaaatgaaaatgaaaaattcttcaaaaagtgtcagttaatcgtaaaaatttattgactcataaatatttgatcggtggattcaaaatatttgattggactcataaaattaataggactcgtaaagtgca

SEQ ID NO: 74623 - DNA, 2712 bp, Heterodera glycines
atggaaagacgccgctctgtggtcatcaccggacttccagaaaaccaatcggagaccccatcagttcgtgccatttctgacaacaatgccgtcacaggttttcttgaccagctcggggttgagactcattctatagtcagctacagaatgggatggtacaacaaagaccgagcaagaaatggtgcctgccgtcccataaaagtcgtgctccccgcctcttcttttcagcgcacatgccttcaccaatggaacaaaaaatcattggaaattcgccgacagttggacaacaaaaggctgaacatcagggaatctctcactcaagaacaactgaaagcgagacgtgaacttcaagcgcagtgtgccgaaaagcgaaaagaaacatccgctgactggatcatctataacggcatgcttgtgctccgaagtgaaatcaaaggaaggaggatgaacggagagaacttgaacgggccttttcctcacattgactctctgctgacacgcaatcaaaaaaactaattcatgccagcaatgttctgaggtttgggggtagacaaaatttccaaaaaatatattctcaaaacagaaaatcccctaaacctcatcctaaattttctcatgctaatgtaaatacaaatatgaatttgtccatctctggttgtttagttaatgcacgttccataaaaaataaactaaatgaattaagtgcattactgacagtaaataaaattgacataatggggattacggaaacttggctttctgaatctgatgaaataacttttcttgaacaatcactcaatgacaaatatgttgtttttaatgcgaaaagattaaaaggcaaagggggcggaacctctcttattataaataaaactattcagccttattttagtaacacggttacaaaatttggttgtgaaatctgtttttgtaaattaaaaaatgctaaaaatttatctattttatctttatatcgcccccctaataccaaacttaaagcaacaaaatcactttttaattaccttgaaaaatttattacagcttccaccttaattataggagaccttaacataggcaacagagacataacttggtctaataattgtcccatacctcatacctgtcttggcataacttttgttgattttttcaataaattttctttaaatacaaaaattataggtcctacaagaggaaattctgttctagacctttgcttatgtacaaacccgaacctaattcattttgttgaaattaaggacagccttatacattctgatcattcagccttattttttcaaattaatttgtcattacagaaatctcctccaccaagaataactattagaaactttaaccctaacaatattaaaaccttaaattcgtatttactttctaatgttacatcaaatttaaccaatgtttttacattagaaaataaatacaaagttttttctgaaacaatttcgagtgctttagagcattttgttcctcaaacttcctttcttaaaaaaccaccaccaaaataccctcttcatataagagaatcgatcagacataaggctctcctttggcagaaaatgaaaatagacccaataaaatataagaaattctatgattctataacattacatatcagaatacaaacaaaaaaattctatgaaaacagacagaaaaaatttctctctgttaatccaatgaatctttataaacttatcagaaaaagttttgtaacaaacaatagtattccacctttagaaactgaaaatgggtttatttttgatgacaaggataaggcacaatattttgccaagtatttctcagaaaccttttcaaataatttggattcaacaccttgtttgtctcagacagacagcctcggctattctatctcggatttaaattttgatgtctctgatgtttttgataaacttaatcgtttaacaaatagaaataatacttctcctgattttataaacaataagattcttaaaaattgtttaattcctcttgagacctgtaactgatcttcttaaactttcttttcactctggaaaattgccaaaaatatggaaacattctattattctcccattacataagaaagatagtaaaagccaaattaagaattatagacctatttcacttacatgctctttatgcaagatatttgaaaaaattcttgctgaacatattttaaagttcttgttagataaaaaattaatttctaattttcaatttggctttgttagtagaagatctactattactaacttaattacaacacttgaggactggtatgacggtattagggataagaaaaatattgatgctctttatcttgattttcataaagcctttgataaggttccccataatttacttatatataaattacataaaattggtattaggggcaagatattagcttggatttctaattttctacttaacaggacttttcaagtcaaagtaaacgaacattattccgaaatttttaaaattaactctggagtcccgcagggatcggttcttggaccacttttgtttctgatttatataaatgacttacctttatgtattcctgctgaaattggcatcaaactttttgctgatgatactaaattatatgttatttataaatctgaagctgaaagaaaacacatggaccttgcactttctaatgtactaaattggtcacaaaaatgggga

SEQ ID NO: 74624 - DNA, 1603 bp, Heterodera glycines
atgccaaaaaatgatgccaagggaaattgccaaactgacaaagtatcaccatatgaaaagaatgatgataatgatgacaaagcgctgacaaaaaatttggaaggaaaagaaaaggttgacaaaacacaaaataaggaaaaggaaaacaaaattaatgaagaagaaaaaacaaagcataaagattctggtaataatgatgaaggaattgttacagaaaaagaagccgctgttacaaatgccaaaaccaaaaaagcctatagaattgcaggtattttaaatgaaagaatatttataataattaaaaataaacggttacttttattagaaaatatataaaaatatttaaattaaaaaacttatcaatatattaagaaataagtaaaaacaattaaatgaaaaaaaagttgaatcatatttcaaataaaatttcttattttgactttaatctttttcttggaaaagaggggaaaatgttgttattaaacttaaaatttttaaattgaaatttagcaaaatgattttcttagtgtatttcgaaagaagaataaaaatatcaattttatattaaaaaaaataaataatttttcaaaatttatgaccttttagatatcaaagaggatgtttttcttctgggccattttcaaaatattctttcaaattcgaaagagtttagcattgagatgccgcgaaatttgctcgagttaggcatttattcaaatgaaatttggcaccgaattttggcagagagacattttgacaaaattggcatcaaattttggcattcaaaaataaattttgaagagaaatgggcagaaattgaaaataataaaataaataaagaaaatgaacaattattgaaaatggaactgtaccaaatgttgagcaatttttccccagattttgacgaaaattttgaaaaaaattatgtgaataaaaattggcaaaaaatcggtgaaaaattgcacagaaattggttggccaggacccttttgtccaatggtgaaatgtcgaatgacgggccaggacgttttcgtaccgccgttttcgtaccgccattttcgtaccgccgttttcgtaccgctgttttcgtaccggagacgttttcgtaccgccgttttcgtaccggagacgttttcgtaccgccgttttcgtaccgctgttttcgtaccggagacgttttcgtaccgccgttttcgtacgagtgagtatcgaaaaaattgcattcaaataatttgttaattttttttaattacttttaatgttttgacagttaagcttttattaactacaaaatgaaccagcagcaagtaattaaaacaaaacgaaataatgataaattggtgcatgatggtgcactttatgtgttccacaaattcagtaacgatggacttaagaaatttggcggtgtgagtttcatagcccggcagaccaatgcaagggtatgcaatatattattttgaattttgaaaatcttttaaaattcaggacgcttgcacacggatttaaatacgttgtgcagaagttggtcggagttcattcgtgcgacatgaacgctgcgcatgtggaatgtcagcgtcttgtaactggtgacgtgctgctgtga

SEQ ID NO: 74625 - DNA, 1554 bp, Heterodera glycines
atgtctgaacaaaaaccagctgaatggcgagcacagattgaataccttcaacaaattaattgcgataataacgtagacttgacttatcgtgtaagaaaataaattatatttatatgttaaattacgtttaaactaatttattaaattttgagaaataaataaaatcagagaaggtaattatattttattttgtttcaattaaattaagtattcaaaattatggtcaattggacattggtcagatgattatgcttaataagcaattgataattattttgaattaattaggattataaattatttctaattttttaatcaatttttaaaaaattcaatttgagctggaacaaattttgacaacaaatggtcatggtttacttgacacaaacaagacacaagaaattaatgaaaatttcaacaaaattcggacggtcattaaagaatgggtgaatttttaaaattaaaaattcattgaaaaattttaaatttagttaaaaggccaaagcgatttgttgttaagcggatcaatgatgttggatgcttttacgatgggttctgatgttgacaccatttgtgtgtcgccagaacatattcaagctgaccaattcttcggcaaagtgccgtgccatcaaaaatttgccgaggaatgccgaaatgatgactcactgttttgccgactgtgctttgtaacttatcgtatcaattgcaaattatgattccgcagttgcggaaaatggaccaaaaaacaaggattaggaaatgtccaaaattcaatttttcaaaccccataaaaaatttttttaatttaccattttttcagcactgcttcaaataaatttaaaatcgaaaaaattaatagatttttaatttttcagcacccggaagttcattcactgcaacggatccaatccaattgggtcccgctgatcagactaaaactgatcaattttgatcatgaaattgacattgttttcgcttcaattcctgggcccgtaccaaaagaacgaggtaagggttaacctacccgttacccgtactaaaagagcaaccccgaattgagggtgacttaacccggttaactaaccctcagctgcgggtaacttttcaacccgcacccatgccagggtaacaacatgagcatgttttttgaaaaaatattcgccctttggaacatgaaatacccacaaaaattcacaatgtttaacgtttaataactttcatatctaataaattggcaaccagcaaaaatcatcaaaaatgcacttgatgagggtatttgttttattaattaatttaaataatttataaattttgtaaagaatttatttaattatatatttatttattttaattgcatttaaatattgtcattttatatatttttgtaaattaaaaataaagtattttattttttacataattaaaaatttttaaaaagaattgtcaaattccctgcttttcctattttcagcatttaaattgttttattcttcaaaaagtgcaaatgaaaaattgcctatgctctttgaacaacaaataaaattccacgaaaag

SEQ ID NO: 74626 - DNA, 609 bp, Heterodera glycines
atgacattttggaaatggaaaaaagaagtaatgccaaattgtcataaatgtaagcaattattttaattttgagaatttttttattcagttaaatatgtttttagcaccaaataaatattccaatgaggaaaaattaagaaagataaagcaatatttcgaaactaaagaaaagaatccaaaaatttgtgatgaaacaaaagctaagaaattgagaattgcgagtgacactctgagaatatggaaaaaagaaacttactttagttccggaaaagtgattttttaaagaagtttatgtttttttgatattagcttgtttatgttatgataaaaaatttaattgttttatttttttgtgtgactaatagcgaaattttaagctggttacaaaggcctaaattaatttaaatatgtttagaagtgttttagcccattttcatactgctcgagaattttgttcaaaaaattagcatttgcgtcttaaagctataaaatttttagtcaatttaaatctcctaaatttgagaattttatgtcatattttaatttcttaggtcataatcaatataataattatatcaaattttacgcattgaattgagtttcagacta

SEQ ID NO: 74627 - DNA, 808 bp, Heterodera glycines
atgtataaaaccccgaaatatgtaaaaatatgtaaataaagtcccaacttttgttcgcaaactcaaaaaagaaagtgttttcctactatttagattatggagaatgcatgaaaaaatatgtatttacataaaattggcatccctagtcatcaagtcacaacattaataattaaaaacgccaaggatttataaaaattgaagatatttaatcccgaaatttttgaagcataagtttctcccattctacaggacttcatccttctgtttttcataagtataatttattttccatgattttattataataattttgttgaattatatcaacaaatttcattaattattaaattctttaagacttttatatacaaatatgaaaaaattcgattaaattaaaaaaatggttagaatgaataataaactttggccaaactttgattaaatatttggagatggatggatggaaggaaataaaaatgaaaaaagtgaaaaattcacggcaatgtttgatcagagatgccgggatatacgcggtctgctggagtttcgaaaaaatgaattttaagttcttcgggctcctgtcttgaggctttccgaacaacaccattcattgagtgcaatggtgcgagggcattttggtaatatcatagtttttgaaattttaattcaattttttcaaaattaccatctcatttttcagtcactttttcgccaattaattcagcttctgactgactactgtggacgaaaaccaacaaatacggtaaatttacatagaaagatcacatagatgtttcattataataaa

SEQ ID NO: 74628 - DNA, 939 bp, Heterodera glycines
atgtcctcgtcccatgccaaagtgactgtgcttcttctgctgttcgtcattgcctttgtggcactggcagtttcggcaccagttgcagaagaagcaaatgccattgttgaagcaaacaatggcaaattagcggcttccattggcacggatgaagcaacaaggtgagatgaaatgcgatacaagacaattaatagtataattaccaaatttctttgattattagacccgggtcttttattgttcaaccccccccccgcccccctaaaaaggggtcatatattcgaggggagtctaaataatcgaacacatacggtactcacttagatctaaacccaatttagtgctgtagaaaactcaaatccggttcgaaatttccttgaaattacgtgtgttttttaagtttgatacgccataaacgatacggatacggctacggtagacgctatggcggctacggtggatggggcggctacggctatggcggctggggtggcggctacggatatcgcagttgttattgtggctatggcggctatggctatggatattatggaaaataaataagatagaattaacaactataattggatataatatatataaccacataacattatgtcaatgttgtataaatatataaaagttatagcttataacaaatttttctaccggttaattactacctaaaaatgatctaatttatattgctgttcgagagtctcggcctcaagtctcggtccatgtcgcaagtctcggctttaacctttttgtttcttaatcaatcgctttaacatttacaattaaatatataagaattgatagaaagatgattatataatttatatctggttcattattttaaaaatttttttgaaatttatttaattttttagcagatttattatcaaattatgaatttacaaggatttttggaataaa

SEQ ID NO: 74629 - DNA, 831 bp, Heterodera glycines
atggtctgtggaaatgcgttcaaagattggcacagagacgcgcatccgatcgatggaagaggcggagagggcactgcaacggcaccaggaaagactggccgaaattggggcacgagaggaagagatcagcgtaagtgacaagccaaaggaaaagccgaatggggaggaaaagccgagtcgcgaaaagaagggatgatcaaagcccaggaatcaccacaacagtcaatgtgttatttcagactctgagagaattcggccataaattggtccaggaacagcccgaactgaaaatggacgtgcaaagggcgcaacggcgcattcagacgatggagcaccagacgaaacagtactgggaacaacataacgccaaattggagagggaattgcgcagacagaaaattgaggcgaatttggcccaaatcgaagcatggactgcgacgaaagaggcttttctggatgggttggtggcgggcgacagcacagagtcggtggaagaagcactgaatgagcactgtgagaagaggcgcgggggggacggactacggaggggggtaattagccaatcaaagggaggaggaggctaataagccaatcaaattgcaaatggcaacaattaaaatgttgaatcaattggcatttcagcgcattttgccaaaacactgaatgtccaaatggagcaccgttttgggcaattggatactgcggaaaaggaaataagcgaaatgggagacgccgaagcggaaacggtgcgcgagagagtggcggagacgcgggaaaaatgtcgcggattgaccgaatggacagaagtggaaaaagccgataaatagttta

SEQ ID NO: 74630 - DNA, 804 bp, Heterodera glycines
atgccttttttgctcgaagccgaatatttcacatgtggccattcggatgccgaattggccattgatttggacatttttcaaacacttattagcattgcattggcaatggaactgcgggacaaattagtgcgctatttggccgatgaattgcccaattttcaaaatgacatgcaaaaaccaaattttgcaccatcacccaatgacatcatccaacaataccatgccaaactttgcgcattggcaacaccattttttgggaacaaatttggccagaaagaagaacagcttgtttggccaagcttgacacggtaaaaattgaaatttcaatgaaattttggaattttaaattttctaaaatagatgggctcatttggctgaccaaagtgacattgaaagtgccatgctttttcttcatacaattcagcaacaaaatgtgccaactcgaaggtattaaatggctaattaattttatttttttattttttaaagcggttaaattaataaattaaatattttattttttgcagatttttacctccacttagtgcccaaaatcgaccaaaatggtgctcacttttgttaatggatgcttcatcggaccatgcaataattggtgcttcattaaattgggttggccatttggaagtgtttgttgatgaggagcaaaagttcaaggtgatttaagcaaaaaagattattttacagtactctcaataatcttttacagtactatcaacccacaaaaatattattttacagtactctcaacacattaatactgtgtattcagcttgtaagcactga

SEQ ID NO: 74631 - DNA, 2613 bp, Heterodera glycines
atggacacaattggacaaagacttgaatggattcggcaacaatttgaacagcggactgttgtgggacaaattgatgaagccgaaatgtcaagctcattggaggaggaaggcaaattaagcaatgaaaatgggaaggatgccgtcatcaaaattccacaaaatgaagacagaaagccgaaattcggagatgaacttgaaaagataagggaattaggaaccatcactgagaagacatgccaagaaaattccaaagtcgaaaagcctgcttctgtaaatgccaaagtcgaaaagcctgcctttgaaaatggcgaagtcgtcgaaaaactaccattcgaaaatgccgaacaacaaaagccacatcgacaaaatgccgagaccataaaaacgactcttgaaacagcgagaatggcaattccggctcttaaaaacggtgaagaaaagccatatttggacagtgccaaagaagtcaacaccaagacaacttccgaacaagctgaatttgaagaaaaaattattgccgagattgaaagtcctcaacaaaatgccgaaattggactaagattattggaccacgaatccgacagatcttttgtacgtcagagcccaccttcatctgctggctatcactcctcacgtccttcgacttcacaaaacaatagtcacgaagaagaagctaatgtcaatgctaaattaaatgccaatcgaagaaatcaaaatgccaaaactggaaatgtgccaacgcctccgattgttgaaccaatggatttccgcggtttgagaagcagcgatgaaggagaagaaatggagcagcaacagcaattgaatgtacagcagaaaaggccaaaagtccgttcatggaaagagatagaggtgaggaaggaggtcttggagggggtacgaacagggaaaaatcaaaaatttcagcaaaaaatgcaaatttcccccaaaaaaaaaatttttttttttacacaaacccatctctgggctaaaaagtacgggaacggaactggtactcgcgacaaaccttaaagtgtaattaataaaaaaaattttaatgttcaattttaaaaaattaacaaataatgatttaaaaataaattgactgtattcagttgaaaagtcgataaatcatttgttaattgctgagctgtttgttttaattttaaagaatatttaaatcataattctaaattatatttaaaattaatttcaaattcaaaattaaggtgttccctcggaacagtccatcaaatgtggaaaagccatcaattttcgttaataaatgcgccaaatcgataccaaaatccaaaaacaatgctaattaccccagcaaaaacatcaaagaagaagccgtccaacaaatgccgaaacggtcaccctggcggcggccccaatggctgcgtttgttgccacctttcgatggcacaattcgtacagaacgccaaacaaccacggcacagattaagcacgggcatccgttgctcgagcttaaactcgacggttcgccaatgttttttaattttctatttttatttttagagcatttttcaacgcctcggtctacggataaagtggcaaatgccggaggtgatgttggcacttttttaacaaatccgggacgatgccgaagaacatttttggagttggctgccaaaaaggagcgtcgtcatcggagccaaaattcgagcctcaacaggccaaaaacgacgatggtcagtttaaaaaaatgcaaataaataaataatctcaaacaaaatgtaaataaaaattgaaatttttgaatcttaatttttctccaaaattctttcgctttgtttgattaaatctaatggacaagatctaattgtaatttatgaattaactcattattgtataatacagggggtttagccccgaccaatcggggaagaaattctcggtgatcggggtaggggagcgcaaaattgtcaggatcggggaccacgatcggggaatgatcatatttttatttgaacaaaaaattcatttttttgccacttactagaaatgggctaaggccgagcccagtacatttgaagaaagggtcataaaggcatgccgtgggaaaaatgaaaaattttgcgcgatttggcgaaaaatttttttttttactccaaatttcaatttaatagatttttgagagccggtgaattctagcttttttcattcaactttccttttttttgacctaattggaccggataattgtcattcctaatggtctatttataattgatcagtttgatgatgaaaaaataataatataaaaaatatcctcaaactactaaattagcaattttgtaattaaaaatatttaaattaggaccaccagcagcagcaaacgcacaacaacggcatttacgacagtggcatcggacttgagcagcagcagcagcagcaacaacagagcaacaatggcacatcaagaaatggcattgtgctgtacacagttgagcttgaagaagcggatgttgcggcaatgcgaaggcgtgccgaaggccgtcagaattgatagttaatgggcaactaaccattttttgaataatttaatttagattttatgttggaaaatatttttattttctcgaaataata

SEQ ID NO: 74632 - DNA, 846 bp, Heterodera glycines
atgcttccattacaaagtggtttatcgtcagcaaaaagttttgcaatgttctgtgctcgtggcattgcaaaacgcgtttccgtatttgccaaaatcccttttgtcggctctatgattgatgctgtacggaaaattatagcagatatgaagaatagatttttgccactgttggcagaaggtaaaataattttttttttttgtatcaaaaaataaatgcttttttattttaattaattaaaaacattttcaattgcttttaatttatttaaaattcatatgcatttaaatagttatgtatgtttattttataaatataaatatatttaattgctctaatgggttggattaaatagtattcttaaatttaattttctaaaacgatttggcacattaaaattttcagtgaatgttgtacagaactggagaaaaaatgtggtttatttaatcacttatccgcgaatcggcgcatttgatgagaacaggtaggaatatagcacgtaatgggactcgaacccaatcaattttctattttaccactgagccattagaacttttttttagtttgaaaaactaaccgtaaacactcataaaaatttcaagaatttcagatttaatgaatttttgctatataattaacatttgtgcctaacatttgggaattggcacttttacagtgggcacagtaatcttctgtttcattacagtaatgtgccagtgatttcgcccgctgcattgaagctggaggtgtggctgcaatttcgcggtgtggatttttatgtaagcaagttaatcactaatcatccacttttgccgcagttaatttcatattttctcgctcattgttaa

SEQ ID NO: 74633 - DNA, 337 bp, Heterodera glycines
atgggcaccactgacaacgaagagaagaaaactgagccgatgaagaagttctgcaaaatgttttcatgggttcagcaaatgttttcatgggttcaggtatgtgttctctaaatacctaaaaacggatcacaaattttcatgatttccttattttgaaatccattaaatttagaaggaaaatgtcgaaacaaaaattgacgacgacgaaacattgttgaaacggttggacaatgtgttcatggtaaaacatccgccggaattgctcaatttttggcgacacgcggtcaaactgaaccccaaaaagccattgggtaaatatttttttacaaaaatttaa

SEQ ID NO: 74634 - DNA, 995 bp, Heterodera glycines
atgtccaacaatgggccggactatttgaaaatgctgaaaaagcggcgtgacagagaatctctcgaaatgctattccatggcattgtcaacaaattcccactggacgacaaaggcattggctaccaacagctgctgttggacgacgccaaggaaaatggtaatacatttttgttttttcttggtacacccattttcgtaaatttacgggtttttttttaattatctcagttttttaaccaaaatttcagcccaactaaagcggaacatcaaaacaatgggcaccacggacaacgaagagaagaaagctgagccgagtaaaaagttcttccaaatgtctccatgggttcaggtatgtgccctctaaattattcatcattttagctgttgttgttttttttgctcactcaaattaaacaacttttacttgtacgcaacggcattttaagcaaaaagaaacgatttttgtgtcattttacaaataaaaacaaagacactttcaattagcctttcacaaatgattggccggacatattattattccattatcatttccgtaactaaaaggaggtaaattcttttttttaagctgtccttttgcttggttttcttgctcctttcatttttggtgttgtgctgctgtgcctccaaccaaactcaaaccagcacaacaacagacactgttcgtttggttttttggggcggtttttttgggtttatttatttttcaacagatttcttccaacaattcttttgctgtcactaagccacccttttggctgcccactgatcccttttggcgtcccgtattcgatgcaatgatttatgcagccattgctataagtgccatcaccgtcatttttggagttccgtttatgattttcattgcttgtattgcttctagtgcggctagagactcggaaagatgggctgaaatgatcgagcgaagggagcagcagagacgcgaggcggaaagaagagatgaactgctgttttaa

SEQ ID NO: 74635 - DNA, 1017 bp, Heterodera glycines
cccaactaaagcggaacatcaaaacaatgggcaccacggacagcgaagagaagaaagctgagccgagtaagaagttctgcaaaatgttttcattgcctcaggtctgtcgttaatgttttaaaaaaaaatttttttttgtttcaaaataccaaaatactacagagaataagaatgacaagaacgcatactgctccgactcgtactgttttttgtatgatcaaaggaggccggccaaaaaaaatttagttggacggcaaaaaaaaatttttcgaaaaacaatatagatttaggctttgaactttttcccgcaaacaattacctttttaaaaaatcaaatgatcatttaaattttctttcagctttcattttgcttcgttttcctgctcctttcattcttcgtgatatggtacacatccgatcaaactcaaataaacacggtccgtttgcttggcaatcctggagaatgggtgtgcccaatttaacttttttttaattttgtgctcataatcagtttttgagcccaaattaaaataatatattaaaaattagggacacccattcgcgtgtcccggcatttgcggtccgacatttgcgcctttgtccaaaatcgagttagtttaagctatcagggattgaaaaaaaaaaaaatcaactttgagtccgattttggacataggcgcaaatgtcggggctcccccattctccagcaggattgccgtttgctttttttgtttttcgttttatatttatttattttccagaaaatgccgttgaatgattccacgtccgtcacacctaataagcctccgttttggccgtacactgatcccttttggcgctctgttgctcatggagtgttctacgcttgccttgccatttctgctttttctctcatttttggctttgcgtcattcattttcatttttgttctgctttcgcgcactttgacaaacatggagcatattaccatgacctgttatgaaatcgacgagatatttgcgtggatgcgtttgaaaa

SEQ ID NO: 74636 - DNA, 1575 bp, Heterodera glycines
atggacgaattttatgtggtactaccatccaattcacctggaccagggaacacgacctcaaaattcactgtcaggcttccacatacgcttgagctggacgcaaactggatggttgcactttcatcaattatctacccctattcattcccatctgtcggaattgatgatgacgacttcatcagcattaaacttgtaaatccaaattttaaatttgcggatgacaaacgttttgtggatattgagctaaaaataccgagtatgcaattctctagtgttgggcatttaaggcaaacattaaatgacataattaatgatgcgtataaacagcggtttgggctctcatcacagaaagccgccaaagttaaacgccaaattgacgttacggagcttttttttcacgatcaccctgtcgattattgggaaaaaattgaagagttggaaaaaaggttggttgaattgagagaggagattgatacgaaggagagggagcatggtgccgaaggtacagagcagaaaagaaaaaatgaacttgaaggtgaattgaaaattttaaggcttcgcctcaagagaaaagatgatgagctggaggagcttaagcgggcagcgaagcgtcgcgatgacgacacccctgagaatcagcagaaaaaaatacgggaattcttccatcaccatccggatgatcatgaaaaaaagctgaacgagtctcgactgatcttcacaaaatatttgtccggtttgcaagaaaaaatgagtgaatatatcggtgaaagagatggagcaaaaattgtgcaacttaatgaacagacagggaagctgagagaaaaaatcaaatacttgctgcgcaatcttaatttgtttgagagcgctgtgctacagcgcgccaacagtgatgacccctcgcgaaaaacgagagaggaatatgaaaagagcagccatgaacagaatagcgtatatgttcaggaattttttcaaagacacccgaccaattattggcaaataattcataacaactacgacggtctccgggaacagttcgacaagatagaagaactccaacaaaaaacggcacagaagcagctaaaggacgacgagcactcatcgttccagcagcaaattgaccgagcaaaacaactgctggaatacagacgcaagagatttgccgcattggaatttgaggcaaagaaacgtgacggacaacagcaacaatcctctccattctcttcaccaatttcatctgcattgaccgccggagaggcgttaaaggagcgattaggtgccgttcaagtgaagcagacagaaaagtcggatcaggataataataattcgatggaaaaaccaaaaacccacgctgaggttctcaaagagaaaatacaacaacaacaacaacaacaagatatagccacgtcgacaccaaatgagttgcaaaatgacggcaaagcagtagcagagccaaaaacccatgccgaggttctaaaagagaagctagaacaaaagaaaggcaccagcgcatcagctgagagggatggtgatcatgacagcgatgccgtcgatttactatcgcgaggtcataaattg

SEQ ID NO: 74637 - DNA, 1586 bp, Heterodera glycines
atgcgtgcccttctcttcttgaccatggttagccttgtgttggctgttcttctagaaacaggttggtcaaaaaaataagaaaattatttacaaagtgggccccataaggcattttttgccattatagtttacgagggcggattttccttaaattttgtcccaaattataaatccatagcaaatataaaacataaccaaaattaagattaagatttctttcacaatatagctctcccatgaaaattatatatatatatttaaatattatttattttaatttagcaattcaaaagctgtgaaaaagggctttcttctatatcaaatataaaataaaatcacaattaagatttttttttttcaaaatgtagctctcccattaaaaataaaatcattatatatttaaatattatttatttttttaatttagcaaattcaaaggctgtgaaaaaggataataaaaggggtaaaaagcaaataatttaattacttattattttatttaaacgtttttaatttataaggagcagtggcagcgcacggaaaaggcaaagatgcccataagggaggagcaagtccagcaaaaggtaaactactgaattacagtatacagaaacagtattgctatagtaaaattaagtattggacttaagacaacacttaatatttatgttattttaaattaaaatcgaaggaaataggaataaataagaataattcgttaattattataatttacattttatttttaactctccatattttaggtaataaaaaagcagcaaaatcgccgggtaaaaaggatgccaaaggaaaaaaaggtttttaagtattggaaatttttctgcaaaatgttcttcaaattttagacaaaaaagataagccagcaaagaaaggcaaatcaaaaggtgtaaattattgaagcaaattccaaacataaattaattattttagacaaaaaatcaaaaaccgccaaatcatcgaaatccaaggacaaaaagacaccaagtaaatcctgaccatgtattgaccacgattgtttcaacttttctaatgagatttttcgtaattttaagaatttttctgacagtacgaattggcacagctatttaaatagtttttacaaaacttaaaatggatatttttgatagaaaaatcattaaaataaagaataaattaagccaagcctagcaaagctgtgaaggccgcttcaccaaaggctgagccggcactgaacaacgaaccatccagcgcaccagcaactgaagttgaacaggaagaacaggacgtcatggaggctgatgaagaattaggagaggcgaatagtgccgaatcttacgatttggcagagggcgaactgcttgaagatgatgccaatggtgatggtgaagttgatgccattgatgctgatgaggaaccgatggaataggaaatgtctagtatattgttgtggacagattgcaaaaacggaacaaacggggaaaatgtgatgaaatgtcacaacaaatttacattttctgttatatattcgtagttatattaaatttttatatttcaatactaaaatatgagtataaggataaaataaa

SEQ ID NO: 74638 - DNA, 1003 bp, Heterodera glycines
atgcgtgccgttctcttcctggctatggtttgtctggtgatggctgttattttggagactggtaataaacattatttaaaaataaacaataataaaatatatctattttagcgaactcaaaagcagtgaaaaacgacggtaaaaaaggtgaatataattgttgaaaataacaatatattaaaatttaaggagctgttgcatcgcctgccaaaggaaaagcttcgccaaaaggtgccagcccagcaaaaggaaaaactgcaaagggtaacgaatttaatatgtttttaattatattaaataataatttaaattaataaggtggcaaaaaagatgcaaaaaaagcgggcaaaaaggacggaaaagtgaaaaagggttagttggtatttgaaaaagattttttgaaaatgtttttgaaatttagaaaagaaagaaaagccggcaaagaaggcaggcaaagggaaagatgcagctaagaaaggtaatattttaagaataatttaatttaaaaaatgaaatttagacaaaacaaaggacaaaaaggcaccagcagcaggtaaactcattaaattctaacttaatgaatggcattgtgccaatttggcgatttaagccaagccaaaggctgagcctgtcgagactgaagagccgtccagtgcacaagttgtagctgaacaggacggaggcgaagagtcggccaacaaccaagaaatggatgccggtgaagagatgacggaggaggaacagacggatttggcacaggatgaacagcttgaagatgatgccatcgacggtgaagaaggcgatggaatggcggaggaagaacaaccggagatgaactaataaacttattttttgaaaatatataggaaaatatttacacgggtcaaacggggccaaacctattgtaaacattattttgtataatatttaatttatcaataagaatcagaagataaatttgtaaacctatttatttgagattttgatttactaaaaaaaaaaa

SEQ ID NO: 74639 - DNA, 1158 bp, Heterodera glycines
atgcttaagccttcaatggatcagaaacattttgcttcgggggttgtcaaagaaacgaatgtagagtcaatgagatccttagggagaccaaaatttattttgtggattgcggtgaaagtgacacaagtgcaagaaagaaaaaatagggatgttcatgaagagttggagagagctgaggaaggaggtagctttgtagcacatccgatgattccgcagggtttggagttgagaagggcatgttttgcgtcaaatcttccatctcgagttgccaagctggacacaaatcaaggaaagctgatgagggcagtaatgggtcgtccacgagaacagctggttggtgaacagggagagattttgggtcatgcgtcggcagttcaagagtttcacccgttgatgagaaagttaaatgagaggcaaaaagtgtcggccaaactgttgttagggaatgagtgttgtttgatctatcaaaatgcgccaccaggagttggtaagacttatgttgcatcaattgtggcggcgattctcttgtcgataaatgaaaatgtcaaaattgccattgtcacatcagcgaatcttcctcttgcaaaattagcccaagaattagacgaagtgttaggtagtgacgaaatggaagagtcgggatcgattgcgttcttctcgggttacgcgaaagaaaaatatagagagatggttgagaagttgaagcgtcacattttggtgtcaaagctaaaaagtgaggaaattcagagcaagtttgaagagagaagtgaagagaatcaagataagagagatgtgagagagtattgccaaaattatgagttcaggcctaggctgacaaaagagagaaaaatggcatcgttgtatgcggaagtggcgaacttgagaattgttttcgcaacggcaacgatggcagagaatgtattgtggacggcgttgactggcacttcggtgcttatatttgatgaagcaacacagggttcctgggtcattctggcacatctggttgctcggttgccgaaattggagaaggtatttgtgaccggcgatcgttaccaacttggtgtccatctgcaggaattgccaaaaattttgagaaagggatttggcttagattcgatggtcgatcagctggttgattctccgaatgttgtgcaataa

SEQ ID NO: 74640 - DNA, 437 bp, Heterodera glycines
aaaatggtctaagtaaaaatcgtaattacgctcaaaaagcttctcaaacaattttagcgcttccaattccttctataatcgcctttatacatcccattatgagcgctaaaattatcagagtgccgaaaatcgcatgtgatctaagcctagaaaaaaatggtctaagtaaaaatcgtaattacgctcaaaaagcttctcaaacaattttagcgcttccaattccttctacaatcgcctttatacatcccattatgagcgctaaaattatcagagtgccgaaaatcgcatgtgatctaagcctagaaaaaatggtctaagtaaaaatcttaattacgctcaaaaagcttctcaaacaattttagcgcttccaattccttctacaatcgcctttatacatcccattatgaggctaaaattatcagagtgccgaaaatcgc

SEQ ID NO: 74641 - DNA, 516 bp, Heterodera glycines
atggttttattcaccgctataaatatagcattagtattcctttgctgcaacaaaacgtattttggtaataaaatttacaaattttggcatttagcaaatccatttcccatcgcattttatttacagaatgcaaacacaccgcacttgaagtgttgttcaactgtgattcatgtggccacgaagtgcacagaacttacgaatgcttcagtacggcactgaattttgttactccaattttctgctttatcacctacactttaagtttactttgtctatgtgaactacgtggacaacagaaggcgccaccgttggtatcgttactgtcgcaacaaaacgtacagtccatggggacggtacacggcggaaaatgtcacaagaacggtggagcagaagccgaggccaacgaccaccattgaggcggtggagcgcgaattcaaagagatgagcggtgaagagaaggacgattacacgaccagctgggcatggaccaccgatttgataagtcgccttgattaa

SEQ ID NO: 74642 - DNA, 423 bp, Heterodera glycines
atgacatttcgccaactagacataaaatgtttaaaatcatttttcattggcctcagtttcttcgccactttcttcgtttccatgaacatcattaagcccctacaaagccttgtatgtatcacaagtccgaacaactgcaaagaatttgtcaatccttcttccgatccaaatttgacctcgtcaaagatcgcaccaattttttacttgatgatataccgttggggacttaatgctttactggaggtgttctgctcgtccgatttccagcttgcggtgccttttggcttttgtatttcgcgaacagttggcaattcttattataattttatgtttacaggacattttgaaaaatttatgttatcattttcgggtttttaatgaaaatttctgatccaacaactgtctggggtaatccgttgacaa

SEQ ID NO: 74643 - DNA, 439 bp, Heterodera glycines
  unsure (1)..(439): unsure at all n locations
atgaatttttttctattcattactattatttttacattcgtaaaaagtgggtaaaatccattaaatatgcatttaaattaaataaataattattgatcacaattatttttattaaattattttatttttcatattttaatttgtaaatattaaaataataatatttaggcaacgcggtactaaattatgtggaagaagcatttagtagcagagacgaagttcaaaagttggccaattatgcaattgattgggcttttaacaacggaatgattcttcgttatgacatcagacagtanaataaataaataattataaaaattaaatggttatttttgccttatttagcaatttcatagcccaattctcanccgtttcgcttcttcccgtcccatttccgagagaagcatttgagaaaagcatcgctggtcaggaggttaaa

SEQ ID NO: 74644 - DNA, 2353 bp, Heterodera glycines
atgaaagaggaagaagccgtaaaattggaaaaatggtataacgagaattatcaaacggaatttgaactaggtagacagaaaaatatgggtttttaaattatattggatttaggggaacagctgaagatatattgcgaaaacgacgtggaaattctgttgcaatcagttttgaagtttcgacaattgtttttggaaataacaggggattttgatgtgatgaaagacagtgtgacaatcgcaggagttgtgatgaagatcttcagggcaaaatttttgaaggagaggcacattccgatcatgcctgagggagggtatgagagagctgaaaatcagagtaaaatagcggtgaaatattttgagtggcttgcccaaagaaaaggagtaaaagtgcggcatgcgtgtaacggaggagaagtggaatttggtgggctgaaagtggactgtgtgataggggcagagaaaaaaataattgagtttcaggtaaaaggaaaaatattttctttttaaacaatacttaaggggtgtgcatttcacgggtgtccgagatgttttttaccttgtactatagcgccaaacggacggactatggaagagaatcaaagtagaaccgaaattcgcatggaaattttgagggaaaagtgcaaaaatttttcaatcggagaagtttgggtagaataaaacatttagaaatatttattaattgttagttttaggagtgtgatgtcagagaggaattgaagaaaaataaggagatgaaaaagttctttgaaagtgtgccggacaagggaccgatcaatccgagggatgcttatgccgggggaagaacgatgccattttgtttgtacgcaaaggctaccgaagaaattgagatatcaatgttcgacatcattagtttgtacccgtttgttaattatggtaaaaatctgcttaatttttgttagtttcctttcgcttaagacaccccataccccgttggagtcccgaaaattgtagtgagcaggaattttaatgtgaattggacagcacccgacgacgtaccctatgatggacttttgaaagtaaaagtgatcccaccgaaaaatcttttgtaccccctcctccacgtgcacatcgatgaaatgctcctcttccctaattgttggtcttgtgcgagaagggccaagaatgaatttgtgatgacaaaagatgtgaaaaaatgtaaccatcgtcccacgcagagagcatttttggggacattcacatcaattgagttgcggaaggctttagagctaggatatagaattatgggattctatcgagcgtatcattttgaacagtttgacagtcaactgttcaaaggatatgtgcggatgtttttgaagataaaggtggaagcgtcggggtggccggcggaggtgaaaagtgaagatgaaaaaagagcattcatcgaaatgtacaaggcaaagtatgacatcggtttggattatgataagattgggtttaatcccggactaagaatgattgcaaaattggtgagaaattataaaaaatctctaaaaaatgttcgaatttaagggattaaacagtttgtggggaaaattttcgatgcgcaacaccctttcaagtacggaaattgtgggcagcatggaacgttggatggaattggggagagacaatacaattgagtttgggcgcccagtaaaaataagcgaagagatatcaagagtcgtgtaccggaaaaaggaggagttcatcagggagcataaagtgtcgaatattgttttgtcattgtggaccacgagtgctgcgaggctaaagctgtacgagtacatggagcaggtctacaagaaggaggggtgtaaactgctctattgtgacacaggtgaaaaggaataaaaagaaaataaacacaaaaatttagattctctagcttttgctcatcggaaggggcgctgtccgttggtggaggggaaatttttggggtaaaacataaattttgaaacgcatttaaattgtggttttaagggagatgactcgagagtatgcggacagcgaaattttggagtttgtgtccgcgggtccgaagcagtacgccttgaagctcagaaggaagaagggtggtgtgatttggcacaaaaccaaaatcagagggatgacactggatagacgaaacgaatttaaatatgaattgttcaaagagatggtgctggattacaagaaaggggtcaaaaaagtttttcactacccggagaagatcgggccgacaaacgacttccgggttctctcaaaagacgtacaaaaagaatatacaccggtgcagaaaaaaggaattattgacgatcactttaatgttttgccctttggatattattaa

SEQ ID NO: 74645 - DNA, 2622 bp, Heterodera glycines
atgattggccaagaatgtagagaatttcaaaaaaaatatggcgggccacatgcccatcgtgtctatcataccgatctgctcgcaatccctgaaaatgttgacggattgatttgggcacatattccacctgaaccgaaccaaaatgaaaaatctgattgggctatttttattcgcaaagtgcgcgagttattgccaaagtatcaatttcatgactgcggacgccattgctttaatcataaagggaaatgtaaaaaaggttttccgaagccatttagtaaatttacgatcttgcatgatgaccggccagcaatctatttccgtccgtgccaagaagatggcggacaaacgttaactgtaaaaagaggcaaaacacaaattacatatgacaattcacgagtatcggcatacaacccatatattttagttcactttgagactcaccataatttggaatatgcctatgggcaaagcaccaacttgaaatatttgtataagtatccgttcaaaggccccagtttttcgtacataaagactattgaagaaaatggaaaaacaagtattgacgagcctgcttattatgccagaatgttatatcgctcatctcctgaggcatattgtaggatcatgtcgctaaaatatgctaaattatctcatacggttattgctttgtcgcttcatttgccaggccagcaaaagatttattataaatcaagtgaaaaggagtctgtcgcacaacaagtacaggcaggcattttgcctgaaactcctttaacagcttattggaaaatgtgtgaaacggatcctgatgttaggaaaattctttttgagcatatgcccgaccagtattcattcaacaaatctggaaaattttggaaaaaacgtattttttctacacgtccacataatatacacaacagaaaaccaattattggacgaattttcccggtctcaccacgaaatccggagttatttgccttatatttgttgacaaaacattttccaggaaacccgcagcaattaaaaatggtaaacccaacgcatatctgtgaaacatttctggagacagcccgactcagggggcttattgatgacaacgacgtgtgggttcggaccatggaggagggtgctgcctcgctcaccccagcacaaatgcgacaattgcttgctaacatattaatttttgggtcaactgaaaattgtctcattgatggagccctgctctggaaaaaatttattaaacacatgtttgacacacgctgcacagaagctgagcgtcctgctcgtattgaccatgctcttgctcttttagaaaaattattagttgcacaaaacaaacaatgtaaagattatggactaccaaccccagcgatttcaattatgaatgatcaacaacgtgggattaacgagtttttcttcccccagctcgtaaaggatgatgatgctgacgacacagttgacacaacagcatttgaacatgggaatttgaatgcggaacaacaaaaattttttgatatggtaaaaactgcttttttaaatacaacgaattctcgactattttatttatgtggtgatggcggaacaggaaagacatttttgcttaattacattttatatcagttgcgaaaaataggtgccaaaattattcccactgcatctacaggaatggcttccacccgttattatgtaggtggtaccactgtccattcggcgtttaaatttggaattaatgttgaacctgggaaattacctgcgattccctttgatagtttctttggtaggcgaataatagaaagtgacattataataattgatgaaatgacaatgttggagaggacagtttttgaaaatattgatttactctgtcgtcaattgtgctcacaaaaagctcacttaccttttggtggaaaatgtgttataatttccggtgactggaaacagtcacttccagttgtgatcaattcttatggaagtgcagcacaagttgcggcatgcatccagtcctccccgctttaccctatattttcaaaatacaaattgacccaaagcatgcgagttaatccaaacgaaatagagtttcttaaatggtttgatgatattggaagaggagtaaatggagacacggtcgcaatcccaaaagacatgctcgtcgattcacgtgaagatctgattgcatgggtatttgatcaagggcttaatatgccaagtagcgaaatgctgaaacgacttcttttgtctactacaaatagaattgttgacataaataattcccaaatttctcattccatgcttggaaattttattgaatatttctcggtcgacaaggcaacagatgaaaacccgttttcggtaaatgcagctgactttgatgtagcccagctaaaccagctgaatccaatgggaatgcctacccatttgttacgccttaaaattggatcaattgtcgtcttacttgtaaatttaaacacttcaaaagggctttgtaatggcaccagacttcttattaaaaaactaactgacaatttaattgaatgtgaaaccattggtagcggatcctctggaaatggcataattattgggattcctcgaaaccgacatacatataaagacaagcgtcctgacggt

SEQ ID NO: 74646 - DNA, 995 bp, Heterodera glycines
atggaaacaaacaaacagttcacaaccagtgttacggtatgatttctaccgtatacacaatgggcaacagttcgccaagaaactgcctcatcacgcggaagaacagcttctcattccgctcctttccaaatcaatttgggcaattaaataattagtttcgttaattaatttgctaatggtcggtcacccgaaggttccgccatcgaatgggcaagtcccttcaaatttgatatttacaatttgttaatttctctttcgctgttcatttgattcggatttcggtattagaaagattctcgactttttctatgactcatcgaggattgccttgttcgtctgcttgttcttcagtatcgaaagtccctttcccgcggtccatgggaatgtttcgggctgtacaattccctcaacatcatttgctgctgcttctattgtttcggatcacttcggtccattttgaattaattataaaataataataatttttatgttttacaaaactgagaattgaataattaaaattaaaaaacatttctttgagagtatttgtaaagttaagggaagaaaatgtgagaatgaaattggcgtttgttgtttgttgccctttttcttttatgatccattaaaaaagagaccagcagtgagtaaacaaaaacataagaaaaattaaaaatgaaaaaaaagaatttgcattcggcattttcaggcgccatcaaaaatgattgaagaatgtctgtgtacatatcatgaaattttcggttaattcgaaagaaaattcaccataaacgacaaatatactgtaaaatttggtaattctgtggacgataaaaaaatcttttatcaataatttaaaaaagcaaaaaactagaaaaaaatgtcggaacgaagcgaattttttcaattaattttttaaatttaatgaattaacttgaaacattttagtgagttgtggtacgataaaaaattcgaaagactttctcgggtttgagaataaa

SEQ ID NO: 74647 - DNA, 266 bp, Heterodera glycines
atgacacggaaagagcattttgtatcagctcctcatagtctgtgctgtaaacttgggaacggacaaacagttctttgtccgccggctcggggtaaagccgggccaatccatccttaattggataataattaattatgattgaaaagaaaattcaaacaaatgtcacttcagatttcactgacagaattatgccaattgatgttgaggaaaagggccctttaattgggattaattgggcaaatgagtcgcaaatgggggacaattaa

SEQ ID NO: 74648 - DNA, 1535 bp, Heterodera glycines
tttgaactttttaataaaaaaatattattatttccgattttctttcacacagtgacagccggagttggtcaagtggtcattaagcgattctccaaggagcaatgcaaatttagttggttaaattgaatcattggaaatgccattcaattacctaatgaataattaatgaaaaatgaattattttacttttgtgtttaaaaagtgttctcgatctgtcagacccttgtctcaatggtggcaaatgcattcccggaaaaacttcgtgcgattgtccgtcgggatggatgggcaaatactgtcaccgtatgccgacttattacccatttcaattcacaaacaaaccctacaactgaaggtcgttgtcgcaatatttaccaaagttgcgaccggtgggccatggaggagaaatgcgaactcgtccgaactcaggtgggcttactgtacattccgtaactgtagcgcattcgattgacaaaaaaaccataagatgccattttaaataagtcgtaattattggctaccaaaattcacaaatatttttccgtccactcatttttcaaaatgacaattgccattctattaagaccaatttcttcgacattaattgcgccgtttcgtgcaaattgtgctcacccgacccttcaatcagtgagtgatcagtgacagtgactccccccctctttcccccattcccctttttagaactcactccgattccattggccccggcactcgaaccgctacaatttatgatgggcaaatggtattctcaggtagacgataggccacacatttggaaaaaacaatgcggaacaggcgagcaaagggctgcgctacccgacggacatggtggcgggagagtacgaggaaatgctggacatttcgccagcccaggcactccccccaggcgtagtttaaatgctggcaattcttctcccttttaggtgccaatgtttggccctccgtctttgaatttgacgttcgtttcgctaaaatttaattgatgcaaaatattattctcctccaatttaggagcacgtgttggcatcaaaatggtaatgggagaagaaccaatcagtcaaattgcttagtgtttgctatcccttcagacatgcgagtgacgcacggatttatcactttaaagcccaattcggtgggttttttatcaattatcactgattagtgctgatagtggtgaaatgatttaactaatgttgtgattagagatgggatttttagtgcagaaaagtattaaaataggttttcaaaatgttaatttttcgaagagtaaaaaatgttcattttttgtcacaaaattttgtaatttttcaatcttacaaatactgaattgatgatatttataatttatgcacctttgccaccggcagaatccgcccgaagttgccattctgagcacgggcaacgagggactgaacatgatcgaacttggcacgctgcagaaccacgcggtgacactgaacatcagttacatgtatgtggaatgttatgacataacgcaaaaggccatcaaaata

SEQ ID NO: 74649 - DNA, 793 bp, Heterodera glycines
atgaccaacacctcgttcagcaaaatttgtgcaaaatcgcaattgctcaacatcattctgtccgacattttctatttcgaagacaatttggacaatttggtcgcagaatgcctccaggggatgccaatgagtgacggctttgataaagcccgggtcaccgccaacaggacggaaactgagcaacggcacagaatcagagcaaacggtggccgaaagacgcctgtccatggcgtattgtgtggacatccgctacaaatggaaaagaaaagcgtgagtgcttcttcttttgtgccacctgttctttggttttgaaaagcctttttccgcgcacggaaagaggaaaaaatgccgaaactgaggcaatttcagcggaatgatcaatctcatcggctgatccattaaaatgcactggcgaacagagatcgaatttaatccctgaattattccaattcaaacaaacaaatcaatcacagcagatggccaacaaaagaccattgacggagaactgttccaactcgggccctggcaaaacgtgcaaatcaacaaaatgttttttcagcactttctctgtcggtcgttcgtccaaagccaacggagaaaataccaattcggaaacgatggaacagcgaaatttgtcggaaaaaggcggagaacagccgggacgaagcttcagctgagaaacagcataagacaaatcggaaaacgacgacttttgataaggcactcacttggtcaagggaaagacacaaattacgaaggaccaattgaaaagggaagggattttgaaatctga

SEQ ID NO: 74650 - DNA, 612 bp, Heterodera glycines
atgacagaagggcggcaggcggaagaacagtctctgccgctggcggacgatggtacccacgcggtgttcccttcgaagccgtgccatgttcttgtctgggacgagttgcggcaaatactcaccgatgtgctcagcaaagaaagtgccaattactcccagttcggccttttctccaaccaatttactgacaatgccaagccttctccgctgcctcccctcgagcctttcttcgttcggcttgggttcgctgcttcccttcccttccgttttgccattgtcttttcagatttcaaaatcccttcccttttcaattggtccttcgtaatttgtgtctttcccttgaccaagtgagtgccttatcaaaagtcgtcgttttccgatttgtcttatgctgtttctcagctgaagcttcgtcccggctgttctccgcctttttccgacaaatttcgctgttccatcgtttccgaattggtattttctccgttggctttggacgaacgaccgacagagaaagtgctgaaaaaacattttgttgatttgcacgttttgccagggcccgagttggaacagttctccgtcaatggtcttttgttggccatctgctgtgattga

SEQ ID NO: 74651 - DNA, 217 bp, Heterodera glycines
atggacaggcgtctttcggccaccgtttgctctgattctgtgccgttgctcagtttccgtcctgttggcggtgacccgggctttatcaaagccgtcactcattggcatcccctggaggcattctgcgaccaaattgtccaaattgtcttcgaaatagaaaatgtcggacagaatgatgttgagcaattgcgattttgcacaaattttgctgaacgag

SEQ ID NO: 74652 - DNA, 1066 bp, Heterodera glycines
atgatcatcgcttgtgtcattacgttggaatcgcgtgacagacacgcgcaggtaattaattaatgacgaatttaattggccaattttaatttttcaggtcattcaagaagaatcggccgaattgcgacgttcgcgtcgttacgcgtcgcagcagaaaaaaggcgaaatcacaagaacagaaacggggcaaatgcgggagaacggcttgaaagtgatgtgcacgagaaggtgcgtgcggcaattaaggagtgaacggcgcaattaattaattaattaatgcccgattagtgaacaatttaaaaaagttgttttcgttaggatagcgttttaatgggttgaatttgtctgctgctgatatcataaactgccccttcccttctcagaaatacgcattcagcaggcgataagctaatgcgacgaagggacccccgacaaaagtaagcattgctttggcaggcaccacagaatgtgcggataatgctgccctttcagagaactgatttcagtggcgcacgacgaggaaattgcggcacaacagcaggagaaaccaatggaaacggacgaagtgcagcaaatagcaagaaagtgccattccaccgccaattgcccgaccattggcccatccctccgcgggtgactttgacaacgagcgacatgtccaccacggatccgatgaacgaatatgcactggaagaaatgccgaagagggaaaaagcggacagaaaaatgatgagaagcaattgggaagatcgaagggggaaagggggcgacgaagcgaatttgggaggggagggggcggcggaagaagcggacgaaaagtgccgggggacggagacaacgccgaggcgaaagtccgcctcagccgtacaaacggtaaacagagtgaggccgacgcggggaatggcgcctttggtacgggtcgaatcggtggtcgaattgtcactgtcctcgccacggtcagcggaagaacaaatggaaagataagcaaaaggcaaatgatgaagtgcagaaaaggacgggtacaaataatatattgcatattaaattatcaattattttgaataaa

SEQ ID NO: 74653 - DNA, 610 bp, Heterodera glycines
tggcgctgaaacagtcggccggtggacgcaatgtccgtccaagggaatgccaaccgccttcacggatgacgcatctgtggccggtgaatttggcatggaagcggcaaatgttggccaatttgggaagatctccagagaatgtccgctgagtgttggcgaaaagattgggcacgtctttgcctccctaattaaagtcattatccttaggtttcgcttttcagcttacgagtagcgatcagagtgcagcagaagccgcagactttttactttctcttcctttacttcgatcagaacggtgccttccttcgccaattcgaaaggcttttcactgtttttgccgtccccacaggccgttcccgtcagtttcgcttttccgcccgagtccgtcccctctcgcgcattttcgatgccgaccattgcgtacttagcgggtccatcggcttgtcaatgctcacacttcgctgtttgccgttcaattctcacgaaagcgatgcaacagcaaaggcaacgacagcggtgacattgaccaaattggacttgctcagactttccgtcaaagtgacggatggaaatgcgcggacaaatgtgcgacgagtggaaaacgaaccaa

SEQ ID NO: 74654 - DNA, 569 bp, Heterodera glycines
cctcgttttcttcaattttacactcgacctgtaattttcaattttgaaatgttcacgaagcttttcttcgctgttctgcttcttctttccgtgctcctctcatttgaggtcctttccttcgtcatttttaaaatgattatttaatctccatcctttttatttaattatttataattaatcgtccatcttttagcatccttcccaaattgccgtggccaatgcttttccttcggaagtcaacggccgaatgaatgagcacaggcgaatcaaacgcctcagctgcaccaacgacaaatgtttcaagaattgtgcaacggaaccgggctcgcagaaggaatgcgcgagtatttgcgaatgcaattttagcagcgggtcgattaaggcaaaacaaaatgagtgaaacaaatgatggagaaagaaaagtgaaatggggagaaaaaggagcgaaaagtggtaggaaaaggaacgaaaagagggaagaaaaggagcgaaaagaggtagaaaagggagcggaatgatggagaaaaaggagcggaatgagggagaaaaaggagcgaaaagcgaatgag

SEQ ID NO: 74655 - DNA, 499 bp, Heterodera glycines
ttttctgtgtcaaattttcttaaaatgccatctttttcgtctgtttttgtcctttttgccatcgtcggtaaattggggagacattaattaaaacattttttaaattgttcgttttcgcagttatttcgctgggaaaggaacagcaaaagggggacgaactgagggcgaaacgacaaatttgccaaggcttttccgcccaatacggcgcatgcattgcacagaaatactcacagtgtgtttggtgtaacgatgcggtaagaaaagaacaaaacttggggatggaaaggcaaaagagtgctgctgggctttaggattacagagggccacaccgatgcgatgagaaatcatcgatgaaaggctgtgttcaaattgtgcagtgaaatcggcacaattaatgacggaacggaggaaatggaacaattaattagcgaaaggaaaaacacaaaagcatcatttattgtttctcgacacgtattggcataaaattattgtctgtcct

SEQ ID NO: 74656 - DNA, 1289 bp, Heterodera glycines
atgaaggatatgtgctgcatttgtggcaaaaatcttcgaccgtatgggaggatgaaaataattaaaatagtaaagttgaatttacgaatttagggaaggcggcttctccggtgaacgtattgaaccgacgacggccaatgtttcaatgattcaccatgttcccgaattggttgtctctaaggaggtgaccaatccaacaaaaaaattcatagcattgcattttcctattatgactaattttggcaattagatagcggacgaattgggtgcacgtgaccatcagaacattgtccgtcaaaggaaactcatccttctgctcgaccttgaccaaacactcgttcacactgcgaaccgacctttaagggccgaggaaatgggagcttcggtcgcatttattatagtaaatactaaaaaaaactattcattttaggatttattcgtttatcggctgaatggttacacattttgcaccaaaattcgtccaaatacaagaagattcctcgaccatttgaacaatttgttcgaaatgcacatcgttacattcggttttattccaaaacctataaaaaatattatctttaaaaggtcagcgaatgtatgcccataaaatagctgaattgttggatcccaaaaagaaatatttcgattatcgcattctttcgagagatgaattgttgagcaggcaaaaccactaatagtcacaaagttttcaaaagtttcctcttttttagtatgcataaaaccggcaatttgaaggccctttttccatgcagtgaacaactgattttgatgctggacgacagacccgacgtttggatgcattccgacgctctcatccgcgtccgtatttatctcaatttttttttcatttagcgttttccaggtcaacccatatcgtttttttgtggaaattggcgatatcaatgctccaccacaggaactgctcgactcagtgcaagcgtcggaagaaatggaaaatacgcaagctgataaatgggtaaaatattgttcacctttagttttttgcacgttaatttaattttgttaagactttaaagcaaaaagtgaaatcgaaaacagaagaggacaaaaaggagggggaaaagagtcttttaacgacgaaaaacggagaagaaaatgcccaaaagaaaggcgaaacggaggaaaaagagagaggagacggaggggggaacggggaagaacggactgaaaatgccttagccgagccaattgcggccattgtggacgatgacaacgcattggaacacgtcgaacgtgtgctggctgag

SEQ ID NO: 74657 - DNA, 721 bp, Heterodera glycines
cgaaccaacgcaacaaacatcactccgcctcgcgccaaacgtttaatggtagctacactggacctggacccaaacactgttgcactcgcagatcaagaacgccaacgcactttggtgttcattggcctcccggaaagcaatgcgctcgcccatcggagcgtgttcaggaagacagggaagcgaccaccaaaatcttggaccatcttgaagttgaggccgaaccaacggccgtctttcgactcggccagtacgacccgcagcgaactactccacgcccgctcaaggtggtcttgccaacacccacacaccaacacgtggcactcggaggatggaagcgcgagcgtgctcgactccgttctcaacagaacctgacccgtctgttcgtccgtccggcgctgtccaaagaacaactcaaagaggaatacgaagcgcgtctccgaaaacgccaacaaaacccagctccattggcacctccaacacagctctcacaaacgaaaaatgaccaaactcccgttgttgcaaagggtccaaaccagaacgaggacagtgaagacatttccaaacatccggaagtttttgacgaaacaatcctcgtatgttatgaagcattaaagccattgccaccaaccgacaaaattgttcaccaaattcaatcgctcgaaaaacaataccctcatcttttcaataaatagttctaccagacctcgaacaatttcttcaa

SEQ ID NO: 74658 - DNA, 1398 bp, Heterodera glycines
agagtgaaaaattcagttgaaaaattaattgctcaaattgaggctggcaatgaagctggagcccaactcaatcaaaggggtgacggacaaggccagctccacgttccagcagatgagcaacttggagctgtttatcgaattctgccgcaagcagggagtcatcacgcaggagttgttccgcgccgtggacctggtcgaggcgcgggacctctactcggtgtgcatgacgctcaactcgttgggccgaattgtgagcataaattaataattaaaatattattcttttatatgtaaaaatttaaagacgggaaatttttgaattttaattgctagatttcttggcattttttaattatggggaggggattcaaataaccaatgattgcttgtagtgttaagcgtgaattattttatttatttatttatttttgtctcatcatttccaaacagtctaagtataatttatcataaattatttaataaattaatagatggaaaagcacggcaaaacaggtcctcggcgtgtttctgtacatgaaattgtcaatattccgctggccgatcagctgcgtatccatgatataaaaacgttttgatcattttcactgctgatttttcttttattaaattaactaaataaaaacataagctcttcgatttttgtatgaaaatagacaaatttagcttacaattttaaaatgatataaaattattaaaatgatttcgttataaataaattcattttttaattgattgaaaattatccattttcctttttattactgaatttaaattttcggtaaaaaattttgtttccatttgtaatagattttaaagaaaaaaattgccaatttgaaagagttcaagaaaatttttggagagctgactatcaatttgtaatattctgtatttttcttctacctgtatttttctgtacatttatactgggagtatgggtacaggccattcttggaatacaggtacaggtacaagataaactcgaaaaacctcgatttcctggacaaagttttcgaatttattatttaagtgaccgatttttcttcaaaaaatttaaatagaattaaaacacattattattgtaaaattgttatttttagatatcataagcaattaattcaaacgtttttttgctttttaaaacaaatttcaaaaaatccaggcatggatccaggtctcgaagagccttatttttcctttatgtgaatttttctgtacttttagacagaaagtacaggaacaggcctttcttggaatacagatacagctacaggttttacctaaatgtcgatctctagtttggaccccaaataataaaagtttagcactttaattttcatttctttattttttgttcattttaaaaaaagtttcatagaa

SEQ ID NO: 74659 - DNA, 578 bp, Heterodera glycines
gctggcactgaagctggaaccaaactcgatcaaaggggtgacggacaaggccagctccacgttccagcagatgagcaacttggagctgtttatcgaattctgtcgcaagcagggagtcatcacgcaggagttgttccgcgccgtggacctggtcgaggcgcgggacctctactcggtgtgcatgacgctcaactcgttgggccgaattgtgagcaacagaaaatattaattaattttgaaaattattttatttatgcaatgaaatatttacaggtttataaggatgagaaaacgaattttaagctaataattatgtgtttcttgaatggctcataaaaataaccaaatttcaattttttaacaaaagaatttcgttatatagttaaatattttggcaataaaaaaccaaaatattataatatatattttttttcaattaaaacattaatttccttataaatacaaccagatgattttttttcaaaatttagatgcaaaagaagggcaaatcccacccgaagcacgtgtcggcatccgaaattgtgaacatcccctccacggatgcgcttcgtctttga

SEQ ID NO: 74660 - DNA, 305 bp, Heterodera glycines
atgggatctcgcaggtaattattaaaatggatttaacaaaaattatgaattttaattttaagtgtcgctggtggtgttggtgcttcgattatgaacaaagtgaactaagaaaaagggggaaaatttaaaaaaaaaaataaaattaaaattttagcaagccagcaaatacaacgagagtgagggtgagctgttgctcaactggatcaagcaggtcaccggtgccacaatgacggtgaacggaacgcgcgaaaacttccaagcacaactgaaggacggcacattgttgtgcaagtaaagaaaataaa

SEQ ID NO: 74661 - DNA, 732 bp, Heterodera glycines
atgggagttcaggaaaacgattttgaagaaaggtaatacaattagtatacattttactataatagcctttgttcaggacttgctgattaaaattttcaaaagactcatttagctcaaaaaggataatttaagcaaaaaaaaaaaaatcattttagaaaatttattcaaagagcaaaaaactgcgataatgatcaaatattattggcatttttcattaccaaatgatcattggtctggtcaaagaccactgtcatcaatagggatgcgatttttaggttttaaatatttttttttttgctcaattgttttgaagataggagctcaaaaaacgcatttctgcgttgaaatttttcgattctggtgtcactcactatcgatcggtcactagaaatcactattttggcgttttgtcactaaaatagttaaaattcactattttggcgttttatcactagtttttcactatttcgacattttttgtaaaatttattagtaaaaatggaaaatacaccccctaagaatcgaccccaaaaatttcagaaaaatacacccctaagaatcgaccaaaaaatgtttttaagaaatacaccactaagaattgtaaaattttctcaaaattcttcccccccaatttttttttcttgacaaaatttttgatttaaaaaacctcaatatttgctaagagaattttataaagaaaagtgtacctccatttgcaactgcaaccagtga

SEQ ID NO: 74662 - DNA, 60 bp, Heterodera glycines
gagaaggagaaggaaaatacacaattattcgccctaacggaagtacgcttatggttcacg

SEQ ID NO: 74663 - DNA, 1860 bp, Heterodera glycines
atgaacgccgaacaaattcagcaacttttgaccgctttgctccaaggaaatgccgcttcaagcataagccaagcgaatttggccagctcaatcgacagtagaatttcaaagtttgtttatgaccccgagaatggtcaaacatttgaacagtggcacaaacgcttcggcatattgattgaagaggatggcaaagacttaaccgagcaagccaaagtccgactattgttgggaaagctcggagacgaagagtacacgaagtacagggacacaatcagcccggagttgcccgacaaaccttcgtgggctgaatcaatcaacagattaaaggagttgttcgctgaaacgcgctctcttttcgtccgccgatatgaatgctttcgaatcagacagcatccaaaccaagacatcagttctttggttgctcaaatcaacgcagcgtgtgagcatgccaatttgagccttaccaaggaacagctcaaatgcatgattttggtgatttcactgagggatgaacatcacgatttgaggcagaaatgtcttaaaatgatggaagaagccgagaaaagtggcaccacagtcacactcaaaaagttggaagaggagttaaaagcgatccaaattgtcaaagatagtgctttgtcactcctttccacgccagcttcgacaaatgccatccgaactcgccctcaacagtggagagaatcaaaaaccaaggccaaatcagcaaatgccgtgcaacaaaaccacccggcacagcaaaaaccggccacaggaggaaaagcaattcgtggacaaccgacccagccgtgcggctcatgtggtggtactgatcactggagatcagattgtcgcttccgagaagcgacatgccacaagtgccaaaaacaaggccacattgctaatgtttgccgaaagggagcattcacgacaaagaaccaacgccgttcatttcacacggtccaagtcaaagcaacatgcctacaaattggcacgactcaaggacggtggtggacaattttggtcgaaattaacggcacaaaaatcgaaatgaatgtcgacacaggagctcaggcgacagtccttaccattgaaacatggaccaaattaggacaacctaaattgttgccaaccgacattgagactcgcaactgcaacgacgtcacatttaaaacaattggcaaatttatatgtcttgtcagcattgtgggacaaccagccaaaaagctaacagcttatgtgactgaagagctcaattacgatttgtttggtttgccatggattgaggcaacggaactgattcccaaagaaatcatgtttccggagacgcacacatcggttggaatccgcgcatcatctgccgcacctttccaagaaatcgccgatgttaagtcactcacgacggctcttaaagaaaattttccggatgtttttggtaaagagctaggacagtgcaccaagattaaggcacacttgattcttaaatccgacgctcgaccggttttctgtaaagcccgacccgttcctcatggctcactggaagcagtcaacacggagctggaccgcctcttacagatcggtgccattaatccgatagaatttagccattgggcagcacccattttggccgtcaaaaagaaaaatggcaaaatcagagtgtgcattgatttctcaactggcttaaacaatgcacttgaactcaaccgccacccactccctcggcctgatgacatttatgcagccataagcggcgctgcatttttcacaaatttggacttaaaagacgcatacctacaaatggaattggatgacgaatccaaacagctctgcgttttgaacacgcatcgtggcctttttcagtga

SEQ ID NO: 74664 - DNA, 1030 bp, Heterodera glycines
atgccaaagcatggactaaaaacggaccaaaaaatggcattcgaagtccgacaatgccaaagccgtcccggttgtagtgcatcatattgtacaggtaaatgcgatggttgagcgacgttttgccggcaaacattccgcgacaataccgctgcaccgcattgttcatcatcaggtcactgtgcatctgttaatgtatttttacaattaccgtatttgctaaaatacagtacccacacgcctaaattaagtgatacacccccttgaaataaaggaattcgagttaaataaattaattattccctattcgtcgcccaagaaaaaatatgaaaaatctgggcgctgatcggtgatcacaaatagaaatttttcaaataaatttttgtttcaaaactttgatgaaactactaaatttaaaaaaaaatcgctgaaaaattttcaaaaatttctttcttgaaatttcttataaaaaaattttctagatttttttttgaaaaatttctaggtttgaaaaaaaaatttttttttggggagggggggggggggggtgaagtgcacgctctcctctgctaccttcaaaaaggcacgggccatttgctgttgttgtggttggaggtggtggtggtcctccgcctcctcctcgcctggccccatgccattgctgttgtgtgtgtgcacatacagtgcgatgcactgctcgcgaagctgttccgcccccgcaattgttggcggaatgtaaatttgcaaatatttacgcatcgacacgacattggcctgacgacggccaagcgcagctgttgagacagagagagagagaggagattgcattgatggaattattgggcaaagtaattatgtaattaattggatcggaggctacctacctaccccagggacgggagggaaaattaggactttttcgagttcagcatgttatgggcctggattgacaggataccatcctgctggttggtacacggctgccatgttacagagtgcaagactacgatgcagagggttgtagatgcaaaaa

SEQ ID NO: 74665 - DNA, 265 bp, Heterodera glycines
atgctcggacttgaaaatgctcgaggaaattttcgactacggcgccgtgcagggcaaaatccgggaccaagacctggacggactgttctcgggcgcgcaaatggcgccgatggtttgctgccagcactttgcctgggacttcttcaagaacaatgtcccgctgctgctcaaaaagtatggctccgtcaacaacaccatgttcctgcactgcatacaaagcacggcttccggcttctgttccagtgccatggccgacgaagtgacg

SEQ ID NO: 74666 - DNA, 668 bp, Heterodera glycines
atgctcggacttgaaaatgctcgaggaaattttcgactacggcgccgtgcagggcaaaatccgggaccaagacctggacggactgttctcgggcacgcaaatggcgccgatggtttgctgccagcactttgcctgggacttcttcaagaacaatgtcccgctgctgctcaaaaagtacggctccgtcaacaacaccatgttcctgcactgcatgcaaagcacggcttccggcttctgttccagtgccatggccgacgaagtgacggtgggttggggcgagtttggcctgtgcgcttcattccccccccccgagaaataaaaaaaattctactaacttagaagttgtcaaggaaaagcctagagtttttttataaaaaaatctaagaaaaaatagaaaaatttttcagcgattttttagaattttttgaaaaatcttagtaattccccacaagtttttcgaaatttttttcttctacttttttataaaaaaaactttctaatattttttcttgaaaaatttttaagttagtaattataaagaaaatttctcgggcggggggaaacgacggaggggaaatgagttgctcccgacactgagataattagcaaaatttacgaaggtttcttgatggtcttctccaaaaaaaaaaaaaaattttaatatcaaa

SEQ ID NO: 74667 - DNA, 308 bp, Heterodera glycines
gttatggtcaatggaatcgaattagcatttgtcctatttttgtggatgacatcggcgatgggtcagcgaatattttttcaataaatccaaatttatttatgtttcacttttttaggcttctcgacgaaattcccggcccaagtgatcaacagcagaagtgaatgaatgaatcaattgttgagaactgatcgatctaattgaattgcggagttggagaacgaatttgagcccatattattgtaatgatcaacttttatttgttttgtgttatacaatatttatgtctttaggataaatttgttgagaag

SEQ ID NO: 74668 - DNA, 1351 bp, Heterodera glycines
atgggcaattcatgcttaatttctgattcaacaagagaacaaacaatttcgccgccgtccaatgattttgtcgcaattttgcgtcggccgagtaataaaaataaaataaagaattaattaaaattaattaattattttttagttaatacaacgatcctcgtcaaacgacaattaattaacaaacgaacgctgacaaaaatgctcagcaaaccaaggacagaaactgcaattgttttgcctgaacggaggatggacactaattttttgtcgccaaaagaccgagaattgtacgtcaatttattagtttaacaaataataagaaaaatatatttgattatttattattaattaatcatggcattgaagaatttttggctcattaatttttagaaaaaaatatttacatcaatataatattgtttttttaatttttttttttaccagaatttatttgtgttggcacaataacattgtgacaagtcgaagcgatctgttccacaaggcaatgcattattgcattcatgcgagcccaaagatgaacgaaattatcgcgtgcggccactattgctatagagacctgacaaaatggccaaaacttaacagaatttggttaataaaaatcaatttaaaaaaatgtttcttttgatgtggtgaaagaaggaattggagtgtgggagaaagtcggataaagggcatgggaggaccccttagaggagttgcccttagctcagtcgggtagagcattccacggtatggaagggcgccgtgggttcgagtcccatcggagcgagtaaactttattttatatagtttttcttgcctttttcgatatatatgaccttatacaaaattgttgcgttctaaacatataaaatttaataagttatacccaaagttcataccatattttcttaatgagttaaatttatttattatgaaaatcaaattgaaaatgccaaaaattctaaaatattttaaatgataataatttaaaaatataaaagtttattataaattatctatttatttaatttttagtcaggcaattttcaagtttttcgataaactgatcaatgaatacaaaatggatgaggataaaatgtacgatgcatgtgtacatcttggcgaaatgcatgcaaattatgcccagtatgggcttaagcaacattttatggacctttttcaacaacaattattaggtgggagaattttaaatataaaatatgggtttaaaatgaattagaaaatttaacttgatgtaattttatgcaagtattaattattgtaaaatttaatttacgcctttttaaaatttgacttaaaaagtgaatttgcagaataatccaataaa

SEQ ID NO: 74669 - DNA, 850 bp, Heterodera glycines
atggaagcattaattgaattggcaattattccatgtaattttggatttaaaatagattaaagacaaaatagaaaaagctctcatttatgggctttttgatcaatttaaaaattttttattttatttttactattatttttataaaacattttatttcaaatgaaaaaaattaaatttcttacataatttaaattatgatatcagccattataagtcgagaacggatttttatgttttacatattttttttgcgcttagttatgacgagagaagcccaaaaatagcattttctccgaacaattttcgatttgagttaaaaattccgtttaacaattttatttattttttttaaacaataattcactcatctatacataattgatgcaaatttaggttatttacacaatctttcaagaataattaataatttgatttggtcatctacctttggttccgatgttaacctgcatttatcaaattgaattgtcattattaaaattaattttattttttaatttcggtcactttccccatttatcaaatttcacactgatttcccacatttaaaggcgctattctttaaacaaatgtgacttttcataattttaatttttcgctaacaattatttcccatacataaatgaatgaaataatttactgttaattgcttttcccattaagtacaaaatattgaattcagttttcccatcttctgagtttagccattaaaatgaaaggacaaatttttttttcattttttgggaataaattataattgccaaccctctattttataatttcagattatttaaaacacatgagaattgaagcattaattgaaatgcaatag

SEQ ID NO: 74670 - DNA, 446 bp, Heterodera glycines
atgggaatagaaaatttatccaatttaaatcagaattcttcatttaagagatatttgtgcctattaatatttcggacattggaagtgattgtgccgacattgtgcactcgtcatttattgttgtgcttggaatcggtgtgatttttttgatgcttttcgtataaaataaacatttatttttagcattgttgtcaatcattggcacttcattttgtggccaagtgctggcttttgagaaggggttgaaagagaactgaaagaaatggcgctcatttagcgggttagagtccaattcgccgccgaccatttcaccgccactaaatcgaactttcaattttacaaccaaattttcaatgtctaattcgaaaatgttttaaaagaatttcaaacaaaaaagttttgacaatgacgaatctttttcattttgtaaacaaatgctaaataaa

SEQ ID NO: 74671 - DNA, 536 bp, Heterodera glycines
atggtataaattagggttaagccccgaccccgagctccccggtccccgaccccgatccccgacatttttgggcctattccccgccccgacacccgacatgtcgtcccccgaggtccacgccccgactttttgccccagagggctcggggcttaaccctatttcaaattatttcaaaaacaaaatgctatttcgaattcccgaatttagacaaatttctagataaacaaattttagggccttctgtttttttatgaaatttctttaaacaccattcagttcattgcttttccttgtgcaagatataacaatcaaatatttttcaggttgtcctttctgttcttggcgttctgtttgtccaaggcatcattgcccttttggtgtttgtgtgcaaatccgtcaaatggcagaaataattggaggaagtgaaaagaaaagtacggcgacgaaatgacgaaagaaaaaacattaagaaatattttgatcaaataccataatcaactttaacatcataccataacaaaaacagagcaataaa

SEQ ID NO: 74672 - DNA, 265 bp, Heterodera glycines
atgccaaattttattctgccgttctcttcattctttctgtgctttatccgttatacacaatctatttgttgtacacaaatctactggcgcaaccaaacgagtaattagctaattaattaatttcttaattaattgacaatattaaatttattttcaactttttaatgcaatattaaaaatcattgattattttatttcatttctttcatttttagtaaaacaatgtgtacgatgggttcttcgttgggccatgacggtgttataa

SEQ ID NO: 74673 - DNA, 253 bp, Heterodera glycines
atgggaaagaaaacgcaaagcaaacgatcaaagccaatggcaaacatcaaagtgaagatgtttacgagaaaggcaaacagaacggattggaagcaaaaacatgtggaattggagaagaagcttcgctggtcggaggagggccacaaaagcacagagagagggaggaaaagctcaaaaaagccgaaaatgctggacaagcgttgcaaagcgatcagaatgtgacaagcgttgtgcaatgagctaaaaatggaaa

SEQ ID NO: 74674 - DNA, 1006 bp, Heterodera glycines
atgattgcttttgagcagtcacttgtgtttcaggtccacggagttgtgcacgacacaattgcatttgtgaagggtattttggagacggagatcaactcggccaccgacaatccactggtgttttctgagattgaagaagtgatttcgggcggcaatttccacggtgaatatccggcaaaagtaagggttaaattagcattgaaattacaattttaattgtccctaattaattaaaatgccatttttgccttaggtgttggattatttggcaattgccgtgcacgagttggcccagatgagtgagcgtcggctggagcgtctgctgaaccaccaactcagtgggcttccaacttttctgacccgcaacggcggactcaactcgggcttcatgacggtccaattgtgtgccgcaagtttggtgtccgagaacaaagtgttatgccatccatcatcagtaaatttttaaaaaatccaaaaaaaagaaggccaggaacaatagtcataattaatgcttaatagttttcctaaaaactgccaaaaatacaaaaatgctattaaggaatttgtctaatttcattaaaaaaaactttttatacataagttaaataaataataataaatgacctaacaccgtcttatgcttcatgaagttggccctatagcaattaaaaaacaattgttataatgtgaaactgctaaaattaaggcggacagtattccgacaagttgcaaccaggaggaccacgtgtcaatgggcggtttttcggcacgaaaggcactgaaaattgttgaacacaccgaagcaggtgctaacccaaaactatggtgatctgatctgacatcggttttcgaaaatccaaaagaccgaaatttttgcatttgcattttgaagaatcagaaataaaacctaatcaccccatttttagtgcttgcgatggaactgatggcagcttgtcaggtgtctaataataatgaaaaccccacaatgaatttgaatgatatttga

SEQ ID NO: 74675 - DNA, 477 bp, Heterodera glycines
tgattaacgtagcctcgctagaatttaatctaaaaaacttttgtaaaaaaagcatttaacaacgtcgcaagcattgtagttttaataggttctaccactatccctttttgaaccttgaaactacgttaatgtccataaaaaaaaaaatccacaaaaaaaaaaagtagtgcaaccttgcttaaaagaggaattacattgctataatttaattttttaccgttgattgataaaaactctcctcatcagaactattatttaaatagttcaagtttctaaaaaaaactgaaaatttttagaaacaataacattttcccttccgggaaaaagttttctctcgtaaaaggctgatcactaggagcttccagaaactctattctataaattaattataaaatatattccaaatctcctatatttcacttatgtgaaaggacctcgggtcttaatctacacgaagcccgtagcgtaccatggcat

SEQ ID NO: 74676 - DNA, 280 bp, Heterodera glycines
attttctaagaaaaaataggaattttgggggcgcggcggtgccgatagtcgccgccggggaaaaaaattggaaattttgatcatttataaacagtttttcactgaaaattagccaatttataggtaaaattttgaaaaattttatgggaatttaatccaattcttaggggtgtaaaagtcgcatttcgcgcaaaaaagcgaaatgcgaaaagcgaaatgcgaaacgccaaaaaatgcgaataatgcgaaatgcgaaaagcgaaacctcggcccatccctg

SEQ ID NO: 74677 - DNA, 1363 bp, Heterodera glycines
  unsure (1)..(1363): unsure at all n locations
atgaatgttcagacagttaaattgagtacttaccatntaaggtncgctaaaggtaggttattgtggcccataatttttacacttgtctaaatttggatcaaatttgtaattacagccaaaagtttgtggccctaacatatttacaaaaaatcgtaaaaagctcctgtttttctctatgctaatataccttgtatatccatcatgggattttacaccaatgccttttcgagcgaatgagtcaaggaccgcctcttcaataaagccctgggaatttaaggccaaaaagatgaagaagaagccgatgccaagctggagcacatttcgagtctgctccgtgcaactggaaccatcttattgagtgtggcattttgtgtcgtacatcacaattaacattaattaattgattaattaattacaattttattggaaaaaagaatattataatgataattgcctcagaaggtcagaacattccctccgattgtgagattgattgagtgagtgaccatcaatctcatcgtagttatcatcgaccatttaagaattgaaaaatgagccgtaaaattagttaattgcctaattagaaattaattttttaaaacaatttgccaaaatattataaattgccattataaaatcattcagaaagaataatatttttctaaaatatttaattggggctcccggtcatgcttgagagcatttgtgcgttgaaaaaatgcggtcggggtcgttttcgcgtggccattttcgcgtgagggccattttcgcgtggccgttttcgcgtggttgcacataagcgaattttttacttttttatagtttggaaaattttttcactcacgttttacttctggtgcttaattcaatatatatttaagtgaattttataaactaattaagtctgacaaattattatacagtctaataattttttaacggtctaatgctctgctggtattagtgtaaactcaccatcccaaatgcaatttggtataaaattgttttctctctttctggcaggcttatttatcataatttaaaaaaaaattccaaccactattacagaattttttctatataaaattgagttatttgtgcgtaaaatgtttggggtttttttttcgggaccaatgttctttacctttgccaaaaattgaacaaaacagttaagactttccaatgggttaatctcttggatatgtatgtatgtgaaagaagagtcctccgccccggaaaaagaaaaaaattaaagaaatgtcgtgatgccgatggtcggattctgtgtctcattcacgttgtcaatacttgaagttgttaatctttgcaagcataaaaatgaggacgcttttgagtaaataaa

SEQ ID NO: 74678 - DNA, 5388 bp, Heterodera glycines
  unsure (1)..(5388): unsure at all n locations
ggttccagttgcacggagcagactcgaaatgtgctccagcttggcatcggcttcttcttcatctttttggccttaaattcccagggctttattgaagaggcggtccttgactcattcgctcgaaaaggcattggtgtaaaatcccatgatggatatacaaggtatattagcatagagaaaaacaggagctttttacgattttttgtaaatatgttagggccacaaacttttggctgtaattacaaatttgatccaaatttagacaagtgtaaaaattatgggccacaataacctacctttagcgnaccttanatggtaagtactcaatttaactgtctgaacattcattatctcctatggcatattatgatatccttttttacagtttggccatcatttatgcatcattcacaatccataattttgtggccgcaccaattattgcctggttaggcgtccgatgggctttggtttttgctggtctcacatatgccatctttcaggttaactctgacagtattttgcaacaattttgccgaaatgtcataatttatacacggcatttttcataaatgaatcgtactgttgcaattacccccgccgctttaaacattttaatttttgtgaaaatgcatttattttgggctctacatattgcattgcacgtccataaaataattttacaaaatttaatgcaattagatatcatttaatagccccaagaatcctctattagtctacgaaggttgaaaaaatcatccaagtttcaataacttatgtcaaataattcagaaagttatttttgaagttttctggtcattgctaataagtaaattcaattttgtaagataattgcgaacccttatatctatttaatgttacaaggagttatggtgcattaaaattgccaaattttttatggtcgtgtaaacagcaaccgagccctttttgctctaaaatgaccttatttcttaattatttgtagtaatttttgagggctccccggaaattggacaccgaaaattggacaatattggatataaaaataaattattgaaataaataaacaaaaatggtgagttggtcatagattttattttagtttgcacatacctatgttttttataagcttaataaaacggaaataaataatgttattattatttttaacatcagcagaaaaaagcaatcataacattcataaagaaaaaggttttcgtttacatagggttcctattttcgtgcattttttggcacattgaccaatcatcccnccatttttcatgcattttttgcaaattgaccaatgatcgtccctgctgaatgtctgattcattctaagtgccttaattcgttaatccatttaccatactcaaattttatttttaaactaattcctggggttattttttaaaaagaaatttggtgtccacttttccggtgtccaaaattccggcggtgtccacttttccgcttggtgtccaattttctggtgtcaaatttaccggtcccctttttgagtcacgagaaccaaaatttttttgttgcatttaaaaatgaatttcaacgaacaaattcaggctggttttctgtttgtcaaccgttggtacctgttcagctcgtccacattgctgggactcggagctgctggtttctaactatttcatataaccgtatttcctctaacagaaccacataaacagagtcctgtggctcggggaattaaaaatatagacctcttggggctgtattagagcattataggtatatgtagttaaaaaaagtaataaaaataagtattaactgtaaaatttcatattaacatatcttacagaattatagattaaatgatgaaaggacgtaaagaataaaaatattttataatttgaaattttagtgatttggacagctcaaggaaaatacttggcaatgaacagcacagaagaaacagcgggacgacacagtggcctcttttgggccttgtcacaattatggtaatgagtcaaaaaattggcaaatttgaaagaaataattgtaaattactctaattaatcaataaacacccccccccccctaatcctgggtttctaaaaaagaaaatacataccctaaaaatcgaatttttactttccccctcacccgaagacaagggtcctggttgcccccttagtaaatggaagaagagagtaaatttgcaacaactataaaaattcattaaaatacataaaatggattcgatacattaagtcagtcatgcggtggcatctttctccttgtcgttttcctattgatgccaagcccaccgggtggtagcgagcaggaaacatccatttctgtgccaactgtgcgcttcatctacggcacattcaccgctctcactgttctcggcactgccattttggcattgttaccagtgccaacagccacaacaccggcacgacaaacaaatacagtcgacggcacttcctctgctgccgctgttcgtgacccctcaacagtgtcaacagaattggcacattcgatcgatgaaggggcagaagggagcggtgaagcagtggcagttgctgaacagccttcccatctggccatcttgagtatgaagaaaattgtttttgggagtatgacactttttaaatttcgtctggaaacccaatgtccagccagcaccagcggatgcattcaaattcatggattgcctattccagctcattcttccgttcttgtctttgtttgggtgcccaaaattaatagtttttttaaaattattttccaagtaaaaattggattttttctcaaaataaatacaaaatctttcttaaaatttttgctacatatcggctaatttcttaacaacactttcttccaatgtaccggggccggccatgcctggtctctattaattaataaaaaattgatttttgagttcaaatatggtgtcattccccgatcggggtccctgatccccgacaattttcggcttcccaaacctcggtcccattttctaaaaattttcttttttatcaataggttcaactgttaaactgatgggcacccgtcggatggtcttcttttcgttgccttttatgtacacgggcatcagccaaagcttttggagttccatttatccgacaacagtggcaaacacagaaatgttccagctgaaccagggagtcaatcccaagctgttgttggcactgaccgctattgtccaaggcgtgggccaagcaacatgtgtgtggtgtaaattagcaattggggttcaaaaaattggcaccaaaattattaagaaaaattcatcataccagatatttgactgccgtaaataagaaaaaattgacaaaagtttgtgaaattaatgcagtaaaaagggctttatttgcttgtttgcatgttgccactattctagtcttaaaatgcttttgtacattgacattttctgctaagctggcttcgttttcggcattttggacagtcggacacggcgttttggccgcactaaaattgtcagcttcggtgccgcgttgcaactgtgctcctttttgttggcctacctgaatttacctgcgcacgcaccgctggaaaaaacatttgagcatggcattctgaactcgccaaggcaagcaaaatttttaggaaattttcgttttaactatttatttgaaatattcataactattaacagtttaggcgatagattattcataacctgtggtttgaaatatatataaaatcgcaaacatggccatagaacatagactaaaaattatgaaaatggacatggtttcaaaaatatggacattaatctttccgaacaatttttcattaagaaaatttatagaaaaaattttggcccaaagagcaactaaaaagtcttcgggtttcgccatccaaaaatttttttctggctacgaccagcaggcctctacaaaattcctgaattttttttcttgatgcctctctacaaaaattttcaaaaaaaccttattttttcataacttaagcatcacgctcgcgttggttggtggttttttgctgagttttggcgatgcctgttggaacacgcaggtttttgccacactaattgccaaatatcccatcagagcgtcgcaagcatttgctgtctttaaattctttcaggtatttaaaattgatgatttttttaaatgataaatttttcaacaattacaataatattaattttcgagtgcaggaaaaaattatgatcaaattgcattctctatctttgatcacctatttttacgtttcaaatatcctaaaatttcgttcttaataattaaattaagaaatgatttaggtaatccttaaaaattaaaatatgacctctttacatctattcttttgtaatgcttaaatttagaaaattatgtgatttcgaatatcagatttaaattgcctcaaatttagttgattcacagtttcattaagcatataattaacaaacaaaattatttaatttttagtcacttttatgctgtgctgcatttttctacgccacttcaatttctttgccatggcatgtgctcattttggccattggtttgttaatcggcttaattggctttttgcttgccgagcgaatggtcagacaaaatgatgacgattttggagatgttgtgataccaacgcattttgaggaggataattgattagtttatcattttcaaatatgaatgtaaatagtttacctgtaaatagaacatttttttaatttaagaaaaaataataagcacctttccgccacccatgcgcgcttcttaaatccaccatggattcgaaaacaaaaaatatgtaacaaataaaagttcattcataactttgctcaaattcaaccaaattaatcaatcataaatagtcttaatttgaattctaaactactatattcaacaagattatggccaaaaaattatggcttaagatttttttaattttacaacacccttttttatattatttgaaaaaattttgaaaattatattctgatagagacagttaaagcttttaaataataacgtaaaatattaatttaattaagtttgagctaggtttatgaattttcatgtttcatcttttgttttcaatcccattggcggatcagcatgttctccaggtacaaacttatataaattgcttcctttttgaactaaatttctattttcttccctcgcgacgagcatttgtaatcaatttcattgaagaaatgtggcattcatattattaaaaattgacaatttttaaacaaatttcgtttaattagtataaaatttaaattcaaaaatctccttcgcagcgctgtcagctccgcaatggagaaattgatgtcaaatgttgaccaaaggtcacaaaactcgaccaataaaaaattcaaaa

SEQ ID NO: 74679 - DNA, 4830 bp, Heterodera glycines
tgaattgccaccctatgttgctgcacaatttggtgttgacattcaacctcttccaaatattggaggactacatgtttttgactcgtcccaattgttcgccattgtcaaaaagttggtcgacacgcttacgtcgttgacgccaccacaacaactgatggacccaccagcatttacacagcttcaatgcaattattggcgcgaacggcttaaacaagtggcggtctatgtgaacgcgctgcaaatgttcctccagttgacggtcagtttttgtgttacctattttttgaagccgcaaacttggcatccgaaatcactgtgaagttttcccccgtttcgttttcccccgcgtaatttttttgaaatttttaaatagaatttttcaaaaaaaaatttaaaaattttttcatatgaaaaatacggaaaaaaaatttttagcggttttttgggaaaattttcaaaggtttttcttatcaaattacagaatgccaagtcgtatgacactgatcaacttgtcgctgttatttgttgtgcatcctttccgttgtcgccatgttcatcaacatcaattctgcgccaaatctgtgccgttcaccgtgacatttccaattctttgcttcaattggagcccgaaaagactgcagcgagcaatgatgatgatgaacttcccaaatcgactgtgttccggtgttggctgcctaatcttgacgtaagagacctgccaaacctagtcggttccaggccaaacccctcatatccataaaaaaaaaatttcgtgtattgcaccaaccggcaaaaccaacttttttttttggcctcaaaatatttttccggtacaatttccaaaatttcagtgacgcgggagaatagaatacattttagcaggccttttttatttcgaaatttttaaattttgagaaatgcctgtcggtgtcgatagccactaaaatttgcaaaatgtttcaaaaagattatatattttttttgggggggggggaggagttatgccaccatgccccttccccacatggattaagctaatttagcatagaattttgagtaactttttgctttcctttttgctgcagcaatttcaacacaattttgttgaccggttgcgtgaagccagcgctcatttgtcccaagcaattggaaatgttgccgaggatgctttgtgtttgttgcggtggacgaacaccaccaccacatcacgcgcatatcgtttagatgttgtccaaggaaacattcacaacattttgaccaccatttcaaccctcaaaacattgcttattacaacaaatgagcgagaaaattcttgtaagaaaatgcaattgctcagcaatttttgagacaaaatttgccaaaatttttcataaaactaagagattttttcctcccttttcagcatttgattccacgctgtcagaagtgccatttctgtttgtttaccccgacctggtggccccatatttgcatgtgctcaatttgctttcaattgcactgtccgaacttggtcgacaaattgccagtgcacagaacattgagcgtgttggtctcaattatggcttttcacatgtaatgttttttaaattttctgtttatccccctaggggttggcacccttaaaaaaatttttgattactttttttttttaaaaattactatcaaattgagtacatttgccgccaagaggtgtccacccaaatttttcgggaagctttcctttttggattttgaaaaactgctatttttcgggatttttttgagtcttaattttttttatttcagtctgaattttacggcttgaatcaattgcttcattgctcatctcaatctgctggcgtcaatgccgccaacaatgactttgccattgacgtccaaccattcatccgttggctgatcactgatcaacaaactccgctgaccgcttccgatcgcctgccaatttgtctatggtcaattgctgcgccgttccgtcgtccattttcccagtgccgtgccgatgtgttgggatggattttgcatttgtgggagcgatggcatgagcaaaatgcaaaaatcaaagccaaggagaaattggtggtgaaacggaagaggaaaaggaggaagcaaaatgatgaagaggagccgggaatgatggacgagggaggagatgagtgtgttcacatggaatcagatgaccaaaaggtagattctaattgctttttttgagtgtgattaatggtgcagaactgtaatgggtgcgttaagttctttcctccataaattaagaaaagttttctaacttgaaaatttttactaaatttttttttgtgtcaaaattggatgtgagagaggtgtacgtacgttcccaagaaaattcctgcgatgtattctccccatcttggtttggttttgttgtaactcgaaaaaattcattcctaattaaatatggattcgtgatttttaagtctcatttgtcagcacacatttcgccgttattttgcctaaaaaaattctttaaccatttcagctgcgcgatgcgtaccttcccgatttctcaaattccgcctctgataataatcacccgacgtcgtcccatttggatgccgccgccgatgttgttgttgaccaattttcggtgtccaaagatgaagtccatgatgcgttgtgcaacctcttcaaaacgctgtcgtcaaatgaagatgatgaagcatttgccaattcttcttttcatcctccgccttttatgcctcttttgtgtgtcatcggcaaattggagctgttcagctcggcaacaaaccaaacggagcatgatgaggatttggcatgtaagttatcaaggaaaattgagaattttttgaaaatttgtatcaatttttaaaacaatcgttaataatttgcaaaaacaaaacataattccctggcgcctgtcattttcgtcggtttacaaaatttcctttttttaaatttccaaaaacgcacaaaattggccattttgcgtaaaataaagtttttggtgtgctaaaatatgtatcctggttattaaattttccagctttttagaaattccaatttttttttcggttgtcaaattcgcttttcagattcccagctgctttcacttgacaaactgcgtgaacagcttcaactctgtgcaccttctagcactaaatttccttctctctcctcctcaaaatcagcgccggaagtgccaaaagcggcgctaaatgtgtaccgtgacagtgagccgtccgcggtggtcaaatgtgtggaatgtttggcaccgcttcatcagcgtgtccaactgttgttgaacgagtttcccgaaaatggacaactggcctcactctcttcaaccattgacgcatttgtcaacaaagcgtcggccggtgttccgttgatgaaacatgcggcacagttggagagcattttaggtacagaaaaacaacaacattgcctaactttttcttttcatatttcgtaattcgtacggggatccgaggcaattttataaagttttttgcgaaaatcgaaaaatacttgtaaagttgggaaaattttacaaaatatgaaaaaatcaagggttttgtttcaaaaataagaaaattttattcttttgaattgcatttcgttaaaaatttttacaaaatgtgtttcgtttttcaatttcgtaattgtacgaagttgaatttcgtaaatttaaaaaaataataataatattgtagtaaagtgatggtgcttttgatattaaaagaactattccagtggcaccaaatagcatttaattaattgttaaattaaaaatatatacatttagtacgagctgaagaatgggagtcaattgcggaccgagcgcattcaattcgggaacaaatggtgccactgcaggcactgctcgtggaatggcgtcgtcgtgaggtgcactgttgggccgagttggtcaacatggtccgtgctgactgtacacaactcgctgtgttggcgggctggccgttgttcaaatgcgcactggacacactgcaaagtgaggcattgggcaacaacaactaaaaaattatattgggcaaattatttgggcgtttaaattcgtttaacaaattaattttcgttttttgtaaatttccctaacaaaaatttttgtctttaaatctgtattggtacagacaaaacaaacaaacattttctatttcaagttttttaaattgacaaaaatacttttttatattttttgttttctaaaaaaaagaaataatgccatggacgtgaggaggactcgaacccccaccatttttttctgttgtctatctcaccaaccacaaacaaaaaaatatttcgcaaattgagccgctatttctacatcattaccaggaatgtgtcggtaattccgattcccgacatttttgtggctcagaatttctgctaattccttttattataataataatagatgaagaacaacaacaaaatggtgctaccgtcgctgatgaaaatagcaacaaaaacacgttgattttggcctttgttgattggatgcacaatgcgaccgttggcgattttggcgcgcgtctttggactggccaattgctcaccaaatgccttcctgttttggcgccaccaaattgtgccattgttgttggaacattgtgccgtcatatgcgctcaacatgtgcccattttgcgcaattcaaccgaacgctacgggcccatttcgacgaccgttttgcatccgttcagcgctcgttgcacgacttttgccgtgcggtgcgctacaccgacctgaacgtgtggagtgtgcaggacagtgcaaggcgtgcgcacacgcaccttgtccgcattttgcgctcattcaag

SEQ ID NO: 74680 - DNA, 3066 bp, Heterodera glycines
atgccggcacaaaatgagcagaccaaacaaaatgccgtgccgacaatggcaaatttgggtgaaccggtcaatgtgaagcagggcgggacactgaagcagatcaaagacagcatccaaatggcacagcaacagtactgggcactcagtggccaacacgcgcacatgggcaccgtggaatggggtggcacaaaaaatcgtaaaattttaatttaattaaaattatttaaaataaaaatatgttctattttaactatttaaattgaataaaatgatttgattcagaagagaagcagcaaaacacgaaaaagaaacagcagcaaccgtacaacaacagtgaggacatttcgccaaaagcgttgagcagtaagtgaaaaaaagaagcaaaaataaaaattgacaattaattttcggtccgattagtgctaaaaaaactttatggcccctcggggcctgagtccagagacctggacctgcttttgataactttaaataaaacatggtcactcaaaagaacaaattcgaaaatattatacagaaatttcaggttttttaattgtctgagtttcaacgatcagcataattttcaaaaaaaaacagaaaataattttcataaaatttcttagaaaaatgtaatcgatttttaagggctattaaaattttaaattttattcatatgtgtatgtttcatttaaaatctatttcccttaattggccaaaattttttttagcaaaaattgaacgtctgacgccaatggaaagggacaatttggccaagcaattggtgaacattgaggaccgattgcagaagacggaacgcaaattgcaacaaaaagagcaaaaagtaagcaataacctcacagcgatcaatcagccttaatgatcaatctgtgcatttttcttgtcaatctgtttctgatcgttaataattgacccatccattggtccatccgtttccgatcactgtcacttttctacagatcattgcatttttctatgtatctctgcccatttttctttttttctttcttcccataaatcactttccctccccacatctctctttctctctctctatttgtcactctctctttctctctctcgctcccctctctctctttctatctctcccctcacaaataagtctcttccctttctctctctttctctctctctctttctatctctcccctcacaaataagtctcttccctccctctctcctctctttctctctctctctaatataacacatacacacgcactctttctctctcatataacaatgttgatattttattgtgctaacagcaattgtctgagcactttgtagttacctacaccgaccacccttgctaattccatcgccactgctaccgtatcaactgcaccaccaagcccctttactactgtagttacaaaagcgcaaaaaacagtggaagacatcacgagggaatggtggaaggaaaataaggagaaaaagcacggggcagaacagcaaaggaagccgggacgacaaccattgcattctgacggtggacaaaaagcggttgtcgaagagcttaccgagtcggcagaatttgtcgcatcatcggccgaggaaatgccatcgaatggggtatgtttagggaaaatttggcatgaacttatggcggaagaacaatgggtctcggcataaatcgggacatatgtacatgaattgggacgccctcgctcgcaaagggggactggcgggagggattttaaacggtgctgggacgttagtcaaaaaccatcaaatgaataattgttaaaagaaaattattcataatttcgtctaaaatggatcaaattttataatatagatatttttcgatagccctaagtgttttctattatcctgcaaaatttttaaaaaattctttaagtttaaaaaaagttatgacctgaaaagctcaaaaagccaagtttttttgaacatttttagtcataacttttttgatacttaacgaaactttttggaattttgtaggctaatagaaaacacttagtgctatttaatgatatcaagaattaaaaatttagatgcttttgaacaaagttatatcaaaaaatattttcatttgatggtttttgactaacgtcatagcaccttttaaactaacaaattctttttaacaaaatgtattaaaaattaataaaaaaaaattttctccagtgtccatcgccggcccaaatcttatttctcttaaaaaatagacgcaaaatctggtcacaaaaagatctgggttttattcgagttgcaggaaatgtcaagccgaacatcattgtcaaactcaaatggtggcttcaaaactattgcttcatccgaaattggtggcacacaatcgacggtggttggcacgccggcactaaacagtgccggagccgcctcgcccagcgatggaacaaacagcagcagtgccaaaactgccagcgctagcgcgttgatgatgatgacacaaaaccggaagcggccgtcaccgccgacaatggcaccgcaaatggacaaaattagcaacgcaacgccaacaaaagtgccaccggttgtgccaatgatgccacggtatcagcaggcggtgcgcaatttgaccggccgcccgctggggcggctggacgctcgccaacgcaccattgtggcggtgatggagcagaagcgcaagcagttccgcaaggagggcgacatggcgacggcaaccgctgcggcggaagtgccatccccgcagcagaaaatgccgaaaccgcagcaaaagccgccggaaacgatgccgcagggaaaaaaccgcagcggttcgggacgaccgagcgcggaccagctgagcgtggacacggcccaggcgctcgagtggatgttggccaacatgaccaaatcggtggaggttgtccggcaccaatcgaccaagggaggaagcagcaaaaagttgctggccatggcaaatggtgatgacaatggcgcggagacggaggaggacagagacagggaccagaaccaacacggggcaacggcagcggacgaagtgaattttaaaacaaataaatgatttgtataaaa

SEQ ID NO: 74681 - DNA, 909 bp, Heterodera glycines
gaattggcacgtgcacaaagtgttgtcggaaagcagcagacgagcggcgagaagcagcaaaaggaaaagcacgcatcgccaatttcaatggaactcgaaattgggcggctccgtgccgaactgagcacgatggagcaacaaatgggacaaatgcgaggccgagaccgaggaggacaacggcaccaaaacgtaccaggcgaacaaccacagcgacaacagaacaaacagaaaaaggaggaggaggagcgtgaagaaatgggaagcaaaagcaccagtggaacgatggaaacttcaacaaaattgaggagtacagcagcaggaattgctcacaaccagcaacaggtgaaatgattaaatgataagagaaacatttagggggtgggccatcagtttggccgcccgaatccagtgtccgaaaccccgcatttttctcatcctaatctcgaaaaccaacccgcaaaactttttttttcatctacgagtcccaacccaaaaattttggcttccctcccgagtctcgacgtttttctcatcccgaaccttggacagcaacccgaaaaattttggccgcctctcgacccgaatcccggtattttttctcatcctaatctcgaatccgacccgaaaagtttggcctcccgacccggaactcgattatttttctcgtccttcggccacattagtggccatttgcctgagtgattagggggcgggagcgcaatgtctggaatatcaaccgtgcagcagaaaatgattgcgtctggtttcgggttgagaaagagaaaataacctctgtgaagcccctccattcataaccctgaaaagaaaagattctttcagggaaccctgaccgttttggtgtatttgtttccgttcccgaagccattccgagcgatcaaaatcagttga

SEQ ID NO: 74682 - DNA, 439 bp, Heterodera glycines
atgattgttgttgggactaagcctggtcccggtcaaatggctaagcctggtcccggtcaaatggcaaagcctggtcccgatcaaatggctaagcctggtcccggtcaaatggctaagcctggtcccggtcaaatggcaaagcctggtcccggtcaaatggcaaagcctggtcccgatcaaatggcaaagcctggtcccgatcaaatggctaagcctggtaccggtcaaatggctaagcctggtcccgatcaaatggctaagcctggtcccggtcaaatggctaagcctggtcccggtcaaatggcaaagcctggtcccgatcaaatggcaaagcctggtcccgatcaaatggctaagcctggtcccggtcaaatggctaagcctggtcccggtcaaatggcaaagcctggtcccggtcaaatggctaagcccggtcccg

SEQ ID NO: 74683 - DNA, 847 bp, Heterodera glycines
atgctgtcaaaatggttgcacactccgcgaaaagatggacaactgaagcgattgttttgctatttgaaaccaccaaatatcgaatgggacaacatcaacactttgaaaaaggtgtggccatatcttcgttaatcatctgattttgttgattgcatttaatggccgttttccccattgttagaaatttctcaatgccaccacttccgttagctacaaaattcaatttattgttgatccaccgtcaccgcaaattgtgccatttgaattagctaacgaacggaccatggagaagctgacactgatcaaagcaagcgaacatcatcaggagaaccgatgggtaatgaaacggtgccaaaatggggagacggcgactgcggttcaatgggaatttgttaatttggccgatttgaacactgtcgcctttatgtttttccctgccaatgaatgcattgggtgagcaacaaaaaaaaaatcattttattttgtttaaaaattgtgccaatttttaggcgtttgtctccacgtcgaaaatggtgtccgattatgtgaaagtgatttatgcatttgagaaatggtcgatcattttggattataatgatgaataggagtgatatgatcatttttaatgttcatttttactattttcgtttaaatatattttattttatctcgtctcgacgcatccattggatatgtgccaattaaaactctaaaaatattatggaataatccattaacatttgaccgccgatctctctccaaaatatattaaattttgatgatttagtcaaaaaaattgaatttttaatttcaactaaaggaaaattgggttaaataagtcaataaa

SEQ ID NO: 74684 - DNA, 2664 bp, Heterodera glycines
caccgcgacacacaggagacactggcggtgttggacaaattggacacggacgaactgaaggacgaggacccgcagacgcaggagcagcaccggatgaagaagttcggctgggaggacgccttttgggagggccggctcaactggtggatgcgcacaaagcgtaaggaccgatgggaagaaaaacagcgggggattttggacaaaaaataaaataaatttaattccaaattcaaaaagaaccatttaaaaactttaatttgggacaatcaaataaaatttgccgattctttgttcttcggttcagcacggatttgggccctcttcgacgagccctattcatccacagctgccaaagtaaaaaatagggggaaattggaaaataaattagaaaaaaagaattaaaaattgaaaattaaattcattatttatttttttgttttttttcctttttttcccctttaggtggtggcttccattagtgtctgtttcatctgcatttccatcttttccttctgcttcaaaacccatccgagctttcgcattccaatccttcaaatttcgtaaaacattttaaataaattattttttataatttatttaaaattttttttttcctttagcaatttgtccgatttctcttcctccccgtcggtgcctcaacattcgcatattcatcagcagcaacagttccattcccacttcaatcagcccattaatgtgcaacgggtcgccactgagccacacaaaatatttgcccaagtaaacctttgaatttaagccgtttaaacaatcattatttatttttattaataccttttaatccattttattttgtttttcagattgaatttgtctgcaacatttggttcaccttcgaaatcctcgtgcgctttgtctgctgtcccaataagctcaactttttcaaatatccgctcaatctgatcgatttggtggccactttaaggtccgtccgtccgtttatccctcaattttctctcttaattaaacactttcaaattgtgccaaattgcctcatttcagcttctacaccgatgccgtgctcgttcggctgttcagggaccaggccccgaaggatttggtggagtttctgtcgatgattcgcattcttcgcctgttcaaactcacccagcaccaccgcggccttcagattctcattcacacattccgcgcatctgccaaagagctgatgcttttggtgagtcattcattaaataggttaattaattgcgcgtaattagtggtaaagcaatgggttttataaggaacattgaaacatataaataaataaaaaatactgcagaaattttttgaaaaaatgataattatcattaatgaaataataatttatgataattttcattttaataattaaatatttttacaataacaatcaatttaattttccaggtgttttttctgattttgggcgtcgtcattttcgccactttggtttattacgcggaaaagacggagaacaatccgaacaatcaattcactgcaagcaatttttttaaacaattattctaagaattattcaatttatagtcaatccccgtgggtctgtggttctcactgatcacaatgactacggtaatgtttcgatgtccgcaaaataatttaaaattcactcatttaattcaggtgggatacggtgacatgacgccacaggtaattaaaaaggaaaagcatataattgagaaacagagacagagttgtattgttattaaaattcatcagtcattggggtgtggaaatttttgggtcacctatttaggctttatagcatttttctttatgtattcccccccccccccctcatctcactccgcgcacccaaatttttgaagctaaaaatattcaccattggtacccctccaagccaaaatcctatgaccgttggaccgtccctggggtatgttctccaattgtaccctttccctctcccctggggccttccttattcaaaccatcattgttccttgtgcccgtcccattcagacttacctcggccgcctcgtgggcagtctctgtgccgtgatgggtgtgctgaccatcgctctgccggtgcccgtcatcgtgtccaacttcgccatgttttactcccattcgcaggcgcgtgaaaaattgccgcggaaacggcgacgcgttttgcccgtggaacaggtgaaaagggaaggaaccgcacacaactgacaacgcataggcactaggaaaaacgcatatttaattaactgactaattagttgctaattggtgggttgcattgcattgcttttgcttaggttcgccttcaatttcggcgacacgcgcaatcgtccattttggagtcgaacactttgagccgtgttacatctacacgaagaagcgcaatgtcaaacgcagctgcgaattcgggtaacaaattaaccaaaactttgactcccgaaattgcccactaattgtttttctctcaattttttgactgatcgctgctttttgctcacatttaggattattaactaaccccaaaggcatggttttgtcccgtggcatttttgcgataaaattttcaacaattttttcagaaatggcaatggaccccaaaagtgcctcgttgatgaagaacaatgtcggaccgcagctatcctcagacagcgcagctga

SEQ ID NO: 74685 - DNA, 408 bp, Heterodera glycines
tatctatttattattcatttattaatttctgtatctaattgggcttaggaacaattttactgcgctttggcctccgttatgtatttgataggctcagtgttcgccgttttgaacatgctcaaggcaatattcgcccctctgtggttttttcatttggtaactttttgaattattattttttgatatttttattttaagtttgtaacttttgccggttttggcctctacgcattcgacttttggacacgttggaaacgggacagtcagttgaggaaggagcaccagcagaaccaatccgtctatatcacttgaccaatcaaacgcacactttgcatacattcgcaattttcccacattttttaaatttttgtttagaaaatatttttgaataaattattatttttttaa

SEQ ID NO: 74686 - DNA, 125 bp, Heterodera glycines
gaattttgtcaaaatgtcaatttatcttcagctgtgcggtctggtcgcccttctgctgacagtccaatgctggccaaatccgcttttccccttctgtttgggccgtgtcgtcgacttctttcagt

SEQ ID NO: 74687 - DNA, 569 bp, Heterodera glycines
atgccgataaaatgtccgccaacagaacgacgagaatcctgtgtcgaagtcaggacgaaagttgctgaaattaatcggaaaacaagaaatatattatttcctatcaaaatgccaaatactaaaaaaataccaatggaaaaacaaatggttgcgatgacaatgcccgcactgatcccatgcgtttttgttgaggacgaagcttcgatccaaagccaagacaatgtgacaccgatgccaaacattgtgatgggagaccaacgcgcaattgccataactaatggagagaacggaacaatgatcaaccacgcccaaaatgacggaaataacggagaggacaaacgaacctgggtctgcgacatgctgaaaatgcaaaataaatcatgaaatttagaggattatttgggggaaggaaaaacataattaattcactataaaatgccatggaaaatcacctgaaaagcgatattatccgcataaaagtcaatgacaacaacgaaagcggcagcgaacagaaggagcaaagggaattccaagaaggaatggataaacgactgaagggaggcgaatta

SEQ ID NO: 74688 - DNA, 1560 bp, Heterodera glycines
atgtttttggctttgcgtttgactgctaaatctctgattgcttttcagatcactcggagtacttttgcctgctcaaaagcctttttcttcggggaaaccaatccgaaagtcactggtgggtttttaagttataattttatgaatagccacgaatattgttaagcatatccgaatcgctcaactgtctctgttcaaatgtctcatcgaaatcctctggttttatggaattgtgcgcctttctttttctttcattttccaatttattttttcagactttttgtggcccacttcgcagcattttaatgttcgagcagagcccaacgtattaaaaaatttgtaattttaagaattttcaaaaattttctttttagcgtgattttgattgctctaatgtcaatcgtcaatggcagcggaagtgcggccaaaacgaggggattggtctgtctgttggtgggatgggttgtgcttttcattatggactccgactctccactgactaatcattgtgcgtctgtgttactagaatttgtattgaattgtctctttgtttcagccgaatcccaccgacaccaaagtgggctgaaccacgtgttttaccatttcgtcggatggttcggtctctccgatcacagcgtttgtcttcaaaactcttttgcccaaagtctgcccttttaggggggtgtgcttctgctgctctttgctgtgtttcttcgcatgatttacgagtccaattatcgagtatttccatttcttattttcggttttatttacaattcatttttagcatttggccgttgaaattggtggtccaaagcgtctttacgctttgtcttctttggtcgcctctttgctgctcactccgttcgctgtccttgtgctcgtcttcagtccggttggtctttccttttccaatttaaattattacttttattaattcgcctcccttcagtcgtttatccattccttcttggaattccctttgctccttctgttcgctgccgctttcgttgttgtcattgacttttatgcggataatatcgcttttcaggtgattttccatggcattttatagtgaattaattatgtttttccttcccccaaataatcctctaaatttcatgatttattttgcattttcagcatgtcgcagacccaggttcgtttgtcctctccgttatttccgtcattttgggcgtggttgatcattgttccgttctctccattagttatggcaattgcgcgttggtctcccatcacaatgtttggcatcggtgtcacattgtcttggctttggatcgaagcttcgtcctcaacaaaaacgcatgggatcagtgcgggcattgtcatcgcaaccatttgtttttccattggtatttttttagtatttggcattttgataggaaataatatatttcttgttttccgattaatttcagcaactttcgtcctgacttcgacacaggattctcgtcgttctgttggcggacattttatcggcatttccgaggatggcatgcctttgttcactcatggcgaagcatttctcgagaagacatcgcg
